United States Patent Application Publication US 2024/0327476 A1 - sequence listing, part 54

SEQ ID NO: 102168 - DNA, 3858 bp, synthetic construct
  misc_feature 1..3858: note = Description of Artificial Sequence: Synthetic coding sequence
  source 1..3858: mol_type = other DNA
atggagagaagatgggacctggacctgacctacgtgaccgagagaatcctggccgccgccttccccgccagacccgacgagcagagacacagaggccacctgagagagctggcccacgtgctgcagagcaagcacagagacaagtacctgctgttcaacctgagcgagaagagacacgacctgaccagactgaaccccaaggtgcaggacttcggctggcccgagctgcacgccccccccctggacaagctgtgcagcatctgcaaggccatggagacctggctgagcgccgacccccagcacgtggtggtgctgtactgcaagggcaacaagggcaagctgggcgtgatcgtgagcgcctacatgcactacagcaagatcagcgccggcgccgaccaggccctggccaccctgaccatgagaaagttctgcgaggacaaggtggccaccgagctgcagcccagccagagaagatacatcagctacttcagcggcctgctgagcggcagcatcagaatgaacagcagccccctgttcctgcactacgtgctgatccccatgctgcccgccttcgagcccggcaccggcttccagcccttcctgaagatctaccagagcatgcagctggtgtacaccagcggcgtgtaccacatcgccggccccggcccccagcagctgtgcatcagcctggagcccgccctgctgctgaagggcgacgtgatggtgacctgctaccacaagggcggcagaggcaccgacagaaccctggtgttcagagtgcagttccacacctgcaccatccacggcccccagctgaccttccccaaggaccagctggacgaggcctggaccgacgagagattccccttccaggccagcgtggagttcgtgttcagcagcagccccgagaagatcaagggcagcacccccagaaacgaccccagcgtgagcgtggactacaacaccaccgagcccgccgtgagatgggacagctacgagaacttcaaccagcaccacgaggacagcgtggacggcagcctgacccacaccagaggccccctggacggcagcccctacgcccaggtgcagagaccccccagacagaccccccccgcccccagccccgagcccccccccccccccatgctgagcgtgagcagcgacagcggccacagcagcaccctgaccaccgagcccgccgccgagagccccggcagacccccccccaccgccgccgagagacaggagctggacagactgctgggcggctgcggcgtggccagcggcggcagaggcgccggcagagagaccgccatcctggacgacgaggagcagcccaccgtgggcggcggcccccacctgggcgtgtaccccggccacagacccggcctgagcagacactgcagctgcagacagggctacagagagccctgcggcgtgcccaacggcggctactacagacccgagggcaccctggagagaagaagactggcctacggcggctacgagggcagcccccagggctacgccgaggccagcatggagaagagaagactgtgcagaagcctgagcgagggcctgtacccctacccccccgagatgggcaagcccgccaccggcgacttcggctacagagcccccggctacagagaggtggtgatcctggaggaccccggcctgcccgccctgtacccctgccccgcctgcgaggagaagctggccctgcccaccgccgccctgtacggcctgagactggagagagaggccggcgagggctgggccagcgaggccggcaagcccctgctgcaccccgtgagacccggccaccccctgcccctgctgctgcccgcctgcggccaccaccacgcccccatgcccgactacagctgcctgaagccccccaaggccggcgaggagggccacgagggctgcagctacaccatgtgccccgagggcagatacggccaccccggctaccccgccctggtgacctacagctacggcggcgccgtgcccagctactgccccgcctacggcagagtgccccacagctgcggcagccccggcgagggcagaggctaccccagccccggcgcccacagccccagagccggcagcatcagccccggcagccccccctacccccagagcagaaagctgagctacgagatccccaccgaggagggcggcgacagataccccctgcccggccacctggccagcgccggccccctggccagcgccgagagcctggagcccgtgagctggagagagggccccagcggccacagcaccctgcccagaagccccagagacgccccctgcagcgccagcagcgagctgagcggccccagcacccccctgcacaccagcagccccgtgcagggcaaggagagcaccagaagacaggacaccagaagccccaccagcgcccccacccagagactgagccccggcgaggccctgccccccgtgagccaggccggcaccggcaaggcccccgagctgcccagcggcagcggccccgagcccctggcccccagccccgtgagccccaccttcccccccagcagccccagcgactggccccaggagagaagccccggcggccacagcgacggcgccagccccagaagccccgtgcccaccaccctgcccggcctgagacacgccccctggcagggccccagaggcccccccgacagccccgacggcagccccctgacccccgtgcccagccagatgccctggctggtggccagccccgagcccccccagagcagccccacccccgccttccccctggccgccagctacgacaccaacggcctgagccagccccccctgcccgagaagagacacctgcccggccccggccagcagcccggcccctggggccccgagcaggccagcagccccgccagaggcatcagccaccacgtgaccttcgcccccctgctgagcgacaacgtgccccagacccccgagccccccacccaggagagccagagcaacgtgaagttcgtgcaggacaccagcaagttctggtacaagccccacctgagcagagaccaggccatcgccctgctgaaggacaaggaccccggcgccttcctgatcagagacagccacagcttccagggcgcctacggcctggccctgaaggtggccacccccccccccagcgcccagccctggaagggcgaccccgtggagcagctggtgagacacttcctgatcgagaccggccccaagggcgtgaagatcaagggctgccccagcgagccctacttcggcagcctgagcgccctggtgagccagcacagcatcagccccatcagcctgccctgctgcctgagaatccccagcaaggaccccctggaggagacccccgaggcccccgtgcccaccaacatgagcaccgccgccgacctgctgagacagggcgccgcctgcagcgtgctgtacctgaccagcgtggagaccgagagcctgaccggcccccaggccgtggccagagccagcagcgccgccctgagctgcagccccagacccacccccgccgtggtgcacttcaaggtgagcgcccagggcatcaccctgaccgacaaccagagaaagctgttcttcagaagacactaccccgtgaacagcatcaccttcagcagcaccgacccccaggacagaagatggaccaaccccgacggcaccaccagcaagatcttcggcttcgtggccaagaagcccggcagcccctgggagaacgtgtgccacctgttcgccgagctggaccccgaccagcccgccggcgccatcgtgaccttcatcaccaaggtgctgctgggccagagaaagtag

SEQ ID NO: 102169 - DNA, 2346 bp, synthetic construct
  misc_feature 1..2346: note = Description of Artificial Sequence: Synthetic coding sequence
  source 1..2346: mol_type = other DNA
atgaagagcagcggccccgtggagagactgctgagagccctgggcagaagagacagcagcagagccgccagcagacccagaaaggccgagccccacagcttcagagagaaggtgttcagaaagaagccccccgtgtgcgccgtgtgcaaggtgaccatcgacggcaccggcgtgagctgcagagtgtgcaaggtggccacccacagaaagtgcgaggccaaggtgaccagcgcctgccaggccctgccccccgtggagctgagaagaaacaccgcccccgtgagaagaatcgagcacctgggcagcaccaagagcctgaaccacagcaagcagagaagcaccctgcccagaagcttcagcctggaccccctgatggagagaagatgggacctggacctgacctacgtgaccgagagaatcctggccgccgccttccccgccagacccgacgagcagagacacagaggccacctgagagagctggcccacgtgctgcagagcaagcacagagacaagtacctgctgttcaacctgagcgagaagagacacgacctgaccagactgaaccccaaggtgcaggacttcggctggcccgagctgcacgccccccccctggacaagctgtgcagcatctgcaaggccatggagacctggctgagcgccgacccccagcacgtggtggtgctgtactgcaagggcaacaagggcaagctgggcgtgatcgtgagcgcctacatgcactacagcaagatcagcgccggcgccgaccaggccctggccaccctgaccatgagaaagttctgcgaggacaaggtggccaccgagctgcagcccagccagagaagatacatcagctacttcagcggcctgctgagcggcagcatcagaatgaacagcagccccctgttcctgcactacgtgctgatccccatgctgcccgccttcgagcccggcaccggcttccagcccttcctgaagatctaccagagcatgcagctggtgtacaccagcggcgtgtaccacatcgccggccccggcccccagcagctgtgcatcagcctggagcccgccctgctgctgaagggcgacgtgatggtgacctgctaccacaagggcggcagaggcaccgacagaaccctggtgttcagagtgcagttccacacctgcaccatccacggcccccagctgaccttccccaaggaccagctggacgaggcctggaccgacgagagattccccttccaggccagcgtggagttcgtgttcagcagcagccccgagaagatcaagggcagcacccccagaaacgaccccagcgtgagcgtggactacaacaccaccgagcccgccgtgagatgggacagctacgagaacttcaaccagcaccacgaggacagcgtggacggcagcctgacccacaccagaggccccctggacggcagcccctacgcccaggtgcagagaccccccagacagaccccccccgcccccagccccgagcccccccccccccccatgctgagcgtgagcagcgacagcggccacagcagcaccctgaccaccgagcccgccgccgagagccccggcagacccccccccaccgccgccgagagacaggagctggacagactgctgggcggctgcggcgtggccagcggcggcagaggcgccggcagagagaccgccatcctggacgacgaggagcagcccaccgtgggcggcggcccccacctgggcgtgtaccccggccacagacccggcctgagcagacactgcagctgcagacagggctacagagagccctgcggcgtgcccaacggcggctactacagacccgagggcaccctggagagaagaagactggcctacggcggctacgagggcagcccccagggctacgccgaggccagcatggagaagagaagactgtgcagaagcctgagcgagggcctgtacccctacccccccgagatgggcaagcccgccaccggcgacttcggctacagagccagcagcgccgccctgagctgcagccccagacccacccccgccgtggtgcacttcaaggtgagcgcccagggcatcaccctgaccgacaaccagagaaagctgttcttcagaagacactaccccgtgaacagcatcaccttcagcagcaccgacccccaggacagaagatggaccaaccccgacggcaccaccagcaagatcttcggcttcgtggccaagaagcccggcagcccctgggagaacgtgtgccacctgttcgccgagctggaccccgaccagcccgccggcgccatcgtgaccttcatcaccaaggtgctgctgggccagagaaagtag

SEQ ID NO: 102170 - DNA, 4200 bp, synthetic construct
  misc_feature 1..4200: note = Description of Artificial Sequence: Synthetic coding sequence
  source 1..4200: mol_type = other DNA
atgaagagcagcggccccgtggagagactgctgagagccctgggcagaagagacagcagcagagccgccagcagacccagaaaggccgagccccacagcttcagagagaaggtgttcagaaagaagccccccgtgtgcgccgtgtgcaaggtgaccatcgacggcaccggcgtgagctgcagagtgtgcaaggtggccacccacagaaagtgcgaggccaaggtgaccagcgcctgccaggccctgccccccgtggagctgagaagaaacaccgcccccgtgagaagaatcgagcacctgggcagcaccaagagcctgaaccacagcaagcagagaagcaccctgcccagaagcttcagcctggaccccctgatggagagaagatgggacctggacctgacctacgtgaccgagagaatcctggccgccgccttccccgccagacccgacgagcagagacacagaggccacctgagagagctggcccacgtgctgcagagcaagcacagagacaagtacctgctgttcaacctgagcgagaagagacacgacctgaccagactgaaccccaaggtgcaggacttcggctggcccgagctgcacgccccccccctggacaagctgtgcagcatctgcaaggccatggagacctggctgagcgccgacccccagcacgtggtggtgctgtactgcaagggcaacaagggcaagctgggcgtgatcgtgagcgcctacatgcactacagcaagatcagcgccggcgccgaccaggccctggccaccctgaccatgagaaagttctgcgaggacaaggtggccaccgagctgcagcccagccagagaagatacatcagctacttcagcggcctgctgagcggcagcatcagaatgaacagcagccccctgttcctgcactacgtgctgatccccatgctgcccgccttcgagcccggcaccggcttccagcccttcctgaagatctaccagagcatgcagctggtgtacaccagcggcgtgtaccacatcgccggccccggcccccagcagctgtgcatcagcctggagcccgccctgctgctgaagggcgacgtgatggtgacctgctaccacaagggcggcagaggcaccgacagaaccctggtgttcagagtgcagttccacacctgcaccatccacggcccccagctgaccttccccaaggaccagctggacgaggcctggaccgacgagagattccccttccaggccagcgtggagttcgtgttcagcagcagccccgagaagatcaagggcagcacccccagaaacgaccccagcgtgagcgtggactacaacaccaccgagcccgccgtgagatgggacagctacgagaacttcaaccagcaccacgaggacagcgtggacggcagcctgacccacaccagaggccccctggacggcagcccctacgcccaggtgcagagaccccccagacagaccccccccgcccccagccccgagcccccccccccccccatgctgagcgtgagcagcgacagcggccacagcagcaccctgaccaccgagcccgccgccgagagccccggcagacccccccccaccgccgccgagagacaggagctggacagactgctgggcggctgcggcgtggccagcggcggcagaggcgccggcagagagaccgccatcctggacgacgaggagcagcccaccgtgggcggcggcccccacctgggcgtgtaccccggccacagacccggcctgagcagacactgcagctgcagacagggctacagagagccctgcggcgtgcccaacggcggctactacagacccgagggcaccctggagagaagaagactggcctacggcggctacgagggcagcccccagggctacgccgaggccagcatggagaagagaagactgtgcagaagcctgagcgagggcctgtacccctacccccccgagatgggcaagcccgccaccggcgacttcggctacagagcccccggctacagagaggtggtgatcctggaggaccccggcctgcccgccctgtacccctgccccgccagcctgtacggcctgagactggagagagaggccggcgagggctgggccagcgaggccggcaagcccctgctgcaccccgtgagacccggccaccccctgcccctgctgctgcccgcctgcggccaccaccacgcccccatgcccgactacagctgcctgaagccccccaaggccggcgaggagggccacgagggctgcagctacaccatgtgccccgagggcagatacggccaccccggctaccccgccctggtgacctacagctacggcggcgccgtgcccagctactgccccgcctacggcagagtgccccacagctgcggcagccccggcgagggcagaggctaccccagccccggcgcccacagccccagagccggcagcatcagccccggcagccccccctacccccagagcagaaagctgagctacgagatccccaccgaggagggcggcgacagataccccctgcccggccacctggccagcgccggccccctggccagcgccgagagcctggagcccgtgagctggagagagggccccagcggccacagcaccctgcccagaagccccagagacgccccctgcagcgccagcagcgagctgagcggccccagcacccccctgcacaccagcagccccgtgcagggcaaggagagcaccagaagacaggacaccagaagccccaccagcgcccccacccagagactgagccccggcgaggccctgccccccgtgagccaggccggcaccggcaaggcccccgagctgcccagcggcagcggccccgagcccctggcccccagccccgtgagccccaccttcccccccagcagccccagcgactggccccaggagagaagccccggcggccacagcgacggcgccagccccagaagccccgtgcccaccaccctgcccggcctgagacacgccccctggcagggccccagaggcccccccgacagccccgacggcagccccctgacccccgtgcccagccagatgccctggctggtggccagccccgagcccccccagagcagccccacccccgccttccccctggccgccagctacgacaccaacggcctgagccagccccccctgcccgagaagagacacctgcccggccccggccagcagcccggcccctggggccccgagcaggccagcagccccgccagaggcatcagccaccacgtgaccttcgcccccctgctgagcgacaacgtgccccagacccccgagccccccacccaggagagccagagcaacgtgaagttcgtgcaggacaccagcaagttctggtacaagccccacctgagcagagaccaggccatcgccctgctgaaggacaaggaccccggcgccttcctgatcagagacagccacagcttccagggcgcctacggcctggccctgaaggtggccacccccccccccagcgcccagccctggaagggcgaccccgtggagcagctggtgagacacttcctgatcgagaccggccccaagggcgtgaagatcaagggctgccccagcgagccctacttcggcagcctgagcgccctggtgagccagcacagcatcagccccatcagcctgccctgctgcctgagaatccccagcaaggaccccctggaggagacccccgaggcccccgtgcccaccaacatgagcaccgccgccgacctgctgagacagggcgccgcctgcagcgtgctgtacctgaccagcgtggagaccgagagcctgaccggcccccaggccgtggccagagccagcagcgccgccctgagctgcagccccagacccacccccgccgtggtgcacttcaaggtgagcgcccagggcatcaccctgaccgacaaccagagaaagctgttcttcagaagacactaccccgtgaacagcatcaccttcagcagcaccgacccccaggacagaagatggaccaaccccgacggcaccaccagcaagatcttcggcttcgtggccaagaagcccggcagcccctgggagaacgtgtgccacctgttcgccgagctggaccccgaccagcccgccggcgccatcgtgaccttcatcaccaaggtgctgctgggccagagaaagtag

SEQ ID NO: 102171 - DNA, 567 bp, synthetic construct
  misc_feature 1..567: note = Description of Artificial Sequence: Synthetic coding sequence
  source 1..567: mol_type = other DNA
atggactgcagaaagatggccagattcagctacagcgtgatctggatcatggccatcagcaaggtgttcgagctgggcctggtggccggcctgggccaccaggagttcgccagacccagcagaggctacctggccttcagagacgacagcatctggccccaggaggagcccgccatcagacccagaagcagccagagagtgccccccatgggcatccagcacagcaaggagctgaacagaacctgctgcctgaacggcggcacctgcatgctgggcagcttctgcgcctgcccccccagcttctacggcagaaactgcgagcacgacgtgagaaaggagaactgcggcagcgtgccccacgacacctggctgcccaagaagtgcagcctgtgcaagtgctggcacggccagctgagatgcttcccccaggccttcctgcccggctgcgacggcctggtgatggacgagcacctggtggccagcagaacccccgagctgccccccagcgccagaaccaccaccttcatgctggtgggcatctgcctgagcatccagagctactactag

SEQ ID NO: 102172 - DNA, 519 bp, synthetic construct
  misc_feature 1..519: note = Description of Artificial Sequence: Synthetic coding sequence
  source 1..519: mol_type = other DNA
atggccatcagcaaggtgttcgagctgggcctggtggccggcctgggccaccaggagttcgccagacccagcagaggctacctggccttcagagacgacagcatctggccccaggaggagcccgccatcagacccagaagcagccagagagtgccccccatgggcatccagcacagcaaggagctgaacagaacctgctgcctgaacggcggcacctgcatgctgggcagcttctgcgcctgcccccccagcttctacggcagaaactgcgagcacgacgtgagaaaggagaactgcggcagcgtgccccacgacacctggctgcccaagaagtgcagcctgtgcaagtgctggcacggccagctgagatgcttcccccaggccttcctgcccggctgcgacggcctggtgatggacgagcacctggtggccagcagaacccccgagctgccccccagcgccagaaccaccaccttcatgctggtgggcatctgcctgagcatccagagctactactag

SEQ ID NO: 102173 - DNA, 645 bp, synthetic construct
  misc_feature 1..645: note = Description of Artificial Sequence: Synthetic coding sequence
  source 1..645: mol_type = other DNA
atgggcgccgcccacagcgccagcgaggaggtgagagagctggagggcaagaccggcttcagcagcgaccagatcgagcagctgcacagaagattcaagcagctgagcggcgaccagcccaccatcagaaaggagaacttcaacaacgtgcccgacctggagctgaaccccatcagaagcaagatcgtgagagccttcttcgacaacagaaacctgagaaagggccccagcggcctggccgacgagatcaacttcgaggacttcctgaccatcatgagctacttcagacccatcgacaccaccatggacgaggagcaggtggagctgagcagaaaggagaagctgagattcctgttccacatgtacgacagcgacagcgacggcagaatcaccctggaggagtacagaaacgtggtggaggagctgctgagcggcaacccccacatcgagaaggagagcgccagaagcatcgccgacggcgccatgatggaggccgccagcgtgtgcatgggccagatggagcccgaccaggtgtacgagggcatcaccttcgaggacttcctgaagatctggcagggcatcgacatcgagaccaagatgcacgtgagattcctgaacatggagaccatggccctgtgccactag

SEQ ID NO: 102174 - DNA, 804 bp, synthetic construct
  misc_feature 1..804: note = Description of Artificial Sequence: Synthetic coding sequence
  source 1..804: mol_type = other DNA
atgagacccagaagcggccccaccagaaaccccagactgagagccttcgccggcgtgcccaccagaggcagaaccagaggccagagcagaagatgcgccgccgaggccagcgccggccccgagagagacgccagacccggcgcccccgccgccggcaccatgggcgccgcccacagcgccagcgaggaggtgagagagctggagggcaagaccggcttcagcagcgaccagatcgagcagctgcacagaagattcaagcagctgagcggcgaccagcccaccatcagaaaggagaacttcaacaacgtgcccgacctggagctgaaccccatcagaagcaagatcgtgagagccttcttcgacaacagaaacctgagaaagggccccagcggcctggccgacgagatcaacttcgaggacttcctgaccatcatgagctacttcagacccatcgacaccaccatggacgaggagcaggtggagctgagcagaaaggagaagctgagattcctgttccacatgtacgacagcgacagcgacggcagaatcaccctggaggagtacagaaacgtggtggaggagctgctgagcggcaacccccacatcgagaaggagagcgccagaagcatcgccgacggcgccatgatggaggccgccagcgtgtgcatgggccagatggagcccgaccaggtgtacgagggcatcaccttcgaggacttcctgaagatctggcagggcatcgacatcgagaccaagatgcacgtgagattcctgaacatggagaccatggccctgtgccactag

SEQ ID NO: 102175 - DNA, 564 bp, synthetic construct
  misc_feature 1..564: note = Description of Artificial Sequence: Synthetic coding sequence
  source 1..564: mol_type = other DNA
atgggcgccgcccacagcgccagcgaggaggtgagagagctggagggcaagaccggcttcagcagcgaccagatcgagcagctgcacagaagattcaagcagctgagcggcgaccagcccaccatcagaaacctgagaaagggccccagcggcctggccgacgagatcaacttcgaggacttcctgaccatcatgagctacttcagacccatcgacaccaccatggacgaggagcaggtggagctgagcagaaaggagaagctgagattcctgttccacatgtacgacagcgacagcgacggcagaatcaccctggaggagtacagaaacgtggtggaggagctgctgagcggcaacccccacatcgagaaggagagcgccagaagcatcgccgacggcgccatgatggaggccgccagcgtgtgcatgggccagatggagcccgaccaggtgtacgagggcatcaccttcgaggacttcctgaagatctggcagggcatcgacatcgagaccaagatgcacgtgagattcctgaacatggagaccatggccctgtgccactag

SEQ ID NO: 102176 - DNA, 1266 bp, synthetic construct
  misc_feature 1..1266: note = Description of Artificial Sequence: Synthetic coding sequence
  source 1..1266: mol_type = other DNA
ctgaacctggaggtgaagttcaagaagatgggcctgggccacgagcagggcttcggcgccccctgcctgaagtgcaaggagaagtgcgagggcttcgagctgcacttctggagaaagatctgcagaaactgcaagtgcggccaggaggagcacgacgtgctgctgagcaacgaggaggacagaaaggtgggcaagctgttcgaggacaccaagtacaccaccctgatcgccaagctgaagagcgacggcatccccatgtacaagagaaacgtgatgatcctgaccaaccccgtggccgccaagaagaacgtgagcatcaacaccgtgacctacgagtgggccccccccgtgcagaaccaggccctggccagacagtacatgcagatgctgcccaaggagaagcagcccgtggccggcagcgagggcgcccagtacagaaagaagcagctggccaagcagctgcccgcccacgaccaggaccccagcaagtgccacgagctgagccccagagaggtgaaggagatggagcagttcgtgaagaagtacaagagcgaggccctgggcgtgggcgacgtgaagctgccctgcgagatggacgcccagggccccaagcagatgaacatccccggcggcgacagaagcacccccgccgccgtgggcgccatggaggacaagagcgccgagcacaagagaacccagtacagctgctactgctgcaagctgagcatgaaggagggcgaccccgccatctacgccgagagagccggctacgacaagctgtggcaccccgcctgcttcgtgtgcagcacctgccacgagctgctggtggacatgatctacttctggaagaacgagaagctgtactgcggcagacactactgcgacagcgagaagcccagatgcgccggctgcgacgagctgatcttcagcaacgagtacacccaggccgagaaccagaactggcacctgaagcacttctgctgcttcgactgcgacagcatcctggccggcgagatctacgtgatggtgaacgacaagcccgtgtgcaagccctgctacgtgaagaaccacgccgtggtgtgccagggctgccacaacgccatcgaccccgaggtgcagagagtgacctacaacaacttcagctggcacgccagcaccgagtgcttcctgtgcagctgctgcagcaagtgcctgatcggccagaagttcatgcccgtggagggcatggtgttctgcagcgtggagtgcaagaagagaatgagctag

SEQ ID NO: 102177 - DNA, 1266 bp, synthetic construct
  misc_feature 1..1266: note = Description of Artificial Sequence: Synthetic coding sequence
  source 1..1266: mol_type = other DNA
atggacctggagaacaaggtgaagaagatgggcctgggccacgagcagggcttcggcgccccctgcctgaagtgcaaggagaagtgcgagggcttcgagctgcacttctggagaaagatctgcagaaactgcaagtgcggccaggaggagcacgacgtgctgctgagcaacgaggaggacagaaaggtgggcaagctgttcgaggacaccaagtacaccaccctgatcgccaagctgaagagcgacggcatccccatgtacaagagaaacgtgatgatcctgaccaaccccgtggccgccaagaagaacgtgagcatcaacaccgtgacctacgagtgggccccccccgtgcagaaccaggccctggccagacagtacatgcagatgctgcccaaggagaagcagcccgtggccggcagcgagggcgcccagtacagaaagaagcagctggccaagcagctgcccgcccacgaccaggaccccagcaagtgccacgagctgagccccagagaggtgaaggagatggagcagttcgtgaagaagtacaagagcgaggccctgggcgtgggcgacgtgaagctgccctgcgagatggacgcccagggccccaagcagatgaacatccccggcggcgacagaagcacccccgccgccgtgggcgccatggaggacaagagcgccgagcacaagagaacccagtacagctgctactgctgcaagctgagcatgaaggagggcgaccccgccatctacgccgagagagccggctacgacaagctgtggcaccccgcctgcttcgtgtgcagcacctgccacgagctgctggtggacatgatctacttctggaagaacgagaagctgtactgcggcagacactactgcgacagcgagaagcccagatgcgccggctgcgacgagctgatcttcagcaacgagtacacccaggccgagaaccagaactggcacctgaagcacttctgctgcttcgactgcgacagcatcctggccggcgagatctacgtgatggtgaacgacaagcccgtgtgcaagccctgctacgtgaagaaccacgccgtggtgtgccagggctgccacaacgccatcgaccccgaggtgcagagagtgacctacaacaacttcagctggcacgccagcaccgagtgcttcctgtgcagctgctgcagcaagtgcctgatcggccagaagttcatgcccgtggagggcatggtgttctgcagcgtggagtgcaagaagagaatgagctag

SEQ ID NO: 102178 - DNA, 1239 bp, synthetic construct
  misc_feature 1..1239: note = Description of Artificial Sequence: Synthetic coding sequence
  source 1..1239: mol_type = other DNA
atgggcctgggccacgagcagggcttcggcgccccctgcctgaagtgcaaggagaagtgcgagggcttcgagctgcacttctggagaaagatctgcagaaactgcaagtgcggccaggaggagcacgacgtgctgctgagcaacgaggaggacagaaaggtgggcaagctgttcgaggacaccaagtacaccaccctgatcgccaagctgaagagcgacggcatccccatgtacaagagaaacgtgatgatcctgaccaaccccgtggccgccaagaagaacgtgagcatcaacaccgtgacctacgagtgggccccccccgtgcagaaccaggccctggccagacagtacatgcagatgctgcccaaggagaagcagcccgtggccggcagcgagggcgcccagtacagaaagaagcagctggccaagcagctgcccgcccacgaccaggaccccagcaagtgccacgagctgagccccagagaggtgaaggagatggagcagttcgtgaagaagtacaagagcgaggccctgggcgtgggcgacgtgaagctgccctgcgagatggacgcccagggccccaagcagatgaacatccccggcggcgacagaagcacccccgccgccgtgggcgccatggaggacaagagcgccgagcacaagagaacccagtacagctgctactgctgcaagctgagcatgaaggagggcgaccccgccatctacgccgagagagccggctacgacaagctgtggcaccccgcctgcttcgtgtgcagcacctgccacgagctgctggtggacatgatctacttctggaagaacgagaagctgtactgcggcagacactactgcgacagcgagaagcccagatgcgccggctgcgacgagctgatcttcagcaacgagtacacccaggccgagaaccagaactggcacctgaagcacttctgctgcttcgactgcgacagcatcctggccggcgagatctacgtgatggtgaacgacaagcccgtgtgcaagccctgctacgtgaagaaccacgccgtggtgtgccagggctgccacaacgccatcgaccccgaggtgcagagagtgacctacaacaacttcagctggcacgccagcaccgagtgcttcctgtgcagctgctgcagcaagtgcctgatcggccagaagttcatgcccgtggagggcatggtgttctgcagcgtggagtgcaagaagagaatgagctag

SEQ ID NO: 102179 - DNA, 540 bp, synthetic construct
  misc_feature 1..540: note = Description of Artificial Sequence: Synthetic coding sequence
  source 1..540: mol_type = other DNA
atgaaggagggcgaccccgccatctacgccgagagagccggctacgacaagctgtggcaccccgcctgcttcgtgtgcagcacctgccacgagctgctggtggacatgatctacttctggaagaacgagaagctgtactgcggcagacactactgcgacagcgagaagcccagatgcgccggctgcgacgagctgatcttcagcaacgagtacacccaggccgagaaccagaactggcacctgaagcacttctgctgcttcgactgcgacagcatcctggccggcgagatctacgtgatggtgaacgacaagcccgtgtgcaagccctgctacgtgaagaaccacgccgtggtgtgccagggctgccacaacgccatcgaccccgaggtgcagagagtgacctacaacaacttcagctggcacgccagcaccgagtgcttcctgtgcagctgctgcagcaagtgcctgatcggccagaagttcatgcccgtggagggcatggtgttctgcagcgtggagtgcaagaagagaatgagctag

SEQ ID NO: 102180 - DNA, 804 bp, synthetic construct
  misc_feature 1..804: note = Description of Artificial Sequence: Synthetic coding sequence
  source 1..804: mol_type = other DNA
atgggcgccagacagatccagaccagcagcagccagaccagccccgaggaggccatgggcacccccagaatccagcacctgctgatcctgctggtgctgggcgccagcctgctgaccagcggcctggagctgtactgccagaagggcctgagcatgaccgtggaggccgaccccgccaacatgttcaactggaccaccgaggaggtggagacctgcgacaagggcgccctgtgccaggagaccatcctgatcatcaaggccggcaccgagaccgccatcctggccaccaagggctgcatccccgagggcgaggaggccatcaccatcgtgcagcacagcagcccccccggcctgatcgtgaccagctacagcaactactgcgaggacagcttctgcaacgacaaggacagcctgagccagttctgggagttcagcgagaccaccgccagcaccgtgagcaccaccctgcactgccccacctgcgtggccctgggcacctgcttcagcgcccccagcctgccctgccccaacggcaccaccagatgctaccagggcaagctggagatcaccggcggcggcatcgagagcagcgtggaggtgaagggctgcaccgccatgatcggctgcagactgatgagcggcatcctggccgtgggccccatgttcgtgagagaggcctgcccccaccagctgctgacccagcccagaaagaccgagaacggcgccacctgcctgcccatccccgtgtggggcctgcagctgctgctgcccctgctgctgcccagcttcatccacttcagctag

SEQ ID NO: 102181 - DNA, 789 bp, synthetic construct
  misc_feature 1..789: note = Description of Artificial Sequence: Synthetic coding sequence
  source 1..789: mol_type = other DNA
atccagaccagcagcagccagaccagccccgaggaggccatgggcacccccagaatccagcacctgctgatcctgctggtgctgggcgccagcctgctgaccagcggcctggagctgtactgccagaagggcctgagcatgaccgtggaggccgaccccgccaacatgttcaactggaccaccgaggaggtggagacctgcgacaagggcgccctgtgccaggagaccatcctgatcatcaaggccggcaccgagaccgccatcctggccaccaagggctgcatccccgagggcgaggaggccatcaccatcgtgcagcacagcagcccccccggcctgatcgtgaccagctacagcaactactgcgaggacagcttctgcaacgacaaggacagcctgagccagttctgggagttcagcgagaccaccgccagcaccgtgagcaccaccctgcactgccccacctgcgtggccctgggcacctgcttcagcgcccccagcctgccctgccccaacggcaccaccagatgctaccagggcaagctggagatcaccggcggcggcatcgagagcagcgtggaggtgaagggctgcaccgccatgatcggctgcagactgatgagcggcatcctggccgtgggccccatgttcgtgagagaggcctgcccccaccagctgctgacccagcccagaaagaccgagaacggcgccacctgcctgcccatccccgtgtggggcctgcagctgctgctgcccctgctgctgcccagcttcatccacttcagctag

SEQ ID NO: 102182 - DNA, 750 bp, synthetic construct
  misc_feature 1..750: note = Description of Artificial Sequence: Synthetic coding sequence
  source 1..750: mol_type = other DNA
atgggcacccccagaatccagcacctgctgatcctgctggtgctgggcgccagcctgctgaccagcggcctggagctgtactgccagaagggcctgagcatgaccgtggaggccgaccccgccaacatgttcaactggaccaccgaggaggtggagacctgcgacaagggcgccctgtgccaggagaccatcctgatcatcaaggccggcaccgagaccgccatcctggccaccaagggctgcatccccgagggcgaggaggccatcaccatcgtgcagcacagcagcccccccggcctgatcgtgaccagctacagcaactactgcgaggacagcttctgcaacgacaaggacagcctgagccagttctgggagttcagcgagaccaccgccagcaccgtgagcaccaccctgcactgccccacctgcgtggccctgggcacctgcttcagcgcccccagcctgccctgccccaacggcaccaccagatgctaccagggcaagctggagatcaccggcggcggcatcgagagcagcgtggaggtgaagggctgcaccgccatgatcggctgcagactgatgagcggcatcctggccgtgggccccatgttcgtgagagaggcctgcccccaccagctgctgacccagcccagaaagaccgagaacggcgccacctgcctgcccatccccgtgtggggcctgcagctgctgctgcccctgctgctgcccagcttcatccacttcagctag

SEQ ID NO: 102183 - DNA, 804 bp, synthetic construct; identical to SEQ ID NO: 102180
  misc_feature 1..804: note = Description of Artificial Sequence: Synthetic coding sequence
  source 1..804: mol_type = other DNA

SEQ ID NO: 102184 - DNA, 2823 bp, synthetic construct
  misc_feature 1..2823: note = Description of Artificial Sequence: Synthetic coding sequence
  source 1..2823: mol_type = other DNA
atgatcagcgcccactgcaacctgagactgctgtgcagcagcgacagcagcgccagcgccagccaggtggccggcaccaccgaggtggtggagaacctggtgaccaacgacaacagccccaacatccccgaggccatcgacagactgttcagcgacatcgccaacatcaacagagagagcatggccgagatcaccgacatccagatcgaggagatggccgtgaacctgtggaactgggccctgaccatcggcggcggctggctggtgaacgaggagcagaagatcagactgcactacgtggcctgcaagctgctgagcatgtgcgaggccagcttcgccagcgagcagagcatccagagactgatcatgatgaacatgagaatcggcaaggagtggctggacgccggcaacttcctgatcgccgacgagtgcttccaggccgccgtggccagcctggagcagctgtacgtgaagctgatccagagaagcagccccgaggccgacctgaccatggagaagatcaccgtggagagcgaccacttcagagtgctgagctaccaggccgagagcgccgtggcccagggcgacttccagagagccagcatgtgcgtgctgcagtgcaaggacatgctgatgagactgccccagatgaccagcagcctgcaccacctgtgctacaacttcggcgtggagacccagaagaacaacaagtacgaggagagcagcttctggctgagccagagctacgacatcggcaagatggacaagaagagcaccggccccgagatgctggccaaggtgctgagactgctggccaccaactacctggactgggacgacaccaagtactacgacaaggccctgaacgccgtgaacctggccaacaaggagcacctgagcagccccggcctgttcctgaagatgaagatcctgctgaagggcgagaccagcaacgaggagctgctggaggccgtgatggagatcctgcacctggacatgcccctggacttctgcctgaacatcgccaagctgctgatggaccacgagagagagagcgtgggcttccacttcctgaccatcatccacgagagattcaagagcagcgagaacatcggcaaggtgctgatcctgcacaccgacatgctgctgcagagaaaggaggagctgctggccaaggagaagatcgaggagatcttcctggcccaccagaccggcagacagctgaccgccgagagcatgaactggctgcacaacatcctgtggagacaggccgccagcagcttcgaggtgcagaactacaccgacgccctgcagtggtactactacagcctgagattctacagcaccgacgagatggacctggacttcaccaagctgcagagaaacatggcctgctgctacctgaacctgcagcagctggacaaggccaaggaggccgtggccgaggccgagagacacgaccccagaaacgtgttcacccagttctacatcttcaagatcgccgtgatcgagggcaacagcgagagagccctgcaggccatcatcaccctggagaacatcctgaccgacgaggagagcgaggacaacgacctggtggccgagagaggcagccccaccatgctgctgagcctggccgcccagttcgccctggagaacggccagcagatcgtggccgagaaggccctggagtacctggcccagcacagcgaggaccaggagcaggtgctgaccgccgtgaagtgcctgctgagattcctgctgcccaagatcgccgagatgcccgagagcgaggacaagaagaaggagatggacagactgctgacctgcctgaacagagccttcgtgaagctgagccagcccttcggcgaggaggccctgagcctggagagcagagccaacgaggcccagtggttcagaaagaccgcctggaacctggccgtgcagtgcgacaaggaccccgtgatgatgagagagttcttcatcctgagctacaagatgagccagttctgccccagcgaccaggtgatcctgatcgccagaaagacctgcctgctgatggccgtggccgtggacctggagcagggcagaaaggccagcaccgccttcgagcagaccatgttcctgagcagagccctggaggagatccagacctgcaacgacatccacaacttcctgaagcagaccggcaccttcagcaacgacagctgcgagaagctgctgctgctgtacgagttcgaggtgagagccaagctgaacgaccccctgctggagagcttcctggagagcgtgtgggagctgccccacctggagaccaagaccttcgagaccatcgccatcatcgccatggagaagcccgcccactaccccctgatcgccctgaaggccctgaagaaggccctgctgctgtacaagaaggaggagcccatcgacatcagccagtacagcaagtgcatgcacaacctggtgaacctgagcgtgcccgacggcgccagcaacgtggagctgtgccccctggaggaggtgtggggctacttcgaggacgccctgagccacatcagcagaaccaaggactaccccgagatggagatcctgtggctgatggtgaagagctggaacaccggcgtgctgatgttcagcagaagcaagtacgccagcgccgagaagtggtgcggcctggccctgagattcctgaaccacctgaccagcttcaaggagagctacgagacccagatgaacatgctgtacagccagctggtggaggccctgagcaacaacaagggccccgtgttccacgagcacggctactggagcaagagcgactag

SEQ ID NO: 102185 - DNA, 1848 bp, synthetic construct
  misc_feature 1..1848: note = Description of Artificial Sequence: Synthetic coding sequence
  source 1..1848: mol_type = other DNA
atggagatcctgcacctggacatgcccctggacttctgcctgaacatcgccaagctgctgatggaccacgagagagagagcgtgggcttccacttcctgaccatcatccacgagagattcaagagcagcgagaacatcggcaaggtgctgatcctgcacaccgacatgctgctgcagagaaaggaggagctgctggccaaggagaagatcgaggagatcttcctggcccaccagaccggcagacagctgaccgccgagagcatgaactggctgcacaacatcctgtggagacaggccgccagcagcttcgaggtgcagaactacaccgacgccctgcagtggtactactacagcctgagattctacagcaccgacgagatggacctggacttcaccaagctgcagagaaacatggcctgctgctacctgaacctgcagcagctggacaaggccaaggaggccgtggccgaggccgagagacacgaccccagaaacgtgttcacccagttctacatcttcaagatcgccgtgatcgagggcaacagcgagagagccctgcaggccatcatcaccctggagaacatcctgaccgacgaggagagcgaggacaacgacctggtggccgagagaggcagccccaccatgctgctgagcctggccgcccagttcgccctggagaacggccagcagatcgtggccgagaaggccctggagtacctggcccagcacagcgaggaccaggagcaggtgctgaccgccgtgaagtgcctgctgagattcctgctgcccaagatcgccgagatgcccgagagcgaggacaagaagaaggagatggacagactgctgacctgcctgaacagagccttcgtgaagctgagccagcccttcggcgaggaggccctgagcctggagagcagagccaacgaggcccagtggttcagaaagaccgcctggaacctggccgtgcagtgcgacaaggaccccgtgatgatgagagagttcttcatcctgagctacaagatgagccagttctgccccagcgaccaggtgatcctgatcgccagaaagacctgcctgctgatggccgtggccgtggacctggagcagggcagaaaggccagcaccgccttcgagcagaccatgttcctgagcagagccctggaggagatccagacctgcaacgacatccacaacttcctgaagcagaccggcaccttcagcaacgacagctgcgagaagctgctgctgctgtacgagttcgaggtgagagccaagctgaacgaccccctgctggagagcttcctggagagcgtgtgggagctgccccacctggagaccaagaccttcgagaccatcgccatcatcgccatggagaagcccgcccactaccccctgatcgccctgaaggccctgaagaaggccctgctgctgtacaagaaggaggagcccatcgacatcagccagtacagcaagtgcatgcacaacctggtgaacctgagcgtgcccgacggcgccagcaacgtggagctgtgccccctggaggaggtgtggggctacttcgaggacgccctgagccacatcagcagaaccaaggactaccccgagatggagatcctgtggctgatggtgaagagctggaacaccggcgtgctgatgttcagcagaagcaagtacgccagcgccgagaagtggtgcggcctggccctgagattcctgaaccacctgaccagcttcaaggagagctacgagacccagatgaacatgctgtacagccagctggtggaggccctgagcaacaacaagggccccgtgttccacgagcacggctactggagcaagagcgactag

SEQ ID NO: 102186 - DNA, 2778 bp, synthetic construct
  misc_feature 1..2778: note = Description of Artificial Sequence: Synthetic coding sequence
  source 1..2778: mol_type = other DNA
atggacaacgacgacttcttcagcatggacttcaaggaggtggtggagaacctggtgaccaacgacaacagccccaacatccccgaggccatcgacagactgttcagcgacatcgccaacatcaacagagagagcatggccgagatcaccgacatccagatcgaggagatggccgtgaacctgtggaactgggccctgaccatcggcggcggctggctggtgaacgaggagcagaagatcagactgcactacgtggcctgcaagctgctgagcatgtgcgaggccagcttcgccagcgagcagagcatccagagactgatcatgatgaacatgagaatcggcaaggagtggctggacgccggcaacttcctgatcgccgacgagtgcttccaggccgccgtggccagcctggagcagctgtacgtgaagctgatccagagaagcagccccgaggccgacctgaccatggagaagatcaccgtggagagcgaccacttcagagtgctgagctaccaggccgagagcgccgtggcccagggcgacttccagagagccagcatgtgcgtgctgcagtgcaaggacatgctgatgagactgccccagatgaccagcagcctgcaccacctgtgctacaacttcggcgtggagacccagaagaacaacaagtacgaggagagcagcttctggctgagccagagctacgacatcggcaagatggacaagaagagcaccggccccgagatgctggccaaggtgctgagactgctggccaccaactacctggactgggacgacaccaagtactacgacaaggccctgaacgccgtgaacctggccaacaaggagcacctgagcagccccggcctgttcctgaagatgaagatcctgctgaagggcgagaccagcaacgaggagctgctggaggccgtgatggagatcctgcacctggacatgcccctggacttctgcctgaacatcgccaagctgctgatggaccacgagagagagagcgtgggcttccacttcctgaccatcatccacgagagattcaagagcagcgagaacatcggcaaggtgctgatcctgcacaccgacatgctgctgcagagaaaggaggagctgctggccaaggagaagatcgaggagatcttcctggcccaccagaccggcagacagctgaccgccgagagcatgaactggctgcacaacatcctgtggagacaggccgccagcagcttcgaggtgcagaactacaccgacgccctgcagtggtactactacagcctgagattctacagcaccgacgagatggacctggacttcaccaagctgcagagaaacatggcctgctgctacctgaacctgcagcagctggacaaggccaaggaggccgtggccgaggccgagagacacgaccccagaaacgtgttcacccagttctacatcttcaagatcgccgtgatcgagggcaacagcgagagagccctgcaggccatcatcaccctggagaacatcctgaccgacgaggagagcgaggacaacgacctggtggccgagagaggcagccccaccatgctgctgagcctggccgcccagttcgccctggagaacggccagcagatcgtggccgagaaggccctggagtacctggcccagcacagcgaggaccaggagcaggtgctgaccgccgtgaagtgcctgctgagattcctgctgcccaagatcgccgagatgcccgagagcgaggacaagaagaaggagatggacagactgctgacctgcctgaacagagccttcgtgaagctgagccagcccttcggcgaggaggccctgagcctggagagcagagccaacgaggcccagtggttcagaaagaccgcctggaacctggccgtgcagtgcgacaaggaccccgtgatgatgagagagttcttcatcctgagctacaagatgagccagttctgccccagcgaccaggtgatcctgatcgccagaaagacctgcctgctgatggccgtggccgtggacctggagcagggcagaaaggccagcaccgccttcgagcagaccatgttcctgagcagagccctggaggagatccagacctgcaacgacatccacaacttcctgaagcagaccggcaccttcagcaacgacagctgcgagaagctgctgctgctgtacgagttcgaggtgagagccaagctgaacgaccccctgctggagagcttcctggagagcgtgtgggagctgccccacctggagaccaagaccttcgagaccatcgccatcatcgccatggagaagcccgcccactaccccctgatcgccctgaaggccctgaagaaggccctgctgctgtacaagaaggaggagcccatcgacatcagccagtacagcaagtgcatgcacaacctggtgaacctgagcgtgcccgacggcgccagcaacgtggagctgtgccccctggaggaggtgtggggctacttcgaggacgccctgagccacatcagcagaaccaaggactaccccgagatggagatcctgtggctgatggtgaagagctggaacaccggcgtgctgatgttcagcagaagcaagtacgccagcgccgagaagtggtgcggcctggccctgagattcctgaaccacctgaccagcttcaaggagagctacgagacccagatgaacatgctgtacagccagctggtggaggccctgagcaacaacaagggccccgtgttccacgagcacggctactggagcaagagcgactag

SEQ ID NO: 102187 - DNA, 2823 bp, synthetic construct; identical to SEQ ID NO: 102184
  misc_feature 1..2823: note = Description of Artificial Sequence: Synthetic coding sequence
  source 1..2823: mol_type = other DNA

SEQ ID NO: 102188 - DNA, 372 bp, synthetic construct
  misc_feature 1..372: note = Description of Artificial Sequence: Synthetic coding sequence
  source 1..372: mol_type = other DNA
atgatggccaaccacctggtgaagcccgacaacagaaactgcaagagacccagagagctggagagccccgtgcccgacagcccccagctgagcagcctgggcaagagcgacagcagcttcagcgagatcagcggcctgttctacaaggacgaggccctggagaaggacctgaacgacgtgagcaaggagatcaacctgatgctgagcacctacgccaagctgctgagcgagagagccgccgtggacgccagctacatcgacgagatcgacgagctgttcaaggaggccaacgccatcgagaacttcctgatccagaagagagagttcctgagacagagattcaccgtgatcgccaacaccctgcacagatag

SEQ ID NO: 102189 - DNA, 372 bp, synthetic construct; identical to SEQ ID NO: 102188
  misc_feature 1..372: note = Description of Artificial Sequence: Synthetic coding sequence
  source 1..372: mol_type = other DNA

SEQ ID NO: 102190 - DNA, 1059 bp, synthetic construct
  misc_feature 1..1059: note = Description of Artificial Sequence: Synthetic coding sequence
  source 1..1059: mol_type = other DNA
atggccctgagacccgaggaccccagcagcggcttcagacacagcaacgtggtggccttcatcaacgagaagatggccagacacaccaagggccccgagttctacctggagaacatcagcctgagctgggagaaggtggaggacaagctgagagccatcctggaggacagcgaggtgcccagcgaggtgaaggaggcctgcacctggggcagcctggccctgggcgtgagattcgcccacagacaggcccagctgcagagacacagagtgagatggctgcacggcttcgccaagctgcacaagagcgccgcccaggccctggccagcgacctgaagaagctgagagagcagcaggagaccgagagaaaggaggccgccagcagactgagaatggcccagaccagcctggtggaggtgcagaaggagagagacaaggagctggtgagcccccacgagtgggagcagggcgccggctggcccggcctggccaccgccggcggcgtgtgcaccgagggcgccgccgaggaggaggaggaggccgccgtggccgccgccggcgccgccggcggcaagggcgccgaggaggagcagagaggctgctggagactgtggctgcccctgtggagaccctggctgcccctgtggagactgggcctgcccccctggagacccagcagccccacctggagacccggcctgcccccctggagaccccagagaagctggagagagagcagctgcagcagcctggagatgctgatcagaaagagcacccccatcggcggcagaagaagagagatcagcggcagaagcaagcagccccacctgatcagcctggagcccagaacccccggccccgagccccaccagaacctgttcctgagcagcagcctgccccacacccacacccacacccaggccctgttcccccccagccagacctaccccctgtaccccctgcacaagcagcagagccagcaccagttcagactgagctgcctgcccaccggcagacccctgatcctggcctgcggcctgatgggcggccccaccgagtag

SEQ ID NO: 102191 - DNA, 1059 bp, synthetic construct; identical to SEQ ID NO: 102190
  misc_feature 1..1059: note = Description of Artificial Sequence: Synthetic coding sequence
  source 1..1059: mol_type = other DNA

SEQ ID NO: 102192 - DNA, 1230 bp, synthetic construct
  misc_feature 1..1230: note = Description of Artificial Sequence: Synthetic coding sequence
  source 1..1230: mol_type = other DNA
atggccctgagacccgaggaccccagcagcggcttcagacacagcaacgtggtggccttcatcaacgagaagatggccagacacaccaagggccccgagttctacctggagaacatcagcctgagctgggagaaggtggaggacaagctgagagccatcctggaggacagcgaggtgcccagcgaggtgaaggaggcctgcacctggggcagcctggccctgggcgtgagattcgcccacagacaggcccagctgcagagacacagagtgagatggctgcacggcttcgccaagctgcacaagagcgccgcccaggccctggccagcgacctgaagaagctgagagagcagcaggagaccgagagaaaggaggccgccagcagactgagaatggcccagaccagcctggtggaggtgcagaaggagagagacaaggagctggtgagcccccacgagtgggagcagggcgccggctggcccggcctggccaccgccggcggcgtgtgcaccgagggcgccgccgaggaggaggaggaggccgccgtggccgccgccggcgccgccggcggcaagggcgccgaggaggagcagagagacgtggaggtggtggccgcccccgtggaggccatggccccccccgtggaggccggcgccgcccccatggagacccagttcccccacgtggaggccagagccgccagcatggagaccaccgagaagctggagagaatcctgctgcagctgctgggcgacgccgaccaggagaagtacacctactggggccagaaggagggcgacctgagaagcgtggagaccgccaccagctacttcagcggcaccaccaacccctggagcagagccagcagcgagcccctgcccgtgcagctgcccgccagctacagctacagctacagcagccccttcagcagcttcagcgacatccccaccatcagccccccccaggccaccgtgaccgcccccgtgcccccccagctgcccagcgactgggaggccttcgacaccagcctgtggagcgacggcggcccccacagaatcgaccaccaggagcaccccagagacagaagatacagcgagccccaccagcagagaccccccgtgtacagaagacccggcgactgggactgcccctggtgcaacgccgtgaacttcagcagaagagacacctgcttcgactgcggcaagggcatctggctgcagaagccccactag

SEQ ID NO: 102193 - DNA, 939 bp, synthetic construct
  misc_feature 1..939: note = Description of Artificial Sequence: Synthetic coding sequence
  source 1..939: mol_type = other DNA
atggccctgagacccgaggaccccagcagcggcttcagacacggcaacgtggtggccttcatcatcgagaagatggccagacacaccaagggccccgagttctacttcgagaacatcagcctgagctgggaggaggtggaggacaagctgagagccatcctggaggacagcgaggtgcccagcgaggtgaaggaggcctgcacctggggcagcctggccctgggcgtgagattcgcccacagacagggccagctgcagaacagaagagtgcagtggctgcagggcttcgccaagctgcacagaagcgccgccctggtgctggccagcaacctgaccgagctgaaggagcagcaggagatggagtgcaacgaggccaccttccagctgcagctgaccgagaccagcctggccgaggtgcagagagagagagacatgctgagatggaagctgttccacgccgagctggcccccccccagggccagggccaggccaccgtgttccccggcctggccaccgccggcggcgactggaccgagggcgccggcgagcaggagaaggaggccgtggccgccgccggcgccgccggcggcaagggcgaggagagatacgccgaggccggccccgcccccgccgaggtgctgcagggcctgggcggcggcttcagacagcccctgggcgccatcgtggccggcaagctgcacctgtgcggcgccgagggcgagagaagccaggtgagcaccaacagccacgtgtgcctgctgtgggcctgggtgcacagcctgaccggcgccagcagctgccccgccccctacctgatccacatcctgatccccatgcccttcgtgagactgctgagccacacccagtacacccccttcaccagcaagggccacagaaccggcagcaacagcgacgccttccagctgggcggcctgtag

SEQ ID NO: 102194 - DNA, 4494 bp, synthetic construct
  misc_feature 1..4494: note = Description of Artificial Sequence: Synthetic coding sequence
  source 1..4494: mol_type = other DNA
atgagcagagccgtgagactgcccgtgccctgccccgtgcagctgggcaccctgagaaacgacagcctggaggcccagctgcacgagtacgtgaagcagggcaactacgtgaaggtgaagaagatcctgaagaagggcatctacgtggacgccgtgaacagcctgggccagaccgccctgttcgtggccgccctgctgggcctgagaaagttcgtggacgtgctggtggactacggcagcgaccccaaccacagatgcttcgacggcagcacccccgtgcacgccgccgccttcagcggcaaccagtggatcctgagcaagctgctggacgccggcggcgacctgagactgcacgacgagagaggccagaaccccaagacctgggccctgaccgccggcaaggagagaagcacccagatcgtggagttcatgcagagatgcgccagccacatgcaggccatcatccagggcttcagctacgacctgctgaagaagatcgacagcccccagagactggtgtacagccccagctggtgcggcggcctggtgcagggcaaccccaacggcagccccaacagactgctgaaggccggcgtgatcagcgcccagaacatctacagcttcggcttcggcaaggccatgccctggttccagttctacctgaccggcgccacccagatggcctacctgggcagcctgcccgtgatcggcgagaaggaggtgatccaggccgacgacgagcccaccttcagcttcttcagcggcccctacatggtgatgaccaacctggtgtggaacggcagcagagtgaccgtgaaggagctgaacctgcccacccacccccactgcagcagactgagactggccgacctgctgatcgccgagcaggagcacagcagcaagctgagacacccctacctgctgcagctgatggccgtgtgcctgagccaggacctggagaagaccagactggtgtacgagagaatcaccatcggcaccctgttcagcgtgctgcacgagagaagaagccagttccccgtgctgcacatggaggtgatcgtgcacctgctgctgcagatcagcgacgccctgagatacctgcacttccagggcttcatccacagaagcctgagcagctacgccgtgcacatcatcagccccggcgaggccagactgaccaacctggagtacatgctggagagcgaggacagaggcgtgcagagagacctgaccagagtgcccctgcccacccagctgtacaactgggccgcccccgaggtgatcctgcagaaggccgccaccgtgaagagcgacatctacagcttcagcatgatcatgcaggagatcctgaccgacgacatcccctggaagggcctggacggcagcgtggtgaagaaggccgtggtgagcggcaactacctggaggccgacgtgagactgcccaagccctactacgacatcgtgaagagcggcatccacgtgaagcagaaggacagaaccatgaacctgcaggacatcagatacatcctgaagaacgacctgaaggacttcaccggcgcccagagaacccagcccaccgagagccccagagtgcagagatacggcctgcaccccgacgtgaacgtgtacctgggcctgaccagcgagcaccccagagagacccccgacatggagatcatcgagctgaaggagatgggcagccagccccacagccccagagtgcacagcctgttcaccgagggcaccctggacccccaggcccccgacccctgcctgatggccagagagacccagaaccaggacgccccctgccccgcccccttcatggccgaggaggccagcagccccagcaccggccagcccagcctgtgcagcttcgagatcaacgagatctacagcggctgcctgatcctggaggacgacatcgaggagccccccggcgccgccagcagcctggaggccgacggccccaaccaggtggacgagctgaagagcatggaggaggagctggacaagatggagagagaggcctgctgcttcggcagcgaggacgagagcagcagcaaggccgagaccgagtacagcttcgacgactgggactggcagaacggcagcctgagcagcctgagcctgcccgagagcaccagagaggccaagagcaacctgaacaacatgagcaccaccgaggagtacctgatcagcaagtgcgtgctggacctgaagatcatgcagaccatcatgcacgagaacgacgacagactgagaaacatcgagcagatcctggacgaggtggagatgaagcagaaggagcaggaggagagaatgagcctgtgggccaccagcagagagttcaccaacgcctacaagctgcccctggccgtgggcccccccagcctgaactacatcccccccgtgctgcagctgagcggcggccagaagcccgacaccagcggcaactaccccaccctgcccagattccccagaatgctgcccaccctgtgcgaccccggcaagcagaacaccgacgagcagttccagtgcacccagggcgccaaggacagcctggagaccagcagaatccagaacaccagcagccagggcagacccagagagagcaccgcccaggccaaggccacccagttcaacagcgccctgttcaccctgagcagccacagacagggccccagcgccagccccagctgccactgggacagcaccagaatgagcgtggagcccgtgagcagcgagatctacaacgccgagagcagaaacaaggacgacggcaaggtgcacctgaagtggaagatggaggtgaaggagatggccaagaaggccgccaccggccagctgaccgtgcccccctggcacccccagagcagcctgaccctggagagcgaggccgagaacgagcccgacgccctgctgcagccccccatcagaagccccgagaacaccgactggcagagagtgatcgagtaccacagagagaacgacgagcccagaggcaacggcaagttcgacaagaccggcaacaacgactgcgacagcgaccagcacggcagacagcccagactgggcagcttcaccagcatcagacaccccagccccagacagaaggagcagcccgagcacagcgaggccttccaggccagcagcgacaccctggtggccgtggagaagagctacagccaccagagcatgcagagcacctgcagccccgagagcagcgaggacatcaccgacgagttcctgacccccgacggcgagtacttctacagcagcaccgcccaggagaacctggccctggagaccagcagccccatcgaggaggacttcgagggcatccagggcgccttcgcccagccccaggtgagcggcgaggagaagttccagatgagaaagatcctgggcaagaacgccgagatcctgcccagaagccagttccagcccgtgagaagcaccgaggacgagcaggaggagaccagcaaggagagccccaaggagctgaaggagaaggacatcagcctgaccgacatccaggacctgagcagcatcagctacgagcccgacagcagcttcaaggaggccagctgcaagacccccaagatcaaccacgcccccaccagcgtgagcacccccctgagccccggcagcgtgagcagcgccgccagccagtacaaggactgcctggagagcatcaccttccaggtgaagaccgagttcgccagctgctggaacagccaggagttcatccagaccctgagcgacgacttcatcagcgtgagagagagagccaagaagctggacagcctgctgaccagcagcgagaccccccccagcagactgaccggcctgaagagactgagcagcttcatcggcgccggcagccccagcctggtgaaggcctgcgacagcagccccccccacgccacccagagaagaagcctgcccaaggtggaggccttcagccagcaccacatcgacgagctgcccccccccagccaggagctgctggacgacatcgagctgctgaagcagcagcagggcagcagcaccgtgctgcacgagaacaccgccagcgacggcggcggcaccgccaacgaccagagacacctggaggagcaggagaccgacagcaagaaggaggacagcagcatgctgctgagcaaggagaccgaggacctgggcgaggacaccgagagagcccacagcaccctggacgaggacctggagagatggctgcagccccccgaggagagcgtggagctgcaggacctgcccaagggcagcgagagagagaccaacatcaaggaccagaaggtgggcgaggagaagagaaagagagaggacagcatcacccccgagagaagaaagagcgagggcgtgctgggcaccagcgaggaggacgagctgaagagctgcttctggaagagactgggctggagcgagagcagcagaatcatcgtgctggaccagagcgacctgagcgactag

SEQ ID NO: 102195 - DNA, 4356 bp, synthetic construct
  misc_feature 1..4356: note = Description of Artificial Sequence: Synthetic coding sequence
  source 1..4356: mol_type = other DNA
atgagcagagccgtgagactgcccgtgccctgccccgtgcagctgggcaccctgagaaacgacagcctggaggcccagctgcacgagtacgtgaagcagggcaactacgtgaaggtgaagaagatcctgaagaagggcatctacgtggacgccgtgaacagcctgggccagaccgccctgttcgtggccgccctgctgggcctgagaaagttcgtggacgtgctggtggactacggcagcgaccccaaccacagatgcttcgacggcagcacccccgtgcacgccgccgccttcagcggcaaccagtggatcctgagcaagctgctggacgccggcggcgacctgagactgcacgacgagagaggccagaaccccaagacctgggccctgaccgccggcaaggagagaagcacccagatcgtggagttcatgcagagatgcgccagccacatgcaggccatcatccagggcttcagctacgacctgctgaagaagatcgacagcccccagagactggtgtacagccccagctggtgcggcggcctggtgcagggcaaccccaacggcagccccaacagactgctgaaggccggcgtgatcagcgcccagaacatctacagcttcggcttcggcaagttctacctgaccggcgccacccagatggcctacctgggcagcctgcccgtgatcggcgagaaggaggtgatccaggccgacgacgagcccaccttcagcttcttcagcggcccctacatggtgatgaccaacctggtgtggaacggcagcagagtgaccgtgaaggagctgaacctgcccacccacccccactgcagcagactgagactggccgacctgctgatcgccgagcaggagcacagcagcaagctgagacacccctacctgctgcagctgatggccgtgtgcctgagccaggacctggagaagaccagactggtgtacgagagaatcaccatcggcaccctgttcagcgtgctgcacgagagaagaagccagttccccgtgctgcacatggaggtgatcgtgcacctgctgctgcagatcagcgacgccctgagatacctgcacttccagggcttcatccacagaagcctgagcagctacgccgtgcacatcatcagccccggcgaggccagactgaccaacctggagtacatgctggagagcgaggacagaggcgtgcagagagacctgaccagagtgcccctgcccacccagctgtacaactgggccgcccccgaggtgatcctgcagaaggccgccaccgtgaagagcgacatctacagcttcagcatgatcatgcaggagatcctgaccgacgacatcccctggaagggcctggacggcagcgtggtgaagaaggccgtggtgagcggcaactacctggaggccgacgtgagactgcccaagccctactacgacatcgtgaagagcggcatccacgtgaagcagaaggacagaaccatgaacctgcaggacatcagatacatcctgaagaacgacctgaaggacttcaccggcgcccagagaacccagcccaccgagagccccagagtgcagagatacggcctgcaccccgacgtgaacgtgtacctgggcctgaccagcgagcaccccagagagacccccgacatggagatcatcgagctgaaggagatgggcagccagccccacagccccagagtgcacagcctgttcaccgagggcaccctggacccccaggcccccgacccctgcctgatggccagagagacccagaaccaggacgccccctgccccgcccccttcatggccgaggaggccagcagccccagcaccggccagcccagcctgtgcagcttcgagatcaacgagatctacagcggctgcctgatcctggaggacgacatcgaggagccccccggcgccgccagcagcctggaggccgacggccccaaccaggtggacgagctgaagagcatggaggaggagctggacaagatggagagagaggcctgctgcttcggcagcgaggacgagagcagcagcaaggccgagaccgagtacagcttcgacgactgggactggcagaacggcagcctgagcagcctgagcctgcccgagagcaccagagaggccaagagcaacctgaacaacatgagcaccaccgaggagtacctgatcagcaagtgcgtgctggacctgaagatcatgcagaccatcatgcacgagaacgacgacagactgagaaacatcgagcagatcctggacgaggtggagatgaagcagaaggagcaggaggagagaatgagcctgtgggccaccagcagagagttcaccaacgcctacaagctgcccctggccgtgggcccccccagcctgaactacatcccccccgtgctgcagctgagcggcggccagaagcccgacaccagcggcaactaccccaccctgcccagattccccagaatgctgcccaccctgtgcgaccccggcaagcagaacaccgacgagcagttccagtgcacccagggcgccaaggacagcctggagaccagcagaatccagaacaccagcagccagggcagacccagagagagcaccgcccaggccaaggccacccagttcaacagcgccctgttcaccctgagcagccacagacagggccccagcgccagccccagctgccactgggacagcaccagaatgagcgtggagcccgtgagcagcgagatctacaacgccgagagcagaaacaaggacgacggcaaggtgcacctgaagtggaagatggaggtgaaggagatggccaagaaggccgccaccggccagctgaccgtgcccccctggcacccccagagcagcctgaccctggagagcgaggccgagaacgagcccgacgccctgctgcagccccccatcagaagccccgagaacaccgactggcagagagtgatcgagtaccacagagagaacgacgagcccagaggcaacggcaagttcgacaagaccggcaacaacgactgcgacagcgaccagcacggcagacagcccagactgggcagcttcaccagcatcagacaccccagccccagacagaaggagcagcccgagcacagcgaggccttccaggccagcagcgacaccctggtggccgtggagaagagctacagcaccagcagccccatcgaggaggacttcgagggcatccagggcgccttcgcccagccccaggtgagcggcgaggagaagttccagatgagaaagatcctgggcaagaacgccgagatcctgcccagaagccagttccagcccgtgagaagcaccgaggacgagcaggaggagaccagcaaggagagccccaaggagctgaaggagaaggacatcagcctgaccgacatccaggacctgagcagcatcagctacgagcccgacagcagcttcaaggaggccagctgcaagacccccaagatcaaccacgcccccaccagcgtgagcacccccctgagccccggcagcgtgagcagcgccgccagccagtacaaggactgcctggagagcatcaccttccaggtgaagaccgagttcgccagctgctggaacagccaggagttcatccagaccctgagcgacgacttcatcagcgtgagagagagagccaagaagctggacagcctgctgaccagcagcgagaccccccccagcagactgaccggcctgaagagactgagcagcttcatcggcgccggcagccccagcctggtgaaggcctgcgacagcagccccccccacgccacccagagaagaagcctgcccaaggtggaggccttcagccagcaccacatcgacgagctgcccccccccagccaggagctgctggacgacatcgagctgctgaagcagcagcagggcagcagcaccgtgctgcacgagaacaccgccagcgacggcggcggcaccgccaacgaccagagacacctggaggagcaggagaccgacagcaagaaggaggacagcagcatgctgctgagcaaggagaccgaggacctgggcgaggacaccgagagagcccacagcaccctggacgaggacctggagagatggctgcagccccccgaggagagcgtggagctgcaggacctgcccaagggcagcgagagagagaccaacatcaaggaccagaaggtgggcgaggagaagagaaagagagaggacagcatcacccccgagagaagaaagagcgagggcgtgctgggcaccagcgaggaggacgagctgaagagctgcttctggaagagactgggctggagcgagagcagcagaatcatcgtgctggaccagagcgacctgagcgactag

SEQ ID NO: 102196 - DNA, 4476 bp, synthetic construct
  misc_feature 1..4476: note = Description of Artificial Sequence: Synthetic coding sequence
  source 1..4476: mol_type = other DNA
atgagcagagccgtgagactgcccgtgccctgccccgtgcagctgggcaccctgagaaacgacagcctggaggcccagctgcacgagtacgtgaagcagggcaactacgtgaaggtgaagaagatcctgaagaagggcatctacgtggacgccgtgaacagcctgggccagaccgccctgttcgtggccgccctgctgggcctgagaaagttcgtggacgtgctggtggactacggcagcgaccccaaccacagatgcttcgacggcagcacccccgtgcacgccgccgccttcagcggcaaccagtggatcctgagcaagctgctggacgccggcggcgacctgagactgcacgacgagagaggccagaaccccaagacctgggccctgaccgccggcaaggagagaagcacccagatcgtggagttcatgcagagatgcgccagccacatgcaggccatcatccagggcttcagctacgacctgctgaagaagatcgacagcccccagagactggtgtacagccccagctggtgcggcggcctggtgcagggcaaccccaacggcagccccaacagactgctgaaggccggcgtgatcagcgcccagaacatctacagcttcggcttcggcaagttctacctgaccggcgccacccagatggcctacctgggcagcctgcccgtgatcggcgagaaggaggtgatccaggccgacgacgagcccaccttcagcttcttcagcggcccctacatggtgatgaccaacctggtgtggaacggcagcagagtgaccgtgaaggagctgaacctgcccacccacccccactgcagcagactgagactggccgacctgctgatcgccgagcaggagcacagcagcaagctgagacacccctacctgctgcagctgatggccgtgtgcctgagccaggacctggagaagaccagactggtgtacgagagaatcaccatcggcaccctgttcagcgtgctgcacgagagaagaagccagttccccgtgctgcacatggaggtgatcgtgcacctgctgctgcagatcagcgacgccctgagatacctgcacttccagggcttcatccacagaagcctgagcagctacgccgtgcacatcatcagccccggcgaggccagactgaccaacctggagtacatgctggagagcgaggacagaggcgtgcagagagacctgaccagagtgcccctgcccacccagctgtacaactgggccgcccccgaggtgatcctgcagaaggccgccaccgtgaagagcgacatctacagcttcagcatgatcatgcaggagatcctgaccgacgacatcccctggaagggcctggacggcagcgtggtgaagaaggccgtggtgagcggcaactacctggaggccgacgtgagactgcccaagccctactacgacatcgtgaagagcggcatccacgtgaagcagaaggacagaaccatgaacctgcaggacatcagatacatcctgaagaacgacctgaaggacttcaccggcgcccagagaacccagcccaccgagagccccagagtgcagagatacggcctgcaccccgacgtgaacgtgtacctgggcctgaccagcgagcaccccagagagacccccgacatggagatcatcgagctgaaggagatgggcagccagccccacagccccagagtgcacagcctgttcaccgagggcaccctggacccccaggcccccgacccctgcctgatggccagagagacccagaaccaggacgccccctgccccgcccccttcatggccgaggaggccagcagccccagcaccggccagcccagcctgtgcagcttcgagatcaacgagatctacagcggctgcctgatcctggaggacgacatcgaggagccccccggcgccgccagcagcctggaggccgacggccccaaccaggtggacgagctgaagagcatggaggaggagctggacaagatggagagagaggcctgctgcttcggcagcgaggacgagagcagcagcaaggccgagaccgagtacagcttcgacgactgggactggcagaacggcagcctgagcagcctgagcctgcccgagagcaccagagaggccaagagcaacctgaacaacatgagcaccaccgaggagtacctgatcagcaagtgcgtgctggacctgaagatcatgcagaccatcatgcacgagaacgacgacagactgagaaacatcgagcagatcctggacgaggtggagatgaagcagaaggagcaggaggagagaatgagcctgtgggccaccagcagagagttcaccaacgcctacaagctgcccctggccgtgggcccccccagcctgaactacatcccccccgtgctgcagctgagcggcggccagaagcccgacaccagcggcaactaccccaccctgcccagattccccagaatgctgcccaccctgtgcgaccccggcaagcagaacaccgacgagcagttccagtgcacccagggcgccaaggacagcctggagaccagcagaatccagaacaccagcagccagggcagacccagagagagcaccgcccaggccaaggccacccagttcaacagcgccctgttcaccctgagcagccacagacagggccccagcgccagccccagctgccactgggacagcaccagaatgagcgtggagcccgtgagcagcgagatctacaacgccgagagcagaaacaaggacgacggcaaggtgcacctgaagtggaagatggaggtgaaggagatggccaagaaggccgccaccggccagctgaccgtgcccccctggcacccccagagcagcctgaccctggagagcgaggccgagaacgagcccgacgccctgctgcagccccccatcagaagccccgagaacaccgactggcagagagtgatcgagtaccacagagagaacgacgagcccagaggcaacggcaagttcgacaagaccggcaacaacgactgcgacagcgaccagcacggcagacagcccagactgggcagcttcaccagcatcagacaccccagccccagacagaaggagcagcccgagcacagcgaggccttccaggccagcagcgacaccctggtggccgtggagaagagctacagccaccagagcatgcagagcacctgcagccccgagagcagcgaggacatcaccgacgagttcctgacccccgacggcgagtacttctacagcagcaccgcccaggagaacctggccctggagaccagcagccccatcgaggaggacttcgagggcatccagggcgccttcgcccagccccaggtgagcggcgaggagaagttccagatgagaaagatcctgggcaagaacgccgagatcctgcccagaagccagttccagcccgtgagaagcaccgaggacgagcaggaggagaccagcaaggagagccccaaggagctgaaggagaaggacatcagcctgaccgacatccaggacctgagcagcatcagctacgagcccgacagcagcttcaaggaggccagctgcaagacccccaagatcaaccacgcccccaccagcgtgagcacccccctgagccccggcagcgtgagcagcgccgccagccagtacaaggactgcctggagagcatcaccttccaggtgaagaccgagttcgccagctgctggaacagccaggagttcatccagaccctgagcgacgacttcatcagcgtgagagagagagccaagaagctggacagcctgctgaccagcagcgagaccccccccagcagactgaccggcctgaagagactgagcagcttcatcggcgccggcagccccagcctggtgaaggcctgcgacagcagccccccccacgccacccagagaagaagcctgcccaaggtggaggccttcagccagcaccacatcgacgagctgcccccccccagccaggagctgctggacgacatcgagctgctgaagcagcagcagggcagcagcaccgtgctgcacgagaacaccgccagcgacggcggcggcaccgccaacgaccagagacacctggaggagcaggagaccgacagcaagaaggaggacagcagcatgctgctgagcaaggagaccgaggacctgggcgaggacaccgagagagcccacagcaccctggacgaggacctggagagatggctgcagccccccgaggagagcgtggagctgcaggacctgcccaagggcagcgagagagagaccaacatcaaggaccagaaggtgggcgaggagaagagaaagagagaggacagcatcacccccgagagaagaaagagcgagggcgtgctgggcaccagcgaggaggacgagctgaagagctgcttctggaagagactgggctggagcgagagcagcagaatcatcgtgctggaccagagcgacctgagcgactag

SEQ ID NO: 102197 - DNA, 8370 bp, synthetic construct
  misc_feature 1..8370: note = Description of Artificial Sequence: Synthetic coding sequence
  source 1..8370: mol_type = other DNA
atgcccagcgacgccaaggacagcgtgaacggcgacctgctgctgaactggaccagcctgaagaacatcctgagcggcctgaacgccagcttccccctgcacaacaacaccggcagcagcaccgtgaccaccagcaagagcatcaaggaccccagactgatgagaagagaggagagcatgggcgagcagagcagcaccgccggcctgaacgaggtgctgcagttcgagaagagcagcgacaacgtgaacagcgagatcaagagcacccccagcaacagcgccagcagcagcgaggtggtgcccggcgactgcgccgtgctgaccaacggcctggacaccccctgcttcaagaccagcgtgaacgacagccagagctgggcccacaacatgggcagcgaggactacgactgcatcccccccaacaaggtgaccatggccggccagtgcaaggaccagggcaacttcagcttccccatcagcgtgagcaacgtggtgagcgaggtggagaaccagaaccacagcgaggagaaggcccagagagcccagcaggagagcggcaacgcctacaccaaggagtacagcagccacatcttccaggacagccagagcagcgacctgaagaccatctaccagaccggctgccagaccagcaccgtgttccccctgaagaagaaggtgagcatcgacgagtacctgcagaacaccggcaagatgaagaacttcgccgacctggaggacagcagcaagcacgaggagaagcagaccagctggaaggagatcgacaacgacttcaccaacgagaccaagatcagccccatcgacaactacatcgtgctgcaccaggagtacaaggagagcgagagccacaacagcttcggcaagagctgcgacaagatcctgatcacccaggagctggagatcaccaagagcagcaccagcaccatcaaggacaaggacgagctggaccacctggccctggagtggcagatcacccccagcttcgagagcctgagccagaagcacccccagcacagcgtggagtacgagggcaacatccacaccagcctggccatcgcccagaagctgatggagctgaagctgggcaagatcaaccagaactacgccagcatcatcaccgaggccttccccaagcccaaggacatcccccaggccaaggagatgttcatcgacaccgtgatcagcagctacaacatcgagaccgcccacgacagcagcaactgcagcatcaccagagagcacatctgcgtgcacagaaagaacgagaacgagcccgtgagcctggagaacatccagagagactacaaggagaccgcctacgtggaggacagaggccaggaccacaacctgttctgcaacagccagctgagcaacgacatctggctgaacgtgaacttcaagaagcagaccgacagagagaaccagaacgaggccaaggagaacagcgccagctgcgtggagaacaacatcgagaacatctacggcgacaagaagcaggacagccacaccaacgagaacttcagcaacatcgacgagaaggaggacaagaactaccacaacatcgagatcctgagcagcgaggagttcagcaccaagttcaacctgatctgcagagaggacaacgccgtgagcgccgccaccgccctgctggagagcgaggaggacaccatcagcgccgtgaagcagaaggacaccgagaacaccggcagaagcgtggagcacctggccagcaccaccttccccaagaccgccagcagcagcgtgtgcgtggccagcaacgccgccatccagatcgccagcgccaccatgcccgccctgagcctgaacaacgacgaccaccagatctaccagttcaaggagacctgcagcagcgagagccccgacttcggcctgctggtgaagcacagagtgagcgactgcgagatcgacaccgacaagaacaagagccaggagagcttccaccagagcatcaacgagaacctggtgctgcagagcatcgagctggagagcgagatcgagatcgagctggaggactgcgacgacgccttcatcttccagcaggacacccacagccacgagaacatgctgtgcgaggagttcgtgaccagctacaaggccctgaagagcagaatcagctgggagggcctgctggccctggacaacggcgagatggaggtgctggagagcaccaccggcagagagaacagcgaccagcactacagcaaggagagcaactacttctacagcagcacccagaacaacgagaccgagctgaccagccccatcctgctgcccgacctgcagatcaagatcaccaacatcttcagacccggcttcagccccaccgccgacagcctggccctgaaggacagcttctgcacccacgtgaccgaggccaccaagcccgagatcaacaaggaggacggcgagatcctgggcttcgacatctacagccagcccttcggcgagaacgccgactacccctgcgaggacaaggtggacaacatcagacaggagagcggccccgtgagcaacagcgagatcagcctgagcttcgacctgagcagaaacaccgacgtgaaccacaccagcgagaaccagaacagcgagagcctgttcaccgagcccagcaacgtgaccaccatcgacgacggcagcagatgcttcttcaccaagagcaagaccgactacaacgacaccaagaacaagaaggaggtggagagcagaatcagcaagagaaagctgcacatcagcagcagagaccagaacatcccccacaaggacctgagaagacacaagatctacggcagaaagagaagactgaccagccaggacagcagcgagtgcttcagcagcctgagccagggcagaatcaagaccttcagccagagcgagaagcacatcaagagcgtgctgaacatcctgagcgacgaggccagcctgtgcaagagcaagtgcctgagcagaaagctggacaaggccgtggtgcacctgaagaaggcccacagaagagtgcacaccagcctgcagctgatcaccaaggtgggcgaggagagaaagggccccctgcccaagagctacgccatcatctgcaacaacttctgggagagctgcgacctgcagggctacagcagcgtgagccagagaaagtactacagcaccaagcacttcagcagcaagagaaagtacgacaagagaagaaagaagagagcccccaaggccgacatcagcaagagcctgacccacgtgagcaagcacaagagctacaagaccagcggcgagaagaagtgcctgagcagaaagagcatggccagcagcgtgagcaagagccaccccaccaccagccacatgggcgagttctgcaaccaggagcaccccgagagccagctgcccgtgagcagcaccagccagagcaccagccagagcgtgtactacaacagcagcgtgagcaaccccagcctgagcgaggagcaccagcccttcagcggcaagaccgcctacctgttcagccccgaccacagcgacgagaagctgatcgagaaggagaaccagatcgacaccgccttcctgagcagcaccagcaagtacgagaagctggagaagcacagcgccaaccacaacgtgaaggacgccaccaaggagaacagctgcgacgccaacgaggtgatcaacgagagcaacagcgtgagcctgagctgcatcaaggagaacatcaacagcagcaccggcaacgactgcgacgccacctgcatcggccacaccaaggccaagaccgacgtgctgatcagcgtgctggacagcaacgtgaagcacttcctgaacgacctgtaccagcagggcaacctgatcctgagcgactgcaagagaaacctggaggtgaagtggaccgaccccatcgagagacccaagcagaacatcatcaccggcaacttcctgatgggccccctgaacctgaccctgatcgccagcaagaagtacagcatcccccagctgagcgccgccgccgtgaccgacagcgagggcgagagcagcaagagctacctggacaagcagagaatcctgaccgtggacagcttcgccgccagcagcaccgtgccccactgcgagcagagctgcagagagaaggagctgctgaagaccgagcagtgcagcagcggcaactgcctgcacaccgacggcaacgagaccaacgtgaccgagaactacgagctggacgtggccagcggcaccgaggaggacaagagctacggcgagaacatcgtggagctgagcagcagcgacagcagcctgctgctgaaggacaacgtgaagggcagcagcagcgagacctgcatcgtgaagaaggacaccgaggacagaatcacctggaaggtgaagcaggccgagaaggccaaggacagcgtgtacaagagaagcatgaccgagggcagcaccgtgaacaccgagtacaagaaccagaagaaccagatcagcgaggagagctgcctgaacgagaagatcatcaccaccaacctgatcgacagccacctgagcaccaagaacaccaccaccgagagcgtgcccctgaagaacaccgtgagcaaccccctgaacaagagagagaagaagggcgagatcaaggtgagcaaggacagccagagcgacctgaccctgcacagcgagatcgcctacatcagcaagcccggcatcctgggcgtgaaccacacccccatcctgcccgcccacagcgagacctgcaaggtgcccaccctgctgaagaagcccgccagctacgtgagcgacttcaaggagaagcactgcagcgccaaccacaccgccctgatcgccaacctgagccagatcctgcagagagccgacgaggccagcagcctgcagatcctgcaggaggagaccaaggtgtgcctgaacatcctgcccctgttcgtggaggccttcgagagaaagcaggagtgcagcgtggagcagatcctgatcagcagagagctgctggtggaccagaacctgtggaacaactgcaagcacaccctgaagccctgcgccgtggacaccctggtggagctgcagatgatgatggagaccatccagttcatcgagaacaagaagagacacctggagggcgagcccaccctgagaagcctgctgtggtacgacgagaccctgtacgccgagctgctgggcaagcccagaggcttccagcagcagagcaacttctaccccggcttccagggcagactgaagtacaacgccttctgcgagctgcagacctaccacgaccagctggtggagctgctggaggagaccaagagagagaagaacagctactacgtgttcctgaagtacaagagacaggtgaacgagtgcgaggccatcatggagcactgcagcgactgcttcgacttcagcctgagcgtgcccttcacctgcggcgtgaacttcggcgacagcctggaggacctggagatcctgagaaagagcaccctgaagctgatcaacgtgtgcggcgacagccccaaggtgcacagctaccccggcaagcaggaccacctgtggatcatcatcgagatgatcagcagcaaggtgaacttcatcaagaacaacgaggccgtgagagtgaagatcagcctgtacggcctggagcacatcttcttcgacgccgccaagaacctggtgtggaaggagagaacccagagcttcagcaagaagtacagccagaagaaggacgaggagagactgctgagagtgaacaagtgcgccttcagcaagctgcagaagatctacgacaccctgagcaaggacctgaacaacgagcccatcagccccatcggcctggaggaggacaccatcatcgccagcagaaagagcgaccaccccatcaacgaggccaccatcagcatcgagaacagcaagttcaacagcaacctgctggcccaccccgacatctgctgcatcagcgagatcctggaccaggccgagttcgccgacctgaagaagctgcaggacctgaccctgagatgcaccgaccacctggagatcctgaagaagtacttccagatgctgcaggacaacaacatggacaacatcttcatcaccgaggagaacgtgctggacgtggtgatcaaccacagccacgaggccatcatcctgaagcccgaggccatcgagatgtacatcgagatcgtgatggtgagcgagaccatccacttcctgaagaacagcatcgccaagaagctggacaagcagagattcagaggcatgctgtggttcgacctgagcctgctgcccgagctggtgcagtgccaggagaagatggccagcttcagcttcctgaaggacaacagcaccgacgtgtgcctgtggaaggtgatcgagaccgccgtgagcgagctgaagaaggacctggacatcatctgcaagtacaacgaggccgtgaactgcagctacgccatccacctgctgagcagagagctgcaggagctgagcgagatcaagaagctgctgaagaagagcaagtacttcatcagcacctacatcgacttcgtgccctacatcgccagcatcaactacggcagcaccgtgaccgagctggagtacaactacaaccagttcagcaccctgctgaagaacgtgatgagcgcccccagaaaggacctgggcaagatggcccacatcagaaaggtgatgaagaccatcgagcacatgaagatgatctgcaccaagaacgccgagctgaccatcagcttcttcctgtgccagatgctgtacaacagaagaaagatcctgcagctgaagagaaaggagaagatgaacatccacatcgtgaagcccggcgagaacaacaacaagttcagcatcagcaccatgctgccccccgtgagcgagtgcatcaacaagaacatcagcaacagcagcaagaagagacccagcaccgtggacaagtgcgaggacagccaggagcagcagcaggacaccaccgtgagcagctgcaagaagctgaaggtggacatgaaggacgtgaccaagatcaacagagagaaggccaccttcaagcaccccagaaccaccggcagccaccccaagagcgagaacaagatcgtgcccagcagctgcgacagcctgaagagaaaccacctgacccccaagaaggtggagatgcagagaagcctgcccggcagcctgctgcccctggagaaccccaaggacacctgcgccagcaagagcgagagcaagatcgacctgaccgtgagcagcgaccacttcagcggccagcaggagaacctgaacagcatgaagaagagaaacgtgaacttcagcgccgccgagaccaagagcgacaagaaggactgcgccgccttcgccatctgcgaccagaagagcgtgcacggcaccttcagccccgaccacggcaccctgctgcagaagttcctgaagaacagccccgaccccacccagaagagctgcctgagcgacatcaaccccgagaccgacgtgagcctggtgcccgacgccagcgtgctgagcaagcccatcttctgcttcgtgaaggacgtgcaccccgacctggagatgaacgacaccgtgttcgagctgcaggacaacgacatcgtgaacagcagcatcaagaacagcagctgcatgaccagccccgagcccatctgcatccagaacaagatccccaccctgcagatcaacaagctgcagcccaccgagaccgagagcgaggacaagtacatgaaggacaccctgaaccccaacaccgtgcacaccttcggcgccagcggccacatcaccctgaacgtgaaccagggcgccgagtacagcctgagcgagcagcagaacgacaagaacagcaaggtgctgatgcagaacgccgccacctactggaacgagctgccccagagcgcctgcaaccccacctacaacagcagcgagcacctgttcggcaccagctacccctacagcgcctggtgcgtgtaccagtacagcaacagcaacggcaacgccatcacccagacctaccagggcatcaccagctacgaggtgcagcccagccccagcggcctgctgaccaccgtggccagcaccgcccagggcacccacagcaacctgctgtacagccagtacttcacctacttcgccggcgagccccaggccaacggcttcgtgcccgtgaacggctacttccagagccagatccccgccagcaacttcagacagcccatcttcagccagtacgccagccaccagcccctgccccaggccacctacccctacctgcccaacagattcgtgccccccgaggtgccctgggtgtacgccccctggcaccaggagagcttccaccccggccactag

SEQ ID NO: 102198 - DNA, 1233 bp, synthetic construct
  misc_feature 1..1233: note = Description of Artificial Sequence: Synthetic coding sequence
  source 1..1233: mol_type = other DNA
atggtgctgaaggccgagcacaccagaagccccagcgccaccctgcccagcaacgtgcccagctgcagaagcctgagcagcagcgaggacggccccagcggccccagcagcctggccgacggcggcctggcccacaacctgcaggacagcgtgagacacagaatcctgtacctgagcgagcagctgagagtggagaaggccagcagagacggcaacaccgtgagctacctgaagctggtgagcaaggccgacagacaccaggtgccccacatccagcaggccttcgagaaggtgaaccagagagccagcgccaccatcgcccagatcgagcacagactgcaccagtgccaccagcagctgcaggagctggaggagggctgcagacccgagggcctgctgctgatggccgagagcgaccccgccaactgcgagccccccagcgagaaggccctgctgagcgagccccccgagcccggcggcgaggacggccccgtgaacctgccccacgccagcagacccttcatcctggagagcagattccagagcctgcagcagggcacctgcctggagaccgaggacgtggcccagcagcagaacctgctgctgcagaaggtgaaggccgagctggaggaggccaagagattccacatcagcctgcaggagagctaccacagcctgaaggagagaagcctgaccgacctgcagctgctgctggagagcctgcaggaggagaagtgcagacaggccctgatggaggagcaggtgaacggcagactgcagggccagctgaacgagatctacaacctgaagcacaacctggcctgcagcgaggagagaatggcctacctgagctacgagagagccaaggagatctgggagatcaccgagaccttcaagagcagaatcagcaagctggagatgctgcagcaggtgacccagctggaggccgccgagcacctgcagagcagacccccccagatgctgttcaagttcctgagccccagactgagcctggccaccgtgctgctggtgttcgtgagcaccctgtgcgcctgccccagcagcctgatcagcagcagactgtgcacctgcaccatgctgatgctgatcggcctgggcgtgctggcctggcagagatggagagccatccccgccaccgactggcaggagtgggtgcccagcagatgcagactgtacagcaaggacagcggcccccccgccgacggcccctag

SEQ ID NO: 102199 - DNA, 1233 bp, synthetic construct; identical to SEQ ID NO: 102198
  misc_feature 1..1233: note = Description of Artificial Sequence: Synthetic coding sequence
  source 1..1233: mol_type = other DNA

SEQ ID NO: 102200 - DNA, 945 bp, synthetic construct
  misc_feature 1..945: note = Description of Artificial Sequence: Synthetic coding sequence
  source 1..945: mol_type = other DNA
atgagacccgagggcagcctgacctacagagtgcccgagagactgagacagggcttctgcggcgtgggcagagccgcccaggccctggtgtgcgccagcgccaaggagggcaccgccttcagaatggaggccgtgcaggagggcgccgccggcgtggagagcgagcaggccgccctgggcgaggaggccgtgctgctgctggacgacatcatggccgaggtggaggtggtggccgaggtggaggtggtggccgaggaggagggcctggtggagagaagagaggaggcccagagagcccagcaggccgtgcccggccccggccccatgacccccgagagcgcccccgaggagctgctggccgtgcaggtggagctggagcccgtgaacgcccaggccagaaaggccttcagcagacagagagagaagatggagagaagaagaaagccccacctggacagaagaggcgccgtgatccagagcgtgcccggcttctgggccaacgtgatcgccaaccacccccagatgagcgccctgatcaccgacgaggacgaggacatgctgagctacatggtgagcctggaggtgggcgaggagaagcaccccgtgcacctgtgcaagatcatgctgttcttcagaagcaacccctacttccagaacaaggtgatcaccaaggagtacctggtgaacatcaccgagtacagagccagccacagcacccccatcgagtggtaccccgactacgaggtggaggcctacagaagaagacaccacaacagcagcctgaacttcttcaactggttcagcgaccacaacttcgccggcagcaacaagatcgccgagatcctgtgcaaggacctgtggagaaaccccctgcagtactacaagagaatgaagccccccgaggagggcaccgagaccagcggcgacagccagctgctgagctag

SEQ ID NO: 102201 - DNA, 927 bp, synthetic construct
  misc_feature 1..927: note = Description of Artificial Sequence: Synthetic coding sequence
  source 1..927: mol_type = other DNA
atgagacccgagggcagcctgacctacagagtgcccgagagactgagacagggcttctgcggcgtgggcagagccgcccaggccctggtgtgcgccagcgccaaggagggcaccgccttcagaatggaggccgtgcaggagggcgccgccggcgtggagagcgagcaggccgccctgggcgaggaggccgtgctgctgctggacgacatcatggccgaggtggaggtggtggccgaggaggagggcctggtggagagaagagaggaggcccagagagcccagcaggccgtgcccggccccggccccatgacccccgagagcgcccccgaggagctgctggccgtgcaggtggagctggagcccgtgaacgcccaggccagaaaggccttcagcagacagagagagaagatggagagaagaagaaagccccacctggacagaagaggcgccgtgatccagagcgtgcccggcttctgggccaacgtgatcgccaaccacccccagatgagcgccctgatcaccgacgaggacgaggacatgctgagctacatggtgagcctggaggtgggcgaggagaagcaccccgtgcacctgtgcaagatcatgctgttcttcagaagcaacccctacttccagaacaaggtgatcaccaaggagtacctggtgaacatcaccgagtacagagccagccacagcacccccatcgagtggtaccccgactacgaggtggaggcctacagaagaagacaccacaacagcagcctgaacttcttcaactggttcagcgaccacaacttcgccggcagcaacaagatcgccgagatcctgtgcaaggacctgtggagaaaccccctgcagtactacaagagaatgaagccccccgaggagggcaccgagaccagcggcgacagccagctgctgagctag

SEQ ID NO: 102202 - DNA, 2097 bp, synthetic construct
  misc_feature 1..2097: note = Description of Artificial Sequence: Synthetic coding sequence
  source 1..2097: mol_type = other DNA
atgatgagaagcagaagcaagagccccagaagacccagccccaccgccagaggcgccaactgcgacgtggagctgctgaagaccaccaccagagacagagaggagctgaagtgcatgctggagaagtacgagagacacctggccgagatccagggcaacgtgaaggtgctgaagagcgagagagacaagatcttcctgctgtacgagcaggcccaggaggagatcaccagactgagaagagagatgatgaagagctgcaagagccccaagagcaccaccgcccacgccatcctgagaagagtggagaccgagagagacgtggccttcaccgacctgagaagaatgaccaccgagagagacagcctgagagagagactgaagatcgcccaggagaccgccttcaacgagaaggcccacctggagcagagaatcgaggagctggagtgcaccgtgcacaacctggacgacgagagaatggagcagatgagcaacatgaccctgatgaaggagaccatcagcaccgtggagaaggagatgaagagcctggccagaaaggccatggacaccgagagcgagctgggcagacagaaggccgagaacaacagcctgagactgctgtacgagaacaccgagaaggacctgagcgacacccagagacacctggccaagaagaagtacgagctgcagctgacccaggagaagatcatgtgcctggacgagaagatcgacaacttcaccagacagaacatcgcccagagagaggagatcagcatcctgggcggcaccctgaacgacctggccaaggagaaggagtgcctgcaggcctgcctggacaagaagagcgagaacatcgccagcctgggcgagagcctggccatgaaggagaagaccatcagcggcatgaagaacatcatcgccgagatggagcaggccagcagacagtgcaccgaggccctgatcgtgtgcgagcaggacgtgagcagaatgagaagacagctggacgagaccaacgacgagctggcccagatcgccagagagagagacatcctggcccacgacaacgacaacctgcaggagcagttcgccaaggccaagcaggagaaccaggccctgagcaagaagctgaacgacacccacaacgagctgaacgacatcaagcagaaggtgcaggacaccaacctggaggtgaacaagctgaagaacatcctgaagagcgaggagagcgagaacagacagatgatggagcagctgagaaaggccaacgaggacgccgagaactgggagaacaaggccagacagagcgaggccgacaacaacaccctgaagctggagctgatcaccgccgaggccgagggcaacagactgaaggagaaggtggacagcctgaacagagaggtggagcagcacctgaacgccgagagaagctacaagagccagatcagcaccctgcacaagagcgtggtgaagatggaggaggagctgcagaaggtgcagttcgagaaggtgagcgccctggccgacctgagcagcaccagagagctgtgcatcaagctggacagcagcaaggagctgctgaacagacagctggtggccaaggaccaggagatcgagatgagagagaacgagctggacagcgcccacagcgagatcgagctgctgagaagccagatggccaacgagagaatcagcatgcagaacctggaggccctgctggtggccaacagagacaaggagtaccagagccagatcgccctgcaggagaaggagagcgagatccagctgctgaaggagcacctgtgcctggccgagaacaagatggccatccagagcagagacgtggcccagttcagaaacgtggtgacccagctggaggccgacctggacatcaccaagagacagctgggcaccgagagattcgagagagagagagccgtgcaggagctgagaagacagaactacagcagcaacgcctaccacatgagcagcaccatgaagcccaacaccaagtgccacagccccgagagagcccaccacagaagccccgacagaggcctggacagaagcctggaggagaacctgtgctacagagacttctag

SEQ ID NO: 102203 - DNA, 2073 bp, synthetic construct
  misc_feature 1..2073: note = Description of Artificial Sequence: Synthetic coding sequence
  source 1..2073: mol_type = other DNA
atgatgagaagcagaagcaagagccccagaagacccagccccaccgccagaggcgccaactgcgacgtggagctgctgaagaccaccaccagagacagagaggagctgaagtgcatgctggagaagtacgagagacacctggccgagatccagggcaacgtgaaggtgctgaagagcgagagagacaagatcttcctgctgtacgagcaggcccaggaggagatcaccagactgagaagagagatgatgaagagctgcaagagccccaagagcaccaccgcccacgccatcctgagaagagtggagaccgagagagacgtggccttcaccgacctgagaagaatgaccaccgagagagacagcctgagagagagactgaagatcgcccaggagaccgccttcaacgagaaggcccacctggagcagagaatcgaggagctggagtgcaccgtgcacaacctggacgacgagagaatggagcagatgagcaacatgaccctgatgaaggagaccatcagcaccgtggagaaggagatgaagagcctggccagaaaggccatggacaccgagagcgagctgggcagacagaaggccgagaacaacagcctgagactgctgtacgagaacaccgagaaggacctgagcgacacccagagacacctggccaagaagaagtacgagctgcagctgacccaggagaagatcatgtgcctggacgagaagatcgacaacttcaccagacagaacatcgcccagagagaggagatcagcatcctgggcggcaccctgaacgacctggccaaggagaaggagtgcctgcaggcctgcctggacaagaagagcgagaacatcgccagcctgggcgagagcctggccatgaaggagaagaccatcagcggcatgaagaacatcatcgccgagatggagcaggccagcagacagtgcaccgaggccctgatcgtgtgcgagcaggacgtgagcagaatgagaagacagctggacgagaccaacgacgagctggcccagatcgccagagagagagacatcctggcccacgacaacgacaacctgcaggagcagttcgccaaggccaagcaggagaaccaggccctgagcaagaagctgaacgacacccacaacgagctgaacgacatcaagcagaaggtgcaggacaccaacctggaggtgaacaagctgaagaacatcctgaagagcgaggagagcgagaacagacagatgatggagcagctgagaaaggccaacgaggacgccgagaactgggagaacaaggccagacagagcgaggccgacaacaacaccctgaagctggagctgatcaccgccgaggccgagggcaacagactgaaggagaaggtggacagcctgaacagagaggtggagcagcacctgaacgccgagagaagctacaagagccagatcagcaccctgcacaagagcgtggtgaagatggaggaggagctgcagaaggtgcagttcgagaaggtgagcgccctggccgacctgagcagcaccagagagctgtgcatcaagctggacagcagcaaggagctgctgaacagacagctggtggccaaggaccaggagatcgagatgagagagaacgagctggacagcgcccacagcgagatcgagctgctgagaagccagatggccaacgagagaatcagcatgcagaacctggaggccctgctggtggccaacagagacaaggagtaccagagccagatcgccctgcaggagaaggagagcgagatccagctgctgaaggagcacctgtgcctggccgagaacaagatggccatccagagcagagacgtggcccagttcagaaacgtggtgacccagctggaggccgacctggacatcaccaagagacagctgggcaccgagagattcgagagagagagagccgtgcaggagctgagaagacagaactacagcagcaacgcctaccacatgagcagcaccatgaagcccaacaccaagtgccacagccccgagagagcccaccacagaagccccgacagaggcctggacagaagcctggagtag

SEQ ID NO: 102204 - DNA, 2097 bp, synthetic construct; identical to SEQ ID NO: 102202
  misc_feature 1..2097: note = Description of Artificial Sequence: Synthetic coding sequence
  source 1..2097: mol_type = other DNA

SEQ ID NO: 102205 - DNA, 2097 bp, synthetic construct; identical to SEQ ID NO: 102202
  misc_feature 1..2097: note = Description of Artificial Sequence: Synthetic coding sequence
  source 1..2097: mol_type = other DNA

SEQ ID NO: 102206 - DNA, 2097 bp, synthetic construct; identical to SEQ ID NO: 102202
  misc_feature 1..2097: note = Description of Artificial Sequence: Synthetic coding sequence
  source 1..2097: mol_type = other DNA

SEQ ID NO: 102207 - DNA, 894 bp, synthetic construct
  misc_feature 1..894: note = Description of Artificial Sequence: Synthetic coding sequence
  source 1..894: mol_type = other DNA
atgatgagaagcagaagcaagagccccagaagacccagccccaccgccagaggcgccaactgcgacgtggagctgctgaagaccaccaccagagacagagaggagctgaagtgcatgctggagaagtacgagagacacctggccgagatccagggcaacgtgaaggtgctgaagagcgagagagacaagatcttcctgctgtacgagcaggcccaggaggagatcaccagactgagaagagagatgatgaagagctgcaagagccccaagagcaccaccgcccacgccatcctgagaagagtggagaccgagagagacgtggccttcaccgacctgagaagaatgaccaccgagagagacagcctgagagagagactgaagatcgcccaggagaccgccttcaacgagaaggcccacctggagcagagaatcgaggagctggagtgcaccgtgcacaacctggacgacgagagaatggagcagatgagcaacatgaccctgatgaaggagaccatcagcaccgtggagaaggagatgaagagcctggccagaaaggccatggacaccgagagcgagctgggcagacagaaggccgagaacaacagcctgagactgctgtacgagaacaccgagaaggacctgagcgacacccagagacacctggccaagaagaagtacgagctgcagctgacccaggagaagatcatgtgcctggacgagaagatcgacaacttcaccagacagaacatcgcccagagagaggagatcagcatcctgggcggcaccctgaacgacctggccaaggagaaggagtgcctgcaggcctgcctggacaagaagagcgagaacatcgccagcctgggcgagagcctggccatgaagaccgtgtactag

SEQ ID NO: 102208 - DNA, 1881 bp, synthetic construct
  misc_feature 1..1881: note = Description of Artificial Sequence: Synthetic coding sequence
  source 1..1881: mol_type = other DNA
atggccggcgagagaccccccctgagaggccccggccccggccccggcgaggtgcccggcgagggcccccccggccccggcggcaccggcggcggccccggcagaggcagacccagcagctacagagccctgagaagcgccgtgagcagcctggccagagtggacgacttccactgcgccgagaagatcggcgccggcttcttcagcgaggtgtacaaggtgagacacagacagagcggccaggtgatggtgctgaagatgaacaagctgcccagcaacagaggcaacaccctgagagaggtgcagctgatgaacagactgagacaccccaacatcctgagattcatgggcgtgtgcgtgcaccagggccagctgcacgccctgaccgagtacatgaacggcggcaccctggagcagctgctgagcagccccgagcccctgagctggcccgtgagactgcacctggccctggacatcgccagaggcctgagatacctgcacagcaagggcgtgttccacagagacctgaccagcaagaactgcctggtgagaagagaggacagaggcttcaccgccgtggtgggcgacttcggcctggccgagaagatccccgtgtacagagagggcgccagaaaggagcccctggccgtggtgggcagcccctactggatggcccccgaggtgctgagaggcgagctgtacgacgagaaggccgacgtgttcgccttcggcatcgtgctgtgcgagctgatcgccagagtgcccgccgaccccgactacctgcccagaaccgaggacttcggcctggacgtgcccgccttcagaaccctggtgggcgacgactgccccctgcccttcctgctgctggccatccactgctgcaacctggagcccagcaccagagcccccttcaccgagatcacccagcacctggagtggatcctggagcagctgcccgagcccgcccccctgaccagaaccgccctgacccacaaccagggcagcgtggccagaggcggccccagcgccaccctgcccagacccgaccccagactgagcagaagcagaagcgacctgttcctgccccccagccccgagagcccccccaactggggcgacaacctgaccagagtgaaccccttcagcctgagagaggacctgagaggcggcaagatcaagctgctggacacccccagcaagcccgtgctgcccctggtgccccccagccccttccccagcacccagctgcccctggtgaccacccccgagaccctggtgcagcccggcacccccgccagaagatgcagaagcctgcccagcagccccgagctgcccagaagaatggagaccgccctgcccggccccggcccccccgccgtgggccccagcgccgaggagaagatggagtgcgagggcagcagccccgagcccgagccccccggccccgccccccagctgcccctggccgtggccaccgacaacttcatcagcacctgcagcagcgccagccagccctggagccccagaagcggccccgtgctgaacaacaacccccccgccgtggtggtgaacagcccccagggctgggccggcgagccctggaacagagcccagcacagcctgcccagagccgccgccctggagagaaccgagcccagccccccccccagcgcccccagagagcccgacgagggcctgccctgccccggctgctgcctgggccccttcagcttcggcttcctgagcatgtgccccagacccacccccgccgtggccagatacagaaacctgaactgcgaggccggcagcctgctgtgccacagaggccaccacgccaagccccccacccccagcctgcagctgcccggcgccagaagctag

SEQ ID NO: 102209 - DNA, 474 bp, synthetic construct
  misc_feature 1..474: note = Description of Artificial Sequence: Synthetic coding sequence
  source 1..474: mol_type = other DNA
agcgccagagccgccgccctgagcagaaacctgcagggccagagacccctgcccctggccgtggccaccgacaacttcatcagcacctgcagcagcgccagccagccctggagccccagaagcggccccgtgctgaacaacaacccccccgccgtggtggtgaacagcccccagggctgggccggcgagccctggaacagagcccagcacagcctgcccagagccgccgccctggagagaaccgagcccagccccccccccagcgcccccagagagcccgacgagggcctgccctgccccggctgctgcctgggccccttcagcttcggcttcctgagcatgtgccccagacccacccccgccgtggccagatacagaaacctgaactgcgaggccggcagcctgctgtgccacagaggccaccacgccaagccccccacccccagcctgcagctgcccggcgccagaagctag

SEQ ID NO: 102210 - DNA, 1077 bp, synthetic construct
  misc_feature 1..1077: note = Description of Artificial Sequence: Synthetic coding sequence
  source 1..1077: mol_type = other DNA
atggacgacgccaccgtgctgagaaagaagggctacatcgtgggcatcaacctgggcaagggcagctacgccaaggtgaagagcgcctacagcgagagactgaagttcaacgtggccgtgaagatcatcgacagaaagaagacccccaccgacttcgtggagagattcctgcccagagagatggacatcctggccaccgtgaaccacggcagcatcatcaagacctacgagatcttcgagaccagcgacggcagaatctacatcatcatggagctgggcgtgcagggcgacctgctggagttcatcaagtgccagggcgccctgcacgaggacgtggccagaaagatgttcagacagctgagcagcgccgtgaagtactgccacgacctggacatcgtgcacagagacctgaagtgcgagaacctgctgctggacaaggacttcaacatcaagctgagcgacttcggcttcagcaagagatgcctgagagacagcaacggcagaatcatcctgagcaagaccttctgcggcagcgccgcctacgccgcccccgaggtgctgcagagcatcccctaccagcccaaggtgtacgacatctggagcctgggcgtgatcctgtacatcatggtgtgcggcagcatgccctacgacgacagcgacatcagaaagatgctgagaatccagaaggagcacagagtggacttccccagaagcaagaacctgacctgcgagtgcaaggacctgatctacagaatgctgcagcccgacgtgagccagagactgcacatcgacgagatcctgagccacagctggctgcagccccccaagcccaaggccaccagcagcgccagcttcaagagagagggcgagggcaagtacagagccgagtgcaagctggacaccaagaccggcctgagacccgaccacagacccgaccacaagctgggcgccaagacccagcacagactgctggtggtgcccgagaacgagaacagaatggaggacagactggccgagaccagcagagccaaggaccaccacatcagcggcgccgaggtgggcaaggccagcacctag

SEQ ID NO: 102211 - DNA, 807 bp, synthetic construct
  misc_feature 1..807: note = Description of Artificial Sequence: Synthetic coding sequence
  source 1..807: mol_type = other DNA
atggaggacttcctgctgagcaacggctaccagctgggcaagaccatcggcgagggcacctacagcaaggtgaaggaggccttcagcaagaagcaccagagaaaggtggccatcaaggtgatcgacaagatgggcggccccgaggagttcatccagagattcctgcccagagagctgcagatcgtgagaaccctggaccacaagaacatcatccaggtgtacgagatgctggagagcgccgacggcaagatctgcctggtgatggagctggccgagggcggcgacgtgttcgactgcgtgctgaacggcggccccctgcccgagagcagagccaaggccctgttcagacagatggtggaggccatcagatactgccacggctgcggcgtggcccacagagacctgaagtgcgagaacgccctgctgcagggcttcaacctgaagctgaccgacttcggcttcgccaaggtgctgcccaagagccacagagagctgagccagaccttctgcggcagcaccgcctacgccgcccccgaggtgctgcagggcatcccccacgacagcaagaagggcgacgtgtggagcatgggcgtggtgctgtacgtgatgctgtgcgccagcctgcccttcgacgacaccgacatccccaagatgctgtggcagcagcagaagggcgtgagcttccccacccacctgagcatcagcgccgactgccaggacctgctgaagagactgctggagcccgacatgatcctgagacccagcatcgaggaggtgagctggcacccctggctggccagcacctag

SEQ ID NO: 102212 - DNA, 987 bp, synthetic construct
  misc_feature 1..987: note = Description of Artificial Sequence: Synthetic coding sequence
  source 1..987: mol_type = other DNA
atgggcaagggcgacgtgctggaggccgcccccaccaccaccgcctaccacagcctgatggacgagtacggctacgaggtgggcaaggccatcggccacggcagctacggcagcgtgtacgaggccttctacaccaagcagaaggtgatggtggccgtgaagatcatcagcaagaagaaggccagcgacgactacctgaacaagttcctgcccagagagatccaggtgatgaaggtgctgagacacaagtacctgatcaacttctacagagccatcgagagcaccagcagagtgtacatcatcctggagctggcccagggcggcgacgtgctggagtggatccagagatacggcgcctgcagcgagcccctggccggcaagtggttcagccagctgaccctgggcatcgcctacctgcacagcaagagcatcgtgcacagagacctgaagctggagaacctgctgctggacaagtgggagaacgtgaagatcagcgacttcggcttcgccaagatggtgcccagcaaccagcccgtgggctgcagccccagctacagacaggtgaactgcttcagccacctgagccagacctactgcggcagcttcgcctacgcctgccccgagatcctgagaggcctgccctacaaccccttcctgagcgacacctggagcatgggcgtgatcctgtacaccctggtggtggcccacctgcccttcgacgacaccaacctgaagaagctgctgagagagacccagaaggaggtgaccttccccgccaaccacaccatcagccaggagtgcaagaacctgatcctgcagatgctgagacaggccaccaagagagccaccatcctggacatcatcaaggacagctgggtgctgaagttccagcccgagcagcccacccacgagatcagactgctggaggccatgtgccagctgcacaacaccaccaagcagcaccagagcctgcagatcaccacctag

SEQ ID NO: 102213 - DNA, 1017 bp, synthetic construct
  misc_feature 1..1017: note = Description of Artificial Sequence: Synthetic coding sequence
  source 1..1017: mol_type = other DNA
atgggcaagggcgacgtgctggaggccgcccccaccaccaccgcctaccacagcctgatggacgagtacggctacgaggtgggcaaggccatcggccacggcagctacggcagcgtgtacgaggccttctacaccaagcagaaggtgatggtggccgtgaagatcatcagcaagaagaaggccagcgacgactacctgaacaagttcctgcccagagagatccaggtgatgaaggtgctgagacacaagtacctgatcaacttctacagagccatcgagagcaccagcagagtgtacatcatcctggagctggcccagggcggcgacgtgctggagtggatccagagatacggcgcctgcagcgagcccctggccggcaagtggttcagccagctgaccctgggcatcgcctacctgcacagcaagagcatcgtgcacagactgatgcccagcctgagcgccgccggcagagacctgaagctggagaacctgctgctggacaagtgggagaacgtgaagatcagcgacttcggcttcgccaagatggtgcccagcaaccagcccgtgggctgcagccccagctacagacaggtgaactgcttcagccacctgagccagacctactgcggcagcttcgcctacgcctgccccgagatcctgagaggcctgccctacaaccccttcctgagcgacacctggagcatgggcgtgatcctgtacaccctggtggtggcccacctgcccttcgacgacaccaacctgaagaagctgctgagagagacccagaaggaggtgaccttccccgccaaccacaccatcagccaggagtgcaagaacctgatcctgcagatgctgagacaggccaccaagagagccaccatcctggacatcatcaaggacagctgggtgctgaagttccagcccgagcagcccacccacgagatcagactgctggaggccatgtgccagctgcacaacaccaccaagcagcaccagagcctgcagatcaccacctag

SEQ ID NO: 102214 - DNA, 759 bp, synthetic construct
  misc_feature 1..759: note = Description of Artificial Sequence: Synthetic coding sequence
  source 1..759: mol_type = other DNA
atgaaggtgctgagacacaagtacctgatcaacttctacagagccatcgagagcaccagcagagtgtacatcatcctggagctggcccagggcggcgacgtgctggagtggatccagagatacggcgcctgcagcgagcccctggccggcaagtggttcagccagctgaccctgggcatcgcctacctgcacagcaagagcatcgtgcacagagacctgaagctggagaacctgctgctggacaagtgggagaacgtgaagatcagcgacttcggcttcgccaagatggtgcccagcaaccagcccgtgggctgcagccccagctacagacaggtgaactgcttcagccacctgagccagacctactgcggcagcttcgcctacgcctgccccgagatcctgagaggcctgccctacaaccccttcctgagcgacacctggagcatgggcgtgatcctgtacaccctggtggtggcccacctgcccttcgacgacaccaacctgaagaagctgctgagagagacccagaaggaggtgaccttccccgccaaccacaccatcagccaggagtgcaagaacctgatcctgcagatgctgagacaggccaccaagagagccaccatcctggacatcatcaaggacagctgggtgctgaagttccagcccgagcagcccacccacgagatcagactgctggaggccatgtgccagctgcacaacaccaccaagcagcaccagagcctgcagatcaccacctag

SEQ ID NO: 102215 - DNA, 822 bp, synthetic construct
  misc_feature 1..822: note = Description of Artificial Sequence: Synthetic coding sequence
  source 1..822: mol_type = other DNA
atgagcggcgacaagctgctgagcgagctgggctacaagctgggcagaaccatcggcgagggcagctacagcaaggtgaaggtggccaccagcaagaagtacaagggcaccgtggccatcaaggtggtggacagaagaagagccccccccgacttcgtgaacaagttcctgcccagagagctgagcatcctgagaggcgtgagacacccccacatcgtgcacgtgttcgagttcatcgaggtgtgcaacggcaagctgtacatcgtgatggaggccgccgccaccgacctgctgcaggccgtgcagagaaacggcagaatccccggcgtgcaggccagagacctgttcgcccagatcgccggcgccgtgagatacctgcacgaccaccacctggtgcacagagacctgaagtgcgagaacgtgctgctgagccccgacgagagaagagtgaagctgaccgacttcggcttcggcagacaggcccacggctaccccgacctgagcaccacctactgcggcagcgccgcctacgccagccccgaggtgctgctgggcatcccctacgaccccaagaagtacgacgtgtggagcatgggcgtggtgctgtacgtgatggtgaccggctgcatgcccttcgacgacagcgacatcgccggcctgcccagaagacagaagagaggcgtgctgtaccccgagggcctggagctgagcgagagatgcaaggccctgatcgccgagctgctgcagttcagccccagcgccagacccagcgccggccaggtggccagaaactgctggctgagagccggcgacagcggctag

SEQ ID NO: 102216 - DNA, 822 bp, synthetic construct; identical to SEQ ID NO: 102215
  misc_feature 1..822: note = Description of Artificial Sequence: Synthetic coding sequence
  source 1..822: mol_type = other DNA

SEQ ID NO: 102217 - DNA, 6411 bp, synthetic construct
  misc_feature 1..6411: note = Description of Artificial Sequence: Synthetic coding sequence
  source 1..6411: mol_type = other DNA
atgagcagaagcagacacgccagacccagcagactggtgagaaaggaggacgtgaacaagaagaagaagaacagccagctgagaaagaccaccaagggcgccaacaagaacgtggccagcgtgaagaccctgagccccggcaagctgaagcagctgatccaggagagagacgtgaagaagaagaccgagcccaagccccccgtgcccgtgagaagcctgctgaccagagccggcgccgccagaatgaacctggacagaaccgaggtgctgttccagaaccccgagagcctgacctgcaacggcttcaccatggccctgagaagcaccagcctgagcagaagactgagccagccccccctggtggtggccaagagcaagaaggtgcccctgagcaagggcctggagaagcagcacgactgcgactacaagatcctgcccgccctgggcgtgaagcacagcgagaacgacagcgtgcccatgcaggacacccaggtgctgcccgacatcgagaccctgatcggcgtgcagaaccccagcctgctgaagggcaagagccaggagaccacccagttctggagccagagagtggaggacagcaagatcaacatccccacccacagcggccccgccgccgagatcctgcccggccccctggagggcaccagatgcggcgagggcctgttcagcgaggagaccctgaacgacaccagcggcagccccaagatgttcgcccaggacaccgtgtgcgcccccttcccccagagagccacccccaaggtgaccagccagggcaaccccagcatccagctggaggagctgggcagcagagtggagagcctgaagctgagcgacagctacctggaccccatcaagagcgagcacgactgctaccccaccagcagcctgaacaaggtgatccccgacctgaacctgagaaactgcctggccctgggcggcagcaccagccccaccagcgtgatcaagttcctgctggccggcagcaagcaggccaccctgggcgccaagcccgaccaccaggaggccttcgaggccaccgccaaccagcaggaggtgagcgacaccaccagcttcctgggccaggccttcggcgccatcccccaccagtgggagctgcccggcgccgaccccgtgcacggcgaggccctgggcgagacccccgacctgcccgagatccccggcgccatccccgtgcagggcgaggtgttcggcaccatcctggaccagcaggagaccctgggcatgagcggcagcgtggtgcccgacctgcccgtgttcctgcccgtgccccccaaccccatcgccaccttcaacgcccccagcaagtggcccgagccccagagcaccgtgagctacggcctggccgtgcagggcgccatccagatcctgcccctgggcagcggccacaccccccagagcagcagcaacagcgagaagaacagcctgccccccgtgatggccatcagcaacgtggagaacgagaagcaggtgcacatcagcttcctgcccgccaacacccagggcttccccctggcccccgagagaggcctgttccacgccagcctgggcatcgcccagctgagccaggccggccccagcaagagcgacagaggcagcagccaggtgagcgtgaccagcaccgtgcacgtggtgaacaccaccgtggtgaccatgcccgtgcccatggtgagcaccagcagcagcagctacaccaccctgctgcccaccctggagaagaagaagagaaagagatgcggcgtgtgcgagccctgccagcagaagaccaactgcggcgagtgcacctactgcaagaacagaaagaacagccaccagatctgcaagaagagaaagtgcgaggagctgaagaagaagcccagcgtggtggtgcccctggaggtgatcaaggagaacaagagaccccagagagagaagaagcccaaggtgctgaaggccgacttcgacaacaagcccgtgaacggccccaagagcgagagcatggactacagcagatgcggccacggcgaggagcagaagctggagctgaacccccacaccgtggagaacgtgaccaagaacgaggacagcatgaccggcatcgaggtggagaagtggacccagaacaagaagagccagctgaccgaccacgtgaagggcgacttcagcgccaacgtgcccgaggccgagaagagcaagaacagcgaggtggacaagaagagaaccaagagccccaagctgttcgtgcagaccgtgagaaacggcatcaagcacgtgcactgcctgcccgccgagaccaacgtgagcttcaagaagttcaacatcgaggagttcggcaagaccctggagaacaacagctacaagttcctgaaggacaccgccaaccacaagaacgccatgagcagcgtggccaccgacatgagctgcgaccacctgaagggcagaagcaacgtgctggtgttccagcagcccggcttcaactgcagcagcatcccccacagcagccacagcatcatcaaccaccacgccagcatccacaacgagggcgaccagcccaagacccccgagaacatccccagcaaggagcccaaggacggcagccccgtgcagcccagcctgctgagcctgatgaaggacagaagactgaccctggagcaggtggtggccatcgaggccctgacccagctgagcgaggcccccagcgagaacagcagccccagcaagagcgagaaggacgaggagagcgagcagagaaccgccagcctgctgaacagctgcaaggccatcctgtacaccgtgagaaaggacctgcaggaccccaacctgcagggcgagccccccaagctgaaccactgccccagcctggagaagcagagcagctgcaacaccgtggtgttcaacggccagaccaccaccctgagcaacagccacatcaacagcgccaccaaccaggccagcaccaagagccacgagtacagcaaggtgaccaacagcctgagcctgttcatccccaagagcaacagcagcaagatcgacaccaacaagagcatcgcccagggcatcatcaccctggacaactgcagcaacgacctgcaccagctgccccccagaaacaacgaggtggagtactgcaaccagctgctggacagcagcaagaagctggacagcgacgacctgagctgccaggacgccacccacacccagatcgaggaggacgtggccacccagctgacccagctggccagcatcatcaagatcaactacatcaagcccgaggacaagaaggtggagagcacccccaccagcctggtgacctgcaacgtgcagcagaagtacaaccaggagaagggcaccatccagcagaagccccccagcagcgtgcacaacaaccacggcagcagcctgaccaagcagaagaaccccacccagaagaagaccaagagcacccccagcagagacagaagaaagaagaagcccaccgtggtgagctaccaggagaacgacagacagaagtgggagaagctgagctacatgtacggcaccatctgcgacatctggatcgccagcaagttccagaacttcggccagttctgcccccacgacttccccaccgtgttcggcaagatcagcagcagcaccaagatctggaagcccctggcccagaccagaagcatcatgcagcccaagaccgtgttcccccccctgacccagatcaagctgcagagataccccgagagcgccgaggagaaggtgaaggtggagcccctggacagcctgagcctgttccacctgaagaccgagagcaacggcaaggccttcaccgacaaggcctacaacagccaggtgcagctgaccgtgaacgccaaccagaaggcccaccccctgacccagcccagcagcccccccaaccagtgcgccaacgtgatggccggcgacgaccagatcagattccagcaggtggtgaaggagcagctgatgcaccagagactgcccaccctgcccggcatcagccacgagacccccctgcccgagagcgccctgaccctgagaaacgtgaacgtggtgtgcagcggcggcatcaccgtggtgagcaccaagagcgaggaggaggtgtgcagcagcagcttcggcaccagcgagttcagcaccgtggacagcgcccagaagaacttcaacgactacgccatgaacttcttcaccaaccccaccaagaacctggtgagcatcaccaaggacagcgagctgcccacctgcagctgcctggacagagtgatccagaaggacaagggcccctactacacccacctgggcgccggccccagcgtggccgccgtgagagagatcatggagaacagatacggccagaagggcaacgccatcagaatcgagatcgtggtgtacaccggcaaggagggcaagagcagccacggctgccccatcgccaagtgggtgctgagaagaagcagcgacgaggagaaggtgctgtgcctggtgagacagagaaccggccaccactgccccaccgccgtgatggtggtgctgatcatggtgtgggacggcatccccctgcccatggccgacagactgtacaccgagctgaccgagaacctgaagagctacaacggccaccccaccgacagaagatgcaccctgaacgagaacagaacctgcacctgccagggcatcgaccccgagacctgcggcgccagcttcagcttcggctgcagctggagcatgtacttcaacggctgcaagttcggcagaagccccagccccagaagattcagaatcgaccccagcagccccctgcacgagaagaacctggaggacaacctgcagagcctggccaccagactggcccccatctacaagcagtacgcccccgtggcctaccagaaccaggtggagtacgagaacgtggccagagagtgcagactgggcagcaaggagggcagacccttcagcggcgtgaccgcctgcctggacttctgcgcccacccccacagagacatccacaacatgaacaacggcagcaccgtggtgtgcaccctgaccagagaggacaacagaagcctgggcgtgatcccccaggacgagcagctgcacgtgctgcccctgtacaagctgagcgacaccgacgagttcggcagcaaggagggcatggaggccaagatcaagagcggcgccatcgaggtgctggcccccagaagaaagaagagaacctgcttcacccagcccgtgcccagaagcggcaagaagagagccgccatgatgaccgaggtgctggcccacaagatcagagccgtggagaagaagcccatccccagaatcaagagaaagaacaacagcaccaccaccaacaacagcaagcccagcagcctgcccaccctgggcagcaacaccgagaccgtgcagcccgaggtgaagagcgagaccgagccccacttcatcctgaagagcagcgacaacaccaagacctacagcctgatgcccagcgccccccaccccgtgaaggaggccagccccggcttcagctggagccccaagaccgccagcgccacccccgcccccctgaagaacgacgccaccgccagctgcggcttcagcgagagaagcagcaccccccactgcaccatgcccagcggcagactgagcggcgccaacgccgccgccgccgacggccccggcatcagccagctgggcgaggtggcccccctgcccaccctgagcgcccccgtgatggagcccctgatcaacagcgagcccagcaccggcgtgaccgagcccctgaccccccaccagcccaaccaccagcccagcttcctgaccagcccccaggacctggccagcagccccatggaggaggacgagcagcacagcgaggccgacgagccccccagcgacgagcccctgagcgacgaccccctgagccccgccgaggagaagctgccccacatcgacgagtactggagcgacagcgagcacatcttcctggacgccaacatcggcggcgtggccatcgcccccgcccacggcagcgtgctgatcgagtgcgccagaagagagctgcacgccaccacccccgtggagcaccccaacagaaaccaccccaccagactgagcctggtgttctaccagcacaagaacctgaacaagccccagcacggcttcgagctgaacaagatcaagttcgaggccaaggaggccaagaacaagaagatgaaggccagcgagcagaaggaccaggccgccaacgagggccccgagcagagcagcgaggtgaacgagctgaaccagatccccagccacaaggccctgaccctgacccacgacaacgtggtgaccgtgagcccctacgccctgacccacgtggccggcccctacaaccactgggtgtag

SEQ ID NO: 102218 - DNA, 330 bp, synthetic construct
  misc_feature 1..330: note = Description of Artificial Sequence: Synthetic coding sequence
  source 1..330: mol_type = other DNA
atggccgacagactgtacaccgagctgaccgagaacctgaagagctacaacggccaccccaccgacagaagatgcaccctgaacgagaacagaacctgcacctgccagggcatcgaccccgagacctgcggcgccagcttcagcttcggctgcagctggagcatgtacttcaacggctgcaagttcggcagaagccccagccccagaagattcagaatcgaccccagcagccccctgcacacctactacgagagaatcaccaagggcagaaaccccgagagaagatacatgaagcccgagagaatcagccccggccacgaggccatgtag

SEQ ID NO: 102219 - DNA, 726 bp, synthetic construct
  misc_feature 1..726: note = Description of Artificial Sequence: Synthetic coding sequence
  source 1..726: mol_type = other DNA
atgcagtgcttcagcttcatcaagaccatgatgatcctgttcaacctgctgatcttcctgtgcggcgccgccctgctggccgtgggcatctgggtgagcatcgacggcgccagcttcctgaagatcttcggccccctgagcagcagcgccatgcagttcgtgaacgtgggctacttcctgatcgccgccggcgtggtggtgttcgccctgggcttcctgggctgctacggcgccaagaccgagagcaagtgcgccctggtgaccttcttcttcatcctgctgctgatcttcatcgccgaggtggccgccgccgtggtggccctggtgtacaccaccatggccgagcacttcctgaccctgctggtggtgcccgccatcaagaaggactacggcagccaggaggacttcacccaggtgtggaacaccaccatgaagggcctgaagtgctgcggcttcaccaactacaccgacttcgaggacagcccctacttcaaggagaacagcgccttcccccccttctgctgcaacgacaacgtgaccaacaccgccaacgagacctgcaccaagcagaaggcccacgaccagaaggtggagggctgcttcaaccagctgctgtacgacatcagaaccaacgccgtgaccgtgggcggcgtggccgccggcatcggcggcctggagctggccgccatgatcgtgagcatgtacctgtactgcaacctgcagtag

SEQ ID NO: 102220 - DNA, 702 bp, synthetic construct
  misc_feature 1..702: note = Description of Artificial Sequence: Synthetic coding sequence
  source 1..702: mol_type = other DNA
atgagcagctacttcgtgaaccccaccttccccggcagcctgcccagcggccaggacagcttcctgggccagctgcccctgtaccaggccggctacgacgccctgagacccttccccgccagctacggcgccagcagcctgcccgacaagacctacaccagcccctgcttctaccagcagagcaacagcgtgctggcctgcaacagagccagctacgagtacggcgccagctgcttctacagcgacaaggacctgagcggcgccagccccagcggcagcggcaagcagagaggccccggcgactacctgcacttcagccccgagcagcagtacaagcccgacagcagcagcggccagggcaaggccctgcacgacgagggcgccgacagaaagtacaccagccccgtgtacccctggatgcagagaatgaacagctgcgccggcgccgtgtacggcagccacggcagaagaggcagacagacctacaccagataccagaccctggagctggagaaggagttccacttcaacagatacctgaccagaagaagaagaatcgagatcgccaacgccctgtgcctgaccgagagacagatcaagatctggttccagaacagaagaatgaagtggaagaaggagaacaagctgatcaacagcacccagcccagcggcgaggacagcgaggccaaggccggcgagtag

SEQ ID NO: 102221 - DNA, 918 bp, synthetic construct; identical to SEQ ID NO: 84680
  misc_feature 1..918: note = Description of Artificial Sequence: Synthetic coding sequence
  source 1..918: mol_type = other DNA

SEQ ID NO: 102222 - DNA, 339 bp, synthetic construct
  misc_feature 1..339: note = Description of Artificial Sequence: Synthetic coding sequence
  source 1..339: mol_type = other DNA
atggccagagaggacagcgtgaagtgcctgagatgcctgctgtacgccctgaacctgctgttctggctgatgagcatcagcgtgctggccgtgagcgcctggatgagagactacctgaacaacgtgctgaccctgaccgccgagaccagagtggaggaggccgtgatcctgacctacttccccgtggtgcaccccgtgatgatcgccgtgtgctgcttcctgatcatcgtgggcatgctgggctactgcggcaccgtgaagagaaacctgctgctgctggcctggtacttcggcagcctgctggtgatcttctgcgtggagctggcctgcggcgtgtag

SEQ ID NO: 102223 - DNA, 288 bp, synthetic construct
  misc_feature 1..288: note = Description of Artificial Sequence: Synthetic coding sequence
  source 1..288: mol_type = other DNA
atggccagagaggacagcgtgaagtgcctgagatgcctgctgtacgccctgaacctgctgttctggctgatgagcatcagcgtgctggccgtgagcgcctggatgagagactacctgaacaacgtgctgaccctgaccgccgagaccagagtggaggaggccgtgatcctgacctacttccccgtggtgcaccccgtgatgatcgccgtgtgctgcttcctgatcatcgtgggcatgctgggctactgcggcaccgtgaagagaaacctgctgctgctggcctggtag

SEQ ID NO: 102224 - DNA, 363 bp, synthetic construct
  misc_feature 1..363: note = Description of Artificial Sequence: Synthetic coding sequence
  source 1..363: mol_type = other DNA
atggccagagaggacagcgtgaagtgcctgagatgcctgctgtacgccctgaacctgctgttctggctgatgagcatcagcgtgctggccgtgagcgcctggatgagagactacctgaacaacgtgctgaccctgaccgccgagaccagagtggaggaggccgtgatcctgacctacttccccgtggtgcaccccgtgatgatcgccgtgtgctgcttcctgatcatcgtgggcatgctgggctactgcggcaccgtgaagagaaacctgctgctgctggcctggtacttcggcagcctgctggtgatcttctgcgtggagctggcctgcggcgtgtggacctacgagcaggagctgatgtag

SEQ ID NO: 102225 - DNA, 444 bp, synthetic construct
  misc_feature 1..444: note = Description of Artificial Sequence: Synthetic coding sequence
  source 1..444: mol_type = other DNA
atggccagagaggacagcgtgaagtgcctgagatgcctgctgtacgccctgaacctgctgttctggctgatgagcatcagcgtgctggccgtgagcgcctggatgagagactacctgaacaacgtgctgaccctgaccgccgagaccagagtggaggaggccgtgatcctgacctacttccccgtggtgcaccccgtgatgatcgccgtgtgctgcttcctgatcatcgtgggcatgctgggctactgcggcaccgtgaagagaaacctgctgctgctggcctggtacttcggcagcctgctggtgatcttctgcgtggagctggcctgcggcgtgtggacctacgagcaggagctgatggtgcccgtgcagtggagcgacatggtgaccctgaaggccagaatgaccaactacggcctgcccagatacagatggctgacctag

SEQ ID NO: 102226 - DNA, 885 bp, synthetic construct
  misc_feature 1..885: note = Description of Artificial Sequence: Synthetic coding sequence
  source 1..885: mol_type = other DNA
atgcccagaggcgacagcgagcaggtgagatactgcgccagattcagctacctgtggctgaagttcagcctgatcatctacagcaccgtgttctggctgatcggcgccctggtgctgagcgtgggcatctacgccgaggtggagagacagaagtacaagaccctggagagcgccttcctggcccccgccatcatcctgatcctgctgggcgtggtgatgttcatggtgagcttcatcggcgtgctggccagcctgagagacaacctgtacctgctgcaggccttcatgtacatcctgggcatctgcctgatcatggagctgatcggcggcgtggtggccctgaccttcagaaaccagaccatcgacttcctgaacgacaacatcagaagaggcatcgagaactactacgacgacctggacttcaagaacatcatggacttcgtgcagaagaagttcaagtgctgcggcggcgaggactacagagactggagcaagaaccagtaccacgactgcagcgcccccggccccctggcctgcggcgtgccctacacctgctgcatcagaaacaccaccgaggtggtgaacaccatgtgcggctacaagaccatcgacaaggagagattcagcgtgcaggacgtgatctacgtgagaggctgcaccaacgccgtgatcatctggttcatggacaactacaccatcatggccggcatcctgctgggcatcctgctgccccagttcctgggcgtgctgctgaccctgctgtacatcaccagagtggaggacatcatcatggagcacagcgtgaccgacggcctgctgggccccggcgccaagcccagcgtggaggccgccggcaccggctgctgcctgtgctaccccaactag

SEQ ID NO: 102227 - DNA, 582 bp, synthetic construct
  misc_feature 1..582: note = Description of Artificial Sequence: Synthetic coding sequence
  source 1..582: mol_type = other DNA
atgggcagattcagaggcggcctgagatgcatcaagtacctgctgctgggcttcaacctgctgttctggctggccggcagcgccgtgatcgccttcggcctgtggttcagattcggcggcgccatcaaggagctgagcagcgaggacaagagccccgagtacttctacgtgggcctgtacgtgctggtgggcgccggcgccctgatgatggccgtgggcttcttcggctgctgcggcgccatgagagagagccagtgcgtgctgggcagcttcttcacctgcctgctggtgatcttcgccgccgaggtgaccaccggcgtgttcgccttcatcggcaagggcgtggccatcagacacgtgcagaccatgtacgaggaggcctacaacgactacctgaaggacagaggcaagggcaacggcaccctgatcaccttccacagcaccttccagtgctgcggcaaggagagcagcgagcaggtgcagcccacctgccccaaggagctgctgggccacaagatcttcggcatgatcttcagcatggtgctgtgctgcgccatcagaaacagcagagacgtgatctag

SEQ ID NO: 102228 - DNA, 591 bp, synthetic construct
  misc_feature 1..591: note = Description of Artificial Sequence: Synthetic coding sequence
  source 1..591: mol_type = other DNA
atgggcagattcagaggcggcctgagatgcatcaagtacctgctgctgggcttcaacctgctgttctggctggccggcagcgccgtgatcgccttcggcctgtggttcagattcggcggcgccatcaaggagctgagcagcgaggacaagagccccgagtacttctacgtgggcctgtacgtgctggtgggcgccggcgccctgatgatggccgtgggcttcttcggctgctgcggcgccatgagagagagccagtgcgtgctgggcagcgccatcagacacgtgcagaccatgtacgaggaggcctacaacgactacctgaaggacagaggcaagggcaacggcaccctgatcaccttccacagcaccttccagtgctgcggcaaggagagcagcgagcaggtgcagcccacctgccccaaggagctgctgggccacaagaactgcatcgacgagatcgagaccatcatcagcgtgaagctgcagctgatcggcatcgtgggcatcggcatcgccggcctgaccatcttcggcatgatcttcagcatggtgctgtgctgcgccatcagaaacagcagagacgtgatctag

SEQ ID NO: 102229 - DNA, 666 bp, synthetic construct
  misc_feature 1..666: note = Description of Artificial Sequence: Synthetic coding sequence
  source 1..666: mol_type = other DNA
atgggcagattcagaggcggcctgagatgcatcaagtacctgctgctgggcttcaacctgctgttctggctggccggcagcgccgtgatcgccttcggcctgtggttcagattcggcggcgccatcaaggagctgagcagcgaggacaagagccccgagtacttctacgtgggcctgtacgtgctggtgggcgccggcgccctgatgatggccgtgggcttcttcggctgctgcggcgccatgagagagagccagtgcgtgctgggcagcttcttcacctgcctgctggtgatcttcgccgccgaggtgaccaccggcgtgttcgccttcatcggcaagggcgtggccatcagacacgtgcagaccatgtacgaggaggcctacaacgactacctgaaggacagaggcaagggcaacggcaccctgatcaccttccacagcaccttccagtgctgcggcaaggagagcagcgagcaggtgcagcccacctgccccaaggagctgctgggccacaagaactgcatcgacgagatcgagaccatcatcagcgtgaagctgcagctgatcggcatcgtgggcatcggcatcgccggcctgaccatcttcggcatgatcttcagcatggtgctgtgctgcgccatcagaaacagcagagacgtgatctag

SEQ ID NO: 102230 - DNA, 564 bp, synthetic construct
  misc_feature 1..564: note = Description of Artificial Sequence: Synthetic coding sequence
  source 1..564: mol_type = other DNA
ggcctgagatgcatcaagtacctgctgctgggcttcaacctgctgttctggctggccggcagcgccgtgatcgccttcggcctgtggttcagattcggcggcgccatcaaggagctgagcagcgaggacaagagccccgagtacttctacgtgggcctgtacgtgctggtgggcgccggcgccctgatgatggccgtgggcttcttcggctgctgcggcgccatgagagagagccagtgcgtgctgggcagcttcttcacctgcctgctggtgatcttcgccgccgaggtgaccaccggcgtgttcgccttcatcggcaagggcgtggccatcagacacgtgcagaccatgtacgaggaggcctacaacgactacctgaaggacagaggcaagggcaacggcaccctgatcaccttccacagcaccttccagtgctgcggcaaggagagcagcgagcaggtgcagcccacctgccccaaggagctgctgggccacaagatcttcggcatgatcttcagcatggtgctgtgctgcgccatcagaaacagcagagacgtgatctag

SEQ ID NO: 102231 - DNA, 762 bp, synthetic construct
  misc_feature 1..762: note = Description of Artificial Sequence: Synthetic coding sequence
  source 1..762: mol_type = other DNA
atgggccagtgcggcatcaccagcagcaagaccgtgctggtgttcctgaacctgatcttctggggcgccgccggcatcctgtgctacgtgggcgcctacgtgttcatcacctacgacgactacgaccacttcttcgaggacgtgtacaccctgatccccgccgtggtgatcatcgccgtgggcgccctgctgttcatcatcggcctgatcggctgctgcgccaccatcagagagagcagatgcggcctggccaccttcgtgatcatcctgctgctggtgttcgtgaccgaggtggtggtggtggtgctgggctacgtgtacagagccaaggtggagaacgaggtggacagaagcatccagaaggtgtacaagacctacaacggcaccaaccccgacgccgccagcagagccatcgactacgtgcagagacagctgcactgctgcggcatccacaactacagcgactgggagaacaccgactggttcaaggagaccaagaaccagagcgtgcccctgagctgctgcagagagaccgccagcaactgcaacggcagcctggcccaccccagcgacctgtacgccgagggctgcgaggccctggtggtgaagaagctgcaggagatcatgatgcacgtgatctgggccgccctggccttcgccgccatccagctgctgggcatgctgtgcgcctgcatcgtgctgtgcagaagaagcagagaccccgcctacgagctgctgatcaccggcggcacctacgcctag

SEQ ID NO: 102232 - DNA, 687 bp, synthetic construct
  misc_feature 1..687: note = Description of Artificial Sequence: Synthetic coding sequence
  source 1..687: mol_type = other DNA
atgggccagtgcggcatcaccagcagcaagaccgtgctggtgttcctgaacctgatcttctggggcgccgccggcatcctgtgctacgtgggcgcctacgtgttcatcacctacgacgactacgaccacttcttcgaggacgtgtacaccctgatccccgccgtggtgatcatcgccgtgggcgccctgctgttcatcatcggcctgatcggctgctgcgccaccatcagagagagcagatgcggcctggccaccgtggagaacgaggtggacagaagcatccagaaggtgtacaagacctacaacggcaccaaccccgacgccgccagcagagccatcgactacgtgcagagacagctgcactgctgcggcatccacaactacagcgactgggagaacaccgactggttcaaggagaccaagaaccagagcgtgcccctgagctgctgcagagagaccgccagcaactgcaacggcagcctggcccaccccagcgacctgtacgccgagggctgcgaggccctggtggtgaagaagctgcaggagatcatgatgcacgtgatctgggccgccctggccttcgccgccatccagctgctgggcatgctgtgcgcctgcatcgtgctgtgcagaagaagcagagaccccgcctacgagctgctgatcaccggcggcacctacgcctag

SEQ ID NO: 102233 - DNA, 651 bp, synthetic construct
  misc_feature 1..651: note = Description of Artificial Sequence: Synthetic coding sequence
  source 1..651: mol_type = other DNA
atgtgggagcccatgagcagcagcctgatgatgaccatgaccaccagcctgaagatgtgcaccagaagcagcctgctgttcatcatcggcctgatcggctgctgcgccaccatcagagagagcagatgcggcctggccaccttcgtgatcatcctgctgctggtgttcgtgaccgaggtggtggtggtggtgctgggctacgtgtacagagccaaggtggagaacgaggtggacagaagcatccagaaggtgtacaagacctacaacggcaccaaccccgacgccgccagcagagccatcgactacgtgcagagacagctgcactgctgcggcatccacaactacagcgactgggagaacaccgactggttcaaggagaccaagaaccagagcgtgcccctgagctgctgcagagagaccgccagcaactgcaacggcagcctggcccaccccagcgacctgtacgccgagggctgcgaggccctggtggtgaagaagctgcaggagatcatgatgcacgtgatctgggccgccctggccttcgccgccatccagcagctgctgggcatgctgtgcgcctgcatcgtgctgtgcagaagaagcagagaccccgcctacgagctgctgatcaccggcggcacctacgcctag

SEQ ID NO: 102234 - DNA, 570 bp, synthetic construct
  misc_feature 1..570: note = Description of Artificial Sequence: Synthetic coding sequence
  source 1..570: mol_type = other DNA
atgggccagtgcggcatcaccagcagcaagaccgtgctggtgttcctgaacctgatcttctggttcgtgatcatcctgctgctggtgttcgtgaccgaggtggtggtggtggtgctgggctacgtgtacagagccaaggtggagaacgaggtggacagaagcatccagaaggtgtacaagacctacaacggcaccaaccccgacgccgccagcagagccatcgactacgtgcagagacagctgcactgctgcggcatccacaactacagcgactgggagaacaccgactggttcaaggagaccaagaaccagagcgtgcccctgagctgctgcagagagaccgccagcaactgcaacggcagcctggcccaccccagcgacctgtacgccgagggctgcgaggccctggtggtgaagaagctgcaggagatcatgatgcacgtgatctgggccgccctggccttcgccgccatccagctgctgggcatgctgtgcgcctgcatcgtgctgtgcagaagaagcagagaccccgcctacgagctgctgatcaccggcggcacctacgcctag

SEQ ID NO: 102235 - DNA, 633 bp, synthetic construct
  misc_feature 1..633: note = Description of Artificial Sequence: Synthetic coding sequence
  source 1..633: mol_type = other DNA
atggtgtgcggcggcttcgcctgcagcaagaacgccctgtgcgccctgaacgtggtgtacatgctggtgagcctgctgctgatcggcgtggccgcctggggcaagggcctgggcctggtgagcagcatccacatcatcggcggcgtgatcgccgtgggcgtgttcctgctgctgatcgccgtggccggcctggtgggcgccgtgaaccaccaccaggtgctgctgttcttctacatgatcatcctgggcctggtgttcatcttccagttcgtgatcagctgcagctgcctggccatcaacagaagcaagcagaccgacgtgatcaacgccagctggtgggtgatgagcaacaagaccagagacgagctggagagaagcttcgactgctgcggcctgttcaacctgaccaccctgtaccagcaggactacgacttctgcaccgccatctgcaagagccagagccccacctgccagatgtgcggcgagaagttcctgaagcacagcgacgaggccctgaagatcctgggcggcgtgggcctgttcttcagcttcaccgagatcctgggcgtgtggctggccatgagattcagaaaccagaaggaccccagagccaaccccagcgccttcctgtag

SEQ ID NO: 102236 - DNA, 963 bp, synthetic construct
  misc_feature 1..963: note = Description of Artificial Sequence: Synthetic coding sequence
  source 1..963: mol_type = other DNA
atgggcccctggagcagagtgagagtggccaagtgccagatgctggtgacctgcttcttcatcctgctgctgggcctgagcgtggccaccatggtgaccctgacctacttcggcgcccacttcgccgtgatcagaagagccagcctggagaagaacccctaccaggccgtgcaccagtgggccttcagcgccggcctgagcctggtgggcctgctgaccctgggcgccgtgctgagcgccgccgccaccgtgagagaggcccagggcctgatggccggcggcttcctgtgcttcagcctggccttctgcgcccaggtgcaggtggtgttctggagactgcacagccccacccaggtggaggacgccatgctggacacctacgacctggtgtacgagcaggccatgaagggcaccagccacgtgagaagacaggagctggccgccatccaggacgtgttcctgtgctgcggcaagaagagccccttcagcagactgggcagcaccgaggccgacctgtgccagggcgaggaggccgccagagaggactgcctgcagggcatcagaagcttcctgagaacccaccagcaggtggccagcagcctgaccagcatcggcctggccctgaccgtgagcgccctgctgttcagcagcttcctgtggttcgccatcagatgcggctgcagcctggacagaaagggcaagtacaccctgacccccagagcctgcggcagacagccccaggagcccagcctgctgagatgcagccagggcggccccacccactgcctgcacagcgaggccgtggccatcggccccagaggctgcagcggcagcctgagatggctgcaggagagcgacgccgcccccctgcccctgagctgccacctggccgcccacagagccctgcagggcagaagcagaggcggcctgagcggctgccccgagagaggcctgagcgactag

SEQ ID NO: 102237 - DNA, 762 bp, synthetic construct
  misc_feature 1..762: note = Description of Artificial Sequence: Synthetic coding sequence
  source 1..762: mol_type = other DNA
atgggcccctggagcagagtgagagtggccaagtgccagatgctggtgacctgcttcttcatcctgctgctgggcctgagcgtggccaccatggtgaccctgacctacttcggcgcccacttcgccgtgatcagaagagccagcctggagaagaacccctaccaggccgtgcaccagtgggccttcagcgccggcctgagcctggtgggcctgctgaccctgggcgccgtgctgagcgccgccgccaccgtgagagaggcccagggcctgatggccggcggcttcctgtgcttcagcctggccttctgcgcccaggtgcaggtggtgttctggagactgcacagccccacccaggtggaggacgccatgctggacacctacgacctggtgtacgagcaggccatgaagggcaccagccacgtgagaagacaggagctggccgccatccaggacgtgttcctgtgctgcggcaagaagagccccttcagcagactgggcagcaccgaggccgacctgtgccagggcgaggaggccgccagagaggactgcctgcagggcatcagaagcttcctgagaacccaccagcaggtggccagcagcctgaccagcatcggcctggccctgaccgtgagcgccctgctgttcagcagcttcctgtggttcgccatcagatgcggctgcagcctggacagaaagggcaagtacaccctgacccccagaagccccggccagaagagcagatgggcccagtgggtgccctag

SEQ ID NO: 102238 - DNA, 525 bp, synthetic construct
  misc_feature 1..525: note = Description of Artificial Sequence: Synthetic coding sequence
  source 1..525: mol_type = other DNA
atggccatcggcttcgtgggctgcctgggcgccatcaaggagaacaagtgcctgctgctgaccttcttcctgctgctgctgctggtgttcctgctggaggccaccatcgccatcctgttcttcgcctacaccgacaagatcgacagatacgcccagcaggacctgaagaagggcctgcacctgtacggcacccagggcaacgtgggcctgaccaacgcctggagcatcatccagaccgacttcagatgctgcggcgtgagcaactacaccgactggttcgaggtgtacaacgccaccagagtgcccgacagctgctgcctggagttcagcgagagctgcggcctgcacgcccccggcacctggtggaaggccccctgctacgagaccgtgaaggtgtggctgcaggagaacctgctggccgtgggcatcttcggcctgtgcaccgccctggtgcagatcctgggcctgaccttcgccatgaccatgtactgccaggtggtgaaggccgacacctactgcgcctag

SEQ ID NO: 102239 - DNA, 717 bp, synthetic construct
  misc_feature 1..717: note = Description of Artificial Sequence: Synthetic coding sequence
  source 1..717: mol_type = other DNA
atggccagagcctgcctgcaggccgtgaagtacctgatgttcgccttcaacctgctgttctggctgggcggctgcggcgtgctgggcgtgggcatctggctggccgccacccagggcagcttcgccaccctgagcagcagcttccccagcctgagcgccgccaacctgctgatcatcaccggcgccttcgtgatggccatcggcttcgtgggctgcctgggcgccatcaaggagaacaagtgcctgctgctgaccttcttcctgctgctgctgctggtgttcctgctggaggccaccatcgccatcctgttcttcgcctacaccgacaagatcgacagatacgcccagcaggacctgaagaagggcctgcacctgtacggcacccagggcaacgtgggcctgaccaacgcctggagcatcatccagaccgacttcagatgctgcggcgtgagcaactacaccgactggttcgaggtgtacaacgccaccagagtgcccgacagctgctgcctggagttcagcgagagctgcggcctgcacgcccccggcacctggtggaaggccccctgctacgagaccgtgaaggtgtggctgcaggagaacctgctggccgtgggcatcttcggcctgtgcaccgccctggtgcagatcctgggcctgaccttcgccatgaccatgtactgccaggtggtgaaggccgacacctactgcgcctag

SEQ ID NO: 102240 - DNA, 717 bp, synthetic construct; identical to SEQ ID NO: 102239
  misc_feature 1..717: note = Description of Artificial Sequence: Synthetic coding sequence
  source 1..717: mol_type = other DNA

SEQ ID NO: 102241 - DNA, 717 bp, synthetic construct; identical to SEQ ID NO: 102239
  misc_feature 1..717: note = Description of Artificial Sequence: Synthetic coding sequence
  source 1..717: mol_type = other DNA

SEQ ID NO: 102242 - DNA, 717 bp, synthetic construct; identical to SEQ ID NO: 102239
  misc_feature 1..717: note = Description of Artificial Sequence: Synthetic coding sequence
  source 1..717: mol_type = other DNA

SEQ ID NO: 102243 - DNA, 717 bp, synthetic construct; identical to SEQ ID NO: 102239
  misc_feature 1..717: note = Description of Artificial Sequence: Synthetic coding sequence
  source 1..717: mol_type = other DNA

SEQ ID NO: 102244 - DNA, 774 bp, synthetic construct
  misc_feature 1..774: note = Description of Artificial Sequence: Synthetic coding sequence
  source 1..774: mol_type = other DNA
atgacccccagaagcgccggcaccagcgcccacggcgccgagctgaagagatgcggcatggccagagcctgcctgcaggccgtgaagtacctgatgttcgccttcaacctgctgttctggctgggcggctgcggcgtgctgggcgtgggcatctggctggccgccacccagggcagcttcgccaccctgagcagcagcttccccagcctgagcgccgccaacctgctgatcatcaccggcgccttcgtgatggccatcggcttcgtgggctgcctgggcgccatcaaggagaacaagtgcctgctgctgaccttcttcctgctgctgctgctggtgttcctgctggaggccaccatcgccatcctgttcttcgcctacaccgacaagatcgacagatacgcccagcaggacctgaagaagggcctgcacctgtacggcacccagggcaacgtgggcctgaccaacgcctggagcatcatccagaccgacttcagatgctgcggcgtgagcaactacaccgactggttcgaggtgtacaacgccaccagagtgcccgacagctgctgcctggagttcagcgagagctgcggcctgcacgcccccggcacctggtggaaggccccctgctacgagaccgtgaaggtgtggctgcaggagaacctgctggccgtgggcatcttcggcctgtgcaccgccctggtgcagatcctgggcctgaccttcgccatgaccatgtactgccaggtggtgaaggccgacacctactgcgcctag

SEQ ID NO: 102245 - DNA, 717 bp, synthetic construct; identical to SEQ ID NO: 102239
  misc_feature 1..717: note = Description of Artificial Sequence: Synthetic coding sequence
  source 1..717: mol_type = other DNA

SEQ ID NO: 102246 - DNA, 525 bp, synthetic construct; identical to SEQ ID NO: 102238
  misc_feature 1..525: note = Description of Artificial Sequence: Synthetic coding sequence
  source 1..525: mol_type = other DNA

SEQ ID NO: 102247 - DNA, 303 bp, synthetic construct
  misc_feature 1..303: note = Description of Artificial Sequence: Synthetic coding sequence
  source 1..303: mol_type = other DNA
atggccatcggcttcgtgggctgcctgggcgccatcaaggagaacaagtgcctgctgctgaccttcttcctgctgctgctgctggtgttcctgctggaggccaccatcgccatcctgttcttcgcctacaccgacaagatcgacagatacgcccagcaggacctgaagaagggcctgcacctgtacggcacccagggcaacgtgggcctgaccaacgcctggagcatcatccagaccgacttcagatgctgcggcgtgagcaactacaccgactggttcgaggtgtacaacgccaccagatag

SEQ ID NO: 102248 - DNA, 480 bp, synthetic construct
  misc_feature 1..480: note = Description of Artificial Sequence: Synthetic coding sequence
  source 1..480: mol_type = other DNA
atggccagagcctgcctgcaggccgtgaagtacctgatgttcgccttcaacctgctgttctggctgggcggctgcggcgtgctgggcgtgggcatctggctggccgccacccagggcagcttcgccaccctgagcagcagcttccccagcctgagcgccgccaacctgctgatcatcaccggcgccttcgtgatggccatcggcttcgtgggctgcctgggcgccatcaaggagaacaagtgcctgctgctgaccttcttcctgctgctgctgctggtgttcctgctggaggccaccatcgccatcctgttcttcgcctacaccgacaagatcgacagatacgcccagcaggacctgaagaagggcctgcacctgtacggcacccagggcaacgtgggcctgaccaacgcctggagcatcatccagaccgacttcagatgctgcggcgtgagcaactacaccgactggttcgaggtgtag

SEQ ID NO: 102249 - DNA, 258 bp, synthetic construct
  misc_feature 1..258: note = Description of Artificial Sequence: Synthetic coding sequence
  source 1..258: mol_type = other DNA
atggccagagcctgcctgcaggccgtgaagtacctgatgttcgccttcaacctgctgttctggctgggcggctgcggcgtgctgggcgtgggcatctggctggccgccacccagggcagcttcgccaccctgagcagcagcttccccagcctgagcgccgccaacctgctgatcatcaccggcgccttcgtgatggccatcggcttcgtgggctgcctgggcgccatcaaggagaacaagtgcctgctgctgacctag

SEQ ID NO: 102250 - DNA, 807 bp, synthetic construct
  misc_feature 1..807: note = Description of Artificial Sequence: Synthetic coding sequence
  source 1..807: mol_type = other DNA
atgagcggcaagcactacaagggccccgaggtgagctgctgcatcaagtacttcatcttcggcttcaacgtgatcttctggttcctgggcatcaccttcctgggcatcggcctgtgggcctggaacgagaagggcgtgctgagcaacatcagcagcatcaccgacctgggcggcttcgaccccgtgtggctgttcctggtggtgggcggcgtgatgttcatcctgggcttcgccggctgcatcggcgccctgagagagaacaccttcctgctgaagttcttcagcgtgttcctgggcatcatcttcttcctggagctgaccgccggcgtgctggccttcgtgttcaaggactggatcaaggaccagctgtacttcttcatcaacaacaacatcagagcctacagagacgacatcgacctgcagaacctgatcgacttcacccaggagtactggcagtgctgcggcgccttcggcgccgacgactggaacctgaacatctacttcaactgcaccgacagcaacgccagcagagagagatgcggcgtgcccttcagctgctgcaccaaggaccccgccgaggacgtgatcaacacccagtgcggctacgacgccagacagaagcccgaggtggaccagcagatcgtgatctacaccaagggctgcgtgccccagttcgagaagtggctgcaggacaacctgaccatcgtggccggcatcttcatcggcatcgccctgctgcagatcttcggcatctgcctggcccagaacctggtgagcgacatcgaggccgtgagagccagctggtag

SEQ ID NO: 102251 - DNA, 594 bp, synthetic construct
  misc_feature 1..594: note = Description of Artificial Sequence: Synthetic coding sequence
  source 1..594: mol_type = other DNA
atgttcatcctgggcttcgccggctgcatcggcgccctgagagagaacaccttcctgctgaagttcttcagcgtgttcctgggcatcatcttcttcctggagctgaccgccggcgtgctggccttcgtgttcaaggactggatcaaggaccagctgtacttcttcatcaacaacaacatcagagcctacagagacgacatcgacctgcagaacctgatcgacttcacccaggagtactggcagtgctgcggcgccttcggcgccgacgactggaacctgaacatctacttcaactgcaccgacagcaacgccagcagagagagatgcggcgtgcccttcagctgctgcaccaaggaccccgccgaggacgtgatcaacacccagtgcggctacgacgccagacagaagcccgaggtggaccagcagatcgtgatctacaccaagggctgcgtgccccagttcgagaagtggctgcaggacaacctgaccatcgtggccggcatcttcatcggcatcgccctgctgcagatcttcggcatctgcctggcccagaacctggtgagcgacatcgaggccgtgagagccagctggtag

SEQ ID NO: 102252 - DNA, 801 bp, synthetic construct
  misc_feature 1..801: note = Description of Artificial Sequence: Synthetic coding sequence
  source 1..801: mol_type = other DNA
atggccagcagaagaatggagaccaagcccgtgatcacctgcctgaagaccctgctgatcatctacagcttcgtgttctggaaggagaaggccgccggcttctgcggcagacaggacgtggccatggccctgatcaccggcgtgatcctgctggccgtgggcgtgtggggcaagctgaccctgggcacctacatcagcctgatcgccgagaacagcaccaacgccccctacgtgctgatcggcaccggcaccaccatcgtggtgttcggcctgttcggctgcttcgccacctgcagaggcagcccctggatgctgaagctgtacgccatgttcctgagcctggtgttcctggccgagctggtggccggcatcagcggcttcgtgttcagacacgagatcaaggacaccttcctgagaacctacaccgacgccatgcagacctacaacggcaacgacgagagaagcagagccgtggaccacgtgcagagaagcctgagctgctgcggcgtgcagaactacaccaactggagcaccagcccctacttcctggagcacggcatcccccccagctgctgcatgaacgagaccgactgcaacccccaggacctgcacaacctgaccgtggccgccaccaaggtgaaccagaagggctgctacgacctggtgaccagcttcatggagaccaacatgggcatcatcgccggcgtggccttcggcatcgccttcagccagctgatcggcatgctgctggcctgctgcctgagcagattcatcaccgccaaccagtacgagatggtgtag

SEQ ID NO: 102253 - DNA, 750 bp, synthetic construct
  misc_feature 1..750: note = Description of Artificial Sequence: Synthetic coding sequence
  source 1..750: mol_type = other DNA
atggccagcagaagaatggagaccaagcccgtgatcacctgcctgaagaccctgctgatcatctacagcttcgtgttctggatcaccggcgtgatcctgctggccgtgggcgtgtggggcaagctgaccctgggcacctacatcagcctgatcgccgagaacagcaccaacgccccctacgtgctgatcggcaccggcaccaccatcgtggtgttcggcctgttcggctgcttcgccacctgcagaggcagcccctggatgctgaagctgtacgccatgttcctgagcctggtgttcctggccgagctggtggccggcatcagcggcttcgtgttcagacacgagatcaaggacaccttcctgagaacctacaccgacgccatgcagacctacaacggcaacgacgagagaagcagagccgtggaccacgtgcagagaagcctgagctgctgcggcgtgcagaactacaccaactggagcaccagcccctacttcctggagcacggcatcccccccagctgctgcatgaacgagaccgactgcaacccccaggacctgcacaacctgaccgtggccgccaccaaggtgaaccagaagggctgctacgacctggtgaccagcttcatggagaccaacatgggcatcatcgccggcgtggccttcggcatcgccttcagccagctgatcggcatgctgctggcctgctgcctgagcagattcatcaccgccaaccagtacgagatggtgtag

SEQ ID NO: 102254 - DNA, 828 bp, synthetic construct
  misc_feature 1..828: note = Description of Artificial Sequence: Synthetic coding sequence
  source 1..828: mol_type = other DNA
atggccaacagaaccgtgtgcaacggccagggcagaagcagagacctgctgagaatcaagaacatccccaacgcccccggccacttcctgatcgccggcgtgggcggcagcagcagccagggcagaagcatcgaggaggagggcaagacccacctgggcatcaccggcgtgatcctgctggccgtgggcgtgtggggcaagctgaccctgggcacctacatcagcctgatcgccgagaacagcaccaacgccccctacgtgctgatcggcaccggcaccaccatcgtggtgttcggcctgttcggctgcttcgccacctgcagaggcagcccctggatgctgaagctgtacgccatgttcctgagcctggtgttcctggccgagctggtggccggcatcagcggcttcgtgttcagacacgagatcaaggacaccttcctgagaacctacaccgacgccatgcagacctacaacggcaacgacgagagaagcagagccgtggaccacgtgcagagaagcctgagctgctgcggcgtgcagaactacaccaactggagcaccagcccctacttcctggagcacggcatcccccccagctgctgcatgaacgagaccgactgcaacccccaggacctgcacaacctgaccgtggccgccaccaaggtgaaccagaagggctgctacgacctggtgaccagcttcatggagaccaacatgggcatcatcgccggcgtggccttcggcatcgccttcagccagctgatcggcatgctgctggcctgctgcctgagcagattcatcaccgccaaccagtacgagatggtgtag

SEQ ID NO: 102255 - DNA, 672 bp, synthetic construct
  misc_feature 1..672: note = Description of Artificial Sequence: Synthetic coding sequence
  source 1..672: mol_type = other DNA
atgatcaccggcgtgatcctgctggccgtgggcgtgtggggcaagctgaccctgggcacctacatcagcctgatcgccgagaacagcaccaacgccccctacgtgctgatcggcaccggcaccaccatcgtggtgttcggcctgttcggctgcttcgccacctgcagaggcagcccctggatgctgaagctgtacgccatgttcctgagcctggtgttcctggccgagctggtggccggcatcagcggcttcgtgttcagacacgagatcaaggacaccttcctgagaacctacaccgacgccatgcagacctacaacggcaacgacgagagaagcagagccgtggaccacgtgcagagaagcctgagctgctgcggcgtgcagaactacaccaactggagcaccagcccctacttcctggagcacggcatcccccccagctgctgcatgaacgagaccgactgcaacccccaggacctgcacaacctgaccgtggccgccaccaaggtgaaccagaagggctgctacgacctggtgaccagcttcatggagaccaacatgggcatcatcgccggcgtggccttcggcatcgccttcagccagctgatcggcatgctgctggcctgctgcctgagcagattcatcaccgccaaccagtacgagatggtgtag

SEQ ID NO: 102256 - DNA, 714 bp, synthetic construct
  misc_feature 1..714: note = Description of Artificial Sequence: Synthetic coding sequence
  source 1..714: mol_type = other DNA
atggccggcgtgagcgcctgcatcaagtacagcatgttcaccttcaacttcctgttctggctgtgcggcatcctgatcctggccctggccatctgggtgagagtgagcaacgacagccaggccatcttcggcagcgaggacgtgggcagcagcagctacgtggccgtggacatcctgatcgccgtgggcgccatcatcatgatcctgggcttcctgggctgctgcggcgccatcaaggagagcagatgcatgctgctgctgttcttcatcggcctgctgctgatcctgctgctgcaggtggccaccggcatcctgggcgccgtgttcaagagcaagagcgacagaatcgtgaacgagaccctgtacgagaacaccaagctgctgagcgccaccggcgagagcgagaagcagttccaggaggccatcatcgtgttccaggaggagttcaagtgctgcggcctggtgaacggcgccgccgactggggcaacaacttccagcactaccccgagctgtgcgcctgcctggacaagcagagaccctgccagagctacaacggcaagcaggtgtacaaggagacctgcatcagcttcatcaaggacttcctggccaagaacctgatcatcgtgatcggcatcagcttcggcctggccgtgatcgagatcctgggcctggtgttcagcatggtgctgtactgccagatcggcaacaagtag

SEQ ID NO: 102257 - DNA, 714 bp, synthetic construct; identical to SEQ ID NO: 102256
  misc_feature 1..714: note = Description of Artificial Sequence: Synthetic coding sequence
  source 1..714: mol_type = other DNA

SEQ ID NO: 102258 - DNA, 714 bp, synthetic construct; identical to SEQ ID NO: 102256
  misc_feature 1..714: note = Description of Artificial Sequence: Synthetic coding sequence
  source 1..714: mol_type = other DNA

SEQ ID NO: 102259 - DNA, 720 bp, synthetic construct
  misc_feature 1..720: note = Description of Artificial Sequence: Synthetic coding sequence
  source 1..720: mol_type = other DNA
atggccagaggctgcctgtgctgcctgaagtacatgatgttcctgttcaacctgatcttctggctgtgcggctgcggcctgctgggcgtgggcatctggctgagcgtgagccagggcaacttcgccaccttcagccccagcttccccagcctgagcgccgccaacctggtgatcgccatcggcaccatcgtgatggtgaccggcttcctgggctgcctgggcgccatcaaggagaacaagtgcctgctgctgagcttcttcatcgtgctgctggtgatcctgctggccgagctgatcctgctgatcctgttcttcgtgtacatggacaaggtgaacgagaacgccaagaaggacctgaaggagggcctgctgctgtaccacaccgagaacaacgtgggcctgaagaacgcctggaacatcatccaggccgagatgagatgctgcggcgtgaccgactacaccgactggtaccccgtgctgggcgagaacaccgtgcccgacagatgctgcatggagaacagccagggctgcggcagaaacgccaccacccccctgtggagaaccggctgctacgagaaggtgaagatgtggttcgacgacaacaagcacgtgctgggcaccgtgggcatgtgcatcctgatcatgcagatcctgggcatggccttcagcatgaccctgttccagcacatccacagaaccggcaagaagtacgacgcctag

SEQ ID NO: 102260 - DNA, 720 bp, synthetic construct; identical to SEQ ID NO: 102259
  misc_feature 1..720: note = Description of Artificial Sequence: Synthetic coding sequence
  source 1..720: mol_type = other DNA

SEQ ID NO: 102261 - DNA, 1044 bp, synthetic construct
  misc_feature 1..1044: note = Description of Artificial Sequence: Synthetic coding sequence
  source 1..1044: mol_type = other DNA
atggccctgatgctgagcctggtgctgagcctgctgaagctgggcagcggccagtggcaggtgttcggccccgacaagcccgtgcaggccctggtgggcgaggacgccgccttcagctgcttcctgagccccaagaccaacgccgaggccatggaggtgagattcttcagaggccagttcagcagcgtggtgcacctgtacagagacggcaaggaccagcccttcatgcagatgccccagtaccagggcagaaccaagctggtgaaggacagcatcgccgagggcagaatcagcctgagactggagaacatcaccgtgctggacgccggcctgtacggctgcagaatcagcagccagagctactaccagaaggccatctgggagctgcaggtgagcgccctgggcagcgtgcccctgatcagcatcaccggctacgtggacagagacatccagctgctgtgccagagcagcggctggttccccagacccaccgccaagtggaagggcccccagggccaggacctgagcaccgacagcagaaccaacagagacatgcacggcctgttcgacgtggagatcagcctgaccgtgcaggagaacgccggcagcatcagctgcagcatgagacacgcccacctgagcagagaggtggagagcagagtgcagatcggcgacaccttcttcgagcccatcagctggcacctggccaccaaggtgctgggcatcctgtgctgcggcctgttcttcggcatcgtgggcctgaagatcttcttcagcaagttccagtgcaagagagagagagaggcctgggccggcgccctgttcatggtgcccgccggcaccggcagcgagatgctgccccaccccgccgccagcctgctgctggtgctggccagcagaggccccggccccaagaaggagaaccccggcggcaccggcctggagaagaaggccagaaccggcagaatcgagagaagacccgagaccagaagcggcggcgacagcggcagcagagacggcagccccgaggccctgagattctag

SEQ ID NO: 102262 - DNA, 879 bp, synthetic construct
  misc_feature 1..879: note = Description of Artificial Sequence: Synthetic coding sequence
  source 1..879: mol_type = other DNA
atgggcgagaagagcgagaactgcggcgtgcccgaggacctgctgaacggcctgaaggtgaccgacacccaggaggccgagtgcgccggcccccccgtgcccgaccccaagaaccagcacagccagagcaagctgctgagagacgacgaggcccacctgcaggaggaccagggcgaggaggagtgcttccacgactgcagcgccagcttcgaggaggagcccggcgccgacaaggtggagaacaagagcaacgaggacgtgaacagcagcgagctggacgaggagtacctgatcgagctggagaagaacatgagcgacgaggagaagcagaagagaagagaggagagcaccagactgaaggaggagggcaacgagcagttcaagaagggcgactacatcgaggccgagagcagctacagcagagccctggagatgtgccccagctgcttccagaaggagagaagcatcctgttcagcaacagagccgccgccagaatgaagcaggacaagaaggagatggccatcaacgactgcagcaaggccatccagctgaaccccagctacatcagagccatcctgagaagagccgagctgtacgagaagaccgacaagctggacgaggccctggaggactacaagagcatcctggagaaggaccccagcatccaccaggccagagaggcctgcatgagactgcccaagcagatcgaggagagaaacgagagactgaaggaggagatgctgggcaagctgaaggacctgggcaacctggtgctgagacccttcggcctgagcaccgagaacttccagatcaagcaggacagcagcaccggcagctacagcatcaacttcgtgcagaaccccaacaacaacagatag

SEQ ID NO: 102263 - DNA, 2199 bp, synthetic construct
  misc_feature 1..2199: note = Description of Artificial Sequence: Synthetic coding sequence
  source 1..2199: mol_type = other DNA
atggacgccgacaaggagaaggacctgcagaagttcctgaagaacgtggacgagatcagcaacctgatccaggagatgaacagcgacgaccccgtggtgcagcagaaggccgtgctggagaccgagaagagactgctgctgatggaggaggaccaggaggaggacgagtgcagaaccaccctgaacaagaccatgatcagccccccccagaccgccatgaagagcgccgaggagatcaacagcgaggccttcctggccagcgtggagaaggacgccaaggagagagccaagagaagaagagagaacaaggtgctggccgacgccctgaaggagaagggcaacgaggccttcgccgagggcaactacgagaccgccatcctgagatacagcgagggcctggagaagctgaaggacatgaaggtgctgtacaccaacagagcccaggcctacatgaagctggaggactacgagaaggccctggtggactgcgagtgggccctgaagtgcgacgagaagtgcaccaaggcctacttccacatgggcaaggccaacctggccctgaagaactacagcgtgagcagagagtgctacaagaagatcctggagatcaaccccaagctgcagacccaggtgaagggctacctgaaccaggtggacctgcaggagaaggccgacctgcaggagaaggaggcccacgagctgctggacagcggcaagaacaccgccgtgaccaccaagaacctgctggagaccctgagcaagcccgaccagatccccctgttctacgccggcggcatcgagatcctgaccgagatgatcaacgagtgcaccgagcagaccctgttcagaatgcacaacggcttcagcatcatcagcgacaacgaggtgatcagaagatgcttcagcaccgccggcaacgacgccgtggaggagatggtgtgcgtgagcgtgctgaagctgtggcaggccgtgtgcagcagaaacgaggagaaccagagagtgctggtgatccaccacgacagagccagactgctggccgccctgctgagcagcaaggtgctggccatcagacagcagagcttcgccctgctgctgcacctggcccagaccgagagcggcagaagcctgatcatcaaccacctggacctgaccagactgctggaggccctggtgagcttcctggacttcagcgacaaggaggccaacaccgccatgggcctgttcaccgacctggccctggaggagagattccaggtgtggttccaggccaacctgcccggcgtgctgcccgccctgaccggcgtgctgaagaccgaccccaaggtgagcagcagcagcgccctgtgccagtgcatcgccatcatgggcaacctgagcgccgagcccaccaccagaagacacatggccgcctgcgaggagttcggcgacggctgcctgagcctgctggccagatgcgaggaggacgtggacctgttcagagaggtgatctacaccctgctgggcctgatgatgaacctgtgcctgcaggcccccttcgtgagcgaggtgtgggccgtggaggtgagcagaagatgcctgagcctgctgaacagccaggacggcggcatcctgaccagagccgccggcgtgctgagcagaaccctgagcagcagcctgaagatcgtggaggaggccctgagagccggcgtggtgaagaagatgatgaagttcctgaagaccggcggcgagaccgccagcagatacgccatcaagatcctggccatctgcaccaacagctaccacgaggccagagaggaggtgatcagactggacaagaagctgagcgtgatgatgaagctgctgagcagcgaggacgaggtgctggtgggcaacgccgccctgtgcctgggcaactgcatggaggtgcccaacgtggccagcagcctgctgaagaccgacctgctgcaggtgctgctgaagctggccggcagcgacacccagaagaccgccgtgcaggtgaacgccggcatcgccctgggcaagctgtgcaccgccgagcccagagtgcccgccgagagcagccacctgcagttcggcagagagagcgccgcccccgaggccctgagccccagaagatgggaggagatgttccacatgctggtgttcagcctgagcagcgtggaccccccccccccccccccccagacctgctacccctag

SEQ ID NO: 102264 - DNA, 324 bp, synthetic construct
  misc_feature 1..324: note = Description of Artificial Sequence: Synthetic coding sequence
  source 1..324: mol_type = other DNA
atggacgccgacaaggagaaggacctgcagaagttcctgaagaacgtggacgagatcagcaacctgatccaggagatgaacagcgacgaccccgtggtgcagcagaaggccgtgctggagaccgagaagagactgctgctgatggaggaggaccaggaggaggacgagtgcagaaccaccctgaacaagaccatgatcagccccccccagaccgccatgaagagcgccgaggagatcaacagcgaggccttcctggccagcgtggagaaggacgccaaggagagagccaagagaagaagagagaacaaggtgctggccgactag

SEQ ID NO: 102265 - DNA, 609 bp, synthetic construct
  misc_feature 1..609: note = Description of Artificial Sequence: Synthetic coding sequence
  source 1..609: mol_type = other DNA
atggacgccgacaaggagaaggacctgcagaagttcctgaagaacgtggacgagatcagcaacctgatccaggagatgaacagcgacgaccccgtggtgcagcagaaggccgtgctggagaccgagaagagactgctgctgatggaggaggaccaggaggaggacgagtgcagaaccaccctgaacaagaccatgatcagccccccccagaccgccatgaagagcgccgaggagatcaacagcgaggccttcctggccagcgtggagaaggacgccaaggagagagccaagagaagaagagagaacaaggtgctggccgacgccctgaaggagaagggcaacgaggccttcgccgagggcaactacgagaccgccatcctgagatacagcgagggcctggagaagctgaaggacatgaaggtgctgtacaccaacagagcccaggcctacatgaagctggaggactacgagaaggccctggtggactgcgagtgggccctgaagtgcgacgagaagtgcaccaaggcctacttccacatgggcaaggccaacctggccctgaagaactacagcgtgagcagagagtgctacaagaagatcctggagtag

SEQ ID NO: 102266 - DNA, 504 bp, synthetic construct
  misc_feature 1..504: note = Description of Artificial Sequence: Synthetic coding sequence
  source 1..504: mol_type = other DNA
atggacgccgacaaggagaaggacctgcagaagttcctgaagaacgtggacgagatcagcaacctgatccaggagatgaacagcgacgaccccgtggtgcagcagaaggccgtgctggagaccgagaagagactgctgctgatggaggaggaccaggaggaggacgagtgcagaaccaccctgaacaagaccatgatcagccccccccagaccgccatgaagagcgccgaggagatcaacagcgaggccttcctggccagcgtggagaaggacgccaaggagagagccaagagaagaagagagaacaaggtgctggccgacgccctgaaggagaagggcaacgaggccttcgccgagggcaactacgagaccgccatcctgagatacagcgagggcctggagaagctgaaggacatgaaggtgctgtacaccaacagagcccaggcctacatgaagctggaggactacgagaaggccctggtggactgcgagtgggccctgtag

SEQ ID NO: 102267 - DNA, 2118 bp, synthetic construct
  misc_feature 1..2118: note = Description of Artificial Sequence: Synthetic coding sequence
  source 1..2118: mol_type = other DNA
atggacgccgacaaggagaaggacctgcagaagttcctgaagaacgtggacgagatcagcaacctgatccaggagatgaacagcgacgaccccgtggtgcagcagaaggccgtgctggagaccgagaagagactgctgctgatggaggaggaccaggaggaggacgagtgcagaaccaccctgaacaagaccatgatcagccccccccagaccgccatgaagagcgccgaggagatcaacagcgaggccttcctggccagcgtggagaaggacgccaaggagagagccaagagaagaagagagaacaaggtgctggccgacgccctgaaggagaagggcaacgaggccttcgccgagggcaactacgagaccgccatcctgagatacagcgagggcctggagaagctgaaggacatgaaggtgctgtacaccaacagagcccaggcctacatgaagctggaggactacgagaaggccctggtggactgcgagtgggccctgaagtgcgacgagaagtgcaccaaggcctacttccacatgggcaaggccaacctggccctgaagaactacagcgtgagcagagagtgctacaagaagatcctggagatcaaccccaagctgcagacccaggtgaagggctacctgaaccaggtggacctgcaggagaaggccgacctgcaggagaaggaggcccacgagctgctggacagcggcaagaacaccgccgtgaccaccaagaacctgctggagaccctgagcaagcccgaccagatccccctgttctacgccggcggcatcgagatcctgaccgagatgatcaacgagtgcaccgagcagaccctgttcagaatgcacaacggcttcagcatcatcagcgacaacgaggtgatcagaagatgcttcagcaccgccggcaacgacgccgtggaggagatggtgtgcgtgagcgtgctgaagctgtggcaggccgtgtgcagcagaaacgaggagaaccagagagtgctggtgatccaccacgacagagccagactgctggccgccctgctgagcagcaaggtgctggccatcagacagcagagcttcgccctgctgctgcacctggcccagaccgagagcggcagaagcctgatcatcaaccacctggacctgaccagactgctggaggccctggtgagcttcctggacttcagcgacaaggaggccaacaccgccatgggcctgttcaccgacctggccctggaggagagattccaggtgtggttccaggccaacctgcccggcgtgctgcccgccctgaccggcgtgctgaagaccgaccccaaggtgagcagcagcagcgccctgtgccagtgcatcgccatcatgggcaacctgagcgccgagcccaccaccagaagacacatggccgcctgcgaggagttcggcgacggctgcctgagcctgctggccagatgcgaggaggacgtggacctgttcagagaggtgatctacaccctgctgggcctgatgatgaacctgtgcctgcaggcccccttcgtgagcgaggtgtgggccgtggaggtgagcagaagatgcctgagcctgctgaacagccaggacggcggcatcctgaccagagccgccggcgtgctgagcagaaccctgagcagcagcctgaagatcgtggaggaggccctgagagccggcgtggtgaagaagatgatgaagttcctgaagaccggcggcgagaccgccagcagatacgccatcaagatcctggccatctgcaccaacagctaccacgaggccagagaggaggtgatcagactggacaagaagctgagcgtgatgatgaagctgctgagcagcgaggacgaggtgctggtgggcaacgccgccctgtgcctgggcaactgcatggaggtgcccaacgtggccagcagcctgctgaagaccgacctgctgcaggtgctgctgaagctggccggcagcgacacccagaagaccgccgtgcaggtgaacgccggcatcgccctgggcaagctgtgcaccgccgagcccagattcgccgcccagctgagaaagctgcacggcctggagatcctgaacagcaccatgaagtacatcagcgacagctag

SEQ ID NO: 102268 - DNA, 1143 bp, synthetic construct
  misc_feature 1..1143: note = Description of Artificial Sequence: Synthetic coding sequence
  source 1..1143: mol_type = other DNA
atgttcagactgctgagctggagcctgggcagaggcttcctgagagccgccggcagaagatgcagaggctgcagcgccagactgctgcccggcctggccggcggccccggccccgaggtgcaggtgccccccagcagagtggccccccacggcagaggccccggcctgctgcccctgctggccgccctggcctggttcagcagacccgccgccgccgaggaggaggagcagcagggcgccgacggcgccgccgccgaggacggcgccgacgaggccgaggccgagatcatccagctgctgaagagagccaagctgagcatcatgaaggacgagcccgaggaggccgagctgatcctgcacgacgccctgagactggcctaccagaccgacaacaagaaggccatcacctacacctacgacctgatggccaacctggccttcatcagaggccagctggagaacgccgagcagctgttcaaggccaccatgagctacctgctgggcggcggcatgaagcaggaggacaacgccatcatcgagatcagcctgaagctggccagcatctacgccgcccagaacagacaggagttcgccgtggccggctacgagttctgcatcagcaccctggaggagaagatcgagagagagaaggagctggccgaggacatcatgagcgtggaggagaaggccaacacccacctgctgctgggcatgtgcctggacgcctgcgccagatacctgctgttcagcaagcagcccagccaggcccagagaatgtacgagaaggccctgcagatcagcgaggagatccagggcgagagacacccccagaccatcgtgctgatgagcgacctggccaccaccctggacgcccagggcagattcgacgaggcctacatctacatgcagagagccagcgacctggccagacagatcaaccaccccgagctgcacatggtgctgagcaacctggccgccgtgctgatgcacagagagagatacacccaggccaaggagatctaccaggaggccctgaagcaggccaagctgaagaaggacgagatcagcgtgcagcacatcagagaggagctggccgagctgagcaagaagagcagacccctgaccaacagcgtgaagctgtag

SEQ ID NO: 102269 - DNA, 1143 bp, synthetic construct; identical to SEQ ID NO: 102268
  misc_feature 1..1143: note = Description of Artificial Sequence: Synthetic coding sequence
  source 1..1143: mol_type = other DNA

SEQ ID NO: 102270 - DNA, 1506 bp, synthetic construct
  misc_feature 1..1506: note = Description of Artificial Sequence: Synthetic coding sequence
  source 1..1506: mol_type = other DNA
atggcccagccccacaccaccagcgtgccctacttcgccagaagccccgccccccccccccccagcagaagcggcgcccccccccagccccccgccaccctgagacccagcagaagaagaaccagaccccccagacccgccgacagaagagacgcccccgccgactgcgcctacctgtggagaatcctgacccccagaagaggcagagccagaagaagcgacgtgggcgccagacacagagcctgcggcagaagagacgtgctgctgagcagacagggccccgccaaccccgagggcgccagaagagtggtgggcggccaggagagagtgtggcccgccgtgagaagaggcagaggcggcagcatgttcagactgctgagctggagcctgggcagaggcttcctgagagccgccggcagaagatgcagaggctgcagcgccagactgctgcccggcctggccggcggccccggccccgaggtgcaggtgccccccagcagagtggccccccacggcagaggccccggcctgctgcccctgctggccgccctggcctggttcagcagacccgccgccgccgaggaggaggagcagcagggcgccgacggcgccgccgccgaggacggcgccgacgaggccgaggccgagatcatccagctgctgaagagagccaagctgagcatcatgaaggacgagcccgaggaggccgagctgatcctgcacgacgccctgagactggcctaccagaccgacaacaagaaggccatcacctacacctacgacctgatggccaacctggccttcatcagaggccagctggagaacgccgagcagctgttcaaggccaccatgagctacctgctgggcggcggcatgaagcaggaggacaacgccatcatcgagatcagcctgaagctggccagcatctacgccgcccagaacagacaggagttcgccgtggccggctacgagttctgcatcagcaccctggaggagaagatcgagagagagaaggagctggccgaggacatcatgagcgtggaggagaaggccaacacccacctgctgctgggcatgtgcctggacgcctgcgccagatacctgctgttcagcaagcagcccagccaggcccagagaatgtacgagaaggccctgcagatcagcgaggagatccagggcgagagacacccccagaccatcgtgctgatgagcgacctggccaccaccctggacgcccagggcagattcgacgaggcctacatctacatgcagagagccagcgacctggccagacagatcaaccaccccgagctgcacatggtgctgagcaacctggccgccgtgctgatgcacagagagagatacacccaggccaaggagatctaccaggaggccctgaagcaggccaagctgaagaaggacgagatcagcgtgcagcacatcagagaggagctggccgagctgagcaagaagagcagacccctgaccaacagcgtgaagctgtag

SEQ ID NO: 102271 - DNA, 501 bp, synthetic construct
  misc_feature 1..501: note = Description of Artificial Sequence: Synthetic coding sequence
  source 1..501: mol_type = other DNA
tgacaggagagagtgtggcccgccgtgagaagaggcagaggcggcagcatgttcagactgctgagctggagcctgggcagaggcttcctgagagccgccggcagaagatgcagaggctgcagcgccagactgctgcccggcctggccggcggccccggccccgaggtgcaggtgccccccagcagagtggccccccacggcagaggccccggcctgctgcccctgctggccgccctggcctggttcagcagacccgccgccgccgaggaggaggagcagcagggcgccgacggcgccgccgccgaggacggcgccgacgaggccgaggccgagatcatccagctgctgaagagagccaaggtgagaagactgagagccctgagacccgccgagagaggcagcctgtgcgagagaggcctgggcgtggccgcccactacagcctgagactggccgaggagtggatggaggcccccagagtgaagctgcccagaatgagctag

SEQ ID NO: 102272 - DNA, 3951 bp, synthetic construct
  misc_feature 1..3951: note = Description of Artificial Sequence: Synthetic coding sequence
  source 1..3951: mol_type = other DNA
atggacagccaggagctgaagaccctgatcaactactactgccaggagagatacttccaccacgtgctgctggtggccagcgagggcatcaagagatacggcagcgaccccgtgttcagattctaccacgcctacggcaccctgatggagggcaagacccaggaggccctgagagagttcgaggccatcaagaacaagcaggacgtgagcctgtgcagcctgctggccctgatctacgcccacaagatgagccccaaccccgacagagaggccatcctggagagcgacgccagagtgaaggagcagagaaagggcgccggcgagaaggccctgtaccacgccggcctgttcctgtggcacatcggcagacacgacaaggccagagagtacatcgacagaatgatcaagatcagcgacggcagcaagcagggccacgtgctgaaggcctggctggacatcaccagaggcaaggagccctacaccaagaaggccctgaagtacttcgaggagggcctgcaggacggcaacgacaccttcgccctgctgggcaaggcccagtgcctggagatgagacagaactacagcggcgccctggagaccgtgaaccagatcatcgtgaacttccccagcttcctgcccgccttcgtgaagaagatgaagctgcagctggccctgcaggactgggaccagaccgtggagaccgcccagagactgctgctgcaggacagccagaacgtggaggccctgagaatgcaggccctgtactacgtgtgcagagagggcgacatcgagaaggccagcaccaagctggagaacctgggcaacaccctggacgccatggagccccagaacgcccagctgttctacaacatcaccctggccttcagcagaacctgcggcagaagccagctgatcctgcagaagatccagaccctgctggagagagccttcagcctgaacccccagcagagcgagttcgccaccgagctgggctaccagatgatcctgcagggcagagtgaaggaggccctgaagtggtacaagaccgccatgaccctggacgagaccagcgtgagcgccctggtgggcttcatccagtgccagctgatcgagggccagctgcaggacgccgaccagcagctggagttcctgaacgagatccagcagagcatcggcaagagcgccgagctgatctacctgcacgccgtgctggccatgaagaagaacaagagacaggaggaggtgatcaacctgctgaacgacgtgctggacacccacttcagccagctggagggcctgcccctgggcatccagtacttcgagaagctgaaccccgacttcctgctggagatcgtgatggagtacctgagcttctgccccatgcagcccgccagccccggccagcccctgtgccccctgctgagaagatgcatcagcgtgctggagaccgtggtgagaaccgtgcccggcctgctgcagaccgtgttcctgatcgccaaggtgaagtacctgagcggcgacatcgaggccgccttcaacaacctgcagcactgcctggagcacaaccccagctacgccgacgcccacctgctgctggcccaggtgtacctgagccaggagaaggtgaagctgtgcagccagagcctggagctgtgcctgagctacgacttcaaggtgagagactaccccctgtaccacctgatcaaggcccagagccagaagaagatgggcgagatcgccgacgccatcaagaccctgcacatggccatgagcctgcccggcatgaagagaatcggcgccagcaccaagagcaaggacagaaagaccgaggtggacaccagccacagactgagcatcttcctggagctgatcgacgtgcacagactgaacggcgagcagcacgaggccaccaaggtgctgcaggacgccatccacgagttcagcggcaccagcgaggaggtgagagtgaccatcgccaacgccgacctggccctggcccagggcgacatcgagagagccctgagcatcctgcagaacgtgaccgccgagcagccctacttcatcgaggccagagagaagatggccgacatctacctgaagcacagaaaggacaagatgctgtacatcacctgcttcagagagatcgccgagagaatggccaaccccagaagcttcctgctgctgggcgacgcctacatgaacatcctggagcccgaggaggccatcgtggcctacgagcaggccctgaaccagaaccccaaggacggcaccctggccagcaagatgggcaaggccctgatcaagacccacaactacagcatggccatcacctactacgaggccgccctgaagaccggccagaagaactacctgtgctacgacctggccgagctgctgctgaagctgaagtggtacgacaaggccgagaaggtgctgcagcacgccctggcccacgagcccgtgaacgagctgagcgccctgatggaggacggcagatgccaggtgctgctggccaaggtgtacagcaagatggagaagctgggcgacgccatcaccgccctgcagcaggccagagagctgcaggccagagtgctgaagagagtgcagatggagcagcccgacgccgtgcccgcccagaagcacctggccgccgagatctgcgccgagatcgccaagcacagcgtggcccagagagactacgagaaggccatcaagttctacagagaggccctggtgcactgcgagaccgacaacaagatcatgctggagctggccagactgtacctggcccaggacgaccccgacagctgcctgagacagtgcgccctgctgctgcagagcgaccaggacaacgaggccgccaccatgatgatggccgacctgatgttcagaaagcaggactacgagcaggccgtgttccacctgcagcagctgctggagagaaagcccgacaactacatgaccctgagcagactgatcgacctgctgagaagatgcggcaagctggaggacgtgcccagattcttcagcatggccgagaagagaaacagcagagccaagctggagcccggcttccagtactgcaagggcctgtacctgtggtacaccggcgagcccaacgacgccctgagacacttcaacaaggccagaaaggacagagactggggccagaacgccctgtacaacatgatcgagatctgcctgaaccccgacaacgagaccgtgggcggcgaggtgttcgagaacctggacggcgacctgggcaacagcaccgagaagcaggagagcgtgcagctggccgtgagaaccgccgagaagctgctgaaggagctgaagccccagaccgtgcagggccacgtgcagctgagaatcatggagaactactgcctgatggccaccaagcagaagagcaacgtggagcaggccctgaacaccttcaccgagatcgccgccagcgagaaggagcacatccccgccctgctgggcatggccaccgcctacatgatcctgaagcagacccccagagccagaaaccagctgaagagaatcgccaagatgaactggaacgccatcgacgccgaggagttcgagaagagctggctgctgctggccgacatctacatccagagcgccaagtacgacatggccgaggacctgctgaagagatgcctgagacacaacagaagctgctgcaaggcctacgagtacatgggctacatcatggagaaggagcaggcctacaccgacgccgccctgaactacgagatggcctggaagtacagcaacagaaccaaccccgccgtgggctacaagctggccttcaactacctgaaggccaagagatacgtggacagcatcgacatctgccaccaggtgctggaggcccaccccacctaccccaagatcagaaaggacatcctggacaaggccagagccagcctgagaccctag

SEQ ID NO: 102273 - DNA, 765 bp, synthetic construct
  misc_feature 1..765: note = Description of Artificial Sequence: Synthetic coding sequence
  source 1..765: mol_type = other DNA
atgatcgagatctgcctgaaccccgacaacgagaccgtgggcggcgaggtgttcgagaacctggacggcgacctgggcaacagcaccgagaagcaggagagcgtgcagctggccgtgagaaccgccgagaagctgctgaaggagctgaagccccagaccgtgcagggccacgtgcagctgagaatcatggagaactactgcctgatggccaccaagcagaagagcaacgtggagcaggccctgaacaccttcaccgagatcgccgccagcgagaaggagcacatccccgccctgctgggcatggccaccgcctacatgatcctgaagcagacccccagagccagaaaccagctgaagagaatcgccaagatgaactggaacgccatcgacgccgaggagttcgagaagagctggctgctgctggccgacatctacatccagagcgccaagtacgacatggccgaggacctgctgaagagatgcctgagacacaacagaagctgctgcaaggcctacgagtacatgggctacatcatggagaaggagcaggcctacaccgacgccgccctgaactacgagatggcctggaagtacagcaacagaaccaaccccgccgtgggctacaagctggccttcaactacctgaaggccaagagatacgtggacagcatcgacatctgccaccaggtgctggaggcccaccccacctaccccaagatcagaaaggacatcctggacaaggccagagccagcctgagaccctag

SEQ ID NO: 102274 - DNA, 6078 bp, synthetic construct
  misc_feature 1..6078: note = Description of Artificial Sequence: Synthetic coding sequence
  source 1..6078: mol_type = other DNA
atggacaacttcgccgagggcgacttcaccgtggccgactacgccctgctggaggactgcccccacgtggacgactgcgtgttcgccgccgagttcatgagcaacgactacgtgagagtgacccagctgtactgcgacggcgtgggcgtgcagtacaaggactacatccagagcgagagaaacctggagttcgacatctgcagcatctggtgcagcaagcccatcagcgtgctgcaggactactgcgacgccatcaagatcaacatcttctggcccctgctgttccagcaccagaacagcagcgtgatcagcagactgcacccctgcgtggacgccaacaacagcagagccagcgagatcaacctgaagaagctgcagcacctggagctgatggaggacatcgtggacctggccaagaaggtggccaacgacagcttcctgatcggcggcctgctgagaatcggctgcaagatcgagaacaagatcctggccatggaggaggccctgaactggatcaagtacgccggcgacgtgaccatcctgaccaagctgggcagcatcgacaactgctggcccatgctgagcatcttcttcaccgagtacaagtaccacatcaccaagatcgtgatggaggactgcaacctgctggaggagctgaagacccagagctgcatggactgcatcgaggagggcgagctgatgaagatgaagggcaacgaggagttcagcaaggagagattcgacatcgccatcatctactacaccagagccatcgagtacagacccgagaactacctgctgtacggcaacagagccctgtgcttcctgagaaccggccagttcagaaacgccctgggcgacggcaagagagccaccatcctgaagaacacctggcccaagggccactacagatactgcgacgccctgagcatgctgggcgagtacgactgggccctgcaggccaacatcaaggcccagaagctgtgcaagaacgaccccgagggcatcaaggacctgatccagcagcacgtgaagctgcagaagcagatcgaggacctgcagggcagaaccgccaacaaggaccccatcaaggccttctacgagaacagagcctacacccccagaagcctgagcgcccccatcttcaccaccagcctgaacttcgtggagaaggagagagacttcagaaagatcaaccacgagatggccaacggcggcaaccagaacctgaaggtggccgacgaggccctgaaggtggacgactgcgactgccaccccgagttcagcccccccagcagccagccccccaagcacaagggcaagcagaagagcagaaacaacgagagcgagaagttcagcagcagcagccccctgaccctgcccgccgacctgaagaacatcctggagaagcagttcagcaagagcagcagagccgcccaccaggacttcgccaacatcatgaagatgctgagaagcctgatccaggacggctacatggccctgctggagcagagatgcagaagcgccgcccaggccttcaccgagctgctgaacggcctggacccccagaagatcaagcagctgaacctggccatgatcaactacgtgctggtggtgtacggcctggccatcagcctgctgggcatcggccagcccgaggagctgagcgaggccgagaaccagttcaagagaatcatcgagcactaccccagcgagggcctggactgcctggcctactgcggcatcggcaaggtgtacctgaagaagaacagattcctggaggccctgaaccacttcgagaaggccagaaccctgatctacagactgcccggcgtgctgacctggcccaccagcaacgtgatcatcgaggagagccagccccagaagatcaagatgctgctggagaagttcgtggaggagtgcaagttcccccccgtgcccgacgccatctgctgctaccagaagtgccacggctacagcaagatccagatctacatcaccgaccccgacttcaagggcttcatcagaatcagctgctgccagtactgcaagatcgagttccacatgaactgctggaagaagctgaagaccaccaccttcaacgacaagatcgacaaggacttcctgcagggcatctgcctgacccccgactgcgagggcgtgatcagcaagatcatcatcttcagcagcggcggcgaggtgaagtgcgagttcgagcacaaggtgatcaaggagaaggtgccccccagacccatcctgaagcagaagtgcagcagcctggagaagctgagactgaaggaggacaagaagctgaagagaaagatccagaagaaggaggccaagaagctggcccaggagagaatggaggaggacctgagagagagcaacccccccaagaacgaggagcagaaggagaccgtggacaacgtgcagagatgccagttcctggacgacagaatcctgcagtgcatcaagcagtacgccgacaagatcaagagcggcatccagaacaccgccatgctgctgaaggagctgctgagctggaaggtgctgagcaccgaggactacaccacctgcttcagcagcagaaacttcctgaacgaggccgtggactacgtgatcagacacctgatccaggagaacaacagagtgaagaccagaatcttcctgcacgtgctgagcgagctgaaggaggtggagcccaagctggccgcctggatccagaagctgaacagcttcggcctggacgccaccggcaccttcttcagcagatacggcgccagcctgaagctgctggacttcagcatcatgaccttcctgtggaacgagaagtacggccacaagctggacagcatcgagggcaagcagctggactacttcagcgagcccgccagcctgaaggaggccagatgcctgatctggctgctggaggagcacagagacaagttccccgccctgcacagcgccctggacgagttcttcgacatcatggacagcagatgcaccgtgctgagaaagcaggacagcggcgaggcccccttcagcagcaccaaggtgaagaacaagagcaagaagaagaagcccaaggacagcaagcccatgctggtgggcagcggcaccaccagcgtgaccagcaacaacgagatcatcaccagcagcgaggaccacagcaacagaaacagcgacagcgccggccccttcgccgtgcccgaccacctgagacaggacgtggaggagttcgaggccctgtacgaccagcacagcaacgagtacgtggtgagaaacaagaagctgtgggacatgaaccccaagcagaagtgcagcaccctgtacgactacttcagccagttcctggaggagcacggccccctggacatgagcaacaagatgttcagcgccgagtacgagttcttccccgaggagaccagacagatcctggagaaggccggcggcctgaagcccttcctgctgggctgccccagattcgtggtgatcgacaactgcatcgccctgaagaaggtggccagcagactgaagaagaagagaaagaagaagaacatcaagaccaaggtggaggagatcagcaaggccggcgagtacgtgagagtgaagctgcagctgaaccccgccgccagagagttcaagcccgacgtgaagagcaagcccgtgagcgacagcagcagcgcccccgccttcgagaacgtgaagcccaagcccgtgagcgccaacagccccaagcccgcctgcgaggacgtgaaggccaagcccgtgagcgacaacagcagcagacaggtgagcgaggacggccagcccaagggcgtgagcagcaacagccccaagcccggcagcgaggacgccaactacaagagagtgagctgcaacagccccaagcccgtgctggaggacgtgaagcccacctactgggcccagagccacctggtgaccggctactgcacctacctgcccttccagagattcgacatcacccagaccccccccgcctacatcaacgtgctgcccggcctgccccagtacaccagcatctacacccccctggccagcctgagccccgagtaccagctgcccagaagcgtgcccgtggtgcccagcttcgtggccaacgacagagccgacaagaacgccgccgcctacttcgagggccaccacctgaacgccgagaacgtggccggccaccagatcgccagcgagacccagatcctggagggcagcctgggcatcagcgtgaagagccactgcagcaccggcgacgcccacaccgtgctgagcgagagcaacagaaacgacgagcactgcggcaacagcaacaacaagtgcgaggtgatccccgagagcaccagcgccgtgaccaacatcccccacgtgcagatggtggccatccaggtgagctggaacatcatccaccaggaggtgaacaccgagccctacaaccccttcgaggagagacagggcgagatcagcagaatcgagaaggagcaccaggtgctgcaggaccagctgcaggaggtgtacgagaactacgagcagatcaagctgaagggcctggaggagaccagagacctggaggagaagctgaagagacacctggaggagaacaagatcagcaagaccgagctggactggttcctgcaggacctggagagagagatcaagaagtggcagcaggagaagaaggagatccaggagagactgaagagcctgaagaagaagatcaagaaggtgagcaacgccagcgagatgtacacccagaagaacgacggcaaggagaaggagcacgagctgcacctggaccagagcctggagatcagcaacaccctgaccaacgagaagatgaagatcgaggagtacatcaagaagggcaaggaggactacgaggagagccaccagagagccgtggccgccgaggtgagcgtgctggagaactggaaggagagcgaggtgtacaagctgcagatcatggagagccaggccgaggccttcctgaagaagctgggcctgatcagcagagaccccgccgcctaccccgacatggagagcgacatcagaagctgggagctgttcctgagcaacgtgaccaaggagatcgagaaggccaagagccagttcgaggagcagatcaaggccatcaagaacggcagcagactgagcgagctgagcaaggtgcagatcagcgagctgagcttccccgcctgcaacaccgtgcaccccgagctgctgcccgagagcagcggcgacgacggccagggcctggtgaccagcgccagcgacgtgaccggcaaccacgccgccctgcacagagaccccagcgtgttcagcgccggcgacagccccggcgaggcccccagcgccctgctgcccggccccccccccggccagcccgaggccacccagctgaccggccccaagagagccggccaggccgccctgagcgagagaagccccgtggccgacagaaagcagcccgtgccccccggcagagccgccagaagcagccagagccccaagaagcccttcaacagcatcatcgagcacctgagcgtggtgttcccctgctacaacagcaccgagctggccggcttcatcaagaaggtgagaagcaagaacaagaacagcctgagcggcctgagcatcgacgagatcgtgcagagagtgaccgagcacatcctggacgagcagaagaagaagaagcccaaccccggcaaggacaagagaacctacgagcccagcagcgccacccccgtgaccagaagcagccagggcagccccagcgtggtggtggcccccagccccaagaccaagggccagaaggccgaggacgtgcccgtgagaatcgccctgggcgccagcagctgcgagatctgccacgaggtgttcaagagcaagaacgtgagagtgctgaagtgcggccacaagtaccacaagggctgcttcaagcagtggctgaagggccagagcgcctgccccgcctgccagggcagagacctgctgaccgaggagagccccagcggcagaggctggcccagccagaaccaggagctgcccagctgcagcagcagatag

SEQ ID NO: 102275 - DNA, 6078 bp, synthetic construct; identical to SEQ ID NO: 102274
  misc_feature 1..6078: note = Description of Artificial Sequence: Synthetic coding sequence
  source 1..6078: mol_type = other DNA

SEQ ID NO: 102276 - DNA, 6078 bp, synthetic construct; identical to SEQ ID NO: 102274
  misc_feature 1..6078: note = Description of Artificial Sequence: Synthetic coding sequence
  source 1..6078: mol_type = other DNA

SEQ ID NO: 102277 - DNA, 3540 bp, synthetic construct
  misc_feature 1..3540: note = Description of Artificial Sequence: Synthetic coding sequence
  source 1..3540: mol_type = other DNA
atggacaacttcgccgagggcgacttcaccgtggccgactacgccctgctggaggactgcccccacgtggacgactgcgtgttcgccgccgagttcatgagcaacgactacgtgagagtgacccagctgtactgcgacggcgtgggcgtgcagtacaaggactacatccagagcgagagaaacctggagttcgacatctgcagcatctggtgcagcaagcccatcagcgtgctgcaggactactgcgacgccatcaagatcaacatcttctggcccctgctgttccagcaccagaacagcagcgtgatcagcagactgcacccctgcgtggacgccaacaacagcagagccagcgagatcaacctgaagaagctgcagcacctggagctgatggaggacatcgtggacctggccaagaaggtggccaacgacagcttcctgatcggcggcctgctgagaatcggctgcaagatcgagaacaagatcctggccatggaggaggccctgaactggatcaagtacgccggcgacgtgaccatcctgaccaagctgggcagcatcgacaactgctggcccatgctgagcatcttcttcaccgagtacaagtaccacatcaccaagatcgtgatggaggactgcaacctgctggaggagctgaagacccagagctgcatggactgcatcgaggagggcgagctgatgaagatgaagggcaacgaggagttcagcaaggagagattcgacatcgccatcatctactacaccagagccatcgagtacagacccgagaactacctgctgtacggcaacagagccctgtgcttcctgagaaccggccagttcagaaacgccctgggcgacggcaagagagccaccatcctgaagaacacctggcccaagggccactacagatactgcgacgccctgagcatgctgggcgagtacgactgggccctgcaggccaacatcaaggcccagaagctgtgcaagaacgaccccgagggcatcaaggacctgatccagcagcacgtgaagctgcagaagcagatcgaggacctgcagggcagaaccgccaacaaggaccccatcaaggccttctacgagaacagagcctacacccccagaagcctgagcgcccccatcttcaccaccagcctgaacttcgtggagaaggagagagacttcagaaagatcaaccacgagatggccaacggcggcaaccagaacctgaaggtggccgacgaggccctgaaggtggacgactgcgactgccaccccgagttcagcccccccagcagccagccccccaagcacaagggcaagcagaagagcagaaacaacgagagcgagaagttcagcagcagcagccccctgaccctgcccgccgacctgaagaacatcctggagaagcagttcagcaagagcagcagagccgcccaccaggacttcgccaacatcatgaagatgctgagaagcctgatccaggacggctacatggccctgctggagcagagatgcagaagcgccgcccaggccttcaccgagctgctgaacggcctggacccccagaagatcaagcagctgaacctggccatgatcaactacgtgctggtggtgtacggcctggccatcagcctgctgggcatcggccagcccgaggagctgagcgaggccgagaaccagttcaagagaatcatcgagcactaccccagcgagggcctggactgcctggcctactgcggcatcggcaaggtgtacctgaagaagaacagattcctggaggccctgaaccacttcgagaaggccagaaccctgatctacagactgcccggcgtgctgacctggcccaccagcaacgtgatcatcgaggagagccagccccagaagatcaagatgctgctggagaagttcgtggaggagtgcaagttcccccccgtgcccgacgccatctgctgctaccagaagtgccacggctacagcaagatccagatctacatcaccgaccccgacttcaagggcttcatcagaatcagctgctgccagtactgcaagatcgagttccacatgaactgctggaagaagctgaagaccaccaccttcaacgacaagatcgacaaggacttcctgcagggcatctgcctgacccccgactgcgagggcgtgatcagcaagatcatcatcttcagcagcggcggcgaggtgaagtgcgagttcgagcacaaggtgatcaaggagaaggtgccccccagacccatcctgaagcagaagtgcagcagcctggagaagctgagactgaaggaggacaagaagctgaagagaaagatccagaagaaggaggccaagaagctggcccaggagagaatggaggaggacctgagagagagcaacccccccaagaacgaggagcagaaggagaccgtggacaacgtgcagagatgccagttcctggacgacagaatcctgcagtgcatcaagcagtacgccgacaagatcaagagcggcatccagaacaccgccatgctgctgaaggagctgctgagctggaaggtgctgagcaccgaggactacaccacctgcttcagcagcagaaacttcctgaacgaggccgtggactacgtgatcagacacctgatccaggagaacaacagagtgaagaccagaatcttcctgcacgtgctgagcgagctgaaggaggtggagcccaagctggccgcctggatccagaagctgaacagcttcggcctggacgccaccggcaccttcttcagcagatacggcgccagcctgaagctgctggacttcagcatcatgaccttcctgtggaacgagaagtacggccacaagctggacagcatcgagggcaagcagctggactacttcagcgagcccgccagcctgaaggaggccagatgcctgatctggctgctggaggagcacagagacaagttccccgccctgcacagcgccctggacgagttcttcgacatcatggacagcagatgcaccgtgctgagaaagcaggacagcggcgaggcccccttcagcagcaccaaggtgaagaacaagagcaagaagaagaagcccaaggacagcaagcccatgctggtgggcagcggcaccaccagcgtgaccagcaacaacgagatcatcaccagcagcgaggaccacagcaacagaaacagcgacagcgccggccccttcgccgtgcccgaccacctgagacaggacgtggaggagttcgaggccctgtacgaccagcacagcaacgagtacgtggtgagaaacaagaagctgtgggacatgaaccccaagcagaagtgcagcaccctgtacgactacttcagccagttcctggaggagcacggccccctggacatgagcaacaagatgttcagcgccgagtacgagttcttccccgaggagaccagacagatcctggagaaggccggcggcctgaagcccttcctgctgggctgccccagattcgtggtgatcgacaactgcatcgccctgaagaaggtggccagcagactgaagtag

SEQ ID NO: 102278 - DNA, 2343 bp, synthetic construct
  misc_feature 1..2343: note = Description of Artificial Sequence: Synthetic coding sequence
  source 1..2343: mol_type = other DNA
atggacaacttcgccgagggcgacttcaccgtggccgactacgccctgctggaggactgcccccacgtggacgactgcgtgttcgccgccgagttcatgagcaacgactacgtgagagtgacccagctgtactgcgacggcgtgggcgtgcagtacaaggactacatccagagcgagagaaacctggagttcgacatctgcagcatctggtgcagcaagcccatcagcgtgctgcaggactactgcgacgccatcaagatcaacatcttctggcccctgctgttccagcaccagaacagcagcgtgatcagcagactgcacccctgcgtggacgccaacaacagcagagccagcgagatcaacctgaagaagctgcagcacctggagctgatggaggacatcgtggacctggccaagaaggtggccaacgacagcttcctgatcggcggcctgctgagaatcggctgcaagatcgagaacaagatcctggccatggaggaggccctgaactggatcaagtacgccggcgacgtgaccatcctgaccaagctgggcagcatcgacaactgctggcccatgctgagcatcttcttcaccgagtacaagtaccacatcaccaagatcgtgatggaggactgcaacctgctggaggagctgaagacccagagctgcatggactgcatcgaggagggcgagctgatgaagatgaagggcaacgaggagttcagcaaggagagattcgacatcgccatcatctactacaccagagccatcgagtacagacccgagaactacctgctgtacggcaacagagccctgtgcttcctgagaaccggccagttcagaaacgccctgggcgacggcaagagagccaccatcctgaagaacacctggcccaagggccactacagatactgcgacgccctgagcatgctgggcgagtacgactgggccctgcaggccaacatcaaggcccagaagctgtgcaagaacgaccccgagggcatcaaggacctgatccagcagcacgtgaagctgcagaagcagatcgaggacctgcagggcagaaccgccaacaaggaccccatcaaggccttctacgagaacagagcctacacccccagaagcctgagcgcccccatcttcaccaccagcctgaacttcgtggagaaggagagagacttcagaaagatcaaccacgagatggccaacggcggcaaccagaacctgaaggtggccgacgaggccctgaaggtggacgactgcgactgccaccccgagttcagcccccccagcagccagccccccaagcacaagggcaagcagaagagcagaaacaacgagagcgagaagttcagcagcagcagccccctgaccctgcccgccgacctgaagaacatcctggagaagcagttcagcaagagcagcagagccgcccaccaggacttcgccaacatcatgaagatgctgagaagcctgatccaggacggctacatggccctgctggagcagagatgcagaagcgccgcccaggccttcaccgagctgctgaacggcctggacccccagaagatcaagcagctgaacctggccatgatcaactacgtgctggtggtgtacggcctggccatcagcctgctgggcatcggccagcccgaggagctgagcgaggccgagaaccagttcaagagaatcatcgagcactaccccagcgagggcctggactgcctggcctactgcggcatcggcaaggtgtacctgaagaagaacagattcctggaggccctgaaccacttcgagaaggccagaaccctgatctacagactgcccggcgtgctgacctggcccaccagcaacgtgatcatcgaggagagccagccccagaagatcaagatgctgctggagaagttcgtggaggagtgcaagttcccccccgtgcccgacgccatctgctgctaccagaagtgccacggctacagcaagatccagatctacatcaccgaccccgacttcaagggcttcatcagaatcagctgctgccagtactgcaagatcgagttccacatgaactgctggaagaagctgaagaccaccaccttcaacgacaagatcgacaaggacttcctgcagggcatctgcctgacccccgactgcgagggcgtgatcagcaagatcatcatcttcagcagcggcggcgaggtgaagtgcgagttcgagcacaaggtgatcaaggagaaggtgccccccagacccatcctgaagcagaagtgcagcagcctggagaagctgagactgaaggaggacaagaagctgaagagaaagatccagaagaaggaggcctag

SEQ ID NO: 102279 - DNA, 1839 bp, synthetic construct
  misc_feature 1..1839: note = Description of Artificial Sequence: Synthetic coding sequence
  source 1..1839: mol_type = other DNA
atgctgggcgagtacgactgggccctgcaggccaacatcaaggcccagaagctgtgcaagaacgaccccgagggcatcaaggacctgatccagcagcacgtgaagctgcagaagcagatcgaggacctgcagggcagaaccgccaacaaggaccccatcaaggccttctacgagaacagagcctacacccccagaagcctgagcgcccccatcttcaccaccagcctgaacttcgtggagaaggagagagacttcagaaagatcaaccacgagatggccaacggcggcaaccagaacctgaaggtggccgacgaggccctgaaggtggacgactgcgactgccaccccgagttcagcccccccagcagccagccccccaagcacaagggcaagcagaagagcagaaacaacgagagcgagaagttcagcagcagcagccccctgaccctgcccgccgacctgaagaacatcctggagaagcagttcagcaagagcagcagagccgcccaccaggacttcgccaacatcatgaagatgctgagaagcctgatccaggacggctacatggccctgctggagcagagatgcagaagcgccgcccaggccttcaccgagctgctgaacggcctggacccccagaagatcaagcagctgaacctggccatgatcaactacgtgctggtggtgtacggcctggccatcagcctgctgggcatcggccagcccgaggagctgagcgaggccgagaaccagttcaagagaatcatcgagcactaccccagcgagggcctggactgcctggcctactgcggcatcggcaaggtgtacctgaagaagaacagattcctggaggccctgaaccacttcgagaaggccagaaccctgatctacagactgcccggcgtgctgacctggcccaccagcaacgtgatcatcgaggagagccagccccagaagatcaagatgctgctggagaagttcgtggaggagtgcaagttcccccccgtgcccgacgccatctgctgctaccagaagtgccacggctacagcaagatccagatctacatcaccgaccccgacttcaagggcttcatcagaatcagctgctgccagtactgcaagatcgagttccacatgaactgctggaagaagctgaagaccaccaccttcaacgacaagatcgacaaggacttcctgcagggcatctgcctgacccccgactgcgagggcgtgatcagcaagatcatcatcttcagcagcggcggcgaggtgaagtgcgagttcgagcacaaggtgatcaaggagaaggtgccccccagacccatcctgaagcagaagtgcagcagcctggagaagctgagactgaaggaggacaagaagctgaagagaaagatccagaagaaggaggccaagaagctggcccaggagagaatggaggaggacctgagagagagcaacccccccaagaacgaggagcagaaggagaccgtggacaacgtgcagagatgccagttcctggacgacagaatcctgcagtgcatcaagcagtacgccgacaagatcaagagcggcatccagaacaccgccatgctgctgaaggagctgctgagctggaaggtgctgagcaccgaggactacaccacctgcttcagcagcagaaacttcctgaacgaggccgtggactacgtgatcagacacctgatccaggagaacaacagagtgaagaccagaatcttcctgcacgtgctgagcgagctgaaggaggtggagcccaagctggccgcctggatccagaagctgaacagcttcggcatgagcctgtacatccccgagcagtag

SEQ ID NO: 102280 - DNA, 1842 bp, synthetic construct
  misc_feature 1..1842: note = Description of Artificial Sequence: Synthetic coding sequence
  source 1..1842: mol_type = other DNA
atggacgccgtgctggcctgcagactgagaggcagaggcaacagagtggccgccctgagacccagacccagacccggcggcagcgccggccccagccccttcgccctgctgtgcgccggcctgagccccgagcccagagccggcgtgggcagcgagttccccgcctggttcctgggcggcagcagccagagaagaaacatggccctgctgggcagcagagccgagctggaggccgacgaggacgtgttcgaggacgccctggagaccatcagcatggccaaggagagcatgtaccacgccctgggctacagcaccatcgtggtgctgcaggccgtgctgaccttcgagcagcaggacatccagaacggcatcagcgccatgaaggacgccctgcagacctgccagaagtacagaaagaagtacaccgtggtggagagcttcagcagcctgctgagcagaggcagcctggagcagctgagcgaggaggagatgcacgccgagatctgctacgccgagtgcctgctgcagaaggccgccctgaccttcgtgcaggacgagaacatgatcaacttcatcaagggcggcctgaagatcagaaccagctaccagatctacaaggagtgcctgagcatcctgcacgagatccagaagaacaagctgcagcaggagttcttctacgagttcgagggcggcgtgaagctgggcagcggcgccttcaacctgatgctgagcctgctgcccgccagaatcatcagactgctggagttcatcggcttcagcggcaacagagagctgggcctgctgcagctgagagagggcgccagcggcagaagcatgagaagcgccctgtgctgcctgaccatcctggccttccacacctacatcagcctgatcctgggcaccggcgaggtgaacgtggccgaggccgagagactgctggcccccttcctgcagcagttccccaacggcagcctggtgctgttctaccacgccagaatcgagctgctgaagggcaacctggaggaggcccaggaggtgttccagaagtgcatcagcgtgcaggaggagtggaagcagttccaccacctgtgctactgggagctgatgtggatcaacgtgttccagcagaactggatgcaggcctactactacagcgacctgctgtgcaaggagagcaagtggagcaaggccacctacgtgttcctgaaggccgccatcctgagcatgctgcccgaggaggacgtggtggccaccaacgagaacgtggtgaccctgttcagacaggtggacagcctgaagcagagaatcgccggcaagagcatccccaccgagaagttcgccgtgagaaaggccagaagatacagcgccagcctgcccgcccccgtgaagctgatcctgcccgccctggagatgatgtacgtgtggaacggcttcagcatcgtgagcaagagaaaggacctgagcgagaacctgctggtgaccgtggagaaggccgaggccgccctgcagagccagaacttcaacagcttcagcgtggacgacgagtgcctggtgaagctgctgaagggctgctgcctgaagaacctgcagagacccctgcaggccgagctgtgctacaaccacgtggtggagagcgagaagctgctgaagtacgaccactacctggtgcccttcaccctgttcgagctggccagcctgtacaagagccagggcgagatcgacaaggccatcaagttcctggagaccgccagaaacaactacaaggactacagcctggagagcagactgcacttcagaatccaggccgccctgcacctgtggagaaagcccagcagcgactag

SEQ ID NO: 102281 - DNA, 1851 bp, synthetic construct
  misc_feature 1..1851: note = Description of Artificial Sequence: Synthetic coding sequence
  source 1..1851: mol_type = other DNA
atggccctgctgggcagcagagccgagctggaggccgacgaggacgtgttcgaggacgccctggagaccatcagcatcagcagccacagcgacatggccaccagcagcctgcacttcgccagctgcgacacccagcaggcccccagacagagaggcgccagcaccgtgagcagcagcagcagcaccaaggtggacctgaagagcggcctggaggagtgcgccgtggccctgaacctgttcctgagcaacaagttcaccgacgccctggagctgctgagaccctgggccaaggagagcatgtaccacgccctgggctacagcaccatcgtggtgctgcaggccgtgctgaccttcgagcagcaggacatccagaacggcatcagcgccatgaaggacgccctgcagacctgccagaagtacagaaagaagtacaccgtggtggagagcttcagcagcctgctgagcagaggcagcctggagcagctgagcgaggaggagatgcacgccgagatctgctacgccgagtgcctgctgcagaaggccgccctgaccttcgtgcaggacgagaacatgatcaacttcatcaagggcggcctgaagatcagaaccagctaccagatctacaaggagtgcctgagcatcctgcacgagatccagaagaacaagctgcagcaggagttcttctacgagttcgagggcggcgtgaagctgggcagcggcgccttcaacctgatgctgagcctgctgcccgccagaatcatcagactgctggagttcatcggcttcagcggcaacagagagctgggcctgctgcagctgagagagggcgccagcggcagaagcatgagaagcgccctgtgctgcctgaccatcctggccttccacacctacatcagcctgatcctgggcaccggcgaggtgaacgtggccgaggccgagagactgctggcccccttcctgcagcagttccccaacggcagcctggtgctgttctaccacgccagaatcgagctgctgaagggcaacctggaggaggcccaggaggtgttccagaagtgcatcagcgtgcaggaggagtggaagcagttccaccacctgtgctactgggagctgatgtggatcaacgtgttccagcagaactggatgcaggcctactactacagcgacctgctgtgcaaggagagcaagtggagcaaggccacctacgtgttcctgaaggccgccatcctgagcatgctgcccgaggaggacgtggtggccaccaacgagaacgtggtgaccctgttcagacaggtggacagcctgaagcagagaatcgccggcaagagcatccccaccgagaagttcgccgtgagaaaggccagaagatacagcgccagcctgcccgcccccgtgaagctgatcctgcccgccctggagatgatgtacgtgtggaacggcttcagcatcgtgagcaagagaaaggacctgagcgagaacctgctggtgaccgtggagaaggccgaggccgccctgcagagccagaacttcaacagcttcagcgtggacgacgagtgcctggtgaagctgctgaagggctgctgcctgaagaacctgcagagacccctgcaggccgagctgtgctacaaccacgtggtggagagcgagaagctgctgaagtacgaccactacctggtgcccttcaccctgttcgagctggccagcctgtacaagagccagggcgagatcgacaaggccatcaagttcctggagaccgccagaaacaactacaaggactacagcctggagagcagactgcacttcagaatccaggccgccctgcacctgtggagaaagcccagcagcgactag

SEQ ID NO: 102282 - DNA, 2010 bp, synthetic construct
  misc_feature 1..2010: note = Description of Artificial Sequence: Synthetic coding sequence
  source 1..2010: mol_type = other DNA
atggacgccgtgctggcctgcagactgagaggcagaggcaacagagtggccgccctgagacccagacccagacccggcggcagcgccggccccagccccttcgccctgctgtgcgccggcctgagccccgagcccagagccggcgtgggcagcgagttccccgcctggttcctgggcggcagcagccagagaagaaacatggccctgctgggcagcagagccgagctggaggccgacgaggacgtgttcgaggacgccctggagaccatcagcatcagcagccacagcgacatggccaccagcagcctgcacttcgccagctgcgacacccagcaggcccccagacagagaggcgccagcaccgtgagcagcagcagcagcaccaaggtggacctgaagagcggcctggaggagtgcgccgtggccctgaacctgttcctgagcaacaagttcaccgacgccctggagctgctgagaccctgggccaaggagagcatgtaccacgccctgggctacagcaccatcgtggtgctgcaggccgtgctgaccttcgagcagcaggacatccagaacggcatcagcgccatgaaggacgccctgcagacctgccagaagtacagaaagaagtacaccgtggtggagagcttcagcagcctgctgagcagaggcagcctggagcagctgagcgaggaggagatgcacgccgagatctgctacgccgagtgcctgctgcagaaggccgccctgaccttcgtgcaggacgagaacatgatcaacttcatcaagggcggcctgaagatcagaaccagctaccagatctacaaggagtgcctgagcatcctgcacgagatccagaagaacaagctgcagcaggagttcttctacgagttcgagggcggcgtgaagctgggcagcggcgccttcaacctgatgctgagcctgctgcccgccagaatcatcagactgctggagttcatcggcttcagcggcaacagagagctgggcctgctgcagctgagagagggcgccagcggcagaagcatgagaagcgccctgtgctgcctgaccatcctggccttccacacctacatcagcctgatcctgggcaccggcgaggtgaacgtggccgaggccgagagactgctggcccccttcctgcagcagttccccaacgtgagaagcgtgttccagagcgcccaggaggtgttccagaagtgcatcagcgtgcaggaggagtggaagcagttccaccacctgtgctactgggagctgatgtggatcaacgtgttccagcagaactggatgcaggcctactactacagcgacctgctgtgcaaggagagcaagtggagcaaggccacctacgtgttcctgaaggccgccatcctgagcatgctgcccgaggaggacgtggtggccaccaacgagaacgtggtgaccctgttcagacaggtggacagcctgaagcagagaatcgccggcaagagcatccccaccgagaagttcgccgtgagaaaggccagaagatacagcgccagcctgcccgcccccgtgaagctgatcctgcccgccctggagatgatgtacgtgtggaacggcttcagcatcgtgagcaagagaaaggacctgagcgagaacctgctggtgaccgtggagaaggccgaggccgccctgcagagccagaacttcaacagcttcagcgtggacgacgagtgcctggtgaagctgctgaagggctgctgcctgaagaacctgcagagacccctgcaggccgagctgtgctacaaccacgtggtggagagcgagaagctgctgaagtacgaccactacctggtgcccttcaccctgttcgagctggccagcctgtacaagagccagggcgagatcgacaaggccatcaagttcctggagaccgccagaaacaactacaaggactacagcctggagagcagactgcacttcagaatccaggccgccctgcacctgtggagaaagcccagcagcgactag

SEQ ID NO: 102283 - DNA, 2049 bp, synthetic construct
  misc_feature 1..2049: note = Description of Artificial Sequence: Synthetic coding sequence
  source 1..2049: mol_type = other DNA
atggacgccgtgctggcctgcagactgagaggcagaggcaacagagtggccgccctgagacccagacccagacccggcggcagcgccggccccagccccttcgccctgctgtgcgccggcctgagccccgagcccagagccggcgtgggcagcgagttccccgcctggttcctgggcggcagcagccagagaagaaacatggccctgctgggcagcagagccgagctggaggccgacgaggacgtgttcgaggacgccctggagaccatcagcatcagcagccacagcgacatggccaccagcagcctgcacttcgccagctgcgacacccagcaggcccccagacagagaggcgccagcaccgtgagcagcagcagcagcaccaaggtggacctgaagagcggcctggaggagtgcgccgtggccctgaacctgttcctgagcaacaagttcaccgacgccctggagctgctgagaccctgggccaaggagagcatgtaccacgccctgggctacagcaccatcgtggtgctgcaggccgtgctgaccttcgagcagcaggacatccagaacggcatcagcgccatgaaggacgccctgcagacctgccagaagtacagaaagaagtacaccgtggtggagagcttcagcagcctgctgagcagaggcagcctggagcagctgagcgaggaggagatgcacgccgagatctgctacgccgagtgcctgctgcagaaggccgccctgaccttcgtgcaggacgagaacatgatcaacttcatcaagggcggcctgaagatcagaaccagctaccagatctacaaggagtgcctgagcatcctgcacgagatccagaagaacaagctgcagcaggagttcttctacgagttcgagggcggcgtgaagctgggcagcggcgccttcaacctgatgctgagcctgctgcccgccagaatcatcagactgctggagttcatcggcttcagcggcaacagagagctgggcctgctgcagctgagagagggcgccagcggcagaagcatgagaagcgccctgtgctgcctgaccatcctggccttccacacctacatcagcctgatcctgggcaccggcgaggtgaacgtggccgaggccgagagactgctggcccccttcctgcagcagttccccaacggcagcctggtgctgttctaccacgccagaatcgagctgctgaagggcaacctggaggaggcccaggaggtgttccagaagtgcatcagcgtgcaggaggagtggaagcagttccaccacctgtgctactgggagctgatgtggatcaacgtgttccagcagaactggatgcaggcctactactacagcgacctgctgtgcaaggagagcaagtggagcaaggccacctacgtgttcctgaaggccgccatcctgagcatgctgcccgaggaggacgtggtggccaccaacgagaacgtggtgaccctgttcagacaggtggacagcctgaagcagagaatcgccggcaagagcatccccaccgagaagttcgccgtgagaaaggccagaagatacagcgccagcctgcccgcccccgtgaagctgatcctgcccgccctggagatgatgtacgtgtggaacggcttcagcatcgtgagcaagagaaaggacctgagcgagaacctgctggtgaccgtggagaaggccgaggccgccctgcagagccagaacttcaacagcttcagcgtggacgacgagtgcctggtgaagctgctgaagggctgctgcctgaagaacctgcagagacccctgcaggccgagctgtgctacaaccacgtggtggagagcgagaagctgctgaagtacgaccactacctggtgcccttcaccctgttcgagctggccagcctgtacaagagccagggcgagatcgacaaggccatcaagttcctggagaccgccagaaacaactacaaggactacagcctggagagcagactgcacttcagaatccaggccgccctgcacctgtggagaaagcccagcagcgactag

SEQ ID NO: 102284 - DNA, 585 bp, synthetic construct
  misc_feature 1..585: note = Description of Artificial Sequence: Synthetic coding sequence
  source 1..585: mol_type = other DNA
atggccctgctgggcagcagagccgagctggaggccgacgaggacgtgttcgaggacgccctggagaccatcagcatcagcagccacagcgacatggccaccagcagcctgcacttcgccagctgcgacacccagcaggcccccagacagagaggcgccagcaccgtgagcagcagcagcagcaccaaggtggacctgaagagcggcctggaggagtgcgccgtggccctgaacctgttcctgagcaacaagttcaccgacgccctggagctgctgagaccctgggccaaggagagcatgtaccacgccctgggctacagcaccatcgtggtgctgcaggccgtgctgaccttcgagcagcaggacatccagaacggcatcagcgccatgaaggacgccctgcagacctgccagaagtacagaaagaagtacaccgtggtggagagcttcagcagcctgctgagcagaggcagcctggagcagctgagcgaggaggagatgcacgccgagatctgctacgccgagtgcctgctgcagaaggccgccctgaccttcgtgcagagaatgagcttctaccccgcctag

SEQ ID NO: 102285 - DNA, 1164 bp, synthetic construct
  misc_feature 1..1164: note = Description of Artificial Sequence: Synthetic coding sequence
  source 1..1164: mol_type = other DNA
atggagcagcccggccaggaccccaccagcgacgacgtgatggacagcttcctggagaagttccagagccagccctacagaggcggcttccacgaggaccagtgggagaaggagttcgagaaggtgcccctgttcatgagcagagcccccagcgagatcgaccccagagagaaccccgacctggcctgcctgcagagcatcatcttcgacgaggagagaagccccgaggagcaggccaagacctacaaggacgagggcaacgactacttcaaggagaaggactacaagaaggccgtgatcagctacaccgagggcctgaagaagaagtgcgccgaccccgacctgaacgccgtgctgtacaccaacagagccgccgcccagtactacctgggcaacttcagaagcgccctgaacgacgtgaccgccgccagaaagctgaagccctgccacctgaaggccatcatcagaggcgccctgtgccacctggagctgaagcacttcgccgaggccgtgaactggtgcgacgagggcctgcagatcgacgccaaggagaagaagctgctggagatgagagccaaggccgacaagctgaagagaatcgagcagagagacgtgagaaaggccaacctgaaggagaagaaggagagaaaccagaacgaggccctgctgcaggccatcaaggccagaaacatcagactgagcgaggccgcctgcgaggacgaggacagcgccagcgagggcctgggcgagctgttcctggacggcctgagcaccgagaacccccacggcgccagactgagcctggacggccagggcagactgagctggcccgtgctgttcctgtaccccgagtacgcccagagcgacttcatcagcgccttccacgaggacagcagattcatcgaccacctgatggtgatgttcggcgagacccccagctgggacctggagcagaagtactgccccgacaacctggaggtgtacttcgaggacgaggacagagccgagctgtacagagtgcccgccaagagcaccctgctgcaggtgctgcagcaccagagatacttcgtgaaggccctgacccccgccttcctggtgtgcgtgggcagcagccccttctgcaagaacttcctgagaggcagaaaggtgtaccagatcagatag

SEQ ID NO: 102286 - DNA, 1515 bp, synthetic construct
  misc_feature 1..1515: note = Description of Artificial Sequence: Synthetic coding sequence
  source 1..1515: mol_type = other DNA
atggccaccagagacgtggtgctgagcagagtgcccgagcaggaggaggacagaaccgtgagcctgcagaacgccgccgccatctacgacctgctgagcatcaccctgggcagaagaggccagtacgtgatgctgagcgagtgcctggagagagccatgaagttcgccttcggcgagttccacctgtggtaccaggtggccctgagcatggtggcctgcggcaagagcgcctacgccgtgagcctgctgagagagtgcgtgaagctgagacccagcgaccccaccgtgcccctgatggccgccaaggtgtgcatcggcagcctgagatggctggaggaggccgagcacttcgccatgatggtgatcagcctgggcgaggaggccggcgagttcctgcccaagggctacctggccctgggcctgacctacagcctgcaggccaccgacgccaccctgaagagcaagcaggacgagctgcacagaaaggccctgcagaccctggagagagcccagcagctggcccccagcgacccccaggtgatcctgtacgtgagcctgcagctggccctggtgagacagatcagcagcgccatggagcagctgcaggaggccctgaaggtgagaaaggacgacgcccacgccctgcacctgctggccctgctgttcagcgcccagaagcaccaccagcacgccctggacgtggtgaacatggccatcaccgagcaccccgagaacttcaacctgatgttcaccaaggtgaagctggagcaggtgctgaagggccccgaggaggccctggtgacctgcagacaggtgctgagactgtggcagaccctgtacagcttcagccagctgggcggcctggagaaggacggcagcttcggcgagggcctgaccatgaagaagcagagcggcatgcacctgaccctgcccgacgcccacgacgccgacagcggcagcagaagagccagcagcatcgccgccagcagactggaggaggccatgagcgagctgaccatgcccagcagcgtgctgaagcagggccccatgcagctgtggaccaccctggagcagatctggctgcaggccgccgagctgttcatggagcagcagcacctgaaggaggccggcttctgcatccaggaggccgccggcctgttccccaccagccacagcgtgctgtacatgagaggcagactggccgaggtgaagggcaacctggaggaggccaagcagctgtacaaggaggccctgaccgtgaaccccgacggcgtgagaatcatgcacagcctgggcctgatgctgagcagactgggccacaagagcctggcccagaaggtgctgagagacgccgtggagagacagagcacctgccacgaggcctggcagggcctgggcgaggtgctgcaggcccagggccagaacgaggccgccgtggactgcttcctgaccgccctggagctggaggccagcagccccgtgctgcccttcagcatcatccccagagagctgtag

SEQ ID NO: 102287 - DNA, 2577 bp, synthetic construct
  misc_feature 1..2577: note = Description of Artificial Sequence: Synthetic coding sequence
  source 1..2577: mol_type = other DNA
atggccgccaagggcgcccacggcagctacctgaaggtggagagcgagctggagagatgcagagccgagggccactgggacagaatgcccgagctggtgagacagctgcagaccctgagcatgcccggcggcggcggcaacagaagaggcagccccagcgccgccttcaccttccccgacaccgacgacttcggcaagctgctgctggccgaggccctgctggagcagtgcctgaaggagaaccacgccaagatcaaggacagcatgcccctgctggagaagaacgagcccaagatgagcgaggccaagaactacctgagcagcatcctgaaccacggcagactgagcccccagtacatgtgcgaggccatgctgatcctgggcaagctgcactacgtggagggcagctacagagacgccatcagcatgtacgccagagccggcatcgacgacatgagcatggagaacaagcccctgtaccagatgagactgctgagcgaggccttcgtgatcaagggcctgagcctggagagactgcccaacagcatcgccagcagattcagactgaccgagagagaggaggaggtgatcacctgcttcgagagagccagctggatcgcccaggtgttcctgcaggagctggagaagaccaccaacaacagcaccagcagacacctgaagggctgccaccccctggactacgagctgacctacttcctggaggccgccctgcagagcgcctacgtgaagaacctgaagaagggcaacatcgtgaagggcatgagagagctgagagaggtgctgagaaccgtggagaccaaggccacccagaacttcaaggtgatggccgccaagcacctggccggcgtgctgctgcacagcctgagcgaggagtgctactggagccccctgagccaccccctgcccgagttcatgggcaaggaggagagcagcttcgccacccaggccctgagaaagccccacctgtacgagggcgacaacctgtactgccccaaggacaacatcgaggaggccctgctgctgctgctgatcagcgagagcatggccaccagagacgtggtgctgagcagagtgcccgagcaggaggaggacagaaccgtgagcctgcagaacgccgccgccatctacgacctgctgagcatcaccctgggcagaagaggccagtacgtgatgctgagcgagtgcctggagagagccatgaagttcgccttcggcgagttccacctgtggtaccaggtggccctgagcatggtggcctgcggcaagagcgcctacgccgtgagcctgctgagagagtgcgtgaagctgagacccagcgaccccaccgtgcccctgatggccgccaaggtgtgcatcggcagcctgagatggctggaggaggccgagcacttcgccatgatggtgatcagcctgggcgaggaggccggcgagttcctgcccaagggctacctggccctgggcctgacctacagcctgcaggccaccgacgccaccctgaagagcaagcaggacgagctgcacagaaaggccctgcagaccctggagagagcccagcagctggcccccagcgacccccaggtgatcctgtacgtgagcctgcagctggccctggtgagacagatcagcagcgccatggagcagctgcaggaggccctgaaggtgagaaaggacgacgcccacgccctgcacctgctggccctgctgttcagcgcccagaagcaccaccagcacgccctggacgtggtgaacatggccatcaccgagcaccccgagaacttcaacctgatgttcaccaaggtgaagctggagcaggtgctgaagggccccgaggaggccctggtgacctgcagacaggtgctgagactgtggcagaccctgtacagcttcagccagctgggcggcctggagaaggacggcagcttcggcgagggcctgaccatgaagaagcagagcggcatgcacctgaccctgcccgacgcccacgacgccgacagcggcagcagaagagccagcagcatcgccgccagcagactggaggaggccatgagcgagctgaccatgcccagcagcgtgctgaagcagggccccatgcagctgtggaccaccctggagcagatctggctgcaggccgccgagctgttcatggagcagcagcacctgaaggaggccggcttctgcatccaggaggccgccggcctgttccccaccagccacagcgtgctgtacatgagaggcagactggccgaggtgaagggcaacctggaggaggccaagcagctgtacaaggaggccctgaccgtgaaccccgacggcgtgagaatcatgcacagcctgggcctgatgctgagcagactgggccacaagagcctggcccagaaggtgctgagagacgccgtggagagacagagcacctgccacgaggcctggcagggcctgggcgaggtgctgcaggcccagggccagaacgaggccgccgtggactgcttcctgaccgccctggagctggaggccagcagccccgtgctgcccttcagcatcatccccagagagctgtag

SEQ ID NO: 102288 - DNA, 2058 bp, synthetic construct
  misc_feature 1..2058: note = Description of Artificial Sequence: Synthetic coding sequence
  source 1..2058: mol_type = other DNA
aagaagaagatcaacttcttcaagaagccccacagcctgagcctgagaaagaagagagaggaggaggtgatcacctgcttcgagagagccagctggatcgcccaggtgttcctgcaggagctggagaagaccaccaacaacagcaccagcagacacctgaagggctgccaccccctggactacgagctgacctacttcctggaggccgccctgcagagcgcctacgtgaagaacctgaagaagggcaacatcgtgaagggcatgagagagctgagagaggtgctgagaaccgtggagaccaaggccacccagaacttcaaggtgatggccgccaagcacctggccggcgtgctgctgcacagcctgagcgaggagtgctactggagccccctgagccaccccctgcccgagttcatgggcaaggaggagagcagcttcgccacccaggccctgagaaagccccacctgtacgagggcgacaacctgtactgccccaaggacaacatcgaggaggccctgctgctgctgctgatcagcgagagcatggccaccagagacgtggtgctgagcagagtgcccgagcaggaggaggacagaaccgtgagcctgcagaacgccgccgccatctacgacctgctgagcatcaccctgggcagaagaggccagtacgtgatgctgagcgagtgcctggagagagccatgaagttcgccttcggcgagttccacctgtggtaccaggtggccctgagcatggtggcctgcggcaagagcgcctacgccgtgagcctgctgagagagtgcgtgaagctgagacccagcgaccccaccgtgcccctgatggccgccaaggtgtgcatcggcagcctgagatggctggaggaggccgagcacttcgccatgatggtgatcagcctgggcgaggaggccggcgagttcctgcccaagggctacctggccctgggcctgacctacagcctgcaggccaccgacgccaccctgaagagcaagcaggacgagctgcacagaaaggccctgcagaccctggagagagcccagcagctggcccccagcgacccccaggtgatcctgtacgtgagcctgcagctggccctggtgagacagatcagcagcgccatggagcagctgcaggaggccctgaaggtgagaaaggacgacgcccacgccctgcacctgctggccctgctgttcagcgcccagaagcaccaccagcacgccctggacgtggtgaacatggccatcaccgagcaccccgagaacttcaacctgatgttcaccaaggtgaagctggagcaggtgctgaagggccccgaggaggccctggtgacctgcagacaggtgctgagactgtggcagaccctgtacagcttcagccagctgggcggcctggagaaggacggcagcttcggcgagggcctgaccatgaagaagcagagcggcatgcacctgaccctgcccgacgcccacgacgccgacagcggcagcagaagagccagcagcatcgccgccagcagactggaggaggccatgagcgagctgaccatgcccagcagcgtgctgaagcagggccccatgcagctgtggaccaccctggagcagatctggctgcaggccgccgagctgttcatggagcagcagcacctgaaggaggccggcttctgcatccaggaggccgccggcctgttccccaccagccacagcgtgctgtacatgagaggcagactggccgaggtgaagggcaacctggaggaggccaagcagctgtacaaggaggccctgaccgtgaaccccgacggcgtgagaatcatgcacagcctgggcctgatgctgagcagactgggccacaagagcctggcccagaaggtgctgagagacgccgtggagagacagagcacctgccacgaggcctggcagggcctgggcgaggtgctgcaggcccagggccagaacgaggccgccgtggactgcttcctgaccgccctggagctggaggccagcagccccgtgctgcccttcagcatcatccccagagagctgtag

SEQ ID NO: 102289 - DNA, 441 bp, synthetic construct
  misc_feature 1..441: note = Description of Artificial Sequence: Synthetic coding sequence
  source 1..441: mol_type = other DNA
atggccgccaagggcgcccacggcagctacctgaaggtggagagcgagctggagagatgcagagccgagggccactgggacagaatgcccgagctggtgagacagctgcagaccctgagcatgcccggcggcggcggcaacagaagaggcagccccagcgccgccttcaccttccccgacaccgacgacttcggcaagctgctgctggccgaggccctgctggagcagtgcctgaaggagaaccacgccaagatcaaggacagcatgcccctgctggagaagaacgagcccaagatgagcgaggccaagaactacctgagcagcatcctgaaccacggcagactgagcggcctggccgtgctgctgagactggtgagcaacagctgggcccaggccatcctgctgctgcagccccccgaggccctgggcctgcaggagtag

SEQ ID NO: 102290 - DNA, 1596 bp, synthetic construct
  misc_feature 1..1596: note = Description of Artificial Sequence: Synthetic coding sequence
  source 1..1596: mol_type = other DNA
atgagcagcgagatggagcccctgctgctggcctggagctacttcagaagaagaaagttccagctgtgcgccgacctgtgcacccagatgctggagaagagcccctacgaccaggccgcctggatcctgaaggccagagccctgaccgagatggtgtacatcgacgagatcgacgtggaccaggagggcatcgccgagatgatgctggacgagaacgccatcgcccaggtgcccagacccggcaccagcctgaagctgcccggcaccaaccagaccggcggccccagccaggccgtgagacccatcacccaggccggcagacccatcaccggcttcctgagacccagcacccagagcggcagacccggcaccatggagcaggccatcagaacccccagaaccgcctacaccgccagacccatcaccagcagcagcggcagattcgtgagactgggcaccgccagcatgctgaccagccccgacggccccttcatcaacctgagcagactgaacctgaccaagtacagccagaagcccaagctggccaaggccctgttcgagtacatcttccaccacgagaacgacgtgaagaccatccacctggaggacgtggtgctgcacctgggcatctaccccttcctgctgagaaacaagaaccacatcgagaagaacgccctggacctggccgccctgagcaccgagcacagccagtacaaggactggtggtggaaggtgcagatcggcaagtgctactacagactgggcatgtacagagaggccgagaagcagttcaagagcgccctgaagcagcaggagatggtggacaccttcctgtacctggccaaggtgtacgtgagcctggaccagcccgtgaccgccctgaacctgttcaagcagggcctggacaagttccccggcgaggtgaccctgctgtgcggcatcgccagaatctacgaggagatgaacaacatgagcagcgccgccgagtactacaaggaggtgctgaagcaggacaacacccacgtggaggccatcgcctgcatcggcagcaaccacttctacagcgaccagcccgagatcgccctgagattctacagaagactgctgcagatgggcatctacaacggccagctgttcaacaacctgggcctgtgctgcttctacgcccagcagtacgacatgaccctgaccagcttcgagagagccctgagcctggccgagaacgaggaggaggccgccgacgtgtggtacaacctgggccacgtggccgtgggcatcggcgacaccaacctggcccaccagtgcttcagactggccctggtgaacaacaacaaccacgccgaggcctacaacaacctggccgtgctggagatgagaaagggccacgtggagcaggccagagccctgctgcagaccgccagcagcctggccccccacatgtacgagccccacttcaacttcgccaccatcagcgacaagatcggcgacctgcagagaagctacgtggccgcccagaagagcgaggccgccttccccgaccacgtggacacccagcacctgatcaagcagctgagacagcacttcgccatgctgtag

SEQ ID NO: 102291 - DNA, 636 bp, synthetic construct
  misc_feature 1..636: note = Description of Artificial Sequence: Synthetic coding sequence
  source 1..636: mol_type = other DNA
atgagcagcgagatggagcccctgctgctggcctggagctacttcagaagaagaaagttccagctgtgcgccgacctgtgcacccagatgctggagaagagcccctacgaccagaagatcagctgggcctggtggcacgtgcccgtgatccccgccacctgggaggccgaggccggcgagctgctggagcccagaaagagaagactgcagcaggccgagatcacccccctgtacagcagcctgggcaacaagagcaagacccccagccagaaggccgcctggatcctgaaggccagagccctgaccgagatggtgtacatcgacgagatcgacgtggaccaggagggcatcgccgagatgatgctggacgagaacgccatcgcccaggtgcccagacccggcaccagcctgaagctgcccggcaccaaccagaccggcggccccagccaggccgccaaccacaccagctggaagacccactacagattcccccaggcccagcacgccgagtggaaggccagacactacggcaccggctaccagaacacccagaacagactgcacagccccccctaccaccagctgctgagaaagatctgccaggccggcaacggcttccacgcctacaagagctag

SEQ ID NO: 102292 - DNA, 1518 bp, synthetic construct
  misc_feature 1..1518: note = Description of Artificial Sequence: Synthetic coding sequence
  source 1..1518: mol_type = other DNA
atgagcagcgagatggagcccctgctgctggcctggagctacttcagaagaagaaagttccagctgtgcgccgacctgtgcacccagatgctggagaagagcccctacgaccaggccgcctggatcctgaaggccagagccctgaccgagatggtgtacatcgacgagatcgacgtggaccaggagggcatcgccgagatgatgctggacgagaacgccatcgcccaggtgcccagacccggcaccagcctgaagctgcccggcaccaaccagaccggcggccccagccaggccgtgagacccatcacccaggccggcagacccatcaccggcttcctgagacccagcacccagagcggcagacccggcaccatggagcaggccatcagaacccccagaaccgcctacaccgccagacccatcaccagcagcagcggcagattcgtgagactgggcaccgccagcatgctgaccagccccgacggccccttcatcaacctgagcagactgaacctgaccaagtacagccagaagcccaagctggccaaggccctgttcgagtacatcttccaccacgagaacgacgtgaagaccgccctggacctggccgccctgagcaccgagcacagccagtacaaggactggtggtggaaggtgcagatcggcaagtgctactacagactgggcatgtacagagaggccgagaagcagttcaagagcgccctgaagcagcaggagatggtggacaccttcctgtacctggccaaggtgtacgtgagcctggaccagcccgtgaccgccctgaacctgttcaagcagggcctggacaagttccccggcgaggtgaccctgctgtgcggcatcgccagaatctacgaggagatgaacaacatgagcagcgccgccgagtactacaaggaggtgctgaagcaggacaacacccacgtggaggccatcgcctgcatcggcagcaaccacttctacagcgaccagcccgagatcgccctgagattctacagaagactgctgcagatgggcatctacaacggccagctgttcaacaacctgggcctgtgctgcttctacgcccagcagtacgacatgaccctgaccagcttcgagagagccctgagcctggccgagaacgaggaggaggccgccgacgtgtggtacaacctgggccacgtggccgtgggcatcggcgacaccaacctggcccaccagtgcttcagactggccctggtgaacaacaacaaccacgccgaggcctacaacaacctggccgtgctggagatgagaaagggccacgtggagcaggccagagccctgctgcagaccgccagcagcctggccccccacatgtacgagccccacttcaacttcgccaccatcagcgacaagatcggcgacctgcagagaagctacgtggccgcccagaagagcgaggccgccttccccgaccacgtggacacccagcacctgatcaagcagctgagacagcacttcgccatgctgtag

SEQ ID NO: 102293 - DNA, 1428 bp, synthetic construct
  misc_feature 1..1428: note = Description of Artificial Sequence: Synthetic coding sequence
  source 1..1428: mol_type = other DNA
atgagcagcgagatggagcccctgctgctggcctggagctacttcagaagaagaaagttccagctgtgcgccgacctgtgcacccagatgctggagaagagcccctacgaccaggccgcctggatcctgaaggccagagccctgaccgagatggtgtacatcgacgagatcgacgtggaccaggagggcatcgccgagatgatgctggacgagaacgccatcgcccaggtgcccagacccggcaccagcctgaagctgcccggcaccaaccagaccggcggccccagccaggccgtgagacccatcacccaggccggcagacccatcaccggcttcctgagacccagcacccagagcggcagacccggcaccatggagcaggccatcagaacccccagaaccgcctacaccgccagacccatcaccagcagcagcggcagattcgtgagactgggcaccgccctgttcgagtacatcttccaccacgagaacgacgtgaagaccgccctggacctggccgccctgagcaccgagcacagccagtacaaggactggtggtggaaggtgcagatcggcaagtgctactacagactgggcatgtacagagaggccgagaagcagttcaagagcgccctgaagcagcaggagatggtggacaccttcctgtacctggccaaggtgtacgtgagcctggaccagcccgtgaccgccctgaacctgttcaagcagggcctggacaagttccccggcgaggtgaccctgctgtgcggcatcgccagaatctacgaggagatgaacaacatgagcagcgccgccgagtactacaaggaggtgctgaagcaggacaacacccacgtggaggccatcgcctgcatcggcagcaaccacttctacagcgaccagcccgagatcgccctgagattctacagaagactgctgcagatgggcatctacaacggccagctgttcaacaacctgggcctgtgctgcttctacgcccagcagtacgacatgaccctgaccagcttcgagagagccctgagcctggccgagaacgaggaggaggccgccgacgtgtggtacaacctgggccacgtggccgtgggcatcggcgacaccaacctggcccaccagtgcttcagactggccctggtgaacaacaacaaccacgccgaggcctacaacaacctggccgtgctggagatgagaaagggccacgtggagcaggccagagccctgctgcagaccgccagcagcctggccccccacatgtacgagccccacttcaacttcgccaccatcagcgacaagatcggcgacctgcagagaagctacgtggccgcccagaagagcgaggccgccttccccgaccacgtggacacccagcacctgatcaagcagctgagacagcacttcgccatgctgtag

SEQ ID NO: 102294 - DNA, 753 bp, synthetic construct
  misc_feature 1..753: note = Description of Artificial Sequence: Synthetic coding sequence
  source 1..753: mol_type = other DNA
atgagcagcgagatggagcccctgctgctggcctggagctacttcagaagaagaaagttccagctgtgcgccgacctgtgcacccagatgctggagaagagcccctacgaccaggagatgaacaacatgagcagcgccgccgagtactacaaggaggtgctgaagcaggacaacacccacgtggaggccatcgcctgcatcggcagcaaccacttctacagcgaccagcccgagatcgccctgagattctacagaagactgctgcagatgggcatctacaacggccagctgttcaacaacctgggcctgtgctgcttctacgcccagcagtacgacatgaccctgaccagcttcgagagagccctgagcctggccgagaacgaggaggaggccgccgacgtgtggtacaacctgggccacgtggccgtgggcatcggcgacaccaacctggcccaccagtgcttcagactggccctggtgaacaacaacaaccacgccgaggcctacaacaacctggccgtgctggagatgagaaagggccacgtggagcaggccagagccctgctgcagaccgccagcagcctggccccccacatgtacgagccccacttcaacttcgccaccatcagcgacaagatcggcgacctgcagagaagctacgtggccgcccagaagagcgaggccgccttccccgaccacgtggacacccagcacctgatcaagcagctgagacagcacttcgccatgctgtag

SEQ ID NO: 102295 - DNA, 954 bp, synthetic construct
  misc_feature 1..954: note = Description of Artificial Sequence: Synthetic coding sequence
  source 1..954: mol_type = other DNA
atgatcctgagctacgaggtgatcctgcacgccctggacctggccgccctgagcaccgagcacagccagtacaaggactggtggtggaaggtgcagatcggcaagtgctactacagactgggcatgtacagagaggccgagaagcagttcaagagcgccctgaagcagcaggagatggtggacaccttcctgtacctggccaaggtgtacgtgagcctggaccagcccgtgaccgccctgaacctgttcaagcagggcctggacaagttccccggcgaggtgaccctgctgtgcggcatcgccagaatctacgaggagatgaacaacatgagcagcgccgccgagtactacaaggaggtgctgaagcaggacaacacccacgtggaggccatcgcctgcatcggcagcaaccacttctacagcgaccagcccgagatcgccctgagattctacagaagactgctgcagatgggcatctacaacggccagctgttcaacaacctgggcctgtgctgcttctacgcccagcagtacgacatgaccctgaccagcttcgagagagccctgagcctggccgagaacgaggaggaggccgccgacgtgtggtacaacctgggccacgtggccgtgggcatcggcgacaccaacctggcccaccagtgcttcagactggccctggtgaacaacaacaaccacgccgaggcctacaacaacctggccgtgctggagatgagaaagggccacgtggagcaggccagagccctgctgcagaccgccagcagcctggccccccacatgtacgagccccacttcaacttcgccaccatcagcgacaagatcggcgacctgcagagaagctacgtggccgcccagaagagcgaggccgccttccccgaccacgtggacacccagcacctgatcaagcagctgagacagcacttcgccatgctgtag

SEQ ID NO: 102296 - DNA, 1548 bp, synthetic construct
  misc_feature 1..1548: note = Description of Artificial Sequence: Synthetic coding sequence
  source 1..1548: mol_type = other DNA
atgagcagcgagatggagcccctgctgctggcctggagctacttcagaagaagaaagttccagctgtgcgccgacctgtgcacccagatgctggagaagagcccctacgaccaggagcccgaccccgagctgcccgtgcaccaggccgcctggatcctgaaggccagagccctgaccgagatggtgtacatcgacgagatcgacgtggaccaggagggcatcgccgagatgatgctggacgagaacgccatcgcccaggtgcccagacccggcaccagcctgaagctgcccggcaccaaccagaccggcggccccagccaggccgtgagacccatcacccaggccggcagacccatcaccggcttcctgagacccagcacccagagcggcagacccggcaccatggagcaggccatcagaacccccagaaccgcctacaccgccagacccatcaccagcagcagcggcagattcgtgagactgggcaccgccagcatgctgaccagccccgacggccccttcatcaacctgagcagactgaacctgaccaagtacagccagaagcccaagctggccaaggccctgttcgagtacatcttccaccacgagaacgacgtgaagaccgccctggacctggccgccctgagcaccgagcacagccagtacaaggactggtggtggaaggtgcagatcggcaagtgctactacagactgggcatgtacagagaggccgagaagcagttcaagagcgccctgaagcagcaggagatggtggacaccttcctgtacctggccaaggtgtacgtgagcctggaccagcccgtgaccgccctgaacctgttcaagcagggcctggacaagttccccggcgaggtgaccctgctgtgcggcatcgccagaatctacgaggagatgaacaacatgagcagcgccgccgagtactacaaggaggtgctgaagcaggacaacacccacgtggaggccatcgcctgcatcggcagcaaccacttctacagcgaccagcccgagatcgccctgagattctacagaagactgctgcagatgggcatctacaacggccagctgttcaacaacctgggcctgtgctgcttctacgcccagcagtacgacatgaccctgaccagcttcgagagagccctgagcctggccgagaacgaggaggaggccgccgacgtgtggtacaacctgggccacgtggccgtgggcatcggcgacaccaacctggcccaccagtgcttcagactggccctggtgaacaacaacaaccacgccgaggcctacaacaacctggccgtgctggagatgagaaagggccacgtggagcaggccagagccctgctgcagaccgccagcagcctggccccccacatgtacgagccccacttcaacttcgccaccatcagcgacaagatcggcgacctgcagagaagctacgtggccgcccagaagagcgaggccgccttccccgaccacgtggacacccagcacctgatcaagcagctgagacagcacttcgccatgctgtag

SEQ ID NO: 102297 - DNA, 831 bp, synthetic construct
  misc_feature 1..831: note = Description of Artificial Sequence: Synthetic coding sequence
  source 1..831: mol_type = other DNA
atgtacagagaggccgagaagcagttcaagagcgccctgaagcagcaggagatggtggacaccttcctgtacctggccaaggtgtacgtgagcctggaccagcccgtgaccgccctgaacctgttcaagcagggcctggacaagttccccggcgaggtgaccctgctgtgcggcatcgccagaatctacgaggagatgaacaacatgagcagcgccgccgagtactacaaggaggtgctgaagcaggacaacacccacgtggaggccatcgcctgcatcggcagcaaccacttctacagcgaccagcccgagatcgccctgagattctacagaagactgctgcagatgggcatctacaacggccagctgttcaacaacctgggcctgtgctgcttctacgcccagcagtacgacatgaccctgaccagcttcgagagagccctgagcctggccgagaacgaggaggaggccgccgacgtgtggtacaacctgggccacgtggccgtgggcatcggcgacaccaacctggcccaccagtgcttcagactggccctggtgaacaacaacaaccacgccgaggcctacaacaacctggccgtgctggagatgagaaagggccacgtggagcaggccagagccctgctgcagaccgccagcagcctggccccccacatgtacgagccccacttcaacttcgccaccatcagcgacaagatcggcgacctgcagagaagctacgtggccgcccagaagagcgaggccgccttccccgaccacgtggacacccagcacctgatcaagcagctgagacagcacttcgccatgctgtag

SEQ ID NO: 102298 - DNA, 348 bp, synthetic construct
  misc_feature 1..348: note = Description of Artificial Sequence: Synthetic coding sequence
  source 1..348: mol_type = other DNA
atgagcagccccagcagccccttcagagagcagagcttcctgtgcgccgccggcgacgccggcgaggagagcagagtgcaggtgctgaagaacgaggtgagaagaggcagccccgtgctgctgggctgggtggagcaggcctacgccgacaagtgcgtgtgcggccccagcgccccccccgcccccaccccccccagcctgagccagagagtgatgtgcaacgacctgttcaaggtgaaccccttccagctgcagcagttcagagccgaccccagcaccgccagcctgctgctgtgccccggcggcctggaccacaagctgaacctgagaggcaaggcctggggctag

SEQ ID NO: 102299 - DNA, 348 bp, synthetic construct; identical to SEQ ID NO: 102298
  misc_feature 1..348: note = Description of Artificial Sequence: Synthetic coding sequence
  source 1..348: mol_type = other DNA

SEQ ID NO: 102300 - DNA, 357 bp, synthetic construct
  misc_feature 1..357: note = Description of Artificial Sequence: Synthetic coding sequence
  source 1..357: mol_type = other DNA
atggagggcggcgcctacggcgccggcaaggccggcggcgccttcgacccctacaccctggtgagacagccccacaccatcctgagagtggtgagctggctgttcagcatcgtggtgttcggcagcatcgtgaacgagggctacctgaacagcgccagcgagggcgaggagttctgcatctacaacagaaaccccaacgcctgcagctacggcgtggccgtgggcgtgctggccttcctgacctgcctgctgtacctggccctggacgtgtacttcccccagatcagcagcgtgaaggacagaaagaaggccgtgctgagcgacatcggcgtgagcgcctgggagatgcacagctag

SEQ ID NO: 102301 - DNA, 1389 bp, synthetic construct
  misc_feature 1..1389: note = Description of Artificial Sequence: Synthetic coding sequence
  source 1..1389: mol_type = other DNA
atggccgcccagagaagaagcctgctgcagagcgagcagcagcccagctggaccgacgacctgcccctgtgccacctgagcggcgtgggcagcgccagcaacagaagctacagcgccgacggcaagggcaccgagagccacccccccgaggacagctggctgaagttcagaagcgagaacaactgcttcctgtacggcgtgttcaacggctacgacggcaacagagtgaccaacttcgtggcccagagactgagcgccgagctgctgctgggccagctgaacgccgagcacgccgaggccgacgtgagaagagtgctgctgcaggccttcgacgtggtggagagaagcttcctggagagcatcgacgacgccctggccgagaaggccagcctgcagagccagctgcccgagggcgtgccccagcaccagctgcccccccagtaccagaagatcctggagagactgaagaccctggagagagagatcagcggcggcgccatggccgtggtggccgtgctgctgaacaacaagctgtacgtggccaacgtgggcaccaacagagccctgctgtgcaagagcaccgtggacggcctgcaggtgacccagctgaacgtggaccacaccaccgagaacgaggacgagctgttcagactgagccagctgggcctggacgccggcaagatcaagcaggtgggcatcatctgcggccaggagagcaccagaagaatcggcgactacaaggtgaagtacggctacaccgacatcgacctgctgagcgccgccaagagcaagcccatcatcgccgagcccgagatccacggcgcccagcccctggacggcgtgaccggcttcctggtgctgatgagcgagggcctgtacaaggccctggaggccgcccacggccccggccaggccaaccaggagatcgccgccatgatcgacaccgagttcgccaagcagaccagcctggacgccgtggcccaggccgtggtggacagagtgaagagaatccacagcgacaccttcgccagcggcggcgagagagccagattctgccccagacacgaggacatgaccctgctggtgagaaacttcggctaccccctgggcgagatgagccagcccacccccagccccgcccccgccgccggcggcagagtgtaccccgtgagcgtgccctacagcagcgcccagagcaccagcaagaccagcgtgaccctgagcctggtgatgcccagccagggccagatggtgaacggcgcccacagcgccagcaccctggacgaggccacccccaccctgaccaaggaccccagcagacccgccagcgacctgaccgccatcccccagtgccagctgaacctgctgggcagcctgacccccggctag

SEQ ID NO: 102302 - DNA, 2082 bp, synthetic construct
  misc_feature 1..2082: note = Description of Artificial Sequence: Synthetic coding sequence
  source 1..2082: mol_type = other DNA
atggcccagggcagccaccagatcgacttccaggtgctgcacgacctgagacagaagttccccgaggtgcccgaggtggtggtgagcagatgcatgctgcagaacaacaacaacctggacgcctgctgcgccgtgctgagccaggagagcaccagatacctgtacggcgagggcgacctgaacttcagcgacgacagcggcatcagcggcctgagaaaccacatgaccagcctgaacctggacctgcagagccagaacatctaccaccacggcagagagggcagcagaatgaacggcagcagaaccctgacccacagcatcagcgacggccagctgcagggcggccagagcaacagcgagctgttccagcaggagccccagaccgcccccgcccaggtgccccagggcttcaacgtgttcggcatgagcagcagcagcggcgccagcaacagcgccccccacctgggcttccacctgggcagcaagggcaccagcagcctgagccagcagacccccagattcaaccccatcatggtgaccctggcccccaacatccagaccggcagaaacacccccaccagcctgcacatccacggcgtgcccccccccgtgctgaacagcccccagggcaacagcatctacatcagaccctacatcaccacccccggcggcaccaccagacagacccagcagcacagcggctgggtgagccagttcaaccccatgaacccccagcaggtgtaccagcccagccagcccggcccctggaccacctgccccgccagcaaccccctgagccacaccagcagccagcagcccaaccagcagggccaccagaccagccacgtgtacatgcccatcagcagccccaccaccagccagccccccaccatccacagcagcggcagcagccagagcagcgcccacagccagtacaacatccagaacatcagcaccggccccagaaagaaccagatcgagatcaagctggagcccccccagagaaacaacagcagcaagctgagaagcagcggccccagaaccagcagcaccagcagcagcgtgaacagccagaccctgaacagaaaccagcccaccgtgtacatcgccgccagcccccccaacaccgacgagctgatgagcagaagccagcccaaggtgtacatcagcgccaacgccgccaccggcgacgagcaggtgatgagaaaccagcccaccctgttcatcagcaccaacagcggcgccagcgccgccagcagaaacatgagcggccaggtgagcatgggccccgccttcatccaccaccacccccccaagagcagagccatcggcaacaacagcgccaccagccccagagtggtggtgacccagcccaacaccaagtacaccttcaagatcaccgtgagccccaacaagccccccgccgtgagccccggcgtggtgagccccaccttcgagctgaccaacctgctgaaccaccccgaccactacgtggagaccgagaacatccagcacctgaccgaccccaccctggcccacgtggacagaatcagcgagaccagaaagctgagcatgggcagcgacgacgccgcctacacccaggccctgctggtgcaccagaaggccagaatggagagactgcagagagagctggagatccagaagaagaagctggacaagctgaagagcgaggtgaacgagatggagaacaacctgaccagaagaagactgaagagaagcaacagcatcagccagatccccagcctggaggagatgcagcagctgagaagctgcaacagacagctgcagatcgacatcgactgcctgaccaaggagatcgacctgttccaggccagaggcccccacttcaaccccagcgccatccacaacttctacgacaacatcggcttcgtgggccccgtgccccccaagcccaaggaccagagaagcatcatcaagacccccaagacccaggacaccgaggacgacgagggcgcccagtggaactgcaccgcctgcaccttcctgaaccaccccgccctgatcagatgcgagcagtgcgagatgcccagacacttctag

SEQ ID NO: 102303 - DNA, 2082 bp, synthetic construct; identical to SEQ ID NO: 102302
  misc_feature 1..2082: note = Description of Artificial Sequence: Synthetic coding sequence
  source 1..2082: mol_type = other DNA

SEQ ID NO: 102304 - DNA, 1611 bp, synthetic construct
  misc_feature 1..1611: note = Description of Artificial Sequence: Synthetic coding sequence
  source 1..1611: mol_type = other DNA
atggcccagggcagccaccagatcgacttccaggtgctgcacgacctgagacagaagttccccgaggtgcccgaggtggtggtgagcagatgcatgctgcagaacaacaacaacctggacgcctgctgcgccgtgctgagccaggagagcaccagatacctgtacggcgagggcgacctgaacttcagcgacgacagcggcatcagcggcctgagaaaccacatgaccagcctgaacctggacctgcagagccagaacatctaccaccacggcagagagggcagcagaatgaacggcagcagaaccctgacccacagcatcagcgacggccagctgcagggcggccagagcaacagcgagctgttccagcaggagccccagaccgcccccgcccaggtgccccagggcttcaacgtgttcggcatgagcagcagcagcggcgccagcaacagcgccccccacctgggcttccacctgggcagcaagggcaccagcagcctgagccagcagacccccagattcaaccccatcatggtgaccctggcccccaacatccagaccggcagaaacacccccaccagcctgcacatccacggcgtgcccccccccgtgctgaacagcccccagggcaacagcatctacatcagaccctacatcaccacccccggcggcaccaccagacagacccagcagcacagcggctgggtgagccagttcaaccccatgaacccccagcaggtgtaccagcccagccagcccggcccctggaccacctgccccgccagcaaccccctgagccacaccagcagccagcagcccaaccagcagggccaccagaccagccacgtgtacatgcccatcagcagccccaccaccagccagccccccaccatccacagcagcggcagcagccagagcagcgcccacagccagtacaacatccagaacatcagcaccggccccagaaagaaccagatcgagatcaagctggagcccccccagagaaacaacagcagcaagctgagaagcagcggccccagaaccagcagcaccagcagcagcgtgaacagccagaccctgaacagaaaccagcccaccgtgtacatcgccgccagcccccccaacaccgacgagctgatgagcagaagccagcccaaggtgtacatcagcgccaacgccgccaccggcgacgagcaggtgatgagaaaccagcccaccctgttcatcagcaccaacagcggcgccagcgccgccagcagaaacatgagcggccaggtgagcatgggccccgccttcatccaccaccacccccccaagagcagagccatcggcaacaacagcgccaccagccccagagtggtggtgacccagcccaacaccaagtacaccttcaagatcaccgtgagccccaacaagccccccgccgtgagccccggcgtggtgagccccaccttcgagctgaccaacctgctgaaccaccccgaccactacgtggagaccgagaacatccagcacctgaccgaccccaccctggcccacgtggacagaatcagcgagaccagaaagctgagcatgggcagcgacgacgccgcctacacccaggacatctag

SEQ ID NO: 102305 - DNA, 1986 bp, synthetic construct
  misc_feature 1..1986: note = Description of Artificial Sequence: Synthetic coding sequence
  source 1..1986: mol_type = other DNA
atgcagaacaacaacaacctggacgcctgctgcgccgtgctgagccaggagagcaccagatacctgtacggcgagggcgacctgaacttcagcgacgacagcggcatcagcggcctgagaaaccacatgaccagcctgaacctggacctgcagagccagaacatctaccaccacggcagagagggcagcagaatgaacggcagcagaaccctgacccacagcatcagcgacggccagctgcagggcggccagagcaacagcgagctgttccagcaggagccccagaccgcccccgcccaggtgccccagggcttcaacgtgttcggcatgagcagcagcagcggcgccagcaacagcgccccccacctgggcttccacctgggcagcaagggcaccagcagcctgagccagcagacccccagattcaaccccatcatggtgaccctggcccccaacatccagaccggcagaaacacccccaccagcctgcacatccacggcgtgcccccccccgtgctgaacagcccccagggcaacagcatctacatcagaccctacatcaccacccccggcggcaccaccagacagacccagcagcacagcggctgggtgagccagttcaaccccatgaacccccagcaggtgtaccagcccagccagcccggcccctggaccacctgccccgccagcaaccccctgagccacaccagcagccagcagcccaaccagcagggccaccagaccagccacgtgtacatgcccatcagcagccccaccaccagccagccccccaccatccacagcagcggcagcagccagagcagcgcccacagccagtacaacatccagaacatcagcaccggccccagaaagaaccagatcgagatcaagctggagcccccccagagaaacaacagcagcaagctgagaagcagcggccccagaaccagcagcaccagcagcagcgtgaacagccagaccctgaacagaaaccagcccaccgtgtacatcgccgccagcccccccaacaccgacgagctgatgagcagaagccagcccaaggtgtacatcagcgccaacgccgccaccggcgacgagcaggtgatgagaaaccagcccaccctgttcatcagcaccaacagcggcgccagcgccgccagcagaaacatgagcggccaggtgagcatgggccccgccttcatccaccaccacccccccaagagcagagccatcggcaacaacagcgccaccagccccagagtggtggtgacccagcccaacaccaagtacaccttcaagatcaccgtgagccccaacaagccccccgccgtgagccccggcgtggtgagccccaccttcgagctgaccaacctgctgaaccaccccgaccactacgtggagaccgagaacatccagcacctgaccgaccccaccctggcccacgtggacagaatcagcgagaccagaaagctgagcatgggcagcgacgacgccgcctacacccaggccctgctggtgcaccagaaggccagaatggagagactgcagagagagctggagatccagaagaagaagctggacaagctgaagagcgaggtgaacgagatggagaacaacctgaccagaagaagactgaagagaagcaacagcatcagccagatccccagcctggaggagatgcagcagctgagaagctgcaacagacagctgcagatcgacatcgactgcctgaccaaggagatcgacctgttccaggccagaggcccccacttcaaccccagcgccatccacaacttctacgacaacatcggcttcgtgggccccgtgccccccaagcccaaggaccagagaagcatcatcaagacccccaagacccaggacaccgaggacgacgagggcgcccagtggaactgcaccgcctgcaccttcctgaaccaccccgccctgatcagatgcgagcagtgcgagatgcccagacacttctag

SEQ ID NO: 102306 - DNA, 2082 bp, synthetic construct; identical to SEQ ID NO: 102302
  misc_feature 1..2082: note = Description of Artificial Sequence: Synthetic coding sequence
  source 1..2082: mol_type = other DNA

SEQ ID NO: 102307 - DNA, 714 bp, synthetic construct
  misc_feature 1..714: note = Description of Artificial Sequence: Synthetic coding sequence
  source 1..714: mol_type = other DNA
atgagcgacagcgacctgggcgaggacgagggcctgctgagcctggccggcaagagaaagagaagaggcaacctgcccaaggagagcgtgaagatcctgagagactggctgtacctgcacagatacaacgcctaccccagcgagcaggagaagctgagcctgagcggccagaccaacctgagcgtgctgcagatctgcaactggttcatcaacgccagaagaagactgctgcccgacatgctgagaaaggacggcaaggaccccaaccagttcaccatcagcagaagaggcggcaaggccagcgacgtggccctgcccagaggcagcagccccagcgtgctggccgtgagcgtgcccgcccccaccaacgtgctgagcctgagcgtgtgcagcatgcccctgcacagcggccagggcgagaagcccgccgcccccttccccagaggcgagctggagagccccaagcccctggtgacccccggcagcaccctgaccctgctgaccagagccgaggccggcagccccaccggcggcctgttcaacacccccccccccaccccccccgagcaggacaaggaggacttcagcagcttccagctgctggtggaggtggccctgcagagagccgccgagatggagctgcagaagcagcaggaccccagcctgcccctgctgcacacccccatccccctggtgagcgagaacccccagtag

SEQ ID NO: 102308 - DNA, 714 bp, synthetic construct; identical to SEQ ID NO: 102307
  misc_feature 1..714: note = Description of Artificial Sequence: Synthetic coding sequence
  source 1..714: mol_type = other DNA

SEQ ID NO: 102309 - DNA, 525 bp, synthetic construct
  misc_feature 1..525: note = Description of Artificial Sequence: Synthetic coding sequence
  source 1..525: mol_type = other DNA
atgagcgacagcgacctgggcgaggacgagggcctgctgagcctggccggcaagagaaagagaagaggcaacctgcccaaggagagcgtgaagatcctgagagactggctgtacctgcacagatacaacgcctaccccagcgagcaggagaagctgagcctgagcggccagaccaacctgagcgtgctgcagatctgcaactggttcatcaacgccagaagaagactgctgcccgacatgctgagaaaggacggcaaggaccccaaccagttcaccatcagcagaagaggcggcaaggccagcgacgtggccctgcccagaggcagcagccccagcgtgctggccgtgagcgtgcccgcccccaccaacgtgctgagcctgagcgtgtgcagcatgcccctgcacagcggccagggcgagaagcccgccgcccccttccccagaggcgagctggagagccccaagcccctggtgacccccggcagcaccctgaccctgctgaccagagccgaggccggcagctag

SEQ ID NO: 102310 - DNA, 714 bp, synthetic construct; identical to SEQ ID NO: 102307
  misc_feature 1..714: note = Description of Artificial Sequence: Synthetic coding sequence
  source 1..714: mol_type = other DNA

SEQ ID NO: 102311 - DNA, 726 bp, synthetic construct
  misc_feature 1..726: note = Description of Artificial Sequence: Synthetic coding sequence
  source 1..726: mol_type = other DNA
atggaggccgccgccgacggccccgccgagacccagagccccgtggagaaggacagccccgccaagacccagagccccgcccaggacaccagcatcatgagcagaaacaacgccgacaccggcagagtgctggccctgcccgagcacaagaagaagagaaagggcaacctgcccgccgagagcgtgaagatcctgagagactggatgtacaagcacagattcaaggcctaccccagcgaggaggagaagcagatgctgagcgagaagaccaacctgagcctgctgcagatcagcaactggttcatcaacgccagaagaagaatcctgcccgacatgctgcagcagagaagaaacgaccccatcatcggccacaagaccggcaaggacgcccacgccacccacctgcagagcaccgaggccagcgtgcccgccaagagcggccccagcggccccgacaacgtgcagagcctgcccctgtggcccctgcccaagggccagatgagcagagagaagcagcccgaccccgagagcgcccccagccagaagctgaccggcatcgcccagcccaagaagaaggtgaaggtgagcgtgaccagccccagcagccccgagctggtgagccccgaggagcacgccgacttcagcagcttcctgctgctggtggacgccgccgtgcagagagccgccgagctggagctggagaagaagcaggagcccaacccctag

SEQ ID NO: 102312 - DNA, 726 bp, synthetic construct; identical to SEQ ID NO: 102311
  misc_feature 1..726: note = Description of Artificial Sequence: Synthetic coding sequence
  source 1..726: mol_type = other DNA

SEQ ID NO: 102313 - DNA, 558 bp, synthetic construct
  misc_feature 1..558: note = Description of Artificial Sequence: Synthetic coding sequence
  source 1..558: mol_type = other DNA
atggaggccgccgccgacggccccgccgagacccagagccccgtggagaaggacagccccgccaagacccagagccccgcccaggacaccagcatcatgagcagaaacaacgccgacaccggcagagtgctggccctgcccgagcacaagaagaagagaaagggcaacctgcccgccgagagcgtgaagatcctgagagactggatgtacaagcacagattcaaggcctaccccagcgaggaggagaagcagatgctgagcgagaagaccaacctgagcctgctgagaatcagcaactggttcatcaacgccagaagaagaatcctgcccgacatgctgcagcagagaagaaacgaccccatcatcggccacaagaccggcaaggacgcccacgccacccacctgcagagcaccgaggccagcgtgcccgccaagagcggccccgtggtgcagaccatgtacaaggcctgcccctgcggcccctgccagagagccagatgccaggagagaagcaaccagatcagaagcagacccctggccagaagcagccccgagtag

SEQ ID NO: 102314 - DNA, 558 bp, synthetic construct; identical to SEQ ID NO: 102313
  misc_feature 1..558: note = Description of Artificial Sequence: Synthetic coding sequence
  source 1..558: mol_type = other DNA

SEQ ID NO: 102315 - DNA, 1773 bp, synthetic construct
  misc_feature 1..1773: note = Description of Artificial Sequence: Synthetic coding sequence
  source 1..1773: mol_type = other DNA
atggccggcgccgtgcccggcgccatcatggacgaggactactacggcagcgccgccgagtggggcgacgaggccgacggcggccagcaggaggacgacagcggcgagggcgaggacgacgccgaggtgcagcaggagtgcctgcacaagttcagcaccagagactacatcatggagcccagcatcttcaacaccctgaagagatacttccaggccggcggcagccccgagaacgtgatccagctgctgagcgagaactacaccgccgtggcccagaccgtgaacctgctggccgagtggctgatccagaccggcgtggagcccgtgcaggtgcaggagaccgtggagaaccacctgaagagcctgctgatcaagcacttcgaccccagaaaggccgacagcatcttcaccgaggagggcgagacccccgcctggctggagcagatgatcgcccacaccacctggagagacctgttctacaagctggccgaggcccaccccgactgcctgatgctgaacttcaccgtgaagctgatcagcgacgccggctaccagggcgagatcaccagcgtgagcaccgcctgccagcagctggaggtgttcagcagagtgctgagaaccagcctggccaccatcctggacggcggcgaggagaacctggagaagaacctgcccgagttcgccaagatggtgtgccacggcgagcacacctacctgttcgcccaggccatgatgagcgtgctggcccaggaggagcagggcggcagcgccgtgagaagaatcgcccaggaggtgcagagattcgcccaggagaagggccacgacgccagccagatcaccctggccctgggcaccgccgccagctaccccagagcctgccaggccctgggcgccatgctgagcaagggcgccctgaaccccgccgacatcaccgtgctgttcaagatgttcaccagcatggaccccccccccgtggagctgatcagagtgcccgccttcctggacctgttcatgcagagcctgttcaagcccggcgccagaatcaaccaggaccacaagcacaagtacatccacatcctggcctacgccgccagcgtggtggagacctggaagaagaacaagagagtgagcatcaacaaggacgagctgaagagcaccagcaaggccgtggagaccgtgcacaacctgtgctgcaacgagaacaagggcgccagcgagctggtggccgagctgagcaccctgtaccagtgcatcagattccccgtggtggccatgggcgtgctgaagtgggtggactggaccgtgagcgagcccagatacttccagctgcagaccgaccacacccccgtgcacctggccctgctggacgagatcagcacctgccaccagctgctgcacccccaggtgctgcagctgctggtgaagctgttcgagaccgagcacagccagctggacgtgatggagcagctggagctgaagaagaccctgctggacagaatggtgcacctgctgagcagaggctacgtgctgcccgtggtgagctacatcagaaagtgcctggagaagctggacaccgacatcagcctgatcagatacttcgtgaccgaggtgctggacgtgatcgcccccccctacaccagcgacttcgtgcagctgttcctgcccatcctggagaacgacagcatcgccggcaccatcaagaccgagggcgagcacgaccccgtgaccgagttcatcgcccactgcaagagcaacttcatcatggtgaactag

SEQ ID NO: 102316 - DNA, 1773 bp, synthetic construct; identical to SEQ ID NO: 102315
  misc_feature 1..1773: note = Description of Artificial Sequence: Synthetic coding sequence
  source 1..1773: mol_type = other DNA

SEQ ID NO: 102317 - DNA, 774 bp, synthetic construct
  misc_feature 1..774: note = Description of Artificial Sequence: Synthetic coding sequence
  source 1..774: mol_type = other DNA
atgcccgccagatgcgtggccgcccactgcggcaacaccaccaagagcggcaagagcctgttcagattccccaaggacagagccgtgagactgctgtgggacagattcgtgagaggctgcagagccgactggtacggcggcaacgacagaagcgtgatctgcagcgaccacttcgcccccgcctgcttcgacgtgagcagcgtgatccagaagaacctgagattcagccagagactgagactggtggccggcgccgtgcccaccctgcacagagtgcccgcccccgcccccaagagaggcgaggagggcgaccaggccggcagactggacaccagaggcgagctgcaggccgccagacacagcgaggccgcccccggccccgtgagctgcaccagacccagagccggcaagcaggccgccgccagccagatcacctgcgagaacgagctggtgcagacccagccccacgccgacaaccccagcaacaccgtgaccagcgtgcccacccactgcgaggagggccccgtgcacaagagcacccagatcagcctgaagagacccagacacagaagcgtgggcatccaggccaaggtgaaggccttcggcaagagactgtgcaacgccaccacccagaccgaggagctgtggagcagaaccagcagcctgttcgacatctacagcagcgacagcgagaccgacaccgactgggacatcaagagcgagcagagcgacctgagctacatggccgtgcaggtgaaggaggagacctgctag

SEQ ID NO: 102318 - DNA, 498 bp, synthetic construct
  misc_feature 1..498: note = Description of Artificial Sequence: Synthetic coding sequence
  source 1..498: mol_type = other DNA
atggagccccccaagatgaaccccgtggtggagcccctgagctggatgctgggcacctggctgagcgacccccccggcgccggcacctaccccaccctgcagcccttccagtacctggaggaggtgcacatcagccacgtgggccagcccatgctgaacttcagcttcaacagcttccaccccgacaccagaaagcccatgcacagagagtgcggcttcatcagactgaagcccgacaccaacaaggtggccttcgtgagcgcccagaacaccggcgtggtggaggtggaggagggcgaggtgaacggccaggagctgtgcatcgccagccacagcatcgccagaatcagcttcgccaaggagccccacgtggagcagatcaccagaaagttcagactgaacagcgagggcaagctggagcagaccgtgagcatggccaccaccacccagcccatgacccagcacctgcacgtgacctacaagaaggtgaccccctag

SEQ ID NO: 102319 - DNA, 1734 bp, synthetic construct
  misc_feature 1..1734: note = Description of Artificial Sequence: Synthetic coding sequence
  source 1..1734: mol_type = other DNA
atggtgatctgctgcgccgccgtgaactgcagcaacagacagggcaagggcgagaagagagccgtgagcttccacagattccccctgaaggacagcaagagactgatccagtggctgaaggccgtgcagagagacaactggacccccaccaagtacagcttcctgtgcagcgagcacttcaccaaggacagcttcagcaagagactggaggaccagcacagactgctgaagcccaccgccgtgcccagcatcttccacctgaccgagaagaagagaggcgccggcggccacggcagaaccagaagaaaggacgccagcaaggccaccggcggcgtgagaggccacagcagcgccgccaccagcagaggcgccgccggctggagccccagcagcagcggcaaccccatggccaagcccgagagcagaagactgaagcaggccgccctgcagggcgaggccacccccagagccgcccaggaggccgccagccaggagcaggcccagcaggccctggagagaacccccggcgacggcctggccaccatggtggccggcagccagggcaaggccgaggccagcgccaccgacgccggcgacgagagcgccaccagcagcatcgagggcggcgtgaccgacaagagcggcatcagcatggacgacttcaccccccccggcagcggcgcctgcaagttcatcggcagcctgcacagctacagcttcagcagcaagcacaccagagagagacccagcgtgcccagagagcccatcgacagaaagagactgaagaaggacgtggagcccagctgcagcggcagcagcctgggccccgacaagggcctggcccagagcccccccagcagcagcctgaccgccaccccccagaagcccagccagagccccagcgccccccccgccgacgtgacccccaagcccgccaccgaggccgtgcagagcgagcacagcgacgccagccccatgagcatcaacgaggtgatcctgagcgccagcggcgcctgcaagctgatcgacagcctgcacagctactgcttcagcagcagacagaacaagagccaggtgtgctgcctgagagagcaggtggagaagaagaacggcgagctgaagagcctgagacagagagtgagcagaagcgacagccaggtgagaaagctgcaggagaagctggacgagctgagaagagtgagcgtgccctaccccagcagcctgctgagccccagcagagagccccccaagatgaaccccgtggtggagcccctgagctggatgctgggcacctggctgagcgacccccccggcgccggcacctaccccaccctgcagcccttccagtacctggaggaggtgcacatcagccacgtgggccagcccatgctgaacttcagcttcaacagcttccaccccgacaccagaaagcccatgcacagagagtgcggcttcatcagactgaagcccgacaccaacaaggtggccttcgtgagcgcccagaacaccggcgtggtggaggtggaggagggcgaggtgaacggccaggagctgtgcatcgccagccacagcatcgccagaatcagcttcgccaaggagccccacgtggagcagatcaccagaaagttcagactgaacagcgagggcaagctggagcagaccgtgagcatggccaccaccacccagcccatgacccagcacctgcacgtgacctacaagaaggtgaccccctag

SEQ ID NO: 102320 - DNA, 510 bp, synthetic construct
  misc_feature 1..510: note = Description of Artificial Sequence: Synthetic coding sequence
  source 1..510: mol_type = other DNA
atgagcatcaacgaggtgatcctgagcgccagcggcgcctgcaagctgatcgacagcctgcacagctactgcttcagcagcagacagaacaagagccaggtgtgctgcctgagagagcaggtggagaagaagaacggcgagctgaagagcctgagacagagagtgagcagaagcgacagccaggtgagaaagctgcaggagaagctggacgagctgagaagagtgagcgtgccctaccccagcagcctgctgagccccagcagagagccccccaagatgaaccccgtggtggagcccctgagctggatgctgggcacctggctgagcgacccccccggcgccggcacctaccccaccctgcagcccttccagtacctggaggaggtgcacatcagccacgtgggccagcccatgctgaacttcagcttcaacagcttccaccccgacaccagaaagcccatgcacagagagtgcggcttcatcagactgaagcccggcagcagcggctag

SEQ ID NO: 102321 - DNA, 1062 bp, synthetic construct
  misc_feature 1..1062: note = Description of Artificial Sequence: Synthetic coding sequence
  source 1..1062: mol_type = other DNA
atgaagagagacagctgggtgcccagcaagtaccagttcctgtgcagcgaccacttcacccccgacagcctggacatcagatggggcatcagatacctgaagcagaccgccgtgcccaccatcttcagcctgcccgaggacaaccagggcaaggaccccagcaagaagaagagccagaagaagaacctggaggacgagaaggaggtgtgccccaaggccaagagcgaggagagcttcgtgctgaacgagaccaagaagaacatcgtgaacaccgacgtgccccaccagcaccccgagctgctgcacagcagcagcctggtgaagccccccgcccccaagaccggcagcatccagaacaacatgctgaccctgaacctggtgaagcagcacaccggcaagcccgagagcaccctggagaccagcgtgaaccaggacaccggcagaggcggcttccacacctgcttcgagaacctgaacagcaccaccatcaccctgaccaccagcaacagcgagagcatccaccagagcctggagacccaggaggtgctggaggtgaccaccagccacctggccaaccccaacttcaccagcaacagcatggagatcaagagcgcccaggagaaccccttcctgttcagcaccatcaaccagaccgtggaggagctgaacaccaacaaggagagcgtgatcgccatcttcgtgcccgccgagaacagcaagcccagcgtgaacagcttcatcagcgcccagaaggagaccaccgagatggaggacaccgacatcgaggacagcctgtacaaggacgtggactacggcaccgaggtgctgcagatcgagcacagctactgcagacaggacatcaacaaggagcacctgtggcagaaggtgagcaagctgcacagcaagatcaccctgctggagctgaaggagcagcagaccctgggcagactgaagagcctggaggccctgatcagacagctgaagcaggagaactggctgagcgaggagaacgtgaagatcatcgagaaccacttcaccacctacgaggtgaccatgatctag

SEQ ID NO: 102322 - DNA, 1188 bp, synthetic construct
  misc_feature 1..1188: note = Description of Artificial Sequence: Synthetic coding sequence
  source 1..1188: mol_type = other DNA
atgcccagatactgcgccgccatctgctgcaagaacagaagaggcagaaacaacaaggacagaaagctgagcttctaccccttccccctgcacgacaaggagagactggagaagtggctgaagaacatgaagagagacagctgggtgcccagcaagtaccagttcctgtgcagcgaccacttcacccccgacagcctggacatcagatggggcatcagatacctgaagcagaccgccgtgcccaccatcttcagcctgcccgaggacaaccagggcaaggaccccagcaagaagaagagccagaagaagaacctggaggacgagaaggaggtgtgccccaaggccaagagcgaggagagcttcgtgctgaacgagaccaagaagaacatcgtgaacaccgacgtgccccaccagcaccccgagctgctgcacagcagcagcctggtgaagccccccgcccccaagaccggcagcatccagaacaacatgctgaccctgaacctggtgaagcagcacaccggcaagcccgagagcaccctggagaccagcgtgaaccaggacaccggcagaggcggcttccacacctgcttcgagaacctgaacagcaccaccatcaccctgaccaccagcaacagcgagagcatccaccagagcctggagacccaggaggtgctggaggtgaccaccagccacctggccaaccccaacttcaccagcaacagcatggagatcaagagcgcccaggagaaccccttcctgttcagcaccatcaaccagaccgtggaggagctgaacaccaacaaggagagcgtgatcgccatcttcgtgcccgccgagaacagcaagcccagcgtgaacagcttcatcagcgcccagaaggagaccaccgagatggaggacaccgacatcgaggacagcctgtacaaggacgtggactacggcaccgaggtgctgcagatcgagcacagctactgcagacaggacatcaacaaggagcacctgtggcagaaggtgagcaagctgcacagcaagatcaccctgctggagctgaaggagcagcagaccctgggcagactgaagagcctggaggccctgatcagacagctgaagcaggagaactggctgagcgaggagaacgtgaagatcatcgagaaccacttcaccacctacgaggtgaccatgatctag

SEQ ID NO: 102323 - DNA, 669 bp, synthetic construct
  misc_feature 1..669: note = Description of Artificial Sequence: Synthetic coding sequence
  source 1..669: mol_type = other DNA
atggtgaagtgctgcagcgccatcggctgcgccagcagatgcctgcccaacagcaagctgaagggcctgaccttccacgtgttccccaccgacgagaacatcaagagaaagtgggtgctggccatgaagagactggacgtgaacgccgccggcatctgggagcccaagaagggcgacgtgctgtgcagcagacacttcaagaagaccgacttcgacagaagcgcccccaacatcaagctgaagcccggcgtgatccccagcatcttcgacagcccctaccacctgcagggcaagagagagaagctgcactgcagaaagaacttcaccctgaagaccgtgcccgccaccaactacaaccaccacctggtgggcgccagcagctgcatcgaggagttccagagccagttcatcttcgagcacagctacagcgtgatggacagccccaagaagctgaagcacaagctggaccacgtgatcggcgagctggaggacaccaaggagagcctgagaaacgtgctggacagagagaagagattccagaagagcctgagaaagaccatcagagagctgaaggacgagtgcctgatcagccaggagaccgccaacagactggacaccttctgctgggactgctgccaggagagcatcgagcaggactacatcagctag

SEQ ID NO: 102324 - DNA, 99 bp, synthetic construct
  misc_feature 1..99: note = Description of Artificial Sequence: Synthetic coding sequence
  source 1..99: mol_type = other DNA
atggtgaagtgctgcagcgccatcggctgcgccagcagatgcctgcccaacagcaagctgaagggcctgaccttccacgtgttccccaccgacgagtag

SEQ ID NO: 102325 - DNA, 243 bp, synthetic construct
  misc_feature 1..243: note = Description of Artificial Sequence: Synthetic coding sequence
  source 1..243: mol_type = other DNA
atggtgaagtgctgcagcgccatcggctgcgccagcagatgcctgcccaacagcaagctgaagggcctgaccttccacgtgttccccaccgacgagaacatcaagagaaagtgggtgctggccatgaagagactggacgtgaacgccgccggcatctgggagcccaagaagggcgacgtgctgtgcagcagacacttcaagaagaccgacttcgacagaagcgcccccaacatcaagctgtag

SEQ ID NO: 102326 - DNA, 669 bp, synthetic construct; identical to SEQ ID NO: 102323
  misc_feature 1..669: note = Description of Artificial Sequence: Synthetic coding sequence
  source 1..669: mol_type = other DNA

SEQ ID NO: 102327 - DNA, 825 bp, synthetic construct
  misc_feature 1..825: note = Description of Artificial Sequence: Synthetic coding sequence
  source 1..825: mol_type = other DNA
atgcccaagtactgcagagcccccaactgcagcaacaccgccggcagactgggcgccgacaacagacccgtgagcttctacaagttccccctgaaggacggccccagactgcaggcctggctgcagcacatgggctgcgagcactgggtgcccagctgccaccagcacctgtgcagcgagcacttcacccccagctgcttccagtggagatggggcgtgagatacctgagacccgacgccgtgcccagcatcttcagcagaggcccccccgccaagagccagagaagaaccagaagcacccagaagcccgtgagcccccccccccccctgcagaagaacacccccctgccccagagccccgccatccccgtgagcggccccgtgagactggtggtgctgggccccaccagcggcagccccaagaccgtggccaccatgctgctgacccccctggcccccgcccccacccccgagagaagccagcccgaggtgcccgcccagcaggcccagaccggcctgggccccgtgctgggcgccctgcagagaagagtgagaagactgcagagatgccaggagagacaccaggcccagctgcaggccctggagagactggcccagcagctgcacggcgagagcctgctggccagagccagaagaggcctgcagagactgaccaccgcccagaccctgggccccgaggagagccagaccttcaccatcatctgcggcggccccgacatcgccatggtgctggcccaggaccccgcccccgccaccgtggacgccaagcccgagctgctggacaccagaatccccagcgcctag

SEQ ID NO: 102328 - DNA, 825 bp, synthetic construct; identical to SEQ ID NO: 102327
  misc_feature 1..825: note = Description of Artificial Sequence: Synthetic coding sequence
  source 1..825: mol_type = other DNA

SEQ ID NO: 102329 - DNA, 390 bp, synthetic construct
  misc_feature 1..390: note = Description of Artificial Sequence: Synthetic coding sequence
  source 1..390: mol_type = other DNA
atgctgctgacccccctggcccccgcccccacccccgagagaagccagcccgaggtgcccgcccagcaggcccagaccggcctgggccccgtgctgggcgccctgcagagaagagtgagaagactgcagagatgccaggagagacaccaggcccagctgcaggccctggagagactggcccagcagctgcacggcgagagcctgctggccagagccagaagaggcctgcagagactgaccaccgcccagaccctgggccccgaggagagccagaccttcaccatcatctgcggcggccccgacatcgccatggtgctggcccaggaccccgcccccgccaccgtggacgccaagcccgagctgctggacaccagaatccccagcgcctag

SEQ ID NO: 102330 - DNA, 2712 bp, synthetic construct
  misc_feature 1..2712: note = Description of Artificial Sequence: Synthetic coding sequence
  source 1..2712: mol_type = other DNA
atgaccagaagctgcagcgccgtgggctgcagcaccagagacaccgtgctgagcagagagagaggcctgagcttccaccagttccccaccgacaccatccagagaagcaagtggatcagagccgtgaacagagtggaccccagaagcaagaagatctggatccccggccccggcgccatcctgtgcagcaagcacttccaggagagcgacttcgagagctacggcatcagaagaaagctgaagaagggcgccgtgcccagcgtgagcctgtacaagatcccccagggcgtgcacctgaagggcaaggccagacagaagatcctgaagcagcccctgcccgacaacagccaggaggtggccaccgaggaccacaactacagcctgaagacccccctgaccatcggcgccgagaagctggccgaggtgcagcagatgctgcaggtgagcaagaagagactgatcagcgtgaagaactacagaatgatcaagaagagaaagggcctgagactgatcgacgccctggtggaggagaagctgctgagcgaggagaccgagtgcctgctgagagcccagttcagcgacttcaagtgggagctgtacaactggagagagaccgacgagtacagcgccgagatgaagcagttcgcctgcaccctgtacctgtgcagcagcaaggtgtacgactacgtgagaaagatcctgaagctgccccacagcagcatcctgagaacctggctgagcaagtgccagcccagccccggcttcaacagcaacatcttcagcttcctgcagagaagagtggagaacggcgaccagctgtaccagtactgcagcctgctgatcaagagcatgcccctgaagcagcagctgcagtgggaccccagcagccacagcctgcagggcttcatggacttcggcctgggcaagctggacgccgacgagacccccctggccagcgagaccgtgctgctgatggccgtgggcatcttcggccactggagaacccccctgggctacttcttcgtgaacagagccagcggctacctgcaggcccagctgctgagactgaccatcggcaagctgagcgacatcggcatcaccgtgctggccgtgaccagcgacgccaccgcccacagcgtgcagatggccaaggccctgggcatccacatcgacggcgacgacatgaagtgcaccttccagcaccccagcagcagcagccagcagatcgcctacttcttcgacagctgccacctgctgagactgatcagaaacgccttccagaacttccagagcatccagttcatcaacggcatcgcccactggcagcacctggtggagctggtggccctggaggagcaggagctgagcaacatggagagaatccccagcaccctggccaacctgaagaaccacgtgctgaaggtgaacagcgccacccagctgttcagcgagagcgtggccagcgccctggagtacctgctgagcctggacctgccccccttccagaactgcatcggcaccatccacttcctgagactgatcaacaacctgttcgacatcttcaacagcagaaactgctacggcaagggcctgaagggccccctgctgcccgagacctacagcaagatcaaccacgtgctgatcgaggccaagaccatcttcgtgaccctgagcgacaccagcaacaaccagatcatcaagggcaagcagaagctgggcttcctgggcttcctgctgaacgccgagagcctgaagtggctgtaccagaactacgtgttccccaaggtgatgcccttcccctacctgctgacctacaagttcagccacgaccacctggagctgttcctgaagatgctgagacaggtgctggtgaccagcagcagccccacctgcatggccttccagaaggcctactacaacctggagaccagatacaagttccaggacgaggtgttcctgagcaaggtgagcatcttcgacatcagcatcgccagaagaaaggacctggccctgtggaccgtgcagagacagtacggcgtgagcgtgaccaagaccgtgttccacgaggagggcatctgccaggactggagccactgcagcctgagcgaggccctgctggacctgagcgaccacagaagaaacctgatctgctacgccggctacgtggccaacaagctgagcgccctgctgacctgcgaggactgcatcaccgccctgtacgccagcgacctgaaggccagcaagatcggcagcctgctgttcgtgaagaagaagaacggcctgcacttccccagcgagagcctgtgcagagtgatcaacatctgcgagagagtggtgagaacccacagcagaatggccatcttcgagctggtgagcaagcagagagagctgtacctgcagcagaagatcctgtgcgagctgagcggccacatcaacctgttcgtggacgtgaacaagcacctgttcgacggcgaggtgtgcgccatcaaccacttcgtgaagctgctgaaggacatcatcatctgcttcctgaacatcagagccaagaacgtggcccagaaccccctgaagcaccacagcgagagaaccgacatgaagaccctgagcagaaagcactggagcagcgtgcaggactacaagtgcagcagcttcgccaacaccagcagcaagttcagacacctgctgagcaacgacggctaccccttcaagtag

SEQ ID NO: 102331 - DNA, 2712 bp, synthetic construct; identical to SEQ ID NO: 102330
  misc_feature 1..2712: note = Description of Artificial Sequence: Synthetic coding sequence
  source 1..2712: mol_type = other DNA

SEQ ID NO: 102332 - DNA, 642 bp, synthetic construct
  misc_feature 1..642: note = Description of Artificial Sequence: Synthetic coding sequence
  source 1..642: mol_type = other DNA
atggtgcagagctgcagcgcctacggctgcaagaacagatacgacaaggacaagcccgtgagcttccacaagttccccctgaccagacccagcctgtgcaaggagtgggaggccgccgtgagaagaaagaacttcaagcccaccaagtacagcagcatctgcagcgagcacttcacccccgactgcttcaagagagagtgcaacaacaagctgctgaaggagaacgccgtgcccaccatcttcctgtgcaccgagccccacgacaagaaggaggacctgctggagccccaggagcagctgccccccccccccctgcccccccccgtgagccaggtggacgccgccatcggcctgctgatgccccccctgcagacccccgtgaacctgagcgtgttctgcgaccacaactacaccgtggaggacaccatgcaccagagaaagagaatccaccagctggagcagcaggtggagaagctgagaaagaagctgaagaccgcccagcagagatgcagaagacaggagagacagctggagaagctgaaggaggtggtgcacttccagaaggagaaggacgacgtgagcgagagaggctacgtgatcctgcccaacgactacttcgagatcgtggaggtgcccgcctag

SEQ ID NO: 102333 - DNA, 162 bp, synthetic construct
  misc_feature 1..162: note = Description of Artificial Sequence: Synthetic coding sequence
  source 1..162: mol_type = other DNA
atggtgcagagctgcagcgcctacggctgcaagaacagatacgacaaggacaagcccgtgagcttccacaagaagaagatcttctggagccacagaaacagcttcccccacctgctgtacagactgctgttccccagactgatgctgctgctggactactag

SEQ ID NO: 102334 - DNA, 687 bp, synthetic construct
  misc_feature 1..687: note = Description of Artificial Sequence: Synthetic coding sequence
  source 1..687: mol_type = other DNA
atgcccaccaactgcgccgccgccggctgcgccaccacctacaacaagcacatcaacatcagcttccacagattccccctggaccccaagagaagaaaggagtgggtgagactggtgagaagaaagaacttcgtgcccggcaagcacaccttcctgtgcagcaagcacttcgaggccagctgcttcgacctgaccggccagaccagaagactgaagatggacgccgtgcccaccatcttcgacttctgcacccacatcaagagcatgaagctgaagagcagaaacctgctgaagaagaacaacagctgcagccccgccggccccagcaacctgaagagcaacatcagcagccagcaggtgctgctggagcacagctacgccttcagaaaccccatggaggccaagaagagaatcatcaagctggagaaggagatcgccagcctgagaagaaagatgaagacctgcctgcagaaggagagaagagccaccagaagatggatcaaggccacctgcctggtgaagaacctggaggccaacagcgtgctgcccaagggcaccagcgagcacatgctgcccaccgccctgagcagcctgcccctggaggacttcaagatcctggagcaggaccagcaggacaagaccctgctgagcctgaacctgaagcagaccaagagcaccttcatctag

SEQ ID NO: 102335 - DNA, 720 bp, synthetic construct
  misc_feature 1..720: note = Description of Artificial Sequence: Synthetic coding sequence
  source 1..720: mol_type = other DNA
atgcccaagagctgcgccgccagacagtgctgcaacagatacagcagcagaagaaagcagctgaccttccacagattccccttcagcagacccgagctgctgaaggagtgggtgctgaacatcggcagaggcaacttcaagcccaagcagcacaccgtgatctgcagcgagcacttcagacccgagtgcttcagcgccttcggcaacagaaagaacctgaagcacaacgccgtgcccaccgtgttcgccttccaggaccccacccagcaggtgagagagaacaccgaccccgccagcgagagaggcaacgccagcagcagccagaaggagaaggtgctgcccgaggccggcgccggcgaggacagccccggcagaaacatggacaccgccctggaggagctgcagctgccccccaacgccgagggccacgtgaagcaggtgagccccagaagaccccaggccaccgaggccgtgggcagacccaccggccccgccggcctgagaagaacccccaacaagcagcccagcgaccacagctacgccctgctggacctggacagcctgaagaagaagctgttcctgaccctgaaggagaacgagaagctgagaaagagactgcaggcccagagactggtgatgagaagaatgagcagcagactgagagcctgcaagggccaccagggcctgcaggccagactgggccccgagcagcagagctag

SEQ ID NO: 102336 - DNA, 717 bp, synthetic construct
  misc_feature 1..717: note = Description of Artificial Sequence: Synthetic coding sequence
  source 1..717: mol_type = other DNA
atgcccaagagctgcgccgccagacagtgctgcaacagatacagcagcagaagaaagcagctgaccttccacagattccccttcagcagacccgagctgctgaaggagtgggtgctgaacatcggcagaggcaacttcaagcccaagcagcacaccgtgatctgcagcgagcacttcagacccgagtgcttcagcgccttcggcaacagaaagaacctgaagcacaacgccgtgcccaccgtgttcgccttccaggaccccacccaggtgagagagaacaccgaccccgccagcgagagaggcaacgccagcagcagccagaaggagaaggtgctgcccgaggccggcgccggcgaggacagccccggcagaaacatggacaccgccctggaggagctgcagctgccccccaacgccgagggccacgtgaagcaggtgagccccagaagaccccaggccaccgaggccgtgggcagacccaccggccccgccggcctgagaagaacccccaacaagcagcccagcgaccacagctacgccctgctggacctggacagcctgaagaagaagctgttcctgaccctgaaggagaacgagaagctgagaaagagactgcaggcccagagactggtgatgagaagaatgagcagcagactgagagcctgcaagggccaccagggcctgcaggccagactgggccccgagcagcagagctag

SEQ ID NO: 102337 - DNA, 528 bp, synthetic construct
  misc_feature 1..528: note = Description of Artificial Sequence: Synthetic coding sequence
  source 1..528: mol_type = other DNA
atgcccaagagctgcgccgccagacagtgctgcaacagatacagcagcagaagaaagcagctgaccttccacagattccccttcagcagacccgagctgctgaaggagtgggtgctgaacatcggcagaggcaacttcaagcccaagcagcacaccgtgatctgcagcgagcacttcagacccgagtgcttcagcgccttcggcaacagaaagaacctgaagcacaacgccgtgcccaccgtgttcgccttccaggaccccacccagcaggtgagagagaacaccgaccccgccagcgagagaggcaacgccagcagcagccagaaggagaagaccagcccctgcagaagccaggtgctgcccgaggccggcgccggcgaggacagccccggcagaaacatggacaccgccctggaggagctgcagctgccccccaacgccgagggccacgtgaagcaggccatgctgttcaacgtggagaacggcacccccgccagcagagaggccctgtggctgagcgaggagtag

SEQ ID NO: 102338 - DNA, 732 bp, synthetic construct
  misc_feature 1..732: note = Description of Artificial Sequence: Synthetic coding sequence
  source 1..732: mol_type = other DNA
atggagcacgccttcacccccctggagcccctgctgagcaccggcaacctgaagtactgcctggtgatcctgaaccagcccctggacaactacttcagacacctgtggaacaaggccctgctgagagcctgcgccgacggcggcgccaacagactgtacgacatcaccgagggcgagagagagagcttcctgcccgagttcatcaacggcgacttcgacagcatcagacccgaggtgagagagtactacgccaccaagggctgcgagctgatcagcacccccgaccaggaccacaccgacttcaccaagtgcctgaagatgctgcagaagaagatcgaggagaaggacctgaaggtggacgtgatcgtgaccctgggcggcctggccggcagattcgaccagatcatggccagcgtgaacaccctgttccaggccacccacatcacccccttccccatcatcatcatccaggaggagagcctgatctacctgctgcagcccggcaagcacagactgcacgtggacaccggcatggagggcgactggtgcggcctgatccccgtgggccagccctgcatgcaggtgaccaccaccggcctgaagtggaacctgaccaacgacgtgctggccttcggcaccctggtgagcaccagcaacacctacgacggcagcggcgtggtgaccgtggagaccgaccaccccctgctgtggaccatggccatcaagagctag

SEQ ID NO: 102339 - DNA, 585 bp, synthetic construct
  misc_feature 1..585: note = Description of Artificial Sequence: Synthetic coding sequence
  source 1..585: mol_type = other DNA
atggagcacgccttcacccccctggagcccctgctgagcaccggcaacctgaagtactgcctggtgatcctgaaccagcccctggacaactacttcagacacctgtggaacaaggccctgctgagagcctgcgccgacggcggcgccaacagactgtacgacatcaccgagggcgagagagagagcttcctgcccgagttcatcaacggcgacttcgacagcatcagacccgaggtgagagagtactacgccaccaagggctgcgagctgatcagcacccccgaccaggaccacaccgacttcaccaagtgcctgaagatgctgcagaagaagatcgaggagaaggacctgaagggcaagcacagactgcacgtggacaccggcatggagggcgactggtgcggcctgatccccgtgggccagccctgcatgcaggtgaccaccaccggcctgaagtggaacctgaccaacgacgtgctggccttcggcaccctggtgagcaccagcaacacctacgacggcagcggcgtggtgaccgtggagaccgaccaccccctgctgtggaccatggccatcaagagctag

SEQ ID NO: 102340 - DNA, 375 bp, synthetic construct
  misc_feature 1..375: note = Description of Artificial Sequence: Synthetic coding sequence
  source 1..375: mol_type = other DNA
atggtggacgtgatcgtgaccctgggcggcctggccggcagattcgaccagatcatggccagcgtgaacaccctgttccaggccacccacatcacccccttccccatcatcatcatccaggaggagagcctgatctacctgctgcagcccggcaagcacagactgcacgtggacaccggcatggagggcgactggtgcggcctgatccccgtgggccagccctgcatgcaggtgaccaccaccggcctgaagtggaacctgagaacctgcgactacaccagaaccacctggatcgccaaggacaaccccgtgcccagactgatcagactgatcagactgaaccacatctgcaaggtgcccctggccatcaagtag

SEQ ID NO: 102341 - DNA, 504 bp, synthetic construct
  misc_feature 1..504: note = Description of Artificial Sequence: Synthetic coding sequence
  source 1..504: mol_type = other DNA
atggagcacgccttcacccccctggagcccctgctgagcaccggcaacctgaagtactgcctggtgatcctgaaccagcccctggacaactacttcagacacctgtggaacaaggccctgctgagagcctgcgccgacggcggcgccaacagactgtacgacatcaccgagggcgagagagagagcttcctgcccgagttcatcaacggcgacttcgacagcatcagacccgaggtgagagagtactacgccaccaagggctgcgagctgatcagcacccccgaccaggaccacaccgacttcaccaagtgcctgaagatgctgcagaagaagatcgaggagaaggacctgaaggtggacgtgatcgtgaccctgggcggcctggccggcagattcgaccagatcatggccagcgtgaacaccctgttccaggccacccacatcacccccttccccatcatcatcatccaggaggagagcctgatctacctgctgcagccctag

SEQ ID NO: 102342 - DNA, 693 bp, synthetic construct
  misc_feature 1..693: note = Description of Artificial Sequence: Synthetic coding sequence
  source 1..693: mol_type = other DNA
atggcccagggcctgatcgaggtggagagaaagttcctgcccggccccggcaccgaggagagactgcaggagctgggcggcaccctggagtacagagtgaccttcagagacacctactacgacacccccgagctgagcctgatgcaggccgaccactggctgagaagaagagaggacagcggctgggagctgaagtgccccggcgccgccggcgtgctgggcccccacaccgagtacaaggagctgaccgccgagcccaccatcgtggcccagctgtgcaaggtgctgagagccgacggcctgggcgccggcgacgtggccgccgtgctgggccccctgggcctgcaggaggtggccagcttcgtgaccaagagaagcgcctggaagctggtgctgctgggcgccgacgaggaggagccccagctgagagtggacctggacaccgccgacttcggctacgccgtgggcgaggtggaggccctggtgcacgaggaggccgaggtgcccaccgccctggagaagatccacagactgagcagcatgctgggcgtgcccgcccaggagaccgcccccgccaagctgatcgtgtacctgcagagattcagaccccaggactaccagagactgctggaggtgaacagcagcagagagagaccccaggagaccgaggaccccgaccactgcctgggctag

SEQ ID NO: 102343 - DNA, 693 bp, synthetic construct; identical to SEQ ID NO: 102342
  misc_feature 1..693: note = Description of Artificial Sequence: Synthetic coding sequence
  source 1..693: mol_type = other DNA

SEQ ID NO: 102344 - DNA, 372 bp, synthetic construct
  misc_feature 1..372: note = Description of Artificial Sequence: Synthetic coding sequence
  source 1..372: mol_type = other DNA
atggcccagggcctgatcgaggtggagagaaagttcctgcccggccccggcaccgaggagagactgcaggagctgggcggcaccctggagtacagagtgaccttcagagacacctactacgacacccccgagctgagcctgatgcaggccgaccactggctgagaagaagagaggacagcggctgggagctgaagtgccccggcgccgccggcgtgctgggcccccacaccgagtacaaggagctgaccgccgagcccaccatcgtggcccagctgtgcaaggtgctgagagccgacggcctgggcgccggcgacgtggccgccgtgctgggccccctgggcctgcaggaggtggccagcttcgtgacctag

SEQ ID NO: 102345 - DNA, 2070 bp, synthetic construct
  misc_feature 1..2070: note = Description of Artificial Sequence: Synthetic coding sequence
  source 1..2070: mol_type = other DNA
atgaagccccccgccgcctgcgccggcgacatggccgacgccgccagcccctgcagcgtggtgaacgacctgagatgggacctgagcgcccagcagatcgaggagagaaccagagagctgatcgagcagaccaagagagtgtacgaccaggtgggcacccaggagttcgaggacgtgagctacgagagcaccctgaaggccctggccgacgtggaggtgacctacaccgtgcagagaaacatcctggacttcccccagcacgtgagccccagcaaggacatcagaaccgccagcaccgaggccgacaagaagctgagcgagttcgacgtggagatgagcatgagagaggacgtgtaccagagaatcgtgtggctgcaggagaaggtgcagaaggacagcctgagacccgaggccgccagatacctggagagactgatcaagctgggcagaagaaacggcctgcacctgcccagagagacccaggagaacatcaagagaatcaagaagaagctgagcctgctgtgcatcgacttcaacaagaacctgaacgaggacaccaccttcctgcccttcaccctgcaggagctgggcggcctgcccgaggacttcctgaacagcctggagaagatggaggacggcaagctgaaggtgaccctgaagtacccccactacttccccctgctgaagaagtgccacgtgcccgagaccagaagaaaggtggaggaggccttcaactgcagatgcaaggaggagaactgcgccatcctgaaggagctggtgaccctgagagcccagaagagcagactgctgggcttccacacccacgccgactacgtgctggagatgaacatggccaagaccagccagaccgtggccaccttcctggacgagctggcccagaagctgaagcccctgggcgagcaggagagagccgtgatcctggagctgaagagagccgagtgcgagagaagaggcctgcccttcgacggcagaatcagagcctgggacatgagatactacatgaaccaggtggaggagaccagatactgcgtggaccagaacctgctgaaggagtacttccccgtgcaggtggtgacccacggcctgctgggcatctaccaggagctgctgggcctggccttccaccacgaggagggcgccagcgcctggcacgaggacgtgagactgtacaccgccagagacgccgccagcggcgaggtggtgggcaagttctacctggacctgtaccccagagagggcaagtacggccacgccgcctgcttcggcctgcagcccggctgcctgagacaggacggcagcagacagatcgccatcgccgccatggtggccaacttcaccaagcccaccgccgacgcccccagcctgctgcagcacgacgaggtggagacctacttccacgagttcggccacgtgatgcaccagctgtgcagccaggccgagttcgccatgttcagcggcacccacgtggagagagacttcgtggaggcccccagccagatgctggagaactgggtgtgggagcaggagcccctgctgagaatgagcagacactacagaaccggcagcgccgtgcccagagagctgctggagaagctgatcgagagcagacaggccaacaccggcctgttcaacctgagacagatcgtgctggccaaggtggaccaggccctgcacacccagaccgacgccgaccccgccgaggagtacgccagactgtgccaggagatcctgggcgtgcccgccacccccggcaccaacatgcccgccaccttcggccacctggccggcggctacgacgcccagtactacggctacctgtggagcgaggtgtacagcatggacatgttccacaccagattcaagcaggagggcgtgctgaacagcaaggtgggcatggactacagaagctgcatcctgagacccggcggcagcgaggacgccagcgccatgctgagaagattcctgggcagagaccccaagcaggacgccttcctgctgagcaagggcctgcaggtgggcggctgcgagcccgagccccaggtgtgctag

SEQ ID NO: 102346 - DNA, 777 bp, synthetic construct
  misc_feature 1..777: note = Description of Artificial Sequence: Synthetic coding sequence
  source 1..777: mol_type = other DNA
atgttcagcggcacccacgtggagagagacttcgtggaggcccccagccagatgctggagaactgggtgtgggagcaggagcccctgctgagaatgagcagacactacagaaccggcagcgccgtgcccagagagctgctggagaagctgatcgagagcagacaggccaacaccggcctgttcaacctgagacagatcgtgctggccaaggtggaccaggccctgcacacccagaccgacgccgaccccgccgaggagtacgccagactgtgccaggagatcctgggcgtgcccgccacccccggcaccaacatgcccgccaccttcggccacctggccggcggctacgacgcccagtactacggctacctgtggagcgaggtgtacagcatggacatgttccacaccagattcaagcaggagggcgtgctgaacagcaagttcccccactacgaggtgagacccctgagacacgtgagcctgtgcctgcccctgacctggtgcgaccccggcagcggccagccccccgagagcctgaccagaaacagatggctgcccgccctgagagccggccccgccctgcccggctgcaacatcgccctgggcagcctgcaggtgggcatggactacagaagctgcatcctgagacccggcggcagcgaggacgccagcgccatgctgagaagattcctgggcagagaccccaagcaggacgccttcctgctgagcaagggcctgcaggtgggcggctgcgagcccgagccccaggtgtgctag

SEQ ID NO: 102347 - DNA, 738 bp, synthetic construct
  misc_feature 1..738: note = Description of Artificial Sequence: Synthetic coding sequence
  source 1..738: mol_type = other DNA
atggacggcaccagaaccagcctggacatcgaggagtacagcgacaccgaggtgcagaagaaccaggtgctgaccctggaggagtggcaggacaagtgggtgaacggcaagaccgccttccaccaggagcagggccaccagctgctgaagaagcacctggacaccttcctgaagggcaagagcggcctgagagtgttcttccccctgtgcggcaaggccgtggagatgaagtggttcgccgacagaggccacagcgtggtgggcgtggagatcagcgagctgggcatccaggagttcttcaccgagcagaacctgagctacagcgaggagcccatcaccgagatccccggcaccaaggtgttcaagagcagcagcggcaacatcagcctgtactgctgcagcatcttcgacctgcccagaaccaacatcggcaagttcgacatgatctgggacagaggcgccctggtggccatcaaccccggcgacagaaagtgctacgccgacaccatgttcagcctgctgggcaagaagttccagtacctgctgtgcgtgctgagctacgaccccaccaagcaccccggcccccccttctacgtgccccacgccgagatcgagagactgttcggcaagatctgcaacatcagatgcctggagaaggtggacgccttcgaggagagacacaagagctggggcatcgactgcctgttcgagaagctgtacctgctgaccgagaagtag

SEQ ID NO: 102348 - DNA, 519 bp, synthetic construct
  misc_feature 1..519: note = Description of Artificial Sequence: Synthetic coding sequence
  source 1..519: mol_type = other DNA
atggagaccagacccagactgggcgccacctgcctgctgggcttcagcttcctgctgctggtgatcagcagcgacggccacaacggcctgggcaagggcttcggcgaccacatccactggagaaccctggaggacggcaagaaggaggccgccgccagcggcctgcccctgatggtgatcatccacaagagctggtgcggcgcctgcaaggccctgaagcccaagttcgccgagagcaccgagatcagcgagctgagccacaacttcgtgatggtgaacctggaggacgaggaggagcccaaggacgaggacttcagccccgacggcggctacatccccagaatcctgttcctggaccccagcggcaaggtgcaccccgagatcatcaacgagaacggcaaccccagctacaagtacttctacgtgagcgccgagcaggtggtgcagggcatgaaggaggcccaggagagactgaccggcgacgccttcagaaagaagcacctggaggacgagctgtag

SEQ ID NO: 102349 - DNA, 1767 bp, synthetic construct
  misc_feature 1..1767: note = Description of Artificial Sequence: Synthetic coding sequence
  source 1..1767: mol_type = other DNA
atggccagcaagaagagagaggtgcagctgcagaccgtgatcaacaaccagagcctgtgggacgagatgctgcagaacaagggcctgaccgtgatcgacgtgtaccaggcctggtgcggcccctgcagagccatgcagcccctgttcagaaagctgaagaacgagctgaacgaggacgagatcctgcacttcgccgtggccgaggccgacaacatcgtgaccctgcagcccttcagagacaagtgcgagcccgtgttcctgttcagcgtgaacggcaagatcatcgagaagatccagggcgccaacgcccccctggtgaacaagaaggtgatcaacctgatcgacgaggagagaaagatcgccgccggcgagatggccagaccccagtaccccgagatccccctggtggacagcgacagcgaggtgagcgaggagagcccctgcgagagcgtgcaggagctgtacagcatcgccatcatcaagcccgacgccgtgatcagcaagaaggtgctggagatcaagagaaagatcaccaaggccggcttcatcatcgaggccgagcacaagaccgtgctgaccgaggagcaggtggtgaacttctacagcagaatcgccgaccagtgcgacttcgaggagttcgtgagcttcatgaccagcggcctgagctacatcctggtggtgagccagggcagcaagcacaacccccccagcgaggagaccgagccccagaccgacaccgagcccaacgagagaagcgaggaccagcccgaggtggaggcccaggtgacccccggcatgatgaagaacaagcaggacagcctgcaggagtacctggagagacagcacctggcccagctgtgcgacatcgaggaggacgccgccaacgtggccaagttcatggacgccttcttccccgacttcaagaagatgaagagcatgaagctggagaagaccctggccctgctgagacccaacctgttccacgagagaaaggacgacgtgctgagaatcatcaaggacgaggacttcaagatcctggagcagagacaggtggtgctgagcgagaaggaggcccaggccctgtgcaaggagtacgagaacgaggactacttcaacaagctgatcgagaacatgaccagcggccccagcctggccctggtgctgctgagagacaacggcctgcagtactggaagcagctgctgggccccagaaccgtggaggaggccatcgagtacttccccgagagcctgtgcgcccagttcgccatggacagcctgcccgtgaaccagctgtacggcagcgacagcctggagaccgccgagagagagatccagcacttcttccccctgcagagcaccctgggcctgatcaagccccacgccaccagcgagcagagagagcagatcctgaagatcgtgaaggaggccggcttcgacctgacccaggtgaagaagatgttcctgacccccgagcagatcgagaagatctaccccaaggtgaccggcaaggacttctacaaggacctgctggagatgctgagcgtgggccccagcatggtgatgatcctgaccaagtggaacgccgtggccgagtggagaagactgatgggccccaccgaccccgaggaggccaagctgctgagccccgacagcatcagagcccagttcggcatcagcaagctgaagaacatcgtgcacggcgccagcaacgcctacgaggccaaggaggtggtgaacagactgttcgaggaccccgaggagaactag

SEQ ID NO: 102350 - DNA, 1767 bp, synthetic construct; identical to SEQ ID NO: 102349
  misc_feature 1..1767: note = Description of Artificial Sequence: Synthetic coding sequence
  source 1..1767: mol_type = other DNA

SEQ ID NO: 102351 - DNA, 681 bp, synthetic construct
  misc_feature 1..681: note = Description of Artificial Sequence: Synthetic coding sequence
  source 1..681: mol_type = other DNA
atggaggccgacgccagcgtggacatgttcagcaaggtgctggagcaccagctgctgcagaccaccaagctggtggaggagcacctggacagcgagatccagaagctggaccagatggacgaggacgagctggagagactgaaggagaagagactgcaggccctgagaaaggcccagcagcagaagcaggagtggctgagcaagggccacggcgagtacagagagatccccagcgagagagacttcttccaggaggtgaaggagagcgagaacgtggtgtgccacttctacagagacagcaccttcagatgcaagatcctggacagacacctggccatcctgagcaagaagcacctggagaccaagttcctgaagctgaacgtggagaaggcccccttcctgtgcgagagactgcacatcaaggtgatccccaccctggccctgctgaaggacggcaagacccaggactacgtggtgggcttcaccgacctgggcaacaccgacgacttcaccaccgagaccctggagtggagactgggcagcagcgacatcctgaactacagcggcaacctgatggagccccccttccagaaccagaagaagttcggcaccaacttcaccaagctggagaagaagaccatcagaggcaagaagtacgacagcgacagcgacgacgactag

SEQ ID NO: 102352 - DNA, 408 bp, synthetic construct
  misc_feature 1..408: note = Description of Artificial Sequence: Synthetic coding sequence
  source 1..408: mol_type = other DNA
atggaggccgacgccagcgtggacatgttcagcaaggtgctggagcaccagctgctgcagaccaccaagctggtggaggagcacctggacagcgagatccagaagctggaccagatggacgaggacgagctggagagactgaaggagaagagactgcaggccctgagaaaggcccagcagcagaagcaggagtggctgagcaagggccacggcgagtacagagagatccccagcgagagagacttcttccaggaggtgaaggagagcgagaacgtggtgtgccacttctacagagacagcaccttcagatgcaagatcctggacagacacctggccatcctgagcaagaagcacctggagaccaagttcctgaagctgaacgtggagaaggcccccttcctgtgctag

SEQ ID NO: 102353 - DNA, 627 bp, synthetic construct
  misc_feature 1..627: note = Description of Artificial Sequence: Synthetic coding sequence
  source 1..627: mol_type = other DNA
atgagccagaagagcctggcccccagactgaacagcgtgcccttcggcagaatggaggccgacgccagcgtggacatgttcagcaaggtgctggagcaccagctgctgcagaccaccaagctggtggaggagcacctggacagcgagatccagaagctggaccagatggacgaggacgagctggagagactgaaggagaagagactgcaggccctgagaaaggcccagcagcagaagcaggagtggctgagcaagggccacggcgagtacagagagatccccagcgagagagacttcttccaggaggtgaaggagagcgagaacgtggtgtgccacttctacagagacagcaccttcagatgcaagatcctggacagacacctggccatcctgagcaagaagcacctggagaccaagttcctgaagctgaacgtggagaaggcccccttcctgtgcgagagactgcacatcaaggtgatccccaccctggccctgctgaaggacggcaagacccaggactacgtggtgggcttcaccgacctgggcaacaccgacgacttcaccaccgagaccctggagtggagactgggcagcagcgacatcctgaactacagatggtggccctag

SEQ ID NO: 102354 - DNA, 1017 bp, synthetic construct
  misc_feature 1..1017: note = Description of Artificial Sequence: Synthetic coding sequence
  source 1..1017: mol_type = other DNA
atggccgccatggccgtggccctgagaggcctgggcggcagattcagatggagaacccaggccgtggccggcggcgtgagaggcgccgccagaggcgccgccgccggccagagagactacgacctgctggtggtgggcggcggcagcggcggcctggcctgcgccaaggaggccgcccagctgggcagaaaggtggccgtggtggactacgtggagcccagcccccagggcaccagatggggcctgggcggcacctgcgtgaacgtgggctgcatccccaagaagctgatgcaccaggccgccctgctgggcggcctgatccaggacgcccccaactacggctgggaggtggcccagcccgtgccccacgactggagaaagatggccgaggccgtgcagaaccacgtgaagagcctgaactggggccacagagtgcagctgcaggacagaaaggtgaagtacttcaacatcaaggccagcttcgtggacgagcacaccgtgtgcggcgtggccaagggcggcaaggagatcctgctgagcgccgaccacatcatcatcgccaccggcggcagacccagataccccacccacatcgagggcgccctggagtacggcatcaccagcgacgacatcttctggctgaaggagagccccggcaagaccctggtggtgggcgccagctacgtggccctggagtgcgccggcttcctgaccggcatcggcctggacaccaccatcatgatgagaagcatccccctgagaggcttcgaccagcagatgagcagcatggtgatcgagcacatggccagccacggcaccagattcctgagaggctgcgcccccagcagagtgagaagactgcccgacggccagctgcaggtgacctgggaggacagcaccaccggcaaggaggacaccggcaccttcgacaccgtgctgtgggccatcgccccctgcatcagcgcctgcctgcccaccaccgtgggccacgccggcaagaaccagagaagagactag

SEQ ID NO: 102355 - DNA, 1485 bp, synthetic construct
  misc_feature 1..1485: note = Description of Artificial Sequence: Synthetic coding sequence
  source 1..1485: mol_type = other DNA
  misc_feature 1..1476: note = DNA
  misc_feature 1477: note = RNA
  misc_feature 1478..1485: note = DNA
atggaggaccaggccggccagagagactacgacctgctggtggtgggcggcggcagcggcggcctggcctgcgccaaggaggccgcccagctgggcagaaaggtggccgtggtggactacgtggagcccagcccccagggcaccagatggggcctgggcggcacctgcgtgaacgtgggctgcatccccaagaagctgatgcaccaggccgccctgctgggcggcctgatccaggacgcccccaactacggctgggaggtggcccagcccgtgccccacgactggagaaagatggccgaggccgtgcagaaccacgtgaagagcctgaactggggccacagagtgcagctgcaggacagaaaggtgaagtacttcaacatcaaggccagcttcgtggacgagcacaccgtgtgcggcgtggccaagggcggcaaggagatcctgctgagcgccgaccacatcatcatcgccaccggcggcagacccagataccccacccacatcgagggcgccctggagtacggcatcaccagcgacgacatcttctggctgaaggagagccccggcaagaccctggtggtgggcgccagctacgtggccctggagtgcgccggcttcctgaccggcatcggcctggacaccaccatcatgatgagaagcatccccctgagaggcttcgaccagcagatgagcagcatggtgatcgagcacatggccagccacggcaccagattcctgagaggctgcgcccccagcagagtgagaagactgcccgacggccagctgcaggtgacctgggaggacagcaccaccggcaaggaggacaccggcaccttcgacaccgtgctgtgggccatcggcagagtgcccgacaccagaagcctgaacctggagaaggccggcgtggacaccagccccgacacccagaagatcctggtggacagcagagaggccaccagcgtgccccacatctacgccatcggcgacgtggtggagggcagacccgagctgacccccatcgccatcatggccggcagactgctggtgcagagactgttcggcggcagcagcgacctgatggactacgacaacgtgcccaccaccgtgttcacccccctggagtacggctgcgtgggcctgagcgaggaggaggccgtggccagacacggccaggagcacgtggaggtgtaccacgcccactacaagcccctggagttcaccgtggccggcagagacgccagccagtgctacgtgaagatggtgtgcctgagagagcccccccagctggtgctgggcctgcacttcctgggccccaacgccggcgaggtgacccagggcttcgccctgggcatcaagtgcggcgccagctacgcccaggtgatgagaaccgtgggcatccaccccacctgcagcgaggaggtggtgaagctgagaatcagcaagagaagcggcctggaccccaccgtgaccggctgctgaggctag

SEQ ID NO: 102356 - DNA, 1575 bp, synthetic construct
  misc_feature 1..1575: note = Description of Artificial Sequence: Synthetic coding sequence
  source 1..1575: mol_type = other DNA
  misc_feature 1..1566: note = DNA
  misc_feature 1567: note = RNA
  misc_feature 1568..1575: note = DNA
atggccgccatggccgtggccctgagaggcctgggcggcagattcagatggagaacccaggccgtggccggcggcgtgagaggcgccgccagaggcgccgccgccggccagagagactacgacctgctggtggtgggcggcggcagcggcggcctggcctgcgccaaggaggccgcccagctgggcagaaaggtggccgtggtggactacgtggagcccagcccccagggcaccagatggggcctgggcggcacctgcgtgaacgtgggctgcatccccaagaagctgatgcaccaggccgccctgctgggcggcctgatccaggacgcccccaactacggctgggaggtggcccagcccgtgccccacgactggagaaagatggccgaggccgtgcagaaccacgtgaagagcctgaactggggccacagagtgcagctgcaggacagaaaggtgaagtacttcaacatcaaggccagcttcgtggacgagcacaccgtgtgcggcgtggccaagggcggcaaggagatcctgctgagcgccgaccacatcatcatcgccaccggcggcagacccagataccccacccacatcgagggcgccctggagtacggcatcaccagcgacgacatcttctggctgaaggagagccccggcaagaccctggtggtgggcgccagctacgtggccctggagtgcgccggcttcctgaccggcatcggcctggacaccaccatcatgatgagaagcatccccctgagaggcttcgaccagcagatgagcagcatggtgatcgagcacatggccagccacggcaccagattcctgagaggctgcgcccccagcagagtgagaagactgcccgacggccagctgcaggtgacctgggaggacagcaccaccggcaaggaggacaccggcaccttcgacaccgtgctgtgggccatcggcagagtgcccgacaccagaagcctgaacctggagaaggccggcgtggacaccagccccgacacccagaagatcctggtggacagcagagaggccaccagcgtgccccacatctacgccatcggcgacgtggtggagggcagacccgagctgacccccatcgccatcatggccggcagactgctggtgcagagactgttcggcggcagcagcgacctgatggactacgacaacgtgcccaccaccgtgttcacccccctggagtacggctgcgtgggcctgagcgaggaggaggccgtggccagacacggccaggagcacgtggaggtgtaccacgcccactacaagcccctggagttcaccgtggccggcagagacgccagccagtgctacgtgaagatggtgtgcctgagagagcccccccagctggtgctgggcctgcacttcctgggccccaacgccggcgaggtgacccagggcttcgccctgggcatcaagtgcggcgccagctacgcccaggtgatgagaaccgtgggcatccaccccacctgcagcgaggaggtggtgaagctgagaatcagcaagagaagcggcctggaccccaccgtgaccggctgctgaggctag

SEQ ID NO: 102357 - DNA, 1566 bp, synthetic construct
  misc_feature 1..1566: note = Description of Artificial Sequence: Synthetic coding sequence
  source 1..1566: mol_type = other DNA
atggccgccatggccgtggccctgagaggcctgggcggcagattcagatggagaacccaggccgtggccggcggcgtgagaggcgccgccagaggcgccgccggccagagagactacgacctgctggtggtgggcggcggcagcggcggcctggcctgcgccaaggaggccgcccagctgggcagaaaggtggccgtggtggactacgtggagcccagcccccagggcaccagatggggcctgggcggcacctgcgtgaacgtgggctgcatccccaagaagctgatgcaccaggccgccctgctgggcggcctgatccaggacgcccccaactacggctgggaggtggcccagcccgtgccccacgactggagaaagatggccgaggccgtgcagaaccacgtgaagagcctgaactggggccacagagtgcagctgcaggacagaaaggtgaagtacttcaacatcaaggccagcttcgtggacgagcacaccgtgtgcggcgtggccaagggcggcaaggagatcctgctgagcgccgaccacatcatcatcgccaccggcggcagacccagataccccacccacatcgagggcgccctggagtacggcatcaccagcgacgacatcttctggctgaaggagagccccggcaagaccctggtggtgggcgccagctacgtggccctggagtgcgccggcttcctgaccggcatcggcctggacaccaccatcatgatgagaagcatccccctgagaggcttcgaccagcagatgagcagcatggtgatcgagcacatggccagccacggcaccagattcctgagaggctgcgcccccagcagagtgagaagactgcccgacggccagctgcaggtgacctgggaggacagcaccaccggcaaggaggacaccggcaccttcgacaccgtgctgtgggccatcggcagagtgcccgacaccagaagcctgaacctggagaaggccggcgtggacaccagccccgacacccagaagatcctggtggacagcagagaggccaccagcgtgccccacatctacgccatcggcgacgtggtggagggcagacccgagctgacccccatcgccatcatggccggcagactgctggtgcagagactgttcggcggcagcagcgacctgatggactacgacaacgtgcccaccaccgtgttcacccccctggagtacggctgcgtgggcctgagcgaggaggaggccgtggccagacacggccaggagcacgtggaggtgtaccacgcccactacaagcccctggagttcaccgtggccggcagagacgccagccagtgctacgtgaagatggtgtgcctgagagagcccccccagctggtgctgggcctgcacttcctgggccccaacgccggcgaggtgacccagggcttcgccctgggcatcaagtgcggcgccagctacgcccaggtgatgagaaccgtgggcatccaccccacctgcagcgaggaggtggtgaagctgagaatcagcaagagaagcggcctggaccccaccgtgaccggctgctag

SEQ ID NO: 102358 - DNA, 1569 bp, synthetic construct
  misc_feature 1..1569: note = Description of Artificial Sequence: Synthetic coding sequence
  source 1..1569: mol_type = other DNA
atggccgccatggccgtggccctgagaggcctgggcggcagattcagatggagaacccaggccgtggccggcggcgtgagaggcgccgccagaggcgccgccgccggccagagagactacgacctgctggtggtgggcggcggcagcggcggcctggcctgcgccaaggaggccgcccagctgggcagaaaggtggccgtggtggactacgtggagcccagcccccagggcaccagatggggcctgggcggcacctgcgtgaacgtgggctgcatccccaagaagctgatgcaccaggccgccctgctgggcggcctgatccaggacgcccccaactacggctgggaggtggcccagcccgtgccccacgactggagaaagatggccgaggccgtgcagaaccacgtgaagagcctgaactggggccacagagtgcagctgcaggacagaaaggtgaagtacttcaacatcaaggccagcttcgtggacgagcacaccgtgtgcggcgtggccaagggcggcaaggagatcctgctgagcgccgaccacatcatcatcgccaccggcggcagacccagataccccacccacatcgagggcgccctggagtacggcatcaccagcgacgacatcttctggctgaaggagagccccggcaagaccctgcccgtgagcgtgagctacgtggccctggagtgcgccggcttcctgaccggcatcggcctggacaccaccatcatgatgagaagcatccccctgagaggcttcgaccagcagatgagcagcatggtgatcgagcacatggccagccacggcaccagattcctgagaggctgcgcccccagcagagtgagaagactgcccgacggccagctgcaggtgacctgggaggacagcaccaccggcaaggaggacaccggcaccttcgacaccgtgctgtgggccatcggcagagtgcccgacaccagaagcctgaacctggagaaggccggcgtggacaccagccccgacacccagaagatcctggtggacagcagagaggccaccagcgtgccccacatctacgccatcggcgacgtggtggagggcagacccgagctgacccccatcgccatcatggccggcagactgctggtgcagagactgttcggcggcagcagcgacctgatggactacgacaacgtgcccaccaccgtgttcacccccctggagtacggctgcgtgggcctgagcgaggaggaggccgtggccagacacggccaggagcacgtggaggtgtaccacgcccactacaagcccctggagttcaccgtggccggcagagacgccagccagtgctacgtgaagatggtgtgcctgagagagcccccccagctggtgctgggcctgcacttcctgggccccaacgccggcgaggtgacccagggcttcgccctgggcatcaagtgcggcgccagctacgcccaggtgatgagaaccgtgggcatccaccccacctgcagcgaggaggtggtgaagctgagaatcagcaagagaagcggcctggaccccaccgtgaccggctgctag

SEQ ID NO: 102359 - DNA, 1281 bp, synthetic construct
  misc_feature 1..1281: note = Description of Artificial Sequence: Synthetic coding sequence
  source 1..1281: mol_type = other DNA
atgcaccaggccgccctgctgggcggcctgatccaggacgcccccaactacggctgggaggtggcccagcccgtgccccacgactggagaaagatggccgaggccgtgcagaaccacgtgaagagcctgaactggggccacagagtgcagctgcaggacagaaaggtgaagtacttcaacatcaaggccagcttcgtggacgagcacaccgtgtgcggcgtggccaagggcggcaaggagatcctgctgagcgccgaccacatcatcatcgccaccggcggcagacccagataccccacccacatcgagggcgccctggagtacggcatcaccagcgacgacatcttctggctgaaggagagccccggcaagacctgcgtggtggcccacgcctacgtggccctggagtgcgccggcttcctgaccggcatcggcctggacaccaccatcatgatgagaagcatccccctgagaggcttcgaccagcagatgagcagcatggtgatcgagcacatggccagccacggcaccagattcctgagaggctgcgcccccagcagagtgagaagactgcccgacggccagctgcaggtgacctgggaggacagcaccaccggcaaggaggacaccggcaccttcgacaccgtgctgtgggccatcggcagagtgcccgacaccagaagcctgaacctggagaaggccggcgtggacaccagccccgacacccagaagatcctggtggacagcagagaggccaccagcgtgccccacatctacgccatcggcgacgtggtggagggcagacccgagctgacccccatcgccatcatggccggcagactgctggtgcagagactgttcggcggcagcagcgacctgatggactacgacaacgtgcccaccaccgtgttcacccccctggagtacggctgcgtgggcctgagcgaggaggaggccgtggccagacacggccaggagcacgtggaggtgtaccacgcccactacaagcccctggagttcaccgtggccggcagagacgccagccagtgctacgtgaagatggtgtgcctgagagagcccccccagctggtgctgggcctgcacttcctgggccccaacgccggcgaggtgacccagggcttcgccctgggcatcaagtgcggcgccagctacgcccaggtgatgagaaccgtgggcatccaccccacctgcagcgaggaggtggtgaagctgagaatcagcaagagaagcggcctggaccccaccgtgaccggctgctag

SEQ ID NO: 102360 - DNA, 1479 bp, synthetic construct
  misc_feature 1..1479: note = Description of Artificial Sequence: Synthetic coding sequence
  source 1..1479: mol_type = other DNA
atggaggaccaggccggccagagagactacgacctgctggtggtgggcggcggcagcggcggcctggcctgcgccaaggaggccgcccagctgggcagaaaggtggccgtggtggactacgtggagcccagcccccagggcaccagatggggcctgggcggcacctgcgtgaacgtgggctgcatccccaagaagctgatgcaccaggccgccctgctgggcggcctgatccaggacgcccccaactacggctgggaggtggcccagcccgtgccccacgactggagaaagatggccgaggccgtgcagaaccacgtgaagagcctgaactggggccacagagtgcagctgcaggacagaaaggtgaagtacttcaacatcaaggccagcttcgtggacgagcacaccgtgtgcggcgtggccaagggcggcaaggagatcctgctgagcgccgaccacatcatcatcgccaccggcggcagacccagataccccacccacatcgagggcgccctggagtacggcatcaccagcgacgacatcttctggctgaaggagagccccggcaagaccctggtggtgggcgccagctacgtggccctggagtgcgccggcttcctgaccggcatcggcctggacaccaccatcatgatgagaagcatccccctgagaggcttcgaccagcagatgagcagcatggtgatcgagcacatggccagccacggcaccagattcctgagaggctgcgcccccagcagagtgagaagactgcccgacggccagctgcaggtgacctgggaggacagcaccaccggcaaggaggacaccggcaccttcgacaccgtgctgtgggccatcggcagagtgcccgacaccagaagcctgaacctggagaaggccggcgtggacaccagccccgacacccagaagatcctggtggacagcagagaggccaccagcgtgccccacatctacgccatcggcgacgtggtggagggcagacccgagctgacccccatcgccatcatggccggcagactgctggtgcagagactgttcggcggcagcagcgacctgatggactacgacaacgtgcccaccaccgtgttcacccccctggagtacggctgcgtgggcctgagcgaggaggaggccgtggccagacacggccaggagcacgtggaggtgtaccacgcccactacaagcccctggagttcaccgtggccggcagagacgccagccagtgctacgtgaagatggtgtgcctgagagagcccccccagctggtgctgggcctgcacttcctgggccccaacgccggcgaggtgacccagggcttcgccctgggcatcaagtgcggcgccagctacgcccaggtgatgagaaccgtgggcatccaccccacctgcagcgaggaggtggtgaagctgagaatcagcaagagaagcggcctggaccccaccgtgaccggctgctag

SEQ ID NO: 102361 - DNA, 429 bp, synthetic construct
  misc_feature 1..429: note = Description of Artificial Sequence: Synthetic coding sequence
  source 1..429: mol_type = other DNA
atgagctacatgctgccccacctgcacaacggctggcaggtggaccaggccatcctgagcgaggaggacagagtggtggtgatcagattcggccacgactgggaccccacctgcatgaagatggacgaggtgctgtacagcatcgccgagaaggtgaagaacttcgccgtgatctacctggtggacatcaccgaggtgcccgacttcaacaagatgtacgagctgtacgacccctgcaccgtgatgttcttcttcagaaacaagcacatcatgatcgacctgggcaccggcaacaacaacaagatcaactgggccatggaggacaagcaggagatggtggacatcatcgagaccgtgtacagaggcgccagaaagggcagaggcctggtggtgagccccaaggactacagcaccaagtacagatactag

SEQ ID NO: 102362 - DNA, 276 bp, synthetic construct
  misc_feature 1..276: note = Description of Artificial Sequence: Synthetic coding sequence
  source 1..276: mol_type = other DNA
atgagctacatgctgccccacctgcacaacggctggcaggtggaccaggccatcctgagcgaggaggacagagtggtggtgatcagattcggccacgactgggaccccacctgcatgaagatggacgaggtgctgtacagcatcgccgagaaggtgaagaacttcgccgtgatctacctggtggacatcaccgaggtgcccgacttcaacaagatgtacgagctgtacgacccctgcaccgtgatgttcttcttcagctaccacagaggctggtag

SEQ ID NO: 102363 - DNA, 894 bp, synthetic construct
  misc_feature 1..894: note = Description of Artificial Sequence: Synthetic coding sequence
  source 1..894: mol_type = other DNA
atggtgcaccaggtgctgtacagagccctggtgagcaccaagtggctggccgagagcatcagaaccggcaagctgggccccggcctgagagtgctggacgccagctggtacagccccggcaccagagaggccagaaaggagtacctggagagacacgtgcccggcgccagcttcttcgacatcgaggagtgcagagacaccgccagcccctacgagatgatgctgcccagcgaggccggcttcgccgagtacgtgggcagactgggcatcagcaaccacacccacgtggtggtgtacgacggcgagcacctgggcagcttctacgcccccagagtgtggtggatgttcagagtgttcggccacagaaccgtgagcgtgctgaacggcggcttcagaaactggctgaaggagggccaccccgtgaccagcgagcccagcagacccgagcccgccgtgttcaaggccaccctggacagaagcctgctgaagacctacgagcaggtgctggagaacctggagagcaagagattccagctggtggacagcagaagccagggcagattcctgggcaccgagcccgagcccgacgccgtgggcctggacagcggccacatcagaggcgccgtgaacatgcccttcatggacttcctgaccgaggacggcttcgagaagggccccgaggagctgagagccctgttccagaccaagaaggtggacctgagccagcccctgatcgccacctgcagaaagggcgtgaccgcctgccacgtggccctggccgcctacctgtgcggcaagcccgacgtggccgtgtacgacggcagctggagcgagtggttcagaagagccccccccgagagcagagtgagccagggcaagagcgagaaggcctag

SEQ ID NO: 102364 - DNA, 894 bp, synthetic construct; identical to SEQ ID NO: 102363
  misc_feature 1..894: note = Description of Artificial Sequence: Synthetic coding sequence
  source 1..894: mol_type = other DNA

SEQ ID NO: 102365 - DNA, 735 bp, synthetic construct
  misc_feature 1..735: note = Description of Artificial Sequence: Synthetic coding sequence
  source 1..735: mol_type = other DNA
atggtgcaccaggtgctgtacagagccctggtgagcaccaagtggctggccgagagcatcagaaccggcaagctgggccccggcctgagagtgctggacgccagctggtacagccccggcaccagagaggccagaaaggagtacctggagagacacgtgcccggcgccagcttcttcgacatcgaggagtgcagagacaccgccagcccctacgagatgatgctgcccagcgaggccggcttcgccgagtacgtgggcagactgggcatcagcaaccacacccacgtggtggtgtacgacggcgagcacctgggcagcttctacgcccccagagtgtggtggatgttcagagtgttcggccacagaaccgtgagcgtgctgaacggcggcttcagaaactggctgaaggagggccaccccgtgaccagcgagcccagcagacccgagcccgccgtgttcaaggccaccctggacagaagcctgctgaagacctacgagcaggtgctggagaacctggagagcaagagattccagctggtggacagcagaagccagggcagattcctgggcaccgagcccgagcccgacgccgtgggcctggacagcggccacatcagaggcgccgtgaacatgcccttcatggacttcctgaccgaggacggcagctggagcgagtggttcagaagagccccccccgagagcagagtgagccagggcaagagcgagaaggcctag

SEQ ID NO: 102366 - DNA, 375 bp, synthetic construct
  misc_feature 1..375: note = Description of Artificial Sequence: Synthetic coding sequence
  source 1..375: mol_type = other DNA
atggtgcaccaggtgctgtacagagccctggtgagcaccaagtggctggccgagagcatcagaaccggcaagctgggccccggcctgagagtgctggacgccagctggtacagccccggcaccagagaggccagaaaggagtacctggagagacacgtgcccggcgccagcttcttcgacatcgaggagtgcagagacaccgccagcccctacgagatgatgctgcccagcgaggccggcttcgccgagtacgtgggcagactgggcatcagcaaccacacccacgtggtggtgtacgacggcgagcacctgggcagcttctacgcccccagagtgtggtggatgttcagagtgttcggccacagaaccgtgtag

SEQ ID NO: 102367 - DNA, 1974 bp, synthetic construct
  misc_feature 1..1974: note = Description of Artificial Sequence: Synthetic coding sequence
  source 1..1974: mol_type = other DNA
atgagccccaccccccccctgttcagcctgcccgaggccagaaccagattcaccaagagcaccagagaggccctgaacaacaagaacatcaagcccctgctgagcaccttcagccaggtgcccggcagcgagaacgagaagaagtgcaccctggaccaggccttcagaggcatcctggaggaggagatcatcaaccacagcagctgcgagaacgtgctggccatcatcagcctggccatcggcggcgtgaccgagggcatctgcaccgccagcacccccttcgtgctgctgggcgacgtgctggactgcctgcccctggaccagtgcgacaccatcttcaccttcgtggagaagaacgtggccacctggaagagcaacaccttctacagcgccggcaagaactacctgctgagaatgtgcaacgacctgctgagaagactgagcaagagccagaacaccgtgttctgcggcagaatccagctgttcctggccagactgttccccctgagcgagaagagcggcctgaacctgcagagccagttcaacctggagaacgtgaccgtgttcaacaccaacgagcaggagagcaccctgggccagaagcacaccgaggacagagaggagggcatggacgtggaggagggcgagatgggcgacgaggaggcccccaccacctgcagcatccccatcgactacaacctgtacagaaagttctggagcctgcaggactacttcagaaaccccgtgcagtgctacgagaagatcagctggaagaccttcctgaagtacagcgaggaggtgctggccgtgttcaagagctacaagctggacgacacccaggccagcagaaagaagatggaggagctgaagaccggcggcgagcacgtgtacttcgccaagttcctgaccagcgagaagctgatggacctgcagctgagcgacagcaacttcagaagacacatcctgctgcagtacctgatcctgttccagtacctgaagggccaggtgaagttcaagagcagcaactacgtgctgaccgacgagcagagcctgtggatcgaggacaccaccaagagcgtgtaccagctgctgagcgagaacccccccgacggcgagagattcagcaagatggtggagcacatcctgaacaccgaggagaactggaacagctggaagaacgagggctgccccagcttcgtgaaggagagaaccagcgacaccaagcccaccagaatcatcagaaagagaaccgcccccgaggacttcctgggcaagggccccaccaagaagatcctgatgggcaacgaggagctgaccagactgtggaacctgtgccccgacaacatggaggcctgcaagagcgagaccagagagcacatgcccaccctggaggagttcttcgaggaggccatcgagcaggccgaccccgagaacatggtggagaacgagtacaaggccgtgaacaacagcaactacggctggagagccctgagactgctggccagaagaagcccccacttcttccagcccaccaaccagcagttcaagagcctgcccgagtacctggagaacatggtgatcaagctggccaaggagctgcccccccccagcgaggagatcaagaccggcgaggacgaggacgaggaggacaacgacgccctgctgaaggagaacgagagccccgacgtgagaagagacaagcccgtgaccggcgagcagatcgaggtgttcgccaacaagctgggcgagcagtggaagatcctggccccctacctggagatgaaggacagcgagatcagacagatcgagtgcgacagcgaggacatgaagatgagagccaagcagctgctggtggcctggcaggaccaggagggcgtgcacgccacccccgagaacctgatcaacgccctgaacaagagcggcctgagcgacctggccgagagcctgaccaacgacaacgagaccaacagctag

SEQ ID NO: 102368 - DNA, 4782 bp, synthetic construct
  misc_feature 1..4782: note = Description of Artificial Sequence: Synthetic coding sequence
  source 1..4782: mol_type = other DNA
atggccgccgccgccgtggtggtgcccgccgagtggatcaagaactgggagaagagcggcagaggcgagttcctgcacctgtgcagaatcctgagcgagaacaagagccacgacagcagcacctacagagacttccagcaggccctgtacgagctgagctaccacgtgatcaagggcaacctgaagcacgagcaggccagcaacgtgctgagcgacatcagcgagttcagagaggacatgcccagcatcctggccgacgtgttctgcatcctggacatcgagaccaactgcctggaggagaagagcaagagagactacttcacccagctggtgctggcctgcctgtacctggtgagcgacaccgtgctgaaggagagactggaccccgagaccctggagagcctgggcctgatcaagcagagccagcagttcaaccagaagagcgtgaagatcaagaccaagctgttctacaagcagcagaagttcaacctgctgagagaggagaacgagggctacgccaagctgatcgccgagctgggccaggacctgagcggcagcatcaccagcgacctgatcctggagaacatcaagagcctgatcggctgcttcaacctggaccccaacagagtgctggacgtgatcctggaggtgttcgagtgcagacccgagcacgacgacttcttcatcagcctgctggagagctacatgagcatgtgcgagccccagaccctgtgccacatcctgggcttcaagttcaagttctaccaggagcccaacggcgagacccccagcagcctgtacagagtggccgccgtgctgctgcagttcaacctgatcgacctggacgacctgtacgtgcacctgctgcccgccgacaactgcatcatggacgagcacaagagagagatcgccgaggccaagcagatcgtgagaaagctgaccatggtggtgctgagcagcgagaagatggacgagagagagaaggagaaggagaaggaggaggagaaggtggagaagccccccgacaaccagaagctgggcctgctggaggccctgctgaagatcggcgactggcagcacgcccagaacatcatggaccagatgcccccctactacgccgccagccacaagctgatcgccctggccatctgcaagctgatccacatcaccatcgagcccctgtacagaagagtgggcgtgcccaagggcgccaagggcagccccgtgaacgccctgcagaacaagagagcccccaagcaggccgagagcttcgaggacctgagaagagacgtgttcaacatgttctgctacctgggcccccacctgagccacgaccccatcctgttcgccaaggtggtgagaatcggcaagagcttcatgaaggagttccagagcgacggcagcaagcaggaggacaaggagaagaccgaggtgatcctgagctgcctgctgagcatcaccgaccaggtgctgctgcccagcctgagcctgatggactgcaacgcctgcatgagcgaggagctgtggggcatgttcaagaccttcccctaccagcacagatacagactgtacggccagtggaagaacgagacctacaacagccaccccctgctggtgaaggtgaaggcccagaccatcgacagagccaagtacatcatgaagagactgaccaaggagaacgtgaagcccagcggcagacagatcggcaagctgagccacagcaaccccaccatcctgttcgactacatcctgagccagatccagaagtacgacaacctgatcacccccgtggtggacagcctgaagtacctgaccagcctgaactacgacgtgctggcctactgcatcatcgaggccctggccaaccccgagaaggagagaatgaagcacgacgacaccaccatcagcagctggctgcagagcctggccagcttctgcggcgccgtgttcagaaagtaccccatcgacctggccggcctgctgcagtacgtggccaaccagctgaaggccggcaagagcttcgacctgctgatcctgaaggaggtggtgcagaagatggccggcatcgagatcaccgaggagatgaccatggagcagctggaggccatgaccggcggcgagcagctgaaggccgagggcggctacttcggccagatcagaaacaccaagaagagcagccagagactgaaggacgccctgctggaccacgacctggccctgcccctgtgcctgctgatggcccagcagagaaacggcgtgatcttccaggagggcggcgagaagcacctgaagctggtgggcaagctgtacgaccagtgccacgacaccctggtgcagttcggcggcttcctggccagcaacctgagcaccgaggactacatcaagagagtgcccagcatcgacgtgctgtgcaacgagttccacaccccccacgacgccgccttcttcctgagcagacccatgtacgcccaccacatcagcagcaagtacgacgagctgaagaagagcgagaagggcagcaagcagcagcacaaggtgcacaagtacatcaccagctgcgagatggtgatggcccccgtgcacgaggccgtggtgagcctgcacgtgagcaaggtgtgggacgacatcagcccccagttctacgccaccttctggagcctgaccatgtacgacctggccgtgccccacaccagctacgagagagaggtgaacaagctgaaggtgcagatgaaggccatcgacgacaaccaggagatgccccccaacaagaagaagaaggagaaggagagatgcaccgccctgcaggacaagctgctggaggaggagaagaagcagatggagcacgtgcagagagtgctgcagagactgaagctggagaaggacaactggctgctggccaagagcaccaagaacgagaccatcaccaagttcctgcagctgtgcatcttccccagatgcatcttcagcgccatcgacgccgtgtactgcgccagattcgtggagctggtgcaccagcagaagacccccaacttcagcaccctgctgtgctacgacagagtgttcagcgacatcatctacaccgtggccagctgcaccgagaacgaggccagcagatacggcagattcctgtgctgcatgctggagaccgtgaccagatggcacagcgacagagccacctacgagaaggagtgcggcaactaccccggcttcctgaccatcctgagagccaccggcttcgacggcggcaacaaggccgaccagctggactacgagaacttcagacacgtggtgcacaagtggcactacaagctgaccaaggccagcgtgcactgcctggagaccggcgagtacacccacatcagaaacatcctgatcgtgctgaccaagatcctgccctggtaccccaaggtgctgaacctgggccaggccctggagagaagagtgcacaagatctgccaggaggagaaggagaagagacccgacctgtacgccctggccatgggctacagcggccagctgaagagcagaaagagctacatgatccccgagaacgagttccaccacaaggaccccccccccagaaacgccgtggccagcgtgcagaacggccccggcggcggccccagcagcagcagcatcggcagcgccagcaagagcgacgagagcagcaccgaggagaccgacaagagcagagagagaagccagtgcggcgtgaaggccgtgaacaaggccagcagcaccacccccaagggcaacagcagcaacggcaacagcggcagcaacagcaacaaggccgtgaaggagaacgacaaggagaagggcaaggagaaggagaaggagaagaaggagaagacccccgccaccacccccgaggccagagtgctgggcaaggacggcaaggagaagcccaaggaggagagacccaacaaggacgagaaggccagagagaccaaggagagaacccccaagagcgacaaggagaaggagaagttcaagaaggaggagaaggccaaggacgagaagttcaagaccaccgtgcccaacgccgagagcaagagcacccaggagagagagagagagaaggagcccagcagagagagagacatcgccaaggagatgaagagcaaggagaacgtgaagggcggcgagaagacccccgtgagcggcagcctgaagagccccgtgcccagaagcgacatccccgagcccgagagagagcagaagagaagaaagatcgacacccaccccagccccagccacagcagcaccgtgaaggacagcctgatcgagctgaaggagagcagcgccaagctgtacatcaaccacacccccccccccctgagcaagagcaaggagagagagatggacaagaaggacctggacaagagcagagagagaagcagagagagagagaagaaggacgagaaggacagaaaggagagaaagagagaccacagcaacaacgacagagaggtgccccccgacctgaccaagagaagaaaggaggagaacggcaccatgggcgtgagcaagcacaagagcgagagcccctgcgagagcccctaccccaacgagaaggacaaggagaagaacaagagcaagagcagcggcaaggagaagggcagcgacagcttcaagagcgagaagatggacaagatcagcagcggcggcaagaaggagagcagacacgacaaggagaagatcgagaagaaggagaagagagacagcagcggcggcaaggaggagaagaagcaccacaagagcagcgacaagcacagatag

SEQ ID NO: 102369 - DNA, 4782 bp, synthetic construct; identical to SEQ ID NO: 102368
  misc_feature 1..4782: note = Description of Artificial Sequence: Synthetic coding sequence
  source 1..4782: mol_type = other DNA

SEQ ID NO: 102370 - DNA, 2547 bp, synthetic construct
  misc_feature 1..2547: note = Description of Artificial Sequence: Synthetic coding sequence
  source 1..2547: mol_type = other DNA
atgcccagcatcctggccgacgtgttctgcatcctggacatcgagaccaactgcctggaggagaagagcaagagagactacttcacccagctggtgctggcctgcctgtacctggtgagcgacaccgtgctgaaggagagactggaccccgagaccctggagagcctgggcctgatcaagcagagccagcagttcaaccagaagagcgtgaagatcaagaccaagctgttctacaagcagcagaagttcaacctgctgagagaggagaacgagggctacgccaagctgatcgccgagctgggccaggacctgagcggcagcatcaccagcgacctgatcctggagaacatcaagagcctgatcggctgcttcaacctggaccccaacagagtgctggacgtgatcctggaggtgttcgagtgcagacccgagcacgacgacttcttcatcagcctgctggagagctacatgagcatgtgcgagccccagaccctgtgccacatcctgggcttcaagttcaagttctaccaggagcccaacggcgagacccccagcagcctgtacagagtggccgccgtgctgctgcagttcaacctgatcgacctggacgacctgtacgtgcacctgctgcccgccgacaactgcatcatggacgagcacaagagagagatcgccgaggccaagcagatcgtgagaaagctgaccatggtggtgctgagcagcgagaagatggacgagagagagaaggagaaggagaaggaggaggagaaggtggagaagccccccgacaaccagaagctgggcctgctggaggccctgctgaagatcggcgactggcagcacgcccagaacatcatggaccagatgcccccctactacgccgccagccacaagctgatcgccctggccatctgcaagctgatccacatcaccatcgagcccctgtacagaagagtgggcgtgcccaagggcgccaagggcagccccgtgaacgccctgcagaacaagagagcccccaagcaggccgagagcttcgaggacctgagaagagacgtgttcaacatgttctgctacctgggcccccacctgagccacgaccccatcctgttcgccaaggtggtgagaatcggcaagagcttcatgaaggagttccagagcgacggcagcaagcaggaggacaaggagaagaccgaggtgatcctgagctgcctgctgagcatcaccgaccaggtgctgctgcccagcctgagcctgatggactgcaacgcctgcatgagcgaggagctgtggggcatgttcaagaccttcccctaccagcacagatacagactgtacggccagtggaagaacgagacctacaacagccaccccctgctggtgaaggtgaaggcccagaccatcgacagagccaagtacatcatgaagagactgaccaaggagaacgtgaagcccagcggcagacagatcggcaagctgagccacagcaaccccaccatcctgttcgactacgtgtgcttcgagatcctgagccagatccagaagtacgacaacctgatcacccccgtggtggacagcctgaagtacctgaccagcctgaactacgacgtgctggcctactgcatcatcgaggccctggccaaccccgagaaggagagaatgaagcacgacgacaccaccatcagcagctggctgcagagcctggccagcttctgcggcgccgtgttcagaaagtaccccatcgacctggccggcctgctgcagtacgtggccaaccagctgaaggccggcaagagcttcgacctgctgatcctgaaggaggtggtgcagaagatggccggcatcgagatcaccgaggagatgaccatggagcagctggaggccatgaccggcggcgagcagctgaaggccgagggcggctacttcggccagatcagaaacaccaagaagagcagccagagactgaaggacgccctgctggaccacgacctggccctgcccctgtgcctgctgatggcccagcagagaaacggcgtgatcttccaggagggcggcgagaagcacctgaagctggtgggcaagctgtacgaccagtgccacgacaccctggtgcagttcggcggcttcctggccagcaacctgagcaccgaggactacatcaagagagtgcccagcatcgacgtgctgtgcaacgagttccacaccccccacgacgccgccttcttcctgagcagacccatgtacgcccaccacatcagcagcaagtacgacgagctgaagaagagcgagaagggcagcaagcagcagcacaaggtgcacaagtacatcaccagctgcgagatggtgatggcccccgtgcacgaggccgtggtgagcctgcacgtgagcaaggtgtgggacgacatcagcccccagttctacgccaccttctggagcctgaccatgtacgacctggccgtgccccacaccagctacgagagagaggtgaacaagctgaaggtgcagatgaaggccatcgacgacaaccaggagatgatccccccccagtag

SEQ ID NO: 102371 - DNA, 570 bp, synthetic construct
  misc_feature 1..570: note = Description of Artificial Sequence: Synthetic coding sequence
  source 1..570: mol_type = other DNA
tgagagcagaagagaagaaagatcgacacccaccccagccccagccacagcagcaccgtgaaggacagcctgatcgagctgaaggagagcagcgccaagctgtacatcaaccacacccccccccccctgagcaagagcaaggagagagagatggacaagaaggacctggacaagagcagagagagaagcagagagagagagaagaaggacgagaaggacagaaaggagagaaagagagaccacagcaacaacgacagagaggtgccccccgacctgaccaagagaagaaaggaggagaacggcaccatgggcgtgagcaagcacaagagcgagagcccctgcgagagcccctaccccaacgagaaggacaaggagaagaacaagagcaagagcagcggcaaggagaagggcagcgacagcttcaagagcgagaagatggacaagatcagcagcggcggcaagaaggagagcagacacgacaaggagaagatcgagaagaaggagaagagagacagcagcggcggcaaggaggagaagaagcaccacaagagcagcgacaagcacagatag

SEQ ID NO: 102372 - DNA, 1056 bp, synthetic construct
  misc_feature 1..1056: note = Description of Artificial Sequence: Synthetic coding sequence
  source 1..1056: mol_type = other DNA
atggccgtgcccgccgccgccatgggccccagcgccctgggccagagcggccccggcagcatggccccctggtgcagcgtgagcagcggccccagcagatacgtgctgggcatgcaggagctgttcagaggccacagcaagaccagagagttcctggcccacagcgccaaggtgcacagcgtggcctggagctgcgacggcagaagactggccagcggcagcttcgacaagaccgccagcgtgttcctgctggagaaggacagactggtgaaggagaacaactacagaggccacggcgacagcgtggaccagctgtgctggcaccccagcaaccccgacctgttcgtgaccgccagcggcgacaagaccatcagaatctgggacgtgagaaccaccaagtgcatcgccaccgtgaacaccaagggcgagaacatcaacatctgctggagccccgacggccagaccatcgccgtgggcaacaaggacgacgtggtgaccttcatcgacgccaagacccacagaagcaaggccgaggagcagttcaagttcgaggtgaacgagatcagctggaacaacgacaacaacatgttcttcctgaccaacggcaacggctgcatcaacatcctgagctaccccgagctgaagcccgtgcagagcatcaacgcccaccccagcaactgcatctgcatcaagttcgaccccatgggcaagtacttcgccaccggcagcgccgacgccctggtgagcctgtgggacgtggacgagctggtgtgcgtgagatgcttcagcagactggactggcccgtgagaaccctgagcttcagccacgacggcaagatgctggccagcgccagcgaggaccacttcatcgacatcgccgaggtggagaccggcgacaagctgtgggaggtgcagtgcgagagccccaccttcaccgtggcctggcaccccaagagacccctgctggccttcgcctgcgacgacaaggacggcaagtacgacagcagcagagaggccggcaccgtgaagctgttcggcctgcccaacgacagctag

SEQ ID NO: 102373 - DNA, 2052 bp, synthetic construct
  misc_feature 1..2052: note = Description of Artificial Sequence: Synthetic coding sequence
  source 1..2052: mol_type = other DNA
atgagcagcgagagcagcaagaagagaaagcccaaggtgatcagaagcgacggcgcccccgccgagggcaagagaaacagaagcgacaccgagcaggagggcaagtactacagcgaggaggccgaggtggacctgagagaccccggcagagactacgagctgtacaagtacacctgccaggagctgcagagactgatggccgagatccaggacctgaagagcagaggcggcaaggacgtggccatcgagatcgaggagagaagaatccagagctgcgtgcacttcatgaccctgaagaagctgaacagactggcccacatcagactgaagaagggcagagaccagacccacgaggccaagcagaaggtggacgcctaccacctgcagctgcagaacctgctgtacgaggtgatgcacctgcagaaggagatcaccaagtgcctggagttcaagagcaagcacgaggagatcgacctggtgagcctggaggagttctacaaggaggccccccccgacatcagcaaggccgaggtgaccatgggcgacccccaccagcagaccctggccagactggactgggagctggagcagagaaagagactggccgagaagtacagagagtgcctgagcaacaaggagaagatcctgaaggagatcgaggtgaagaaggagtacctgagcagcctgcagcccagactgaacagcatcatgcaggccagcctgcccgtgcaggagtacctgttcatgcccttcgaccaggcccacaagcagtacgagaccgccagacacctgcccccccccctgtacgtgctgttcgtgcaggccaccgcctacggccaggcctgcgacaagaccctgagcgtggccatcgagggcagcgtggacgaggccaaggccctgttcaagccccccgaggacagccaggacgacgagagcgacagcgacgccgaggaggagcagaccaccaagagaagaagacccaccctgggcgtgcagctggacgacaagagaaaggagatgctgaagagacaccccctgagcgtgatgctggacctgaagtgcaaggacgacagcgtgctgcacctgaccttctactacctgatgaacctgaacatcatgaccgtgaaggccaaggtgaccaccgccatggagctgatcacccccatcagcgccggcgacctgctgagccccgacagcgtgctgagctgcctgtaccccggcgaccacggcaagaagacccccaaccccgccaaccagtaccagttcgacaaggtgggcatcctgaccctgagcgactacgtgctggagctgggccacccctacctgtgggtgcagaagctgggcggcctgcacttccccaaggagcagccccagcagaccgtgatcgccgaccacagcctgagcgccagccacatggagaccaccatgaagctgctgaagaccagagtgcagagcagactggccctgcacaagcagttcgccagcctggagcacggcatcgtgcccgtgaccagcgactgccagtacctgttccccgccaaggtggtgagcagactggtgaagtgggtgaccgtggcccacgaggactacatggagctgcacttcaccaaggacatcgtggacgccggcctggccggcgacaccaacctgtactacatggccctgatcgagagaggcaccgccaagctgcaggccgccgtggtgctgaaccccggctacagcagcatcccccccgtgttccagctgtgcctgaactggaagggcgagaagaccaacagcaacgacgacaacatcagagccatggagggcgaggtgaacgtgtgctacaaggagctgtgcggcccctggcccagccaccagctgctgaccaaccagctgcagagactgtgcgtgctgctggacgtgtacctggagaccgagagccacgacgacagcgtggagggccccaaggagttcccccaggagaagatgtgcctgagactgttcagaggccccagcagaatgaagcccttcaagtacaaccacccccagggcttcttcagccacagatag

SEQ ID NO: 102374 - DNA, 2052 bp, synthetic construct; identical to SEQ ID NO: 102373
  misc_feature 1..2052: note = Description of Artificial Sequence: Synthetic coding sequence
  source 1..2052: mol_type = other DNA

SEQ ID NO: 102375 - DNA, 2052 bp, synthetic construct; identical to SEQ ID NO: 102373
  misc_feature 1..2052: note = Description of Artificial Sequence: Synthetic coding sequence
  source 1..2052: mol_type = other DNA

SEQ ID NO: 102376 - DNA, 282 bp, synthetic construct
  misc_feature 1..282: note = Description of Artificial Sequence: Synthetic coding sequence
  source 1..282: mol_type = other DNA
atgagcagcgagagcagcaagaagagaaagcccaaggtgatcagaagcgacggcgcccccgccgagggcaagagaaacagaagcgacaccgagcaggagggcaagtactacagcgaggaggccgaggtggacctgagagaccccggcagagactacgagctgtacaagtacacctgccaggagctgcagagactgatggccgagatccaggacctgaagagcagaggcggcaaggacgtggccatcgagatcgaggagagaagaatccagagctgcgtgtag

SEQ ID NO: 102377 - DNA, 486 bp, synthetic construct
  misc_feature 1..486: note = Description of Artificial Sequence: Synthetic coding sequence
  source 1..486: mol_type = other DNA
atgagcagcgagagcagcaagaagagaaagcccaaggtgatcagaagcgacggcgcccccgccgagggcaagagaaacagaagcgacaccgagcaggagggcaagtactacagcgaggaggccgaggtggacctgagagaccccggcagagactacgagctgtacaagtacacctgccaggagctgcagagactgatggccgagatccaggacctgaagagcagaggcggcaaggacgtggccatcgagatcgaggagagaagaatccagagctgcgtgcacttcatgaccctgaagaagctgaacagactggcccacatcagactgaagaagggcagagaccagacccacgaggccaagcagaaggtggacgcctaccacctgcagctgcagaacctgctgtacgaggtgatgcacctgcagaaggagatcaccaagtgcctggagttcaagagcaagcacgaggagatcgacctggtgagctag

SEQ ID NO: 102378 - DNA, 672 bp, synthetic construct
  misc_feature 1..672: note = Description of Artificial Sequence: Synthetic coding sequence
  source 1..672: mol_type = other DNA
atgagcagcgagagcagcaagaagagaaagcccaaggtgatcagaagcgacggcgcccccgccgagggcaagagaaacagaagcgacaccgagcaggagggcaagtactacagcgaggaggccgaggtggacctgagagaccccggcagagactacgagctgtacaagtacacctgccaggagctgcagagactgatggccgagatccaggacctgaagagcagaggcggcaaggacgtggccatcgagatcgaggagagaagaatccagagctgcgtgcacttcatgaccctgaagaagctgaacagactggcccacatcagactgaagaagggcagagaccagacccacgaggccaagcagaaggtggacgcctaccacctgcagctgcagaacctgctgtacgaggtgatgcacctgcagaaggagatcaccaagtgcctggagttcaagagcaagcacgaggagatcgacctggtgagcctggaggagttctacaaggaggccccccccgacatcagcaaggccgaggtgaccatgggcgacccccaccagcagaccctggccagactggactgggagctggagcagagaaagagactggccgagaagtacagagagtgcctgagcaacaaggagaagatcctgaaggagatcgaggtgaagaagtag

SEQ ID NO: 102379 - DNA, 2052 bp, synthetic construct; identical to SEQ ID NO: 102373
  misc_feature 1..2052: note = Description of Artificial Sequence: Synthetic coding sequence
  source 1..2052: mol_type = other DNA

SEQ ID NO: 102380 - DNA, 615 bp, synthetic construct
  misc_feature 1..615: note = Description of Artificial Sequence: Synthetic coding sequence
  source 1..615: mol_type = other DNA
atgggcgccgtgaccgacgacgaggtgatcagaaagagactgctgatcgacggcgacggcgccggcgacgacagaagaatcaacctgctggtgaagagcttcatcaagtggtgcaacagcggcagccaggaggagggctacagccagtaccagagaatgctgagcaccctgagccagtgcgagttcagcatgggcaagaccctgctggtgtacgacatgaacctgagagagatggagaactacgagaagatctacaaggagatcgagtgcagcatcgccggcgcccacgagaagatcgccgagtgcaagaagcagatcctgcaggccaagagaatcagaaagaacagacaggagtacgacgccctggccaaggtgatccagcaccaccccgacagacacgagaccctgaaggagctggaggccctgggcaaggagctggagcacctgagccacatcaaggagagcgtggaggacaagctggagctgagaagaaagcagttccacgtgctgctgagcaccatccacgagctgcagcagaccctggagaacgacgagaagctgagcgaggtggaggaggcccaggaggccagcatggagaccgaccccaagccctag

SEQ ID NO: 102381 - DNA, 711 bp, synthetic construct
  misc_feature 1..711: note = Description of Artificial Sequence: Synthetic coding sequence
  source 1..711: mol_type = other DNA
atgagcgaggcccccagagccgagaccttcgtgttcctggacctggaggccaccggcctgcccagcgtggagcccgagatcgccgagctgagcctgttcgccgtgcacagaagcagcctggagaaccccgagcacgacgagagcggcgccctggtgctgcccagagtgctggacaagctgaccctgtgcatgtgccccgagagacccttcaccgccaaggccagcgagatcaccggcctgagcagcgagggcctggccagatgcagaaaggccggcttcgacggcgccgtggtgagaaccctgcaggccttcctgagcagacaggccggccccatctgcctggtggcccacaacggcttcgactacgacttccccctgctgtgcgccgagctgagaagactgggcgccagactgcccagagacaccgtgtgcctggacaccctgcccgccctgagaggcctggacagagcccacagccacggcaccagagccagaggcagacagggctacagcctgggcagcctgttccacagatacttcagagccgagcccagcgccgcccacagcgccgagggcgacgtgcacaccctgctgctgatcttcctgcacagagccgccgagctgctggcctgggccgacgagcaggccagaggctgggcccacatcgagcccatgtacctgccccccgacgaccccagcctggaggcctag

SEQ ID NO: 102382 - DNA, 840 bp, synthetic construct
  misc_feature 1..840: note = Description of Artificial Sequence: Synthetic coding sequence
  source 1..840: mol_type = other DNA
atgggcagagccggcagccccctgcccagaagcagctggcccagaatggacgactgcggcagcagaagcagatgcagccccaccctgtgcagcagcctgagaacctgctaccccagaggcaacatcaccatgagcgaggcccccagagccgagaccttcgtgttcctggacctggaggccaccggcctgcccagcgtggagcccgagatcgccgagctgagcctgttcgccgtgcacagaagcagcctggagaaccccgagcacgacgagagcggcgccctggtgctgcccagagtgctggacaagctgaccctgtgcatgtgccccgagagacccttcaccgccaaggccagcgagatcaccggcctgagcagcgagggcctggccagatgcagaaaggccggcttcgacggcgccgtggtgagaaccctgcaggccttcctgagcagacaggccggccccatctgcctggtggcccacaacggcttcgactacgacttccccctgctgtgcgccgagctgagaagactgggcgccagactgcccagagacaccgtgtgcctggacaccctgcccgccctgagaggcctggacagagcccacagccacggcaccagagccagaggcagacagggctacagcctgggcagcctgttccacagatacttcagagccgagcccagcgccgcccacagcgccgagggcgacgtgcacaccctgctgctgatcttcctgcacagagccgccgagctgctggcctgggccgacgagcaggccagaggctgggcccacatcgagcccatgtacctgccccccgacgaccccagcctggaggcctag

SEQ ID NO: 102383 - DNA, 711 bp, synthetic construct; identical to SEQ ID NO: 102381
  misc_feature 1..711: note = Description of Artificial Sequence: Synthetic coding sequence
  source 1..711: mol_type = other DNA

SEQ ID NO: 102384 - DNA, 711 bp, synthetic construct; identical to SEQ ID NO: 102381
  misc_feature 1..711: note = Description of Artificial Sequence: Synthetic coding sequence
  source 1..711: mol_type = other DNA

SEQ ID NO: 102385 - DNA, 840 bp, synthetic construct; identical to SEQ ID NO: 102382
  misc_feature 1..840: note = Description of Artificial Sequence: Synthetic coding sequence
  source 1..840: mol_type = other DNA

SEQ ID NO: 102386 - DNA, 711 bp, synthetic construct; identical to SEQ ID NO: 102381
  misc_feature 1..711: note = Description of Artificial Sequence: Synthetic coding sequence
  source 1..711: mol_type = other DNA

SEQ ID NO: 102387 - DNA, 840 bp, synthetic construct; identical to SEQ ID NO: 102382
  misc_feature 1..840: note = Description of Artificial Sequence: Synthetic coding sequence
  source 1..840: mol_type = other DNA

SEQ ID NO: 102388 - DNA, 837 bp, synthetic construct
  misc_feature 1..837: note = Description of Artificial Sequence: Synthetic coding sequence
  source 1..837: mol_type = other DNA
atgatcgtggccgccgaggccgtggccgcccccagatgcgccctggtgggcgacagaagcggcgccgacgcccccagagccaagggccacagcctgagaacctgctaccccagaggcaacatcaccatgagcgaggcccccagagccgagaccttcgtgttcctggacctggaggccaccggcctgcccagcgtggagcccgagatcgccgagctgagcctgttcgccgtgcacagaagcagcctggagaaccccgagcacgacgagagcggcgccctggtgctgcccagagtgctggacaagctgaccctgtgcatgtgccccgagagacccttcaccgccaaggccagcgagatcaccggcctgagcagcgagggcctggccagatgcagaaaggccggcttcgacggcgccgtggtgagaaccctgcaggccttcctgagcagacaggccggccccatctgcctggtggcccacaacggcttcgactacgacttccccctgctgtgcgccgagctgagaagactgggcgccagactgcccagagacaccgtgtgcctggacaccctgcccgccctgagaggcctggacagagcccacagccacggcaccagagccagaggcagacagggctacagcctgggcagcctgttccacagatacttcagagccgagcccagcgccgcccacagcgccgagggcgacgtgcacaccctgctgctgatcttcctgcacagagccgccgagctgctggcctgggccgacgagcaggccagaggctgggcccacatcgagcccatgtacctgccccccgacgaccccagcctggaggcctag

SEQ ID NO: 102389 - DNA, 2172 bp, synthetic construct
  misc_feature 1..2172: note = Description of Artificial Sequence: Synthetic coding sequence
  source 1..2172: mol_type = other DNA
atgttcgaggagaaggccagcagccccagcggcaagatgggcggcgaggagaagcccatcggcgccggcgaggagaagcagaaggagggcggcaagaagaagaacaaggagggcagcggcgacggcggcagagccgagctgaacccctggcccgagtacatctacaccagactggagatgtacaacatcctgaaggccgagcacgacagcatcctggccgagaaggccgagaaggacagcaagcccatcaaggtgaccctgcccgacggcaagcaggtggacgccgagagctggaagaccaccccctaccagatcgcctgcggcatcagccagggcctggccgacaacaccgtgatcgccaaggtgaacaacgtggtgtgggacctggacagacccctggaggaggactgcaccctggagctgctgaagttcgaggacgaggaggcccaggccgtgtactggcacagcagcgcccacatcatgggcgaggccatggagagagtgtacggcggctgcctgtgctacggcccccccatcgagaacggcttctactacgacatgtacctggaggagggcggcgtgagcagcaacgacttcagcagcctggaggccctgtgcaagaagatcatcaaggagaagcaggccttcgagagactggaggtgaagaaggagaccctgctggccatgttcaagtacaacaagttcaagtgcagaatcctgaacgagaaggtgaacacccccaccaccaccgtgtacagatgcggccccctgatcgacctgtgcagaggcccccacgtgagacacaccggcaagatcaaggccctgaagatccacaagaacagcagcacctactgggagggcaaggccgacatggagaccctgcagagaatctacggcatcagcttccccgaccccaagatgctgaaggagtgggagaagttccaggaggaggccaagaacagagaccacagaaagatcggcagagaccaggagctgtacttcttccacgagctgagccccggcagctgcttcttcctgcccaagggcgcctacatctacaacgccctgatcgagttcatcagaagcgagtacagaaagagaggcttccaggaggtggtgacccccaacatcttcaacagcagactgtggatgaccagcggccactggcagcactacagcgagaacatgttcagcttcgaggtggagaaggagctgttcgccctgaagcccatgaactgccccggccactgcctgatgttcgaccacagacccagaagctggagagagctgcccctgagactggccgacttcggcgtgctgcacagaaacgagctgagcggcgccctgaccggcctgaccagagtgagaagattccagcaggacgacgcccacatcttctgcgccatggagcagatcgaggacgagatcaagggctgcctggacttcctgagaaccgtgtacagcgtgttcggcttcagcttcaagctgaacctgagcaccagacccgagaagttcctgggcgacatcgaggtgtgggaccaggccgagaagcagctggagaacagcctgaacgagttcggcgagaagtgggagctgaacagcggcgacggcgccttctacggccccaagatcgacatccagatcaaggacgccatcggcagataccaccagtgcgccaccatccagctggacttccagctgcccatcagattcaacctgacctacgtgagccacgacggcgacgacaagaagagacccgtgatcgtgcacagagccatcctgggcagcgtggagagaatgatcgccatcctgaccgagaactacggcggcaagtggcccttctggctgagccccagacaggtgatggtggtgcccgtgggccccacctgcgacgagtacgcccagaaggtgagacagcagttccacgacgccaagttcatggccgacatcgacctggaccccggctgcaccctgaacaagaagatcagaaacgcccagctggcccagtacaacttcatcctggtggtgggcgagaaggagaagatcagcggcaccgtgaacatcagaaccagagacaacaaggtgcacggcgagagaaccatcagcgagaccatcgagagactgcagcagctgaaggagttcagaagcaagcaggccgaggaggagttctag

SEQ ID NO: 102390 - DNA, 1809 bp, synthetic construct
  misc_feature 1..1809: note = Description of Artificial Sequence: Synthetic coding sequence
  source 1..1809: mol_type = other DNA
atgatccccttctggcagaagagacagaagaagatcgccagccagctgaagagcctgtgcctgatggtgaacagactgatgagaaacctgggcaagctgcaccacatcaagctgcccgtggagctggccatggagagagtgtacggcggctgcctgtgctacggcccccccatcgagaacggcttctactacgacatgtacctggaggagggcggcgtgagcagcaacgacttcagcagcctggaggccctgtgcaagaagatcatcaaggagaagcaggccttcgagagactggaggtgaagaaggagaccctgctggccatgttcaagtacaacaagttcaagtgcagaatcctgaacgagaaggtgaacacccccaccaccaccgtgtacagatgcggccccctgatcgacctgtgcagaggcccccacgtgagacacaccggcaagatcaaggccctgaagatccacaagaacagcagcacctactgggagggcaaggccgacatggagaccctgcagagaatctacggcatcagcttccccgaccccaagatgctgaaggagtgggagaagttccaggaggaggccaagaacagagaccacagaaagatcggcagagaccaggagctgtacttcttccacgagctgagccccggcagctgcttcttcctgcccaagggcgcctacatctacaacgccctgatcgagttcatcagaagcgagtacagaaagagaggcttccaggaggtggtgacccccaacatcttcaacagcagactgtggatgaccagcggccactggcagcactacagcgagaacatgttcagcttcgaggtggagaaggagctgttcgccctgaagcccatgaactgccccggccactgcctgatgttcgaccacagacccagaagctggagagagctgcccctgagactggccgacttcggcgtgctgcacagaaacgagctgagcggcgccctgaccggcctgaccagagtgagaagattccagcaggacgacgcccacatcttctgcgccatggagcagatcgaggacgagatcaagggctgcctggacttcctgagaaccgtgtacagcgtgttcggcttcagcttcaagctgaacctgagcaccagacccgagaagttcctgggcgacatcgaggtgtgggaccaggccgagaagcagctggagaacagcctgaacgagttcggcgagaagtgggagctgaacagcggcgacggcgccttctacggccccaagatcgacatccagatcaaggacgccatcggcagataccaccagtgcgccaccatccagctggacttccagctgcccatcagattcaacctgacctacgtgagccacgacggcgacgacaagaagagacccgtgatcgtgcacagagccatcctgggcagcgtggagagaatgatcgccatcctgaccgagaactacggcggcaagtggcccttctggctgagccccagacaggtgatggtggtgcccgtgggccccacctgcgacgagtacgcccagaaggtgagacagcagttccacgacgccaagttcatggccgacatcgacctggaccccggctgcaccctgaacaagaagatcagaaacgcccagctggcccagtacaacttcatcctggtggtgggcgagaaggagaagatcagcggcaccgtgaacatcagaaccagagacaacaaggtgcacggcgagagaaccatcagcgagaccatcgagagactgcagcagctgaaggagttcagaagcaagcaggccgaggaggagttctag

SEQ ID NO: 102391 - DNA, 2271 bp, synthetic construct
  misc_feature 1..2271: note = Description of Artificial Sequence: Synthetic coding sequence
  source 1..2271: mol_type = other DNA
atgttcgaggagaaggccagcagccccagcggcaagatgggcggcgaggagaagcccatcggcgccggcgaggagaagcagaaggagggcggcaagaagaagaacaaggagggcagcggcgacggcggcagagccgagctgaacccctggcccgagtacatctacaccagactggagatgtacaacatcctgaaggccgagcacgacagcatcctggccgagaaggccgagaaggacagcaagcccatcaaggtgaccctgcccgacggcaagcaggtggacgccgagagctggaagaccaccccctaccagatcgcctgcggcatcagccacaccgccagctgcaagaacctgagcagcctggccagcctgctggccagcgtggccatccccagcagcggcatgccctggccccccctgttcttcctgcagggcctggccgacaacaccgtgatcgccaaggtgaacaacgtggtgtgggacctggacagacccctggaggaggactgcaccctggagctgctgaagttcgaggacgaggaggcccaggccgtgtactggcacagcagcgcccacatcatgggcgaggccatggagagagtgtacggcggctgcctgtgctacggcccccccatcgagaacggcttctactacgacatgtacctggaggagggcggcgtgagcagcaacgacttcagcagcctggaggccctgtgcaagaagatcatcaaggagaagcaggccttcgagagactggaggtgaagaaggagaccctgctggccatgttcaagtacaacaagttcaagtgcagaatcctgaacgagaaggtgaacacccccaccaccaccgtgtacagatgcggccccctgatcgacctgtgcagaggcccccacgtgagacacaccggcaagatcaaggccctgaagatccacaagaacagcagcacctactgggagggcaaggccgacatggagaccctgcagagaatctacggcatcagcttccccgaccccaagatgctgaaggagtgggagaagttccaggaggaggccaagaacagagaccacagaaagatcggcagagaccaggagctgtacttcttccacgagctgagccccggcagctgcttcttcctgcccaagggcgcctacatctacaacgccctgatcgagttcatcagaagcgagtacagaaagagaggcttccaggaggtggtgacccccaacatcttcaacagcagactgtggatgaccagcggccactggcagcactacagcgagaacatgttcagcttcgaggtggagaaggagctgttcgccctgaagcccatgaactgccccggccactgcctgatgttcgaccacagacccagaagctggagagagctgcccctgagactggccgacttcggcgtgctgcacagaaacgagctgagcggcgccctgaccggcctgaccagagtgagaagattccagcaggacgacgcccacatcttctgcgccatggagcagatcgaggacgagatcaagggctgcctggacttcctgagaaccgtgtacagcgtgttcggcttcagcttcaagctgaacctgagcaccagacccgagaagttcctgggcgacatcgaggtgtgggaccaggccgagaagcagctggagaacagcctgaacgagttcggcgagaagtgggagctgaacagcggcgacggcgccttctacggccccaagatcgacatccagatcaaggacgccatcggcagataccaccagtgcgccaccatccagctggacttccagctgcccatcagattcaacctgacctacgtgagccacgacggcgacgacaagaagagacccgtgatcgtgcacagagccatcctgggcagcgtggagagaatgatcgccatcctgaccgagaactacggcggcaagtggcccttctggctgagccccagacaggtgatggtggtgcccgtgggccccacctgcgacgagtacgcccagaaggtgagacagcagttccacgacgccaagttcatggccgacatcgacctggaccccggctgcaccctgaacaagaagatcagaaacgcccagctggcccagtacaacttcatcctggtggtgggcgagaaggagaagatcagcggcaccgtgaacatcagaaccagagacaacaaggtgcacggcgagagaaccatcagcgagaccatcgagagactgcagcagctgaaggagttcagaagcaagcaggccgaggaggagttctag

SEQ ID NO: 102392 - DNA, 2172 bp, synthetic construct; identical to SEQ ID NO: 102389
  misc_feature 1..2172: note = Description of Artificial Sequence: Synthetic coding sequence
  source 1..2172: mol_type = other DNA

SEQ ID NO: 102393 - DNA, 390 bp, synthetic construct
  misc_feature 1..390: note = Description of Artificial Sequence: Synthetic coding sequence
  source 1..390: mol_type = other DNA
atgttcgaggagaaggccagcagccccagcggcaagatgggcggcgaggagaagcccatcggcgccggcgaggagaagcagaaggagggcggcaagaagaagaacaaggagggcagcggcgacggcggcagagccgagctgaacccctggcccgagtacatctacaccagactggagatgtacaacatcctgaaggccgagcacgacagcatcctggccgagaaggccgagaaggacagcaagcccatcaaggtgaccctgcccgacggcaagcaggtggacgccgagagctggaagaccaccccctaccagatcgcctgcggcatcagccagggcctggccgacaacaccgtgatcgccaaggtgaacaacgtggtgtgggacctgtag

SEQ ID NO: 102394 - DNA, 1860 bp, synthetic construct
  misc_feature 1..1860: note = Description of Artificial Sequence: Synthetic coding sequence
  source 1..1860: mol_type = other DNA
atggaggtggagctgagccagggcctggccgacaacaccgtgatcgccaaggtgaacaacgtggtgtgggacctggacagacccctggaggaggactgcaccctggagctgctgaagttcgaggacgaggaggcccaggccgtgtactggcacagcagcgcccacatcatgggcgaggccatggagagagtgtacggcggctgcctgtgctacggcccccccatcgagaacggcttctactacgacatgtacctggaggagggcggcgtgagcagcaacgacttcagcagcctggaggccctgtgcaagaagatcatcaaggagaagcaggccttcgagagactggaggtgaagaaggagaccctgctggccatgttcaagtacaacaagttcaagtgcagaatcctgaacgagaaggtgaacacccccaccaccaccgtgtacagatgcggccccctgatcgacctgtgcagaggcccccacgtgagacacaccggcaagatcaaggccctgaagatccacaagaacagcagcacctactgggagggcaaggccgacatggagaccctgcagagaatctacggcatcagcttccccgaccccaagatgctgaaggagtgggagaagttccaggaggaggccaagaacagagaccacagaaagatcggcagagaccaggagctgtacttcttccacgagctgagccccggcagctgcttcttcctgcccaagggcgcctacatctacaacgccctgatcgagttcatcagaagcgagtacagaaagagaggcttccaggaggtggtgacccccaacatcttcaacagcagactgtggatgaccagcggccactggcagcactacagcgagaacatgttcagcttcgaggtggagaaggagctgttcgccctgaagcccatgaactgccccggccactgcctgatgttcgaccacagacccagaagctggagagagctgcccctgagactggccgacttcggcgtgctgcacagaaacgagctgagcggcgccctgaccggcctgaccagagtgagaagattccagcaggacgacgcccacatcttctgcgccatggagcagatcgaggacgagatcaagggctgcctggacttcctgagaaccgtgtacagcgtgttcggcttcagcttcaagctgaacctgagcaccagacccgagaagttcctgggcgacatcgaggtgtgggaccaggccgagaagcagctggagaacagcctgaacgagttcggcgagaagtgggagctgaacagcggcgacggcgccttctacggccccaagatcgacatccagatcaaggacgccatcggcagataccaccagtgcgccaccatccagctggacttccagctgcccatcagattcaacctgacctacgtgagccacgacggcgacgacaagaagagacccgtgatcgtgcacagagccatcctgggcagcgtggagagaatgatcgccatcctgaccgagaactacggcggcaagtggcccttctggctgagccccagacaggtgatggtggtgcccgtgggccccacctgcgacgagtacgcccagaaggtgagacagcagttccacgacgccaagttcatggccgacatcgacctggaccccggctgcaccctgaacaagaagatcagaaacgcccagctggcccagtacaacttcatcctggtggtgggcgagaaggagaagatcagcggcaccgtgaacatcagaaccagagacaacaaggtgcacggcgagagaaccatcagcgagaccatcgagagactgcagcagctgaaggagttcagaagcaagcaggccgaggaggagttctag

SEQ ID NO: 102395 - DNA, 1332 bp, synthetic construct
  misc_feature 1..1332: note = Description of Artificial Sequence: Synthetic coding sequence
  source 1..1332: mol_type = other DNA
atggagcacaaccccctgcccaccagccccgccgaccagttcaacaccggcagatactgcagcggccccagcaccgagtacggcttctaccacgacttcttcctgggcaaggagagatgcggcaccctggtggacctgtgccagggcccccacctgagacacaccggccagatcggcggcctgaagctgctgagcgccgagtacgcccacagaggcttcagcgaggtgaagacccccaccctgttcagcaccaagctgtgggagcagagcggccactgggagcactaccaggaggacatgttcgccgtgcagccccccggcagcgacagaccccccagcagccagagcgacgacagcaccagacacatcaccgacaccctggccctgaagcccatgaactgccccgcccactgcctgatgttcgcccacagacccagaagctggagagagctgcccctgagactggccgacttcggcgccctgcacagagccgaggccagcggcggcctgggcggcctgaccagactgagatgcttccagcaggacgacgcccacatcttctgcaccaccgaccagctggaggccgagatccagagctgcctggacttcctgagaagcgtgtacgccgtgctgggcttcagcttcagactggccctgagcaccagacccagcggcttcctgggcgacccctgcctgtgggaccaggccgagcaggtgctgaagcaggccctgaaggagttcggcgagccctgggacctgaacagcggcgacggcgccttctacggccccaagatcgacgtgcacctgcacgacgccctgggcagaccccaccagtgcggcaccatccagctggacttccagctgcccctgagattcgacctgcagtacaagggccaggccggcgccctggagagacccgtgctgatccacagagccgtgctgggcagcgtggagagactgctgggcgtgctggccgagagctgcggcggcaagtggcccctgtggctgagccccttccaggtggtggtgatccccgtgggcagcgagcaggaggagtacgccaaggaggcccagcagagcctgagagccgccggcctggtgagcgacctggacgccgacagcggcctgaccctgagcagaagaatcagaagagcccagctggcccactacaacttccagttcgtggtgggccagaaggagcagagcaagagaaccgtgaacatcagaaccagagacaacagaagactgggcgagtgggacctgcccgaggccgtgcagagactggtggagctgcagaacaccagagtgcccaacgccgaggagatcttctag

SEQ ID NO: 102396 - DNA, 1332 bp, synthetic construct
  misc_feature 1..1332: note = Description of Artificial Sequence: Synthetic coding sequence
  source 1..1332: mol_type = other DNA
atggagcacaaccccctgcccaccagccccgccgaccagttcaacaccggcagatactgcagaggccccagcaccgagtacggcttctaccacgacttcttcctgggcaaggagagatgcggcaccctggtggacctgtgccagggcccccacctgagacacaccggccagatcggcggcctgaagctgctgagcgccgagtacgcccacagaggcttcagcgaggtgaagacccccaccctgttcagcaccaagctgtgggagcagagcggccactgggagcactaccaggaggacatgttcgccgtgcagccccccggcagcgacagaccccccagcagccagagcgacgacagcaccagacacatcaccgacaccctggccctgaagcccatgaactgccccgcccactgcctgatgttcgcccacagacccagaagctggagagagctgcccctgagactggccgacttcggcgccctgcacagagccgaggccagcggcggcctgggcggcctgaccagactgagatgcttccagcaggacgacgcccacatcttctgcaccaccgaccagctggaggccgagatccagagctgcctggacttcctgagaagcgtgtacgccgtgctgggcttcagcttcagactggccctgagcaccagacccagcggcttcctgggcgacccctgcctgtgggaccaggccgagcaggtgctgaagcaggccctgaaggagttcggcgagccctgggacctgaacagcggcgacggcgccttctacggccccaagatcgacgtgcacctgcacgacgccctgggcagaccccaccagtgcggcaccatccagctggacttccagctgcccctgagattcgacctgcagtacaagggccaggccggcgccctggagagacccgtgctgatccacagagccgtgctgggcagcgtggagagactgctgggcgtgctggccgagagctgcggcggcaagtggcccctgtggctgagccccttccaggtggtggtgatccccgtgggcagcgagcaggaggagtacgccaaggaggcccagcagagcctgagagccgccggcctggtgagcgacctggacgccgacagcggcctgaccctgagcagaagaatcagaagagcccagctggcccactacaacttccagttcgtggtgggccagaaggagcagagcaagagaaccgtgaacatcagaaccagagacaacagaagactgggcgagtgggacctgcccgaggccgtgcagagactggtggagctgcagaacaccagagtgcccaacgccgaggagatcttctag

SEQ ID NO: 102397 - DNA, 537 bp, synthetic construct
  misc_feature 1..537: note = Description of Artificial Sequence: Synthetic coding sequence
  source 1..537: mol_type = other DNA
atggccctgtaccagagatggagatgcctgagactgcagggcctgcaggcctgcagactgcacaccgccgtggtgagcaccccccccagatggctggccgagagactgggcctgttcgaggagctgtgggccgcccaggtgaagagactggccagcatggcccagaaggagcccagaaccatcaagatcagcctgcccggcggccagaagatcgacgccgtggcctggaacaccaccccctaccagctggccagacagatcagcagcaccctggccgacaccgccgtggccgcccaggtgaacggcgagccctacgacctggagagacccctggagaccgacagcgacctgagattcctgaccttcgacagccccgagggcaaggccgtgagcttcttcctgatcagaaacaccgtgaccaccaagcccagagacatcgaggccggcaacagcaacatcctgttcttctgcagaagcttcagcatctgcagctgggagggcgacctgccccagaccgtgctgaccatcagcggctag

SEQ ID NO: 102398 - DNA, 1767 bp, synthetic construct
  misc_feature 1..1767: note = Description of Artificial Sequence: Synthetic coding sequence
  source 1..1767: mol_type = other DNA
atggccctgtaccagagatggagatgcctgagactgcagggcctgcaggcctgcagactgcacaccgccgtggtgagcaccccccccagatggctggccgagagactgggcctgttcgaggagctgtgggccgcccaggtgaagagactggccagcatggcccagaaggagcccagaaccatcaagatcagcctgcccggcggccagaagatcgacgccgtggcctggaacaccaccccctaccagctggccagacagatcagcagcaccctggccgacaccgccgtggccgcccaggtgaacggcgagccctacgacctggagagacccctggagaccgacagcgacctgagattcctgaccttcgacagccccgagggcaaggccgtgttctggcacagcagcacccacgtgctgggcgccgccgccgagcagttcctgggcgccgtgctgtgcagaggccccagcaccgagtacggcttctaccacgacttcttcctgggcaaggagagaaccatcagaggcagcgagctgcccgtgctggagagaatctgccaggagctgaccgccgccgccagacccttcagaagactggaggccagcagagaccagctgagacagctgttcaaggccgagtacgcccacagaggcttcagcgaggtgaagacccccaccctgttcagcaccaagctgtgggagcagagcggccactgggagcactaccaggaggacatgttcgccgtgcagccccccggcagcgacagaccccccagcagccagagcgacgacagcaccagacacatcaccgacaccctggccctgaagcccatgaactgccccgcccactgcctgatgttcgcccacagacccagaagctggagagagctgcccctgagactggccgacttcggcgccctgcacagagccgaggccagcggcggcctgggcggcctgaccagactgagatgcttccagcaggacgacgcccacatcttctgcaccaccgaccagctggaggccgagatccagagctgcctggacttcctgagaagcgtgtacgccgtgctgggcttcagcttcagactggccctgagcaccagacccagcggcttcctgggcgacccctgcctgtgggaccaggccgagcaggtgctgaagcaggccctgaaggagttcggcgagccctgggacctgaacagcggcgacggcgccttctacggccccaagatcgacgtgcacctgcacgacgccctgggcagaccccaccagtgcggcaccatccagctggacttccagctgcccctgagattcgacctgcagtacaagggccaggccggcgccctggagagacccgtgctgatccacagagccgtgctgggcagcgtggagagactgctgggcgtgctggccgagagctgcggcggcaagtggcccctgtggctgagccccttccaggtggtggtgatccccgtgggcagcgagcaggaggagtacgccaaggaggcccagcagagcctgagagccgccggcctggtgagcgacctggacgccgacagcggcctgaccctgagcagaagaatcagaagagcccagctggcccactacaacttccagttcgtggtgggccagaaggagcagagcaagagaaccgtgaacatcagaaccagagacaacagaagactgggcgagtgggacctgcccgaggccgtgcagagactggtggagctgcagaacaccagagtgcccaacgccgaggagatcttctag

SEQ ID NO: 102399 - DNA, 2157 bp, synthetic construct
  misc_feature 1..2157: note = Description of Artificial Sequence: Synthetic coding sequence
  source 1..2157: mol_type = other DNA
atggccctgtaccagagatggagatgcctgagactgcagggcctgcaggcctgcagactgcacaccgccgtggtgagcaccccccccagatggctggccgagagactgggcctgttcgaggagctgtgggccgcccaggtgaagagactggccagcatggcccagaaggagcccagaaccatcaagatcagcctgcccggcggccagaagatcgacgccgtggcctggaacaccaccccctaccagctggccagacagatcagcagcaccctggccgacaccgccgtggccgcccaggtgaacggcgagccctacgacctggagagacccctggagaccgacagcgacctgagattcctgaccttcgacagccccgagggcaaggccgtgttctggcacagcagcacccacgtgctgggcgccgccgccgagcagttcctgggcgccgtgctgtgcagaggccccagcaccgagtacggcttctaccacgacttcttcctgggcaaggagagaaccatcagaggcagcgagctgcccgtgctggagagaatctgccaggagctgaccgccgccgccagacccttcagaagactggaggccagcagagaccagctgagacagctgttcaaggacaaccccttcaagctgcacctgatcgaggagaaggtgaccggccccaccgccaccgtgtacggctgcggcaccctggtggacctgtgccagggcccccacctgagacacaccggccagatcggcggcctgaagctgctgagcaacagcagcagcctgtggagaagcagcggcgcccccgagaccctgcagagagtgagcggcatcagcttccccaccaccgagctgctgagagtgtgggaggcctggagagaggaggccgagctgagagaccacagaagaatcggcaaggagcaggagctgttcttcttccacgagctgagccccggcagctgcttcttcctgcccagaggcaccagagtgtacaacgccctggtggccttcatcagagccgagtacgcccacagaggcttcagcgaggtgaagacccccaccctgttcagcaccaagctgtgggagcagagcggccactgggagcactaccaggaggacatgttcgccgtgcagccccccggcagcgacagaccccccagcagccagagcgacgacagcaccagacacatcaccgacaccctggccctgaagcccatgaactgccccgcccactgcctgatgttcgcccacagacccagaagctggagagagctgcccctgagactggccgacttcggcgccctgcacagagccgaggccagcggcggcctgggcggcctgaccagactgagatgcttccagcaggacgacgcccacatcttctgcaccaccgaccagctggaggccgagatccagagctgcctggacttcctgagaagcgtgtacgccgtgctgggcttcagcttcagactggccctgagcaccagacccagcggcttcctgggcgacccctgcctgtgggaccaggccgagcaggtgctgaagcaggccctgaaggagttcggcgagccctgggacctgaacagcggcgacggcgccttctacggccccaagatcgacgtgcacctgcacgacgccctgggcagaccccaccagtgcggcaccatccagctggacttccagctgcccctgagattcgacctgcagtacaagggccaggccggcgccctggagagacccgtgctgatccacagagccgtgctgggcagcgtggagagactgctgggcgtgctggccgagagctgcggcggcaagtggcccctgtggctgagccccttccaggtggtggtgatccccgtgggcagcgagcaggaggagtacgccaaggaggcccagcagagcctgagagccgccggcctggtgagcgacctggacgccgacagcggcctgaccctgagcagaagaatcagaagagcccagctggcccactacaacttccagttcgtggtgggccagaaggagcagagcaagagaaccgtgaacatcagaaccagagacaacagaagactgggcgagtgggacctgcccgaggccgtgcagagactggtggagctgcagaacaccagagtgcccaacgccgaggagatcttctag

SEQ ID NO: 102400 - DNA, 510 bp, synthetic construct
  misc_feature 1..510: note = Description of Artificial Sequence: Synthetic coding sequence
  source 1..510: mol_type = other DNA
atggccctgtaccagagatggagatgcctgagactgcagggcctgcaggcctgcagactgcacaccgccgtggtgagcaccccccccagatggctggccgagagactgggcctgttcgaggagctgtgggccgcccaggtgaagagactggccagcatggcccagaaggagcccagaaccatcaagatcagcctgcccggcggccagaagatcgacgccgtggcctggaacaccaccccctaccagctggccagacagatcagcagcaccctggccgacaccgccgtggccgcccaggtgaacggcgagccctacgacctggagagacccctggagaccgacagcgacctgagattcctgaccttcgacagccccgagggcaaggccgacaaccccggcctgagagccgcctgcttcggcgccgacctgcccggcacctacagctgctgcagcaccctgcccgaggccagaggcttcaccggcagcgccagccccgtggtgcagggctag

SEQ ID NO: 102401 - DNA, 4974 bp, synthetic construct
  misc_feature 1..4974: note = Description of Artificial Sequence: Synthetic coding sequence
  source 1..4974: mol_type = other DNA
atgggcctgcaggccagaagatgggccagcggcagcagaggcgccgccggccccagaagaggcgtgctgcagctgctgcccctgcccctgcccctgcccctgctgctgctgctgctgctgagacccggcgccggcagagccgccgcccagggcgaggccgaggcccccaccctgtacctgtggaagaccggcccctggggcagatgcatgggcgacgagtgcggccccggcggcatccagaccagagccgtgtggtgcgcccacgtggagggctggaccaccctgcacaccaactgcaagcaggccgagagacccaacaaccagcagaactgcttcaaggtgtgcgactggcacaaggagctgtacgactggagactgggcccctggaaccagtgccagcccgtgatcagcaagagcctggagaagcccctggagtgcatcaagggcgaggagggcatccaggtgagagagatcgcctgcatccagaaggacaaggacatccccgccgaggacatcatctgcgagtacttcgagcccaagcccctgctggagcaggcctgcctgatcccctgccagcaggactgcatcgtgagcgagttcagcgcctggagcgagtgcagcaagacctgcggcagcggcctgcagcacagaaccagacacgtggtggcccccccccagttcggcggcagcggctgccccaacctgaccgagttccaggtgtgccagagcagcccctgcgaggccgaggagctgagatacagcctgcacgtgggcccctggagcacctgcagcatgccccacagcagacaggtgagacaggccagaagaagaggcaagaacaaggagagagagaaggacagaagcaagggcgtgaaggaccccgaggccagagagctgatcaagaagaagagaaacagaaacagacagaacagacaggagaacaagtactgggacatccagatcggctaccagaccagagaggtgatgtgcatcaacaagaccggcaaggccgccgacctgagcttctgccagcaggagaagctgcccatgaccttccagagctgcgtgatcaccaaggagtgccaggtgagcgagtggagcgagtggagcccctgcagcaagacctgccacgacatggtgagccccgccggcaccagagtgagaaccagaaccatcagacagttccccatcggcagcgagaaggagtgccccgagttcgaggagaaggagccctgcctgagccagggcgacggcgtggtgccctgcgccacctacggctggagaaccaccgagtggaccgagtgcagagtggaccccctgctgagccagcaggacaagagaagaggcaaccagaccgccctgtgcggcggcggcatccagaccagagaggtgtactgcgtgcaggccaacgagaacctgctgagccagctgagcacccacaagaacaaggaggccagcaagcccatggacctgaagctgtgcaccggccccatccccaacaccacccagctgtgccacatcccctgccccaccgagtgcgaggtgagcccctggagcgcctggggcccctgcacctacgagaactgcaacgaccagcagggcaagaagggcttcaagctgagaaagagaagaatcaccaacgagcccaccggcggcagcggcgtgaccggcaactgcccccacctgctggaggccatcccctgcgaggagcccgcctgctacgactggaaggccgtgagactgggcaactgcgagcccgacaacggcaaggagtgcggccccggcacccaggtgcaggaggtggtgtgcatcaacagcgacggcgaggaggtggacagacagctgtgcagagacgccatcttccccatccccgtggcctgcgacgccccctgccccaaggactgcgtgctgagcacctggagcacctggagcagctgcagccacacctgcagcggcaagaccaccgagggcaagcagatcagagccagaagcatcctggcctacgccggcgaggagggcggcatcagatgccccaacagcagcgccctgcaggaggtgagaagctgcaacgagcacccctgcaccgtgtaccactggcagaccggcccctggggccagtgcatcgaggacaccagcgtgagcagcttcaacaccaccaccacctggaacggcgaggccagctgcagcgtgggcatgcagaccagaaaggtgatctgcgtgagagtgaacgtgggccaggtgggccccaagaagtgccccgagagcctgagacccgagaccgtgagaccctgcctgctgccctgcaagaaggactgcatcgtgaccccctacagcgactggaccagctgccccagcagctgcaaggagggcgacagcagcatcagaaagcagagcagacacagagtgatcatccagctgcccgccaacggcggcagagactgcaccgaccccctgtacgaggagaaggcctgcgaggccccccaggcctgccagagctacagatggaagacccacaagtggagaagatgccagctggtgccctggagcgtgcagcaggacagccccggcgcccaggagggctgcggccccggcagacaggccagagccatcacctgcagaaagcaggacggcggccaggccggcatccacgagtgcctgcagtacgccggccccgtgcccgccctgacccaggcctgccagatcccctgccaggacgactgccagctgaccagctggagcaagttcagcagctgcaacggcgactgcggcgccgtgagaaccagaaagagaaccctggtgggcaagagcaagaagaaggagaagtgcaagaacagccacctgtaccccctgatcgagacccagtactgcccctgcgacaagtacaacgcccagcccgtgggcaactggagcgactgcatcctgcccgagggcaaggtggaggtgctgctgggcatgaaggtgcagggcgacatcaaggagtgcggccagggctacagataccaggccatggcctgctacgaccagaacggcagactggtggagaccagcagatgcaacagccacggctacatcgaggaggcctgcatcatcccctgccccagcgactgcaagctgagcgagtggagcaactggagcagatgcagcaagagctgcggcagcggcgtgaaggtgagaagcaagtggctgagagagaagccctacaacggcggcagaccctgccccaagctggaccacgtgaaccagttccaggtgtacgaggtggtgccctgccacagcgactgcaaccagtacctgtgggtgaccgagccctggagcatctgcaaggtgaccttcgtgaacatgagagagaactgcggcgagggcgtgcagaccagaaaggtgagatgcatgcagaacaccgccgacggccccagcgagcacgtggaggactacctgtgcgaccccgaggagatgcccctgggcagcagagtgtgcaagctgccctgccccgaggactgcgtgatcagcgagtggggcccctggacccagtgcgtgctgccctgcaaccagagcagcttcagacagagaagcgccgaccccatcagacagcccgccgacgagggcagaagctgccccaacgccgtggagaaggagccctgcaacctgaacaagaactgctaccactacgactacaacgtgaccgactggagcacctgccagctgagcgagaaggccgtgtgcggcaacggcatcaagaccagaatgctggactgcgtgagaagcgacggcaagagcgtggacctgaagtactgcgaggccctgggcctggagaagaactggcagatgaacaccagctgcatggtggagtgccccgtgaactgccagctgagcgactggagcccctggagcgagtgcagccagacctgcggcctgaccggcaagatgatcagaagaagaaccgtgacccagcccttccagggcgacggcagaccctgccccagcctgatggaccagagcaagccctgccccgtgaagccctgctacagatggcagtacggccagtggagcccctgccaggtgcaggaggcccagtgcggcgagggcaccagaaccagaaacatcagctgcgtggtgagcgacggcagcgccgacgacttcagcaaggtggtggacgaggagttctgcgccgacatcgagctgatcatcgacggcaacaagaacatggtgctggaggagagctgcagccagccctgccccggcgactgctacctgaaggactggagcagctggagcctgtgccagctgacctgcgtgaacggcgaggacctgggcttcggcggcatccaggtgagaagcagacccgtgatcatccaggagctggagaaccagcacctgtgccccgagcagatgctggagaccaagagctgctacgacggccagtgctacgagtacaagtggatggccagcgcctggaagggcagcagcagaaccgtgtggtgccagagaagcgacggcatcaacgtgaccggcggctgcctggtgatgagccagcccgacgccgacagaagctgcaaccccccctgcagccagccccacagctactgcagcgagaccaagacctgccactgcgaggagggctacaccgaggtgatgagcagcaacagcaccctggagcagtgcaccctgatccccgtggtggtgctgcccaccatggaggacaagagaggcgacgtgaagaccagcagagccgtgcaccccacccagcccagcagcaaccccgccggcagaggcagaacctggttcctgcagcccttcggccccgacggcagactgaagacctgggtgtacggcgtggccgccggcgccttcgtgctgctgatcttcatcgtgagcatgatctacctggcctgcaagaagcccaagaagccccagagaagacagaacaacagactgaagcccctgaccctggcctacgacggcgacgccgacatgtag

SEQ ID NO: 102402 - DNA, 4974 bp, synthetic construct
  misc_feature 1..4974: note = Description of Artificial Sequence: Synthetic coding sequence
  source 1..4974: mol_type = other DNA
atgggcctgcaggccagaagatgggccagcggcagcagaggcgccgccggccccagaagaggcgtgctgcagctgctgcccctgcccctgcccctgcccctgctgctgctgctgctgctgagacccggcgccggcagagccgccgcccagggcgaggccgaggcccccaccctgtacctgtggaagaccggcccctggggcagatgcatgggcgacgagtgcggccccggcggcatccagaccagagccgtgtggtgcgcccacgtggagggctggaccaccctgcacaccaactgcaagcaggccgagagacccaacaaccagcagaactgcttcaaggtgtgcgactggcacaaggagctgtacgactggagactgggcccctggaaccagtgccagcccgtgatcagcaagagcctggagaagcccctggagtgcatcaagggcgaggagggcatccaggtgagagagatcgcctgcatccagaaggacaaggacatccccgccgaggacatcatctgcgagtacttcgagcccaagcccctgctggagcaggcctgcctgatcccctgccagcaggactgcatcgtgagcgagttcagcgcctggagcgagtgcagcaagacctgcggcagcggcctgcagcacagaaccagacacgtggtggcccccccccagttcggcggcagcggctgccccaacctgaccgagttccaggtgtgccagagcagcccctgcgaggccgaggagctgagatacagcctgcacgtgggcccctggagcacctgcagcatgccccacagcagacaggtgagacaggccagaagaagaggcaagaacaaggagagagagaaggacagaagcaagggcgtgaaggaccccgaggccagagagctgatcaagaagaagagaaacagaaacagacagaacagacaggagaacaagtactgggacatccagatcggctaccagaccagagaggtgatgtgcatcaacaagaccggcaaggccgccgacctgagcttctgccagcaggagaagctgcccatgaccttccagagctgcgtgatcaccaaggagtgccaggtgagcgagtggagcgagtggagcccctgcagcaagacctgccacgacatggtgagccccgccggcaccagagtgagaaccagaaccatcagacagttccccatcggcagcgagaaggagtgccccgagttcgaggagaaggagccctgcctgagccagggcgacggcgtggtgccctgcgccacctacggctggagaaccaccgagtggaccgagtgcagagtggaccccctgctgagccagcaggacaagagaagaggcaaccagaccgccctgtgcggcggcggcatccagaccagagaggtgtactgcgtgcaggccaacgagaacctgctgagccagctgagcacccacaagaacaaggaggccagcaagcccatggacctgaagctgtgcaccggccccatccccaacaccacccagctgtgccacatcccctgccccaccgagtgcgaggtgagcccctggagcgcctggggcccctgcacctacgagaactgcaacgaccagcagggcaagaagggcttcaagctgagaaagagaagaatcaccaacgagcccaccggcggcagcggcgtgaccggcaactgcccccacctgctggaggccatcccctgcgaggagcccgcctgctacgactggaaggccgtgagactgggcaactgcgagcccgacaacggcaaggagtgcggccccggcacccaggtgcaggaggtggtgtgcatcaacagcgacggcgaggaggtggacagacagctgtgcagagacgccatcttccccatccccgtggcctgcgacgccccctgccccaaggactgcgtgctgagcacctggagcacctggagcagctgcagccacacctgcagcggcaagaccaccgagggcaagcagatcagagccagaagcatcctggcctacgccggcgaggagggcggcatcagatgccccaacagcagcgccctgcaggaggtgagaagctgcaacgagcacccctgcaccgtgtaccactggcagaccggcccctggggccagtgcatcgaggacaccagcgtgagcagcttcaacaccaccaccacctggaacggcgaggccagctgcagcgtgggcatgcagaccagaaaggtgatctgcgtgagagtgaacgtgggccaggtgggccccaagaagtgccccgagagcctgagacccgagaccgtgagaccctgcctgctgccctgcaagaaggactgcatcgtgaccccctacagcgactggaccagctgccccagcagctgcaaggagggcgacagcagcatcagaaagcagagcagacacagagtgatcatccagctgcccgccaacggcggcagagactgcaccgaccccctgtacgaggagaaggcctgcgaggccccccaggcctgccagagctacagatggaagacccacaagtggagaagatgccagctggtgccctggagcgtgcagcaggacagccccggcgcccaggagggctgcggccccggcagacaggccagagccatcacctgcagaaagcaggacggcggccaggccggcatccacgagtgcctgcagtacgccggccccgtgcccgccctgacccaggcctgccagatcccctgccaggacgactgccagctgaccagctggagcaagttcagcagctgcaacggcgactgcggcgccgtgagaaccagaaagagaaccctggtgggcaagagcaagaagaaggagaagtgcaagaacagccacctgtaccccctgatcgagacccagtactgcccctgcgacaagtacaacgcccagcccgtgggcaactggagcgactgcatcctgcccgagggcaaggtggaggtgctgctgggcatgaaggtgcagggcgacatcaaggagtgcggccagggctacagataccaggccatggcctgctacgaccagaacggcagactggtggagaccagcagatgcaacagccacggctacatcgaggaggcctgcatcatcccctgccccagcgactgcaagctgagcgagtggagcaactggagcagatgcagcaagagctgcggcagcggcgtgaaggtgagaagcaagtggctgagagagaagccctacaacggcggcagaccctgccccaagctggaccacgtgaaccaggcccaggtgtacgaggtggtgccctgccacagcgactgcaaccagtacctgtgggtgaccgagccctggagcatctgcaaggtgaccttcgtgaacatgagagagaactgcggcgagggcgtgcagaccagaaaggtgagatgcatgcagaacaccgccgacggccccagcgagcacgtggaggactacctgtgcgaccccgaggagatgcccctgggcagcagagtgtgcaagctgccctgccccgaggactgcgtgatcagcgagtggggcccctggacccagtgcgtgctgccctgcaaccagagcagcttcagacagagaagcgccgaccccatcagacagcccgccgacgagggcagaagctgccccaacgccgtggagaaggagccctgcaacctgaacaagaactgctaccactacgactacaacgtgaccgactggagcacctgccagctgagcgagaaggccgtgtgcggcaacggcatcaagaccagaatgctggactgcgtgagaagcgacggcaagagcgtggacctgaagtactgcgaggccctgggcctggagaagaactggcagatgaacaccagctgcatggtggagtgccccgtgaactgccagctgagcgactggagcccctggagcgagtgcagccagacctgcggcctgaccggcaagatgatcagaagaagaaccgtgacccagcccttccagggcgacggcagaccctgccccagcctgatggaccagagcaagccctgccccgtgaagccctgctacagatggcagtacggccagtggagcccctgccaggtgcaggaggcccagtgcggcgagggcaccagaaccagaaacatcagctgcgtggtgagcgacggcagcgccgacgacttcagcaaggtggtggacgaggagttctgcgccgacatcgagctgatcatcgacggcaacaagaacatggtgctggaggagagctgcagccagccctgccccggcgactgctacctgaaggactggagcagctggagcctgtgccagctgacctgcgtgaacggcgaggacctgggcttcggcggcatccaggtgagaagcagacccgtgatcatccaggagctggagaaccagcacctgtgccccgagcagatgctggagaccaagagctgctacgacggccagtgctacgagtacaagtggatggccagcgcctggaagggcagcagcagaaccgtgtggtgccagagaagcgacggcatcaacgtgaccggcggctgcctggtgatgagccagcccgacgccgacagaagctgcaaccccccctgcagccagccccacagctactgcagcgagaccaagacctgccactgcgaggagggctacaccgaggtgatgagcagcaacagcaccctggagcagtgcaccctgatccccgtggtggtgctgcccaccatggaggacaagagaggcgacgtgaagaccagcagagccgtgcaccccacccagcccagcagcaaccccgccggcagaggcagaacctggttcctgcagcccttcggccccgacggcagactgaagacctgggtgtacggcgtggccgccggcgccttcgtgctgctgatcttcatcgtgagcatgatctacctggcctgcaagaagcccaagaagccccagagaagacagaacaacagactgaagcccctgaccctggcctacgacggcgacgccgacatgtag

SEQ ID NO: 102403 - DNA, 2010 bp, synthetic construct
  misc_feature 1..2010: note = Description of Artificial Sequence: Synthetic coding sequence
  source 1..2010: mol_type = other DNA
atgagcgccctgctgagcctgtgcttcgtgctgcccctggccgcccccggccacggcacccagggctgggagccctgcaccgacctgagacccctggacatcctggccgaggtggtgcccagcgacggcgccaccagcggcatcagaatcgtgcaggtgcacggcgccagaggcctgcagctgagcgtggccgcccccagaaccatgagcttccccgccagcagaatcttcagccagtgcgacctgttccccgaggagttcagcatcgtggtgaccctgagagtgcccaacctgccccccaagagaaacgagtacctgctgaccgtggtggccgaggagagcgacctgctgctgctgggcctgagactgagccccgcccagctgcacttcctgttcctgagagaggacaccgccggcgcctggcagaccagagtgagcttcagaagccccgccctggtggacggcagatggcacaccctggtgctggccgtgagcgccggcgtgttcagcctgaccaccgactgcggcctgcccgtggacatcatggccgacgtgcccttccccgccaccctgagcgtgaagggcgccagattcttcgtgggcagcagaagaagagccaagggcctgttcatgggcctggtgagacagctggtgctgctgcccggcagcgacgccacccccagactgtgccccagcagaaacgcccccctggccgtgctgagcatccccagagtgctgcaggccctgaccggcaagcccgaggacaacgaggtgctgaagtacccctacgagaccaacatcagagtgaccctgggcccccagcccccctgcaccgaggtggaggacgcccagttctggttcgacgccagcagaaagggcctgtacctgtgcgtgggcaacgagtgggtgagcgtgctggccgccaaggagagactggactacgtggaggagcaccagaacctgagcaccaacagcgagaccctgggcatcgaggtgttcagaatcccccaggtgggcctgttcgtggccaccgccaacagaaaggccaccagcgccgtgtacaagtggaccgaggagaagttcgtgagctaccagaacatccccacccaccaggcccaggcctggagacacttcaccatcggcaagaagatcttcctggccgtggccaacttcgagcccgacgagaagggccaggagttcagcgtgatctacaagtggagccacagaaagctgaagttcaccccctaccagagcatcgccacccacagcgccagagactgggaggccttcgaggtggacggcgagcacttcctggccgtggccaaccacagagagggcgacaaccacaacatcgacagcgtgatctacaagtggaaccccgccaccagactgttcgaggccaaccagaccatcgccaccagcggcgcctacgactgggagttcttcagcgtgggcccctacagcttcctggtggtggccaacaccttcaacggcaccagcaccaaggtgcacagccacctgtacatcagactgctgggcagcttccagctgttccagagcttccccaccttcggcgccgccgactgggaggtgttccagatcggcgagagaatcttcctggccgtggccaacagccacagctacgacgtggagatgcaggtgcagaacgacagctacgtgatcaacagcgtgatctacgagctgaacgtgaccgcccaggccttcgtgaagttccaggacatcctgacctgcagcgccctggactgggagttcttcagcgtgggcgaggactacttcctggtggtggccaacagcttcgacggcagaaccttcagcgtgaacagcatcatctacagatggcagggctacgagggcttcgtggccgtgcacagcctgcccaccgtgggctgcagagactgggaggccttcagcaccaccgccggcgcctacctgatctacagcagcgccaaggagcccctgagcagagtgctgagactgagaaccagatag

SEQ ID NO: 102404 - DNA, 1800 bp, synthetic construct
  misc_feature 1..1800: note = Description of Artificial Sequence: Synthetic coding sequence
  source 1..1800: mol_type = other DNA
atgagcgccctgctgagcctgtgcttcgtgctgcccctggccgcccccggccacggcacccagggctgggagccctgcaccgacctgagacccctggacatcctggccgaggtggtgcccagcgacggcgccaccagcggcatcagaatcgtgcaggtgcacggcgccagaggcctgcagctgagcgtggccgcccccagaaccatgagcttccccgccagcagaatcttcagccagtgcgacctgttccccgaggagttcagcatcgtggtgaccctgagagtgcccaacctgccccccaagagaaacgagtacctgctgaccgtggtggccgaggagagcgacctgctgctgctgggcctgagactgagccccgcccagctgcacttcctgttcctgagagaggacaccgccggcgcctggcagaccagagtgagcttcagaagccccgccctggtggacggcagatggcacaccctggtgctggccgtgagcgccggcgtgttcagcctgaccaccgactgcggcctgcccgtggacatcatggccgacgtgcccttccccgccaccctgagcgtgaagggcgccagattcttcgtgggcagcagaagaagagccaagggcctgttcatgggcctggtgagacagctggtgctgctgcccggcagcgacgccacccccagactgtgccccagcagaaacgcccccctggccgtgctgagcatccccagagtgctgcaggccctgaccggcaagcccgaggacaacgaggtgctgaagtacccctacgagaccaacatcagagtgaccctgggcccccagcccccctgcaccgaggtggaggacgcccagttctggttcgacgccagcagaaagggcctgtacctgtgcgtgggcaacgagtgggtgagcgtgctggccgaggccaaggagagactggactacgtggaggagcaccagaacctgagcaccaacagcgagaccctgggcatcgaggtgttcagaatcccccaggtgggcctgttcgtggccaccgccaacagaaaggccaccagcgccgtgtacaagtggaccgaggagaagttcgtgagctaccagaacatccccacccaccaggcccaggcctggagacacttcaccatcggcaagaagatcttcctggccgtggccaacttcgagcccgacgagaagggccaggagttcagcgtgatctacaagtggagccacagaaagctgaagttcaccccctaccagagcatcgccacccacagcgccagagactgggaggccttcgaggtggacggcgagcacttcctggccgtggccaaccacagagagggcgacaaccacaacatcgacagcgtgatctacaagtggaaccccgccaccagactgttcgaggccaaccagaccatcgccaccagcggcgcctacgactgggagttcttcagcgtgggcccctacagcttcctggtggtggccaacaccttcaacggcaccagcaccaaggtgcacagccacctgtacatcagactgctgggcagcttccagctgttccagagcttccccaccttcggcgccgccgactgggaggtgttccagatcggcgagagaatcttcctggccgtggccaacagccacagctacgacgtggagatgcaggtgcagaacgacagctacgtgatcaacagcgtgatctacgagctgaacgtgaccgcccaggccttcgtgaagttccaggacatcctgacctgcagcggcggcagaagaggcctgcacgccagaagagccgagggctag

SEQ ID NO: 102405 - DNA, 1569 bp, synthetic construct
  misc_feature 1..1569: note = Description of Artificial Sequence: Synthetic coding sequence
  source 1..1569: mol_type = other DNA
atgagcgccctgctgagcctgtgcttcgtgctgcccctggccgcccccggccacggcacccagggctgggagccctgcaccgacctgagacccctggacatcctggccgaggtggtgcccagcgacggcgccaccagcggcatcagaatcgtgcaggtgcacggcgccagaggcctgcagctgagcgtggccgcccccagaaccatgagcttccccgccagcagaatcttcagccagtgcgacctgttccccgaggagttcagcatcgtggtgaccctgagagtgcccaacctgccccccaagagaaacgagtacctgctgaccgtggtggccgaggagagcgacctgctgctgctgggcctgagactgagccccgcccagcccccctgcaccgaggtggaggacgcccagttctggttcgacgccagcagaaagggcctgtacctgtgcgtgggcaacgagtgggtgagcgtgctggccgccaaggagagactggactacgtggaggagcaccagaacctgagcaccaacagcgagaccctgggcatcgaggtgttcagaatcccccaggtgggcctgttcgtggccaccgccaacagaaaggccaccagcgccgtgtacaagtggaccgaggagaagttcgtgagctaccagaacatccccacccaccaggcccaggcctggagacacttcaccatcggcaagaagatcttcctggccgtggccaacttcgagcccgacgagaagggccaggagttcagcgtgatctacaagtggagccacagaaagctgaagttcaccccctaccagagcatcgccacccacagcgccagagactgggaggccttcgaggtggacggcgagcacttcctggccgtggccaaccacagagagggcgacaaccacaacatcgacagcgtgatctacaagtggaaccccgccaccagactgttcgaggccaaccagaccatcgccaccagcggcgcctacgactgggagttcttcagcgtgggcccctacagcttcctggtggtggccaacaccttcaacggcaccagcaccaaggtgcacagccacctgtacatcagactgctgggcagcttccagctgttccagagcttccccaccttcggcgccgccgactgggaggtgttccagatcggcgagagaatcttcctggccgtggccaacagccacagctacgacgtggagatgcaggtgcagaacgacagctacgtgatcaacagcgtgatctacgagctgaacgtgaccgcccaggccttcgtgaagttccaggacatcctgacctgcagcgccctggactgggagttcttcagcgtgggcgaggactacttcctggtggtggccaacagcttcgacggcagaaccttcagcgtgaacagcatcatctacagatggcagggctacgagggcttcgtggccgtgcacagcctgcccaccgtgggctgcagagactgggaggccttcagcaccaccgccggcgcctacctgatctacagcagcgccaaggagcccctgagcagagtgctgagactgagaaccagatag

SEQ ID NO: 102406 - DNA, 1605 bp, synthetic construct
  misc_feature 1..1605: note = Description of Artificial Sequence: Synthetic coding sequence
  source 1..1605: mol_type = other DNA
atgatggaggccctgggcttcctgaagctggaggtgaacggccccatggtgaccgtggccctgagcgtggccctgctggccctgctgaagtggtacagcaccagcgccttcagcagactggagaagctgggcctgagacaccccaagcccagccccttcatcggcaacctgaccttcttcagacagggcttctgggagagccagatggagctgagaaagctgtacggccccctgtgcggctactacctgggcagaagaatgttcatcgtgatcagcgagcccgacatgatcaagcaggtgctggtggagaacttcagcaacttcaccaacagaatggccagcggcctggagttcaagagcgtggccgacagcgtgctgttcctgagagacaagagatgggaggaggtgagaggcgccctgatgagcgccttcagccccgagaagctgaacgagatggtgcccctgatcagccaggcctgcgagctgctgctggcccacctgaagagatacgccgagagcggcgacgccttcgacatccagagatgctactgcaactacaccaccgacgtggtggccagcgtggccttcggcacccccgtggacagctggcaggcccccgaggaccccttcgtgaagcactgcaagagattcttcgagttctgcatccccagacccatcctggtgctgctgctgagcttccccagcatcatggtgcccctggccagaatcctgcccaacaagaacagagacgagctgaacggcttcttcaacaagctgatcagaaacgtgatcgccctgagagaccagcaggccgccgaggagagaagaagagacttcctgcagatggtgctggacgccagacacagcgccagccccatgggcgtgcaggacttcgacatcgtgagagacgtgttcagcagcaccggctgcaagcccaaccccagcagacagcaccagcccagccccatggccagacccctgaccgtggacgagatcgtgggccaggccttcatcttcctgatcgccggctacgagatcatcaccaacaccctgagcttcgccacctacctgctggccaccaaccccgactgccaggagaagctgctgagagaggtggacgtgttcaaggagaagcacatggcccccgagttctgcagcctggaggagggcctgccctacctggacatggtgatcgccgagaccctgagaatgtacccccccgccttcagattcaccagagaggccgcccaggactgcgaggtgctgggccagagaatccccgccggcgccgtgctggagatggccgtgggcgccctgcaccacgaccccgagcactggcccagccccgagaccttcaaccccgagagattcaccgccgaggccagacagcagcacagacccttcacctacctgcccttcggcgccggccccagaagctgcctgggcgtgagactgggcctgctggaggtgaagctgaccctgctgcacgtgctgcacaagttcagattccaggcctgccccgagacccaggtgcccctgcagctggagagcaagagcgccctgggccccaagaacggcgtgtacatcaagatcgtgagcagatag

SEQ ID NO: 102407 - DNA, 1602 bp, synthetic construct
  misc_feature 1..1602: note = Description of Artificial Sequence: Synthetic coding sequence
  source 1..1602: mol_type = other DNA
atggaggccctgggcttcctgaagctggaggtgaacggccccatggtgaccgtggccctgagcgtggccctgctggccctgctgaagtggtacagcaccagcgccttcagcagactggagaagctgggcctgagacaccccaagcccagccccttcatcggcaacctgaccttcttcagacagggcttctgggagagccagatggagctgagaaagctgtacggccccctgtgcggctactacctgggcagaagaatgttcatcgtgatcagcgagcccgacatgatcaagcaggtgctggtggagaacttcagcaacttcaccaacagaatggccagcggcctggagttcaagagcgtggccgacagcgtgctgttcctgagagacaagagatgggaggaggtgagaggcgccctgatgagcgccttcagccccgagaagctgaacgagatggtgcccctgatcagccaggcctgcgagctgctgctggcccacctgaagagatacgccgagagcggcgacgccttcgacatccagagatgctactgcaactacaccaccgacgtggtggccagcgtggccttcggcacccccgtggacagctggcaggcccccgaggaccccttcgtgaagcactgcaagagattcttcgagttctgcatccccagacccatcctggtgctgctgctgagcttccccagcatcatggtgcccctggccagaatcctgcccaacaagaacagagacgagctgaacggcttcttcaacaagctgatcagaaacgtgatcgccctgagagaccagcaggccgccgaggagagaagaagagacttcctgcagatggtgctggacgccagacacagcgccagccccatgggcgtgcaggacttcgacatcgtgagagacgtgttcagcagcaccggctgcaagcccaaccccagcagacagcaccagcccagccccatggccagacccctgaccgtggacgagatcgtgggccaggccttcatcttcctgatcgccggctacgagatcatcaccaacaccctgagcttcgccacctacctgctggccaccaaccccgactgccaggagaagctgctgagagaggtggacgtgttcaaggagaagcacatggcccccgagttctgcagcctggaggagggcctgccctacctggacatggtgatcgccgagaccctgagaatgtacccccccgccttcagattcaccagagaggccgcccaggactgcgaggtgctgggccagagaatccccgccggcgccgtgctggagatggccgtgggcgccctgcaccacgaccccgagcactggcccagccccgagaccttcaaccccgagagattcaccgccgaggccagacagcagcacagacccttcacctacctgcccttcggcgccggccccagaagctgcctgggcgtgagactgggcctgctggaggtgaagctgaccctgctgcacgtgctgcacaagttcagattccaggcctgccccgagacccaggtgcccctgcagctggagagcaagagcgccctgggccccaagaacggcgtgtacatcaagatcgtgagcagatag

SEQ ID NO: 102408 - DNA, 1380 bp, synthetic construct
  misc_feature 1..1380: note = Description of Artificial Sequence: Synthetic coding sequence
  source 1..1380: mol_type = other DNA
atggaggccctgggcttcctgaagctggaggtgaacggccccatggtgaccgtggccctgagcgtggccctgctggccctgctgaagtggtacagcaccagcgccttcagcagactggagaagctgggcctgagacaccccaagcccagccccttcatcggcaacctgaccttcttcagacagggcttctgggagagccagatggagctgagaaagctgtacggccccctgtgcggctactacctgggcagaagaatgttcatcgtgatcagcgagcccgacatgatcaagcaggtgctggtggagaacttcagcaacttcaccaacagaatggccagcggcctggagttcaagagcgtggccgacagcgtgctgttcctgagagacaagagatgggaggaggtgagaggcgccctgatgagcgccttcagccccgagaagctgaacgagatggtgcccctgatcagccaggcctgcgagctgctgctggcccacctgaagagatacgccgagagcggcgacgccttcgacatccagagatgctactgcaactacaccaccgacgtggtggccagcgtggccttcggcacccccgtggacagctggcaggcccccgaggaccccttcgtgaagcactgcaagagattcttcgagttctgcatccccagacccatcctggtgctgctgctgagcttccccagcatcatggtgcccctggccagaatcctgcccaacaagaacagagacgagctgaacggcttcttcaacaagctgatcagaaacgtgatcgccctgagagaccagcaggccgccgaggagagaagaagagacttcctgcagatggtgctggacgccagacacagcgccagccccatgggcgtgcaggacttcgacatcgtgagagacgtgttcagcagcaccggctgcaagcccaaccccagcagacagcaccagcccagccccatggccagacccctgaccgtggacgagatcgtgggccaggccttcatcttcctgatcgccggctacgagatcatcaccaacaccctgagcttcgccacctacctgctggccaccaaccccgactgccaggagaagctgctgagagaggtggacgtgttcaaggagaagcacatggcccccgagttctgcagcctggaggagggcctgccctacctggacatggtgatcgccgagaccctgagaatgtacccccccgccttcagattcaccagagaggccgcccaggactgcgaggtgctgggccagagaatccccgccggcgccgtgctggagatggccgtgggcgccctgcaccacgaccccgagcactggcccagccccgagaccttcaaccccgagagatacagatgcagctag

SEQ ID NO: 102409 - DNA, 1383 bp, synthetic construct
  misc_feature 1..1383: note = Description of Artificial Sequence: Synthetic coding sequence
  source 1..1383: mol_type = other DNA
atgatggaggccctgggcttcctgaagctggaggtgaacggccccatggtgaccgtggccctgagcgtggccctgctggccctgctgaagtggtacagcaccagcgccttcagcagactggagaagctgggcctgagacaccccaagcccagccccttcatcggcaacctgaccttcttcagacagggcttctgggagagccagatggagctgagaaagctgtacggccccctgtgcggctactacctgggcagaagaatgttcatcgtgatcagcgagcccgacatgatcaagcaggtgctggtggagaacttcagcaacttcaccaacagaatggccagcggcctggagttcaagagcgtggccgacagcgtgctgttcctgagagacaagagatgggaggaggtgagaggcgccctgatgagcgccttcagccccgagaagctgaacgagatggtgcccctgatcagccaggcctgcgagctgctgctggcccacctgaagagatacgccgagagcggcgacgccttcgacatccagagatgctactgcaactacaccaccgacgtggtggccagcgtggccttcggcacccccgtggacagctggcaggcccccgaggaccccttcgtgaagcactgcaagagattcttcgagttctgcatccccagacccatcctggtgctgctgctgagcttccccagcatcatggtgcccctggccagaatcctgcccaacaagaacagagacgagctgaacggcttcttcaacaagctgatcagaaacgtgatcgccctgagagaccagcaggccgccgaggagagaagaagagacttcctgcagatggtgctggacgccagacacagcgccagccccatgggcgtgcaggacttcgacatcgtgagagacgtgttcagcagcaccggctgcaagcccaaccccagcagacagcaccagcccagccccatggccagacccctgaccgtggacgagatcgtgggccaggccttcatcttcctgatcgccggctacgagatcatcaccaacaccctgagcttcgccacctacctgctggccaccaaccccgactgccaggagaagctgctgagagaggtggacgtgttcaaggagaagcacatggcccccgagttctgcagcctggaggagggcctgccctacctggacatggtgatcgccgagaccctgagaatgtacccccccgccttcagattcaccagagaggccgcccaggactgcgaggtgctgggccagagaatccccgccggcgccgtgctggagatggccgtgggcgccctgcaccacgaccccgagcactggcccagccccgagaccttcaaccccgagagatacagatgcagctag

SEQ ID NO: 102410 - DNA, 1743 bp, synthetic construct
  misc_feature 1..1743: note = Description of Artificial Sequence: Synthetic coding sequence
  source 1..1743: mol_type = other DNA
atgatggaggccctgggcttcctgaagctggaggtgaacggccccatggtgaccgtggccctgagcgtggccctgctggccctgctgaagtggtacagcaccagcgccttcagcagactggagaagctgggcctgagacaccccaagcccagccccttcatcggcaacctgaccttcttcagacagggcttctgggagagccagatggagctgagaaagctgtacggccccctgtgcggctactacctgggcagaagaatgttcatcgtgatcagcgagcccgacatgatcaagcaggtgctggtggagaacttcagcaacttcaccaacagaatggccagcggcctggagttcaagagcgtggccgacagcgtgctgttcctgagagacaagagatgggaggaggtgagaggcgccctgatgagcgccttcagccccgagaagctgaacgagctgggcctgctgatcatgcaggagagaatcaagggccacatgggcggccagcaggccccccagagaatcccccccaccagactgagcaagcccagcggcatctacgtgaacctgcactacgccaccctgcccttctgcatggtgcccctgatcagccaggcctgcgagctgctgctggcccacctgaagagatacgccgagagcggcgacgccttcgacatccagagatgctactgcaactacaccaccgacgtggtggccagcgtggccttcggcacccccgtggacagctggcaggcccccgaggaccccttcgtgaagcactgcaagagattcttcgagttctgcatccccagacccatcctggtgctgctgctgagcttccccagcatcatggtgcccctggccagaatcctgcccaacaagaacagagacgagctgaacggcttcttcaacaagctgatcagaaacgtgatcgccctgagagaccagcaggccgccgaggagagaagaagagacttcctgcagatggtgctggacgccagacacagcgccagccccatgggcgtgcaggacttcgacatcgtgagagacgtgttcagcagcaccggctgcaagcccaaccccagcagacagcaccagcccagccccatggccagacccctgaccgtggacgagatcgtgggccaggccttcatcttcctgatcgccggctacgagatcatcaccaacaccctgagcttcgccacctacctgctggccaccaaccccgactgccaggagaagctgctgagagaggtggacgtgttcaaggagaagcacatggcccccgagttctgcagcctggaggagggcctgccctacctggacatggtgatcgccgagaccctgagaatgtacccccccgccttcagattcaccagagaggccgcccaggactgcgaggtgctgggccagagaatccccgccggcgccgtgctggagatggccgtgggcgccctgcaccacgaccccgagcactggcccagccccgagaccttcaaccccgagagattcaccgccgaggccagacagcagcacagacccttcacctacctgcccttcggcgccggccccagaagctgcctgggcgtgagactgggcctgctggaggtgaagctgaccctgctgcacgtgctgcacaagttcagattccaggcctgccccgagacccaggtgcccctgcagctggagagcaagagcgccctgggccccaagaacggcgtgtacatcaagatcgtgagcagatag

SEQ ID NO: 102411 - DNA, 1605 bp, synthetic construct; identical to SEQ ID NO: 102406
  misc_feature 1..1605: note = Description of Artificial Sequence: Synthetic coding sequence
  source 1..1605: mol_type = other DNA

SEQ ID NO: 102412 - DNA, 453 bp, synthetic construct
  misc_feature 1..453: note = Description of Artificial Sequence: Synthetic coding sequence
  source 1..453: mol_type = other DNA
atggaggccctgggcttcctgaagctggaggtgaacggccccatggtgaccgtggccctgagcgtggccctgctggccctgctgaagtggtacagcaccagcgccttcagcagactggagaagctgggcctgagacaccccaagcccagccccttcatcggcaacctgaccttcttcagacagggcttctgggagagccagatggagctgagaaagctgtacggccccctgtgcggctactacctgggcagaagaatgttcatcgtgatcagcgagcccgacatgatcaagcaggtgctggtggagaacttcagcaacttcaccaacagaatggccagcggcctggagttcaagagcgtggccgacagcgtgctgttcctgagagacaagagatgggaggaggtgagaggcgccctgatgagcgccttcagccccgagaagctgaacgagtag

SEQ ID NO: 102413 - DNA, 1602 bp, synthetic construct; identical to SEQ ID NO: 102407
  misc_feature 1..1602: note = Description of Artificial Sequence: Synthetic coding sequence
  source 1..1602: mol_type = other DNA

SEQ ID NO: 102414 - DNA, 459 bp, synthetic construct
  misc_feature 1..459: note = Description of Artificial Sequence: Synthetic coding sequence
  source 1..459: mol_type = other DNA
atgatggaggccctgggcttcctgaagctggaggtgaacggccccatggtgaccgtggccctgagcgtggccctgctggccctgctgaagtggtacagcaccagcgccttcagcagactggagaagctgggcctgagacaccccaagcccagccccttcatcggcaacctgaccttcttcagacagggcttctgggagagccagatggagctgagaaagctgtacggccccctgtgcggctactacctgggcagaagaatgttcatcgtgatcagcgagcccgacatgatcaagcaggtgctggtggagaacttcagcaacttcaccaacagaatgccccagagcatcatgcccaacagcagacaccacgtggccagcagaggcatgtggcccggcggcagaagactggcctgctacctgcaccccttcagaatggccgagggcatcgccgaggtgtag

SEQ ID NO: 102415 - DNA, 1401 bp, synthetic construct
  misc_feature 1..1401: note = Description of Artificial Sequence: Synthetic coding sequence
  source 1..1401: mol_type = other DNA
atggagctgagaaagctgtacggccccctgtgcggctactacctgggcagaagaatgttcatcgtgatcagcgagcccgacatgatcaagcaggtgctggtggagaacttcagcaacttcaccaacagaatggccagcggcctggagttcaagagcgtggccgacagcgtgctgttcctgagagacaagagatgggaggaggtgagaggcgccctgatgagcgccttcagccccgagaagctgaacgagatggtgcccctgatcagccaggcctgcgagctgctgctggcccacctgaagagatacgccgagagcggcgacgccttcgacatccagagatgctactgcaactacaccaccgacgtggtggccagcgtggccttcggcacccccgtggacagctggcaggcccccgaggaccccttcgtgaagcactgcaagagattcttcgagttctgcatccccagacccatcctggtgctgctgctgagcttccccagcatcatggtgcccctggccagaatcctgcccaacaagaacagagacgagctgaacggcttcttcaacaagctgatcagaaacgtgatcgccctgagagaccagcaggccgccgaggagagaagaagagacttcctgcagatggtgctggacgccagacacagcgccagccccatgggcgtgcaggacttcgacatcgtgagagacgtgttcagcagcaccggctgcaagcccaaccccagcagacagcaccagcccagccccatggccagacccctgaccgtggacgagatcgtgggccaggccttcatcttcctgatcgccggctacgagatcatcaccaacaccctgagcttcgccacctacctgctggccaccaaccccgactgccaggagaagctgctgagagaggtggacgtgttcaaggagaagcacatggcccccgagttctgcagcctggaggagggcctgccctacctggacatggtgatcgccgagaccctgagaatgtacccccccgccttcagattcaccagagaggccgcccaggactgcgaggtgctgggccagagaatccccgccggcgccgtgctggagatggccgtgggcgccctgcaccacgaccccgagcactggcccagccccgagaccttcaaccccgagagattcaccgccgaggccagacagcagcacagacccttcacctacctgcccttcggcgccggccccagaagctgcctgggcgtgagactgggcctgctggaggtgaagctgaccctgctgcacgtgctgcacaagttcagattccaggcctgccccgagacccaggtgcccctgcagctggagagcaagagcgccctgggccccaagaacggcgtgtacatcaagatcgtgagcagatag

SEQ ID NO: 102416 - DNA, 1032 bp, synthetic construct
  misc_feature 1..1032: note = Description of Artificial Sequence: Synthetic coding sequence
  source 1..1032: mol_type = other DNA
atgtggcccaacggcagcagcctgggcccctgcttcagacccaccaacatcaccctggaggagagaagactgatcgccagcccctggttcgccgccagcttctgcgtggtgggcctggccagcaacctgctggccctgagcgtgctggccggcgccagacagggcggcagccacaccagaagcagcttcctgaccttcctgtgcggcctggtgctgaccgacttcctgggcctgctggtgaccggcaccatcgtggtgagccagcacgccgccctgttcgagtggcacgccgtggaccccggctgcagactgtgcagattcatgggcgtggtgatgatcttcttcggcctgagccccctgctgctgggcgccgccatggccagcgagagatacctgggcatcaccagacccttcagcagacccgccgtggccagccagagaagagcctgggccaccgtgggcctggtgtgggccgccgccctggccctgggcctgctgcccctgctgggcgtgggcagatacaccgtgcagtaccccggcagctggtgcttcctgaccctgggcgccgagagcggcgacgtggccttcggcctgctgttcagcatgctgggcggcctgagcgtgggcctgagcttcctgctgaacaccgtgagcgtggccaccctgtgccacgtgtaccacggccaggaggccgcccagcagagacccagagacagcgaggtggagatgatggcccagctgctgggcatcatggtggtggccagcgtgtgctggctgcccctgctggtgttcatcgcccagaccgtgctgagaaacccccccgccatgagccccgccggccagctgagcagaaccaccgagaaggagctgctgatctacctgagagtggccacctggaaccagatcctggacccctgggtgtacatcctgttcagaagagccgtgctgagaagactgcagcccagactgagcaccagacccagaagcctgagcctgcagccccagctgacccagagaagcggcctgcagtag

SEQ ID NO: 102417 - DNA, 1224 bp, synthetic construct
  misc_feature 1..1224: note = Description of Artificial Sequence: Synthetic coding sequence
  source 1..1224: mol_type = other DNA
atgtggcccaacggcagcagcctgggcccctgcttcagacccaccaacatcaccctggaggagagaagactgatcgccagcccctggttcgccgccagcttctgcgtggtgggcctggccagcaacctgctggccctgagcgtgctggccggcgccagacagggcggcagccacaccagaagcagcttcctgaccttcctgtgcggcctggtgctgaccgacttcctgggcctgctggtgaccggcaccatcgtggtgagccagcacgccgccctgttcgagtggcacgccgtggaccccggctgcagactgtgcagattcatgggcgtggtgatgatcttcttcggcctgagccccctgctgctgggcgccgccatggccagcgagagatacctgggcatcaccagacccttcagcagacccgccgtggccagccagagaagagcctgggccaccgtgggcctggtgtgggccgccgccctggccctgggcctgctgcccctgctgggcgtgggcagatacaccgtgcagtaccccggcagctggtgcttcctgaccctgggcgccgagagcggcgacgtggccttcggcctgctgttcagcatgctgggcggcctgagcgtgggcctgagcttcctgctgaacaccgtgagcgtggccaccctgtgccacgtgtaccacggccaggaggccgcccagcagagacccagagacagcgaggtggagatgatggcccagctgctgggcatcatggtggtggccagcgtgtgctggctgcccctgctggtgttcatcgcccagaccgtgctgagaaacccccccgccatgagccccgccggccagctgagcagaaccaccgagaaggagctgctgatctacctgagagtggccacctggaaccagatcctggacccctgggtgtacatcctgttcagaagagccgtgctgagaagactgcagcccagactgagcaccagacccagaagaagcctgaccctgtggcccagcctggagtacagcggcaccatcagcgcccactgcaacctgagactgcccggcagcagcgacagcagagccagcgccagcagagccgccggcatcaccggcgtgagccactgcgccagaccctgcatgctgttcgaccccgagttcgacctgctggccggcgtgcagctgctgcccttcgagccccccaccggcaaggccctgagcagaaaggactag

SEQ ID NO: 102418 - DNA, 1422 bp, synthetic construct
  misc_feature 1..1422: note = Description of Artificial Sequence: Synthetic coding sequence
  source 1..1422: mol_type = other DNA
atgagagaggtgagagccagactggccgccacccaggtggagtacatcagcggcaaggtgttcttcaccacctgcagcgacctgaacatgctgaagaagctgaagagcgccgagagactgttcctgctgatcaagaagcagttccccctgatcatcagcagcgtgagcaagggcaagatcttcaacgagatgcagagactgatcaacgaggaccccggcagctggctgaacgccatcagcatctggaagaacctgctggagctggacgccaagaaggagaagctgagccagagagacgacaaccagctgaagagaaaggtgggcgagaacgagatcatcgccaagaagctgaagatcgagcagatgcagaagatcgaggagaacagagactgccagctggagaagcagatcaaggaggagaccctggagcagagagacttcaccaccaagagcgagaagttccaggaggaggagttccagaacgacatcgagaaggccatcgacacccacaaccagaacgacctgaccttcagagtgagctgcagatgcagcggcaccatcggcaaggccttcaccgcccaggaggtgggcaaggtgatcggcatcgccatcatgaagcacttcggctggaaggccgacctgagaaacccccagctggagatcttcatccacctgaacgacatctacagcgtggtgggcatccccgtgttcagagtgagcctggccagcagagcctacatcaagaccgccggcctgagaagcaccatcgcctgggccatggccagcctggccgacatcaaggccggcgccttcgtgctggaccccatgtgcggcctgggcaccatcctgctggaggccgccaaggagtggcccgacgtgtactacgtgggcgccgacgtgagcgacagccagctgctgggcacctgggacaacctgaaggccgccggcctggaggacaagatcgagctgctgaagatcagcgtgatcgagctgcccctgcccagcgagagcgtggacatcatcatcagcgacatccccttcggcaagaagttcaagctgggcaaggacatcaagagcatcctgcaggagatggagagagtgctgcacgtgggcggcaccatcgtgctgctgctgagcgaggaccaccacagaagactgaccgactgcaaggagagcaacatccccttcaacagcaaggacagccacaccgacgagcccggcatcaagaagtgcctgaaccccgaggagaagaccggcgccttcaagaccgccagcaccagcttcgaggccagcaaccacaagttcctggacagaatgagccccttcggcagcctggtgcccgtggagtgctacaaggtgagcctgggcaagaccgacgccttcatctgcaagtacaagaagagccacagcagcggcctgtag

SEQ ID NO: 102419 - DNA, 873 bp, synthetic construct
  misc_feature 1..873: note = Description of Artificial Sequence: Synthetic coding sequence
  source 1..873: mol_type = other DNA
atgagagaggtgagagccagactggccgccacccaggtggagtacatcagcggcaaggtgttcttcaccacctgcagcgacctgaacatgctgaagaagctgaagagcgccgagagactgttcctgctgatcaagaagcagttccccctgatcatcagcagcgtgagcaagggcaagatcttcaacgagatgcagagactgatcaacgaggaccccggcagctggctgaacgccatcagcatctggaagaacctgctggagctggacgccaagaaggagaagctgagccagagagacgacaaccagctgaagagaaaggtgggcgagaacgagatcatcgccaagaagctgaagatcgagcagatgcagaagatcgaggagaacagagactgccagctggagaagcagatcaaggaggagaccctggagcagagagacttcaccaccaagagcgagaagttccaggaggaggagttccagaacgacatcgagaaggccatcgacacccacaaccagaacgacctgaccttcagagtgagctgcagatgcagcggcaccatcggcaaggccttcaccgcccaggtgctgtacatgggcctgagccccggccccagactgcagatgcacatgagaagccagcagtgcagagaggagagaaccccccagaccgtggccatcaccagaccccaccagctggccctgaccaagttcagcgacgtgaagggccactggagcgagtacttcatcaacctgaagatcagccagaccctgaagggcggcagaaagagcaactggaactgctactacgagaccctgtggatggagagcagactggaggagagcaccatcagagacctgtacaccagcaagtag

SEQ ID NO: 102420 - DNA, 1512 bp, synthetic construct
  misc_feature 1..1512: note = Description of Artificial Sequence: Synthetic coding sequence
  source 1..1512: mol_type = other DNA
atgagcgaggccagaggcgagcccggcagcggccccgaggccggcgccagattcttctgcaccgccggcagaggcctggagcccttcgtgatgagagaggtgagagccagactggccgccacccaggtggagtacatcagcggcaaggtgttcttcaccacctgcagcgacctgaacatgctgaagaagctgaagagcgccgagagactgttcctgctgatcaagaagcagttccccctgatcatcagcagcgtgagcaagggcaagatcttcaacgagatgcagagactgatcaacgaggaccccggcagctggctgaacgccatcagcatctggaagaacctgctggagctggacgccaagaaggagaagctgagccagagagacgacaaccagctgaagagaaaggtgggcgagaacgagatcatcgccaagaagctgaagatcgagcagatgcagaagatcgaggagaacagagactgccagctggagaagcagatcaaggaggagaccctggagcagagagacttcaccaccaagagcgagaagttccaggaggaggagttccagaacgacatcgagaaggccatcgacacccacaaccagaacgacctgaccttcagagtgagctgcagatgcagcggcaccatcggcaaggccttcaccgcccaggaggtgggcaaggtgatcggcatcgccatcatgaagcacttcggctggaaggccgacctgagaaacccccagctggagatcttcatccacctgaacgacatctacagcgtggtgggcatccccgtgttcagagtgagcctggccagcagagcctacatcaagaccgccggcctgagaagcaccatcgcctgggccatggccagcctggccgacatcaaggccggcgccttcgtgctggaccccatgtgcggcctgggcaccatcctgctggaggccgccaaggagtggcccgacgtgtactacgtgggcgccgacgtgagcgacagccagctgctgggcacctgggacaacctgaaggccgccggcctggaggacaagatcgagctgctgaagatcagcgtgatcgagctgcccctgcccagcgagagcgtggacatcatcatcagcgacatccccttcggcaagaagttcaagctgggcaaggacatcaagagcatcctgcaggagatggagagagtgctgcacgtgggcggcaccatcgtgctgctgctgagcgaggaccaccacagaagactgaccgactgcaaggagagcaacatccccttcaacagcaaggacagccacaccgacgagcccggcatcaagaagtgcctgaaccccgaggagaagaccggcgccttcaagaccgccagcaccagcttcgaggccagcaaccacaagttcctggacagaatgagccccttcggcagcctggtgcccgtggagtgctacaaggtgagcctgggcaagaccgacgccttcatctgcaagtacaagaagagccacagcagcggcctgtag

SEQ ID NO: 102421 - DNA, 486 bp, synthetic construct
  misc_feature 1..486: note = Description of Artificial Sequence: Synthetic coding sequence
  source 1..486: mol_type = other DNA
atgaacctggccatcagcatcgccctgctgctgaccgtgctgcaggtgagcagaggccagaaggtgaccagcctgaccgcctgcctggtggaccagagcctgagactggactgcagacacgagaacaccagcagcagccccatccagtacgagttcagcctgaccagagagaccaagaagcacgtgctgttcggcaccgtgggcgtgcccgagcacacctacagaagcagaaccaacttcaccagcaagtacaacatgaaggtgctgtacctgagcgccttcaccagcaaggacgagggcacctacacctgcgccctgcaccacagcggccacagcccccccatcagcagccagaacgtgaccgtgctgagagacaagctggtgaagtgcgagggcatcagcctgctggcccagaacaccagctggctgctgctgctgctgctgagcctgagcctgctgcaggccaccgacttcatgagcctgtag

SEQ ID NO: 102422 - DNA, 486 bp, synthetic construct; identical to SEQ ID NO: 102421
  misc_feature 1..486: note = Description of Artificial Sequence: Synthetic coding sequence
  source 1..486: mol_type = other DNA

SEQ ID NO: 102423 - DNA, 480 bp, synthetic construct
  misc_feature 1..480: note = Description of Artificial Sequence: Synthetic coding sequence
  source 1..480: mol_type = other DNA
atgttccccttcgccctgctgtacgtgctgagcgtgagcttcagaaagatcttcatcctgcagctggtgggcctggtgctgacctacgacttcaccaactgcgacttcgagaagatcaaggccgcctacctgagcaccatcagcaaggacctgatcacctacatgagcggcaccaagagcaccgagttcaacaacaccgtgagctgcagcaacagaccccactgcctgaccgagatccagagcctgaccttcaaccccaccgccggctgcgccagcctggccaaggagatgttcgccatgaagaccaaggccgccctggccatctggtgccccggctacagcgagacccagatcaacgccacccaggccatgaagaagagaagaaagagaaaggtgaccaccaacaagtgcctggagcaggtgagccagctgcagggcctgtggagaagattcaacagacccctgctgaagcagcagtag

SEQ ID NO: 102424 - DNA, 192 bp, synthetic construct
  misc_feature 1..192: note = Description of Artificial Sequence: Synthetic coding sequence
  source 1..192: mol_type = other DNA
atgttcgccatgaagaccaaggccgccctggccatctggtgccccggctacagcgagacccagatcaacgccacccaggccatgaagaagagaagaaagagaaaggtgaccaccaacaagtgcctggagcaggtgagccagctgcagggcctgtggagaagattcaacagacccctgctgaagcagcagtag

SEQ ID NO: 102425 - DNA, 705 bp, synthetic construct
  misc_feature 1..705: note = Description of Artificial Sequence: Synthetic coding sequence
  source 1..705: mol_type = other DNA
atgagctgcatcaacctgcccaccgtgctgcccggcagccccagcaagaccagaggccagatccaggtgatcctgggccccatgttcagcggcaagagcaccgagctgatgagaagagtgagaagattccagatcgcccagtacaagtgcctggtgatcaagtacgccaaggacaccagatacagcagcagcttctgcacccacgacagaaacaccatggaggccctgcccgcctgcctgctgagagacgtggcccaggaggccctgggcgtggccgtgatcggcatcgacgagggccagttcttccccgacatcgtggagttctgcgaggccatggccaacgccggcaagaccgtgatcgtggccgccctggacggcaccttccagagaaagcccttcggcgccatcctgaacctggtgcccctggccgagagcgtggtgaagctgaccgccgtgtgcatggagtgcttcagagaggccgcctacaccaagagactgggcaccgagaaggaggtggaggtgatcggcggcgccgacaagtaccacagcgtgtgcagactgtgctacttcaagaaggccagcggccagcccgccggccccgacaacaaggagaactgccccgtgcccggcaagcccggcgaggccgtggccgccagaaagctgttcgccccccagcagatcctgcagtgcagccccgccaactag

SEQ ID NO: 102426 - DNA, 705 bp, synthetic construct; identical to SEQ ID NO: 102425
  misc_feature 1..705: note = Description of Artificial Sequence: Synthetic coding sequence
  source 1..705: mol_type = other DNA

SEQ ID NO: 102427 - DNA, 924 bp, synthetic construct
  misc_feature 1..924: note = Description of Artificial Sequence: Synthetic coding sequence
  source 1..924: mol_type = other DNA
atgagacccggcctgttcaagggccaggcccccggcagcagaagaagacccaccgccggcctggccgtggtgagagccgacagccacaagaaggagcccagagccagcggcagcgccagacccgccatgctgctgtggcccctgagaggctgggccgccagagccctgagatgcttcggccccggcagcagaggcagccccgccagcggccccggccccagaagagtgcagagaagagcctggccccccgacaaggagcaggagaaggagaagaagagcgtgatctgcgtggagggcaacatcgccagcggcaagaccacctgcctggagttcttcagcaacgccaccgacgtggaggtgctgaccgagcccgtgagcaagtggagaaacgtgagaggccacaaccccctgggcctgatgtaccacgacgccagcagatggggcctgaccctgcagacctacgtgcagctgaccatgctggacagacacaccagaccccaggtgagcagcgtgagactgatggagagaagcatccacagcgccagatacatcttcgtggagaacctgtacagaagcggcaagatgcccgaggtggactacgtggtgctgagcgagtggttcgactggatcctgagaaacatggacgtgagcgtggacctgatcgtgtacctgagaaccaaccccgagacctgctaccagagactgaagaagagatgcagagaggaggagaaggtgatccccctggagtacctggaggccatccaccacctgcacgaggagtggctgatcaagggcagcctgttccccatggccgcccccgtgctggtgatcgaggccgaccaccacatggagagaatgctggagctgttcgagcagaacagagacagaatcctgacccccgagaacagaaagcactgcccctag

SEQ ID NO: 102428 - DNA, 744 bp, synthetic construct
  misc_feature 1..744: note = Description of Artificial Sequence: Synthetic coding sequence
  source 1..744: mol_type = other DNA
atgctgctgtggcccctgagaggctgggccgccagagccctgagatgcttcggccccggcagcagaggcagccccgccagcggccccggccccagaagagtgcagagaagagcctggccccccgacaaggagcaggagaaggagaagaagagcgtgatctgcgtggagggcaacatcgccagcggcaagaccacctgcctggagttcttcagcaacgccaccgacgtggagggcctgatgtaccacgacgccagcagatggggcctgaccctgcagacctacgtgcagctgaccatgctggacagacacaccagaccccaggtgagcagcgtgagactgatggagagaagcatccacagcgccagatacatcttcgtggagaacctgtacagaagcggcaagatgcccgaggtggactacgtggtgctgagcgagtggttcgactggatcctgagaaacatggacgtgagcgtggacctgatcgtgtacctgagaaccaaccccgagacctgctaccagagactgaagaagagatgcagagaggaggagaaggtgatccccctggagtacctggaggccatccaccacctgcacgaggagtggctgatcaagggcagcctgttccccatggccgcccccgtgctggtgatcgaggccgaccaccacatggagagaatgctggagctgttcgagcagaacagagacagaatcctgacccccgagaacagaaagcactgcccctag

SEQ ID NO: 102429 - DNA, 798 bp, synthetic construct
  misc_feature 1..798: note = Description of Artificial Sequence: Synthetic coding sequence
  source 1..798: mol_type = other DNA
atgctgctgtggcccctgagaggctgggccgccagagccctgagatgcttcggccccggcagcagaggcagccccgccagcggccccggccccagaagagtgcagagaagagcctggccccccgacaaggagcaggagaaggagaagaagagcgtgatctgcgtggagggcaacatcgccagcggcaagaccacctgcctggagttcttcagcaacgccaccgacgtggaggtgctgaccgagcccgtgagcaagtggagaaacgtgagaggccacaaccccctgggcctgatgtaccacgacgccagcagatggggcctgaccctgcagacctacgtgcagctgaccatgctggacagacacaccagaccccaggtgagcagcgtgagactgatggagagaagcatccacagcgccagatacatcttcgtggagaacctgtacagaagcggcaagatgcccgaggtggactacgtggtgctgagcgagtggttcgactggatcctgagaaacatggacgtgagcgtggacctgatcgtgtacctgagaaccaaccccgagacctgctaccagagactgaagaagagatgcagagaggaggagaaggtgatccccctggagtacctggaggccatccaccacctgcacgaggagtggctgatcaagggcagcctgttccccatggccgcccccgtgctggtgatcgaggccgaccaccacatggagagaatgctggagctgttcgagcagaacagagacagaatcctgacccccgagaacagaaagcactgcccctag

SEQ ID NO: 102430 - DNA, 507 bp, synthetic construct
  misc_feature 1..507: note = Description of Artificial Sequence: Synthetic coding sequence
  source 1..507: mol_type = other DNA
atgtaccacgacgccagcagatggggcctgaccctgcagacctacgtgcagctgaccatgctggacagacacaccagaccccaggtgagcagcgtgagactgatggagagaagcatccacagcgccagatacatcttcgtggagaacctgtacagaagcggcaagatgcccgaggtggactacgtggtgctgagcgagtggttcgactggatcctgagaaacatggacgtgagcgtggacctgatcgtgtacctgagaaccaaccccgagacctgctaccagagactgaagaagagatgcagagaggaggagaaggtgatccccctggagtacctggaggccatccaccacctgcacgaggagtggctgatcaagggcagcctgttccccatggccgcccccgtgctggtgatcgaggccgaccaccacatggagagaatgctggagctgttcgagcagaacagagacagaatcctgacccccgagaacagaaagcactgcccctag

SEQ ID NO: 102431 - DNA, 705 bp, synthetic construct
  misc_feature 1..705: note = Description of Artificial Sequence: Synthetic coding sequence
  source 1..705: mol_type = other DNA
atgggcgccttctgccagagacccagcagcgacaaggagcaggagaaggagaagaagagcgtgatctgcgtggagggcaacatcgccagcggcaagaccacctgcctggagttcttcagcaacgccaccgacgtggaggtgctgaccgagcccgtgagcaagtggagaaacgtgagaggccacaaccccctgggcctgatgtaccacgacgccagcagatggggcctgaccctgcagacctacgtgcagctgaccatgctggacagacacaccagaccccaggtgagcagcgtgagactgatggagagaagcatccacagcgccagatacatcttcgtggagaacctgtacagaagcggcaagatgcccgaggtggactacgtggtgctgagcgagtggttcgactggatcctgagaaacatggacgtgagcgtggacctgatcgtgtacctgagaaccaaccccgagacctgctaccagagactgaagaagagatgcagagaggaggagaaggtgatccccctggagtacctggaggccatccaccacctgcacgaggagtggctgatcaagggcagcctgttccccatggccgcccccgtgctggtgatcgaggccgaccaccacatggagagaatgctggagctgttcgagcagaacagagacagaatcctgacccccgagaacagaaagcactgcccctag

SEQ ID NO: 102432 - DNA, 507 bp, synthetic construct; identical to SEQ ID NO: 102430
  misc_feature 1..507: note = Description of Artificial Sequence: Synthetic coding sequence
  source 1..507: mol_type = other DNA

SEQ ID NO: 102433 - DNA, 651 bp, synthetic construct
  misc_feature 1..651: note = Description of Artificial Sequence: Synthetic coding sequence
  source 1..651: mol_type = other DNA
atgaccagcatctgcgtggagggcaacatcgccagcggcaagaccacctgcctggagttcttcagcaacgccaccgacgtggaggtgctgaccgagcccgtgagcaagtggagaaacgtgagaggccacaaccccctgggcctgatgtaccacgacgccagcagatggggcctgaccctgcagacctacgtgcagctgaccatgctggacagacacaccagaccccaggtgagcagcgtgagactgatggagagaagcatccacagcgccagatacatcttcgtggagaacctgtacagaagcggcaagatgcccgaggtggactacgtggtgctgagcgagtggttcgactggatcctgagaaacatggacgtgagcgtggacctgatcgtgtacctgagaaccaaccccgagacctgctaccagagactgaagaagagatgcagagaggaggagaaggtgatccccctggagtacctggaggccatccaccacctgcacgaggagtggctgatcaagggcagcctgttccccatggccgcccccgtgctggtgatcgaggccgaccaccacatggagagaatgctggagctgttcgagcagaacagagacagaatcctgacccccgagaacagaaagcactgcccctag

SEQ ID NO: 102434 - DNA, 723 bp, synthetic construct
  misc_feature 1..723: note = Description of Artificial Sequence: Synthetic coding sequence
  source 1..723: mol_type = other DNA
atgctgctgtggcccctgagaggctgggccgccagagccctgagatgcttcggccccggcagcagaggcagccccgccagcggccccggccccagaagagtgcagagaagagcctggccccccgacaaggagcaggagaaggagaagaagagcgtggtgctgaccgagcccgtgagcaagtggagaaacgtgagaggccacaaccccctgggcctgatgtaccacgacgccagcagatggggcctgaccctgcagacctacgtgcagctgaccatgctggacagacacaccagaccccaggtgagcagcgtgagactgatggagagaagcatccacagcgccagatacatcttcgtggagaacctgtacagaagcggcaagatgcccgaggtggactacgtggtgctgagcgagtggttcgactggatcctgagaaacatggacgtgagcgtggacctgatcgtgtacctgagaaccaaccccgagacctgctaccagagactgaagaagagatgcagagaggaggagaaggtgatccccctggagtacctggaggccatccaccacctgcacgaggagtggctgatcaagggcagcctgttccccatggccgcccccgtgctggtgatcgaggccgaccaccacatggagagaatgctggagctgttcgagcagaacagagacagaatcctgacccccgagaacagaaagcactgcccctag

SEQ ID NO: 102435 - DNA, 840 bp, synthetic construct
  misc_feature 1..840: note = Description of Artificial Sequence: Synthetic coding sequence
  source 1..840: mol_type = other DNA
atgcccgtggccggcagcgagctgcccagaagacccctgccccccgccgcccaggagagagacgccgagcccagacccccccacggcgagctgcagtacctgggccagatccagcacatcctgagatgcggcgtgagaaaggacgacagaaccggcaccggcaccctgagcgtgttcggcatgcaggccagatacagcctgagagacgagttccccctgctgaccaccaagagagtgttctggaagggcgtgctggaggagctgctgtggttcatcaagggcagcaccaacgccaaggagctgagcagcaagggcgtgaagatctgggacgccaacggcagcagagacttcctggacagcctgggcttcagcaccagagaggagggcgacctgggccccgtgtacggcttccagtggagacacttcggcgccgagtacagagacatggagagcgacctgcccctgatggccctgcccccctgccacgccctgtgccagttctacgtggtgaacagcgagctgagctgccagctgtaccagagaagcggcgacatgggcctgggcgtgcccttcaacatcgccagctacgccctgctgacctacatgatcgcccacatcaccggcctgaagcccggcgacttcatccacaccctgggcgacgcccacatctacctgaaccacatcgagcccctgaagatccagctgcagagagagcccagacccttccccaagctgagaatcctgagaaaggtggagaagatcgacgacttcaaggccgaggacttccagatcgagggctacaacccccaccccaccatcaagatggagatggccgtgtag

SEQ ID NO: 102436 - DNA, 693 bp, synthetic construct
  misc_feature 1..693: note = Description of Artificial Sequence: Synthetic coding sequence
  source 1..693: mol_type = other DNA
atgcccgtggccggcagcgagctgcccagaagacccctgccccccgccgcccaggagagagacgccgagcccagacccccccacggcgagctgcagtacctgggccagatccagcacatcctgagatgcggcgtgagaaaggacgacagaaccggcaccggcaccctgagcgtgttcggcatgcaggccagatacagcctgagagactacagcggccagggcgtggaccagctgcagagagtgatcgacaccatcaagaccaaccccgacgacagaagaatcatcatgtgcgcctggaaccccagagacctgcccctgatggccctgcccccctgccacgccctgtgccagttctacgtggtgaacagcgagctgagctgccagctgtaccagagaagcggcgacatgggcctgggcgtgcccttcaacatcgccagctacgccctgctgacctacatgatcgcccacatcaccggcctgaagcccggcgacttcatccacaccctgggcgacgcccacatctacctgaaccacatcgagcccctgaagatccagctgcagagagagcccagacccttccccaagctgagaatcctgagaaaggtggagaagatcgacgacttcaaggccgaggacttccagatcgagggctacaacccccaccccaccatcaagatggagatggccgtgtag

SEQ ID NO: 102437 - DNA, 942 bp, synthetic construct
  misc_feature 1..942: note = Description of Artificial Sequence: Synthetic coding sequence
  source 1..942: mol_type = other DNA
atgcccgtggccggcagcgagctgcccagaagacccctgccccccgccgcccaggagagagacgccgagcccagacccccccacggcgagctgcagtacctgggccagatccagcacatcctgagatgcggcgtgagaaaggacgacagaaccggcaccggcaccctgagcgtgttcggcatgcaggccagatacagcctgagagacgagttccccctgctgaccaccaagagagtgttctggaagggcgtgctggaggagctgctgtggttcatcaagggcagcaccaacgccaaggagctgagcagcaagggcgtgaagatctgggacgccaacggcagcagagacttcctggacagcctgggcttcagcaccagagaggagggcgacctgggccccgtgtacggcttccagtggagacacttcggcgccgagtacagagacatggagagcgactacagcggccagggcgtggaccagctgcagagagtgatcgacaccatcaagaccaaccccgacgacagaagaatcatcatgtgcgcctggaaccccagagacctgcccctgatggccctgcccccctgccacgccctgtgccagttctacgtggtgaacagcgagctgagctgccagctgtaccagagaagcggcgacatgggcctgggcgtgcccttcaacatcgccagctacgccctgctgacctacatgatcgcccacatcaccggcctgaagcccggcgacttcatccacaccctgggcgacgcccacatctacctgaaccacatcgagcccctgaagatccagctgcagagagagcccagacccttccccaagctgagaatcctgagaaaggtggagaagatcgacgacttcaaggccgaggacttccagatcgagggctacaacccccaccccaccatcaagatggagatggccgtgtag

SEQ ID NO: 102438 - DNA, 678 bp, synthetic construct
  misc_feature 1..678: note = Description of Artificial Sequence: Synthetic coding sequence
  source 1..678: mol_type = other DNA
atgagcagacccagaaagagactggccggcaccagcggcagcgacaagggcctgagcggcaagagaaccaagaccgagaacagcggcgaggccctggccaaggtggaggacagcaacccccagaagaccagcgccaccaagaactgcctgaagaacctgagcagccactggctgatgaagagcgagcccgagagcagactggagaagggcgtggacgtgaagttcagcatcgaggacctgaaggcccagcccaagcagaccacctgctgggacggcgtgagaaactaccaggccagaaacttcctgagagccatgaagctgggcgaggaggccttcttctaccacagcaactgcaaggagcccggcatcgccggcctgatgaagatcgtgaaggaggcctaccccgaccacacccagttcgagaagaacaacccccactacgaccccagcagcaaggaggacaaccccaagtggagcatggtggacgtgcagttcgtgagaatgatgaagagattcatccccctggccgagctgaagagctaccaccaggcccacaaggccaccggcggccccctgaagaacatggtgctgttcaccagacagagactgagcatccagcccctgacccaggaggagttcgacttcgtgctgagcctggaggagaaggagcccagctag

SEQ ID NO: 102439 - DNA, 501 bp, synthetic construct
  misc_feature 1..501: note = Description of Artificial Sequence: Synthetic coding sequence
  source 1..501: mol_type = other DNA
atgagcagacccagaaagagactggccggcaccagcggcagcgacaagggcctgagcggcaagagaaccaagaccgagaacagcggcgaggccctggccaaggtggaggacagcaacccccagaagaccagcgccaccaagaactgcctgaagaacctgagcagccactggctgatgaagagcgagcccgagagcagactggagaagggcgtggacgtgaagttcagcatcgaggacctgaaggcccagcccaagcagaccacctgctgggacggcgtgagaaactaccaggccagaaacttcctgagagccatgaagctgggcgaggaggccttcttctaccacagcaactgcaaggagcccggcatcgccggcctgatgaagatcgtgaaggaggcctaccccgaccacacccagttcgagaagaacaacccccactacgaccccagcagcaaggaggacaaccccaagtggagcatgaagagcctgatcctgttctag

SEQ ID NO: 102440 - DNA, 678 bp, synthetic construct; identical to SEQ ID NO: 102438
  misc_feature 1..678: note = Description of Artificial Sequence: Synthetic coding sequence
  source 1..678: mol_type = other DNA

SEQ ID NO: 102441 - DNA, 678 bp, synthetic construct; identical to SEQ ID NO: 102438
  misc_feature 1..678: note = Description of Artificial Sequence: Synthetic coding sequence
  source 1..678: mol_type = other DNA

SEQ ID NO: 102442 - DNA, 1926 bp, synthetic construct
  misc_feature 1..1926: note = Description of Artificial Sequence: Synthetic coding sequence
  source 1..1926: mol_type = other DNA
atggccctgagcctggaggagttcgtgcacagcctggacctgagaaccctgcccagagtgctggagatccaggccggcatctacctggagggcagcatctacgagatgttcggcaacgagtgctgcttcagcaccggcgaggtgatcaagatcaccggcctgaaggtgaagaagatcatcgccgagatctgcgagcagatcgagggctgcgagagcctgcagcccttcgagctgcccatgaacttccccggcctgttcaagatcgtggccgacaagaccccctacctgaccatggaggagatcaccagaaccatccacatcggccccagcagactgggccacccctgcttctaccaccagaaggacatcaagctggagaacctgatcatcaagcagggcgagcagatcatgctgaacagcgtggaggagatcgacggcgagatcatggtgagctgcgccgtggccagaaaccaccagacccacagcttcaacctgcccctgagccaggagggcgagttctacgagtgcgaggacgagagaatctacaccctgaaggagatcgtggagtggaagatccccaagaacagaaccagaaccgtgaacctgaccgacttcagcaacaagtgggacagcaccaaccccttccccaaggacttctacggcaccctgatcctgaagcccgtgtacgagatccagggcgtgatgaagttcagaaaggacatcatcagaatcctgcccagcctggacgtggaggtgaaggacatcaccgacagctacgacgccaactggttcctgcagctgctgagcaccgaggacctgttcgagatgaccagcaaggagttccccatcgtgaccgaggtgatcgaggcccccgagggcaaccacctgccccagagcatcctgcagcccggcaagaccatcgtgatccacaagaagtaccaggccagcagaatcctggccagcgagatcagaagcaacttccccaagagacacttcctgatccccaccagctacaagggcaagttcaagagaagacccagagagttccccaccgcctacgacctggagatcgccaagagcgagaaggagcccctgcacgtggtggccaccaaggccttccacagcccccacgacaagctgagcagcgtgagcgtgggcgaccagttcctggtgcaccagagcgagaccaccgaggtgctgtgcgagggcatcaagaaggtggtgaacgtgctggcctgcgagaagatcctgaagaagagctacgaggccgccctgctgcccctgtacatggagggcggcttcgtggaggtgatccacgacaagaagcagtaccccatcagcgagctgtgcaagcagttcagactgcccttcaacgtgaaggtgagcgtgagagacctgagcatcgaggaggacgtgctggccgccacccccggcctgcagctggaggaggacatcaccgacagctacctgctgatcagcgacttcgccaaccccaccgagtgctgggagatccccgtgggcagactgaacatgaccgtgcagctggtgagcaacttcagcagagacgccgagcccttcctggtgagaaccctggtggaggagatcaccgaggagcagtactacatgatgagaagatacgagagcagcgccagccaccccccccccagaccccccaagcaccccagcgtggaggagaccaagctgaccctgctgaccctggccgaggagagaaccgtggacctgcccaagagccccaagagacaccacgtggacatcaccaagaagctgcaccccaaccaggccggcctggacagcaaggtgctgatcggcagccagaacgacctggtggacgaggagaaggagagaagcaacagaggcgccaccgccatcgccgagaccttcaagaacgagaagcaccagaagtag

SEQ ID NO: 102443 - DNA, 1689 bp, synthetic construct
  misc_feature 1..1689: note = Description of Artificial Sequence: Synthetic coding sequence
  source 1..1689: mol_type = other DNA
atgaacttccccggcctgttcaagatcgtggccgacaagaccccctacctgaccatggaggagatcaccagaaccatccacatcggccccagcagactgggccacccctgcttctaccaccagaaggacatcaagctggagaacctgatcatcaagcagggcgagcagatcatgctgaacagcgtggaggagatcgacggcgagatcatggtgagctgcgccgtggccagaaaccaccagacccacagcttcaacctgcccctgagccaggagggcgagttctacgagtgcgaggacgagagaatctacaccctgaaggagatcgtggagtggaagatccccaagaacagaaccagaaccgtgaacctgaccgacttcagcaacaagtgggacagcaccaaccccttccccaaggacttctacggcaccctgatcctgaagcccgtgtacgagatccagggcgtgatgaagttcagaaaggacatcatcagaatcctgcccagcctggacgtggaggtgaaggacatcaccgacagctacgacgccaactggttcctgcagctgctgagcaccgaggacctgttcgagatgaccagcaaggagttccccatcgtgaccgaggtgatcgaggcccccgagggcaaccacctgccccagagcatcctgcagcccggcaagaccatcgtgatccacaagaagtaccaggccagcagaatcctggccagcgagatcagaagcaacttccccaagagacacttcctgatccccaccagctacaagggcaagttcaagagaagacccagagagttccccaccgcctacgacctggagatcgccaagagcgagaaggagcccctgcacgtggtggccaccaaggccttccacagcccccacgacaagctgagcagcgtgagcgtgggcgaccagttcctggtgcaccagagcgagaccaccgaggtgctgtgcgagggcatcaagaaggtggtgaacgtgctggcctgcgagaagatcctgaagaagagctacgaggccgccctgctgcccctgtacatggagggcggcttcgtggaggtgatccacgacaagaagcagtaccccatcagcgagctgtgcaagcagttcagactgcccttcaacgtgaaggtgagcgtgagagacctgagcatcgaggaggacgtgctggccgccacccccggcctgcagctggaggaggacatcaccgacagctacctgctgatcagcgacttcgccaaccccaccgagtgctgggagatccccgtgggcagactgaacatgaccgtgcagctggtgagcaacttcagcagagacgccgagcccttcctggtgagaaccctggtggaggagatcaccgaggagcagtactacatgatgagaagatacgagagcagcgccagccaccccccccccagaccccccaagcaccccagcgtggaggagaccaagctgaccctgctgaccctggccgaggagagaaccgtggacctgcccaagagccccaagagacaccacgtggacatcaccaagaagctgcaccccaaccaggccggcctggacagcaaggtgctgatcggcagccagaacgacctggtggacgaggagaaggagagaagcaacagaggcgccaccgccatcgccgagaccttcaagaacgagaagcaccagaagtag

SEQ ID NO: 102444 - DNA, 372 bp, synthetic construct
  misc_feature 1..372: note = Description of Artificial Sequence: Synthetic coding sequence
  source 1..372: mol_type = other DNA
atgaacttccccgtgagaaaggacatcatcagaatcctgcccagcctggacgtggaggtgaaggacatcaccgacagctacgacgccaactggttcctgcagctgctgagcaccgaggacctgttcgagatgaccagcaaggagttccccatcgtgaccgaggtgatcgaggcccccgagggcaaccacctgccccagagcatcctgcagcccggcaagaccatcgtgatccacaagaagtaccaggccagcagaatcctggccagcgagatcagaagcaacttccccaagagacacttcctgatccccaccagctacaagggcaagttcaagagaagacccagagagttccccaccgcctacgacctgtag

SEQ ID NO: 102445 - DNA, 1821 bp, synthetic construct
  misc_feature 1..1821: note = Description of Artificial Sequence: Synthetic coding sequence
  source 1..1821: mol_type = other DNA
atgttcggcaacgagtgctgcttcagcaccggcgaggtgatcaagatcaccggcctgaaggtgaagaagatcatcgccgagatctgcgagcagatcgagggctgcgagagcctgcagcccttcgagctgcccatgaacttccccggcctgttcaagatcgtggccgacaagaccccctacctgaccatggaggagatcaccagaaccatccacatcggccccagcagactgggccacccctgcttctaccaccagaaggacatcaagctggagaacctgatcatcaagcagggcgagcagatcatgctgaacagcgtggaggagatcgacggcgagatcatggtgagctgcgccgtggccagaaaccaccagacccacagcttcaacctgcccctgagccaggagggcgagttctacgagtgcgaggacgagagaatctacaccctgaaggagatcgtggagtggaagatccccaagaacagaaccagaaccgtgaacctgaccgacttcagcaacaagtgggacagcaccaaccccttccccaaggacttctacggcaccctgatcctgaagcccgtgtacgagatccagggcgtgatgaagttcagaaaggacatcatcagaatcctgcccagcctggacgtggaggtgaaggacatcaccgacagctacgacgccaactggttcctgcagctgctgagcaccgaggacctgttcgagatgaccagcaaggagttccccatcgtgaccgaggtgatcgaggcccccgagggcaaccacctgccccagagcatcctgcagcccggcaagaccatcgtgatccacaagaagtaccaggccagcagaatcctggccagcgagatcagaagcaacttccccaagagacacttcctgatccccaccagctacaagggcaagttcaagagaagacccagagagttccccaccgcctacgacctggagatcgccaagagcgagaaggagcccctgcacgtggtggccaccaaggccttccacagcccccacgacaagctgagcagcgtgagcgtgggcgaccagttcctggtgcaccagagcgagaccaccgaggtgctgtgcgagggcatcaagaaggtggtgaacgtgctggcctgcgagaagatcctgaagaagagctacgaggccgccctgctgcccctgtacatggagggcggcttcgtggaggtgatccacgacaagaagcagtaccccatcagcgagctgtgcaagcagttcagactgcccttcaacgtgaaggtgagcgtgagagacctgagcatcgaggaggacgtgctggccgccacccccggcctgcagctggaggaggacatcaccgacagctacctgctgatcagcgacttcgccaaccccaccgagtgctgggagatccccgtgggcagactgaacatgaccgtgcagctggtgagcaacttcagcagagacgccgagcccttcctggtgagaaccctggtggaggagatcaccgaggagcagtactacatgatgagaagatacgagagcagcgccagccaccccccccccagaccccccaagcaccccagcgtggaggagaccaagctgaccctgctgaccctggccgaggagagaaccgtggacctgcccaagagccccaagagacaccacgtggacatcaccaagaagctgcaccccaaccaggccggcctggacagcaaggtgctgatcggcagccagaacgacctggtggacgaggagaaggagagaagcaacagaggcgccaccgccatcgccgagaccttcaagaacgagaagcaccagaagtag

SEQ ID NO: 102446 - DNA, 2043 bp, synthetic construct
  misc_feature 1..2043: note = Description of Artificial Sequence: Synthetic coding sequence
  source 1..2043: mol_type = other DNA
atggccctgagcctggaggagttcgtgcacagcctggacctgagaaccctgcccagagtgctggagatccaggccggcatctacctggagggcagcatctacgagatgttcggcaacgagtgctgcttcagcaccggcgaggtgatcaagatcaccggcctgaaggtgaagaagatcatcgccgagatctgcgagcagatcgagggctgcgagagcctgcagcccttcgagctgcccatgaacttccccggcctgttcaagatcgtggccgacaagaccccctacctgaccatggaggagatcaccagaaccatccacatcggccccagcagactgggccacccctgcttctaccaccagaaggacatcaagctggagaacctgatcatcaagcagggcgagcagatcatgctgaacagcgtggaggagatcgacggcgagatcatggtgagctgcgccgtggccagaaaccaccagacccacagcttcaacctgcccctgagccaggagggcgagttctacgagtgcgaggacgagagaatctacaccctgaaggagatcgtggagtggaagatccccaagaacagaaccagaaccgtgaacctgaccgacttcagcaacaagtgggacagcaccaaccccttccccaaggacttctacggcaccctgatcctgaagcccgtgtacgagatccagggcgtgatgaagttcagaaaggacatcatcagaatcctgcccagcctggacgtggaggtgaaggacatcaccgacagctacgacgccaactggttcctgcagctgctgagcaccgaggacctgttcgagatgaccagcaaggagttccccatcgtgaccgaggtgatcgaggcccccgagggcaaccacctgccccagagcatcctgcagcccggcaagaccatcgtgatccacaagaagtaccaggccagcagaatcctggccagcgagatcagaagcaacttccccaagagacacttcctgatccccaccagctacaagggcaagttcaagagaagacccagagagttccccaccgcctacgacctggagatcgccaagagcgagaaggagcccctgcacgtggtggccaccaaggccttccacagcccccacgacaagctgagcagcgtgagcgtgggcgaccagttcctggtgcaccagagcgagaccaccgaggtgctgtgcgagggcatcaagaaggtggtgaacgtgctggcctgcgagaagatcctgaagaagagctacgaggccgccctgctgcccctgtacatggagggcggcttcgtggaggtgatccacgacaagaagcagtaccccatcagcgagctgtgcaagcagttcagactgcccttcaacgtgaaggtgagcgtgagagacctgagcatcgaggaggacgtgctggccgccacccccggcctgcagctggaggaggacatcaccgacagctacctgctgatcagcgacttcgccaaccccaccgagtgctgggagatccccgtgggcagactgaacatgaccgtgcagctggtgagcaacttcagcagagacgccgagcccttcctggtgagaaccctggtggaggagatcaccgaggagcagtactacatgatgagaagatacgagagcagcgccagccaccccccccccagaccccccaagcaccccagcgtggaggagaccaagctgaccctgctgaccctggccgaggagagaaccgtggacctgcccaagagccccaaggccggcgtgcagtggagagacctgggcagcctgcagcccctgccccccggcttcaagcagttcagcgccagcgccagccacgtggccggcatcaccggcaccccccaccacgtgcagagacaccacgtggacatcaccaagaagctgcaccccaaccaggccggcctggacagcaaggtgctgatcggcagccagaacgacctggtggacgaggagaaggagagaagcaacagaggcgccaccgccatcgccgagaccttcaagaacgagaagcaccagaagtag

SEQ ID NO: 102447 - DNA, 1581 bp, synthetic construct
  misc_feature 1..1581: note = Description of Artificial Sequence: Synthetic coding sequence
  source 1..1581: mol_type = other DNA
atggacgtgagattctaccccccccccgcccagcccgccgccgcccccgacgccccctgcctgggccccagcccctgcctggacccctactactgcaacaagttcgacggcgagaacatgtacatgagcatgaccgagcccagccaggactacgtgcccgccagccagagctaccccggccccagcctggagagcgaggacttcaacatcccccccatcaccccccccagcctgcccgaccacagcctggtgcacctgaacgaggtggagagcggctaccacagcctgtgccaccccatgaaccacaacggcctgctgcccttccacccccagaacatggacctgcccgagatcaccgtgagcaacatgctgggccaggacggcaccctgctgagcaacagcatcagcgtgatgcccgacatcagaaaccccgagggcacccagtacagcagccacccccagatggccgccatgagacccagaggccagcccgccgacatcagacagcagcccggcatgatgccccacggccagctgaccaccatcaaccagagccagctgagcgcccagctgggcctgaacatgggcggcagcaacgtgccccacaacagccccagcccccccggcagcaagagcgccacccccagccccagcagcagcgtgcacgaggacgagggcgacgacaccagcaagatcaacggcggcgagaagagacccgccagcgacatgggcaagaagcccaagacccccaagaagaagaagaagaaggaccccaacgagccccagaagcccgtgagcgcctacgccctgttcttcagagacacccaggccgccatcaagggccagaaccccaacgccaccttcggcgaggtgagcaagatcgtggccagcatgtgggacggcctgggcgaggagcagaagcaggtgtacaagaagaagaccgaggccgccaagaaggagtacctgaagcagctggccgcctacagagccagcctggtgagcaagagctacagcgagcccgtggacgtgaagaccagccagcccccccagctgatcaacagcaagcccagcgtgttccacggccccagccaggcccacagcgccctgtacctgagcagccactaccaccagcagcccggcatgaacccccacctgaccgccatgcaccccagcctgcccagaaacatcgcccccaagcccaacaaccagatgcccgtgaccgtgagcatcgccaacatggccgtgagcccccccccccccctgcagatcagcccccccctgcaccagcacctgaacatgcagcagcaccagcccctgaccatgcagcagcccctgggcaaccagctgcccatgcaggtgcagagcgccctgcacagccccaccatgcagcagggcttcaccctgcagcccgactaccagaccatcatcaaccccaccagcaccgccgcccaggtggtgacccaggccatggagtacgtgagaagcggctgcagaaacccccccccccagcccgtggactggaacaacgactactgcagcagcggcggcatgcagagagacaaggccctgtacctgacctag

SEQ ID NO: 102448 - DNA, 831 bp, synthetic construct
  misc_feature 1..831: note = Description of Artificial Sequence: Synthetic coding sequence
  source 1..831: mol_type = other DNA
atgggcaagaagcccaagacccccaagaagaagaagaagaaggaccccaacgagccccagaagcccgtgagcgcctacgccctgttcttcagagacacccaggccgccatcaagggccagaaccccaacgccaccttcggcgaggtgagcaagatcgtggccagcatgtgggacggcctgggcgaggagcagaagcaggtgtacaagaagaagaccgaggccgccaagaaggagtacctgaagcagctggccgcctacagagccagcctggtgagcaagagctacagcgagcccgtggacgtgaagaccagccagcccccccagctgatcaacagcaagcccagcgtgttccacggccccagccaggcccactaccaccagcagcccggcatgaacccccacctgaccgccatgcaccccagcctgcccagaaacatcgcccccaagcccaacaaccagatgcccgtgaccgtgagcatcgccaacatggccgtgagcccccccccccccctgcagatcagcccccccctgcaccagcacctgaacatgcagcagcaccagcccctgaccatgcagcagcccctgggcaaccagctgcccatgcaggtgcagagcgccctgcacagccccaccatgcagcagggcttcaccctgcagcccgactaccagaccatcatcaaccccaccagcaccgccgcccaggtggtgacccaggccatggagtacgtgagaagcggctgcagaaacccccccccccagcccgtggactggaacaacgactactgcagcagcggcggcatgcagagagacaaggccctgtacctgacctag

SEQ ID NO: 102449 - DNA, 747 bp, synthetic construct
  misc_feature 1..747: note = Description of Artificial Sequence: Synthetic coding sequence
  source 1..747: mol_type = other DNA
atgcccgagttcctggaggaccccagcgtgctgaccaaggacaagctgaagagcgagctggtggccaacaacgtgaccctgcccgccggcgagcagagaaaggacgtgtacgtgcagctgtacctgcagcacctgaccgccagaaacagaccccccctgcccgccggcaccaacagcaagggcccccccgacttcagcagcgacgaggagagagagcccacccccgtgctgggcagcggcgccgccgccgccggcagaagcagagccgccgtgggcagaaaggccaccaagaagaccgacaagcccagacaggaggacaaggacgacctggacgtgaccgagctgaccaacgaggacctgctggaccagctggtgaagtacggcgtgaaccccggccccatcgtgggcaccaccagaaagctgtacgagaagaagctgctgaagctgagagagcagggcaccgagagcagaagcagcacccccctgcccaccatcagcagcagcgccgagaacaccagacagaacggcagcaacgacagcgacagatacagcgacaacgaggaggacagcaagatcgagctgaagctggagaagagagagcccctgaagggcagagccaagacccccgtgaccctgaagcagagaagagtggagcacaaccaggtgagcctggtgctgctgcccccctgcaccggcatcaacaacctgctgaccaccctgatccacgtgctggccttcaacggctag

SEQ ID NO: 102450 - DNA, 2085 bp, synthetic construct
  misc_feature 1..2085: note = Description of Artificial Sequence: Synthetic coding sequence
  source 1..2085: mol_type = other DNA
atgcccgagttcctggaggaccccagcgtgctgaccaaggacaagctgaagagcgagctggtggccaacaacgtgaccctgcccgccggcgagcagagaaaggacgtgtacgtgcagctgtacctgcagcacctgaccgccagaaacagaccccccctgcccgccggcaccaacagcaagggcccccccgacttcagcagcgacgaggagagagagcccacccccgtgctgggcagcggcgccgccgccgccggcagaagcagagccgccgtgggcagaaaggccaccaagaagaccgacaagcccagacaggaggacaaggacgacctggacgtgaccgagctgaccaacgaggacctgctggaccagctggtgaagtacggcgtgaaccccggccccatcgtgggcaccaccagaaagctgtacgagaagaagctgctgaagctgagagagcagggcaccgagagcagaagcagcacccccctgcccaccatcagcagcagcgccgagaacaccagacagaacggcagcaacgacagcgacagatacagcgacaacgaggagggcaagaagaaggagcacaagaaggtgaagagcaccagagacatcgtgcccttcagcgagctgggcaccacccccagcggcggcggcttcttccagggcatcagcttccccgagatcagcaccagaccccccctgggcagcaccgagctgcaggccgccaagaaggtgcacaccagcaagggcgacctgcccagagagcccctggtggccaccaacctgcccggcagaggccagctgcagaagctggccagcgagagaaacctgttcatcagctgcaagagcagccacgacagatgcctggagaagagcagcagcagcagcagccagcccgagcacagcgccatgctggtgagcaccgccgccagccccagcctgatcaaggagaccaccaccggctactacaaggacatcgtggagaacatctgcggcagagagaagagcggcatccagcccctgtgccccgagagaagccacatcagcgaccagagccccctgagcagcaagagaaaggccctggaggagagcgagagcagccagctgatcagcccccccctggcccaggccatcagagactacgtgaacagcctgctggtgcagggcggcgtgggcagcctgcccggcaccagcaacagcatgccccccctggacgtggagaacatccagaagagaatcgaccagagcaagttccaggagaccgagttcctgagcccccccagaaaggtgcccagactgagcgagaagagcgtggaggagagagacagcggcagcttcgtggccttccagaacatccccggcagcgagctgatgagcagcttcgccaagaccgtggtgagccacagcctgaccaccctgggcctggaggtggccaagcagagccagcacgacaagatcgacgccagcgagctgagcttccccttccacgagagcatcctgaaggtgatcgaggaggagtggcagcaggtggacagacagctgcccagcctggcctgcaagtaccccgtgagcagcagagaggccacccagatcctgagcgtgcccaaggtggacgacgagatcctgggcttcatcagcgaggccacccccctgggcggcatccaggccgccagcaccgagagctgcaaccagcagctggacctggccctgtgcagagcctacgaggccgccgccagcgccctgcagatcgccacccacaccgccttcgtggccaaggccatgcaggccgacatcagccaggccgcccagatcctgagcagcgaccccagcagaacccaccaggccctgggcatcctgagcaagacctacgacgccgccagctacatctgcgaggccgccttcgacgaggtgaagatggccgcccacaccatgggcaacgccaccgtgggcagaagatacctgtggctgaaggactgcaagatcaacctggccagcaagaacaagctggccagcacccccttcaagggcggcaccctgttcggcggcgaggtgtgcaaggtgatcaagaagagaggcaacaagcactag

SEQ ID NO: 102451 - DNA, 1245 bp, synthetic construct
  misc_feature 1..1245: note = Description of Artificial Sequence: Synthetic coding sequence
  source 1..1245: mol_type = other DNA
atgcccgagttcctggaggaccccagcgtgctgaccaaggacaagctgaagagcgagctggtggccaacaacgtgaccctgcccgccggcgagcagagaaaggacgtgtacgtgcagctgtacctgcagcacctgaccgccagaaacagaccccccctgcccgccggcaccaacagcaagggcccccccgacttcagcagcgacgaggagagagagcccacccccgtgctgggcagcggcgccgccgccgccggcagaagcagagccgccgtgggcagaaaggccaccaagaagaccgacaagcccagacaggaggacaaggacgacctggacgtgaccgagctgaccaacgaggacctgctggaccagctggtgaagtacggcgtgaaccccggccccatcgtgggcaccaccagaaagctgtacgagaagaagctgctgaagctgagagagcagggcaccgagagcagaagcagcacccccctgcccaccatcagcagcagcgccgagaacaccagacagaacggcagcaacgacagcgacagatacagcgacaacgaggaggacagcaagatcgagctgaagctggagaagagagagcccctgaagggcagagccaagacccccgtgaccctgaagcagagaagagtggagcacaaccaggtggagaccagcgagcacttcagaatcgacggccccgtgatcagcgagagcacccccatcgccgagaccatcatggccagcagcaacgagagcctggtggtgaacagagtgaccggcaacttcaagcacgccagccccatcctgcccatcaccgagttcagcgacatccccagaagagcccccaagaagcccctgaccagagccgaggtgggcgagaagaccgaggagagaagagtggagagagacatcctgaaggagatgttcccctacgaggccagcacccccaccggcatcagcgccagctgcagaagacccatcaagggcgccgccggcagacccctggagctgagcgacttcagaatggaggagagcttcagcagcaagtacgtgcccaagtacgtgcccctggccgacgtgaagagcgagaagaccaagaagggcagaagcatccccgtgtggatcaagatcctgctgttcgtggtggtggccgtgttcctgttcctggtgtaccaggccatggagaccaaccaggtgaaccccttcagcaacttcctgcacgtggaccccagaaagagcaactag

SEQ ID NO: 102452 - DNA, 1038 bp, synthetic construct
  misc_feature 1..1038: note = Description of Artificial Sequence: Synthetic coding sequence
  source 1..1038: mol_type = other DNA
atgcccgagttcctggaggaccccagcgtgctgaccaaggacaagctgaagagcgagctggtggccaacaacgtgaccctgcccgccggcgagcagagaaaggacgtgtacgtgcagctgtacctgcagcacctgaccgccagaaacagaccccccctgcccgccggcaccaacagcaagggcccccccgacttcagcagcgacgaggagagagagcccacccccgtgctgggcagcggcgccgccgccgccggcagaagcagagccgccgtgggcagaaaggccaccaagaagaccgacaagcccagacaggaggacaaggacgacctggacgtgaccgagctgaccaacgaggacctgctggaccagctggtgaagtacggcgtgaaccccggccccatcgtgggcaccaccagaaagctgtacgagaagaagctgctgaagctgagagagcagggcaccgagagcagaagcagcacccccctgcccaccatcagcagcagcgccgagaacaccagacagaacggcagcaacgacagcgacagatacagcgacaacgaggaggacagcaagatcgagctgaagctggagaagagagagcccctgaagggcagagccaagacccccgtgaccctgaagcagagaagagtggagcacaaccaggtgggcgagaagaccgaggagagaagagtggagagagacatcctgaaggagatgttcccctacgaggccagcacccccaccggcatcagcgccagctgcagaagacccatcaagggcgccgccggcagacccctggagctgagcgacttcagaatggaggagagcttcagcagcaagtacgtgcccaagtacgtgcccctggccgacgtgaagagcgagaagaccaagaagggcagaagcatccccgtgtggatcaagatcctgctgttcgtggtggtggccgtgttcctgttcctggtgtaccaggccatggagaccaaccaggtgaaccccttcagcaacttcctgcacgtggaccccagaaagagcaactag

SEQ ID NO: 102453 - DNA, 1365 bp, synthetic construct
  misc_feature 1..1365: note = Description of Artificial Sequence: Synthetic coding sequence
  source 1..1365: mol_type = other DNA
atgcccgagttcctggaggaccccagcgtgctgaccaaggacaagctgaagagcgagctggtggccaacaacgtgaccctgcccgccggcgagcagagaaaggacgtgtacgtgcagctgtacctgcagcacctgaccgccagaaacagaccccccctgcccgccggcaccaacagcaagggcccccccgacttcagcagcgacgaggagagagagcccacccccgtgctgggcagcggcgccgccgccgccggcagaagcagagccgccgtgggcagaaaggccaccaagaagaccgacaagcccagacaggaggacaaggacgacctggacgtgaccgagctgaccaacgaggacctgctggaccagctggtgaagtacggcgtgaaccccggccccatcgtgggcaccaccagaaagctgtacgagaagaagctgctgaagctgagagagcagggcaccgagagcagaagcagcacccccctgcccaccatcagcagcagcgccgagaacaccagacagaacggcagcaacgacagcgacagatacagcgacaacgaggaggacagcaagatcgagctgaagctggagaagagagagcccctgaagggcagagccaagacccccgtgaccctgaagcagagaagagtggagcacaaccagagctacagccaggccggcatcaccgagaccgagtggaccagcggcagcagcaagggcggccccctgcaggccctgaccagagagagcaccagaggcagcagaagaacccccagaaagagagtggagaccagcgagcacttcagaatcgacggccccgtgatcagcgagagcacccccatcgccgagaccatcatggccagcagcaacgagagcctggtggtgaacagagtgaccggcaacttcaagcacgccagccccatcctgcccatcaccgagttcagcgacatccccagaagagcccccaagaagcccctgaccagagccgaggtgggcgagaagaccgaggagagaagagtggagagagacatcctgaaggagatgttcccctacgaggccagcacccccaccggcatcagcgccagctgcagaagacccatcaagggcgccgccggcagacccctggagctgagcgacttcagaatggaggagagcttcagcagcaagtacgtgcccaagtacgtgcccctggccgacgtgaagagcgagaagaccaagaagggcagaagcatccccgtgtggatcaagatcctgctgttcgtggtggtggccgtgttcctgttcctggtgtaccaggccatggagaccaaccaggtgaaccccttcagcaacttcctgcacgtggaccccagaaagagcaactag

SEQ ID NO: 102454 - DNA, 135 bp, synthetic construct
  misc_feature 1..135: note = Description of Artificial Sequence: Synthetic coding sequence
  source 1..135: mol_type = other DNA
atgagcgacaagcccgacatggccgagatcgagaagttcgacaagagcaagctgaagaagaccgagacccaggagaagaaccccctgcccagcaaggagaccatcgagcaggagaagcaggccggcgagagctag

SEQ ID NO: 102455 - DNA, 135 bp, synthetic construct; identical to SEQ ID NO: 102454
  misc_feature 1..135: note = Description of Artificial Sequence: Synthetic coding sequence
  source 1..135: mol_type = other DNA

SEQ ID NO: 102456 - DNA, 135 bp, synthetic construct; identical to SEQ ID NO: 102454
  misc_feature 1..135: note = Description of Artificial Sequence: Synthetic coding sequence
  source 1..135: mol_type = other DNA

SEQ ID NO: 102457 - DNA, 135 bp, synthetic construct; identical to SEQ ID NO: 102454
  misc_feature 1..135: note = Description of Artificial Sequence: Synthetic coding sequence
  source 1..135: mol_type = other DNA

SEQ ID NO: 102458 - DNA, 135 bp, synthetic construct
  misc_feature 1..135: note = Description of Artificial Sequence: Synthetic coding sequence
  source 1..135: mol_type = other DNA
atgagcgacaagcccggcatggccgagatcgagaagttcgacaagagcaagctgaagaagaccgagacccaggagaagaaccccctgagcagcaaggagaccatcgagcaggagagacaggccggcgagagctag

SEQ ID NO: 102459 - DNA, 1299 bp, synthetic construct
  misc_feature 1..1299: note = Description of Artificial Sequence: Synthetic coding sequence
  source 1..1299: mol_type = other DNA
atgggccccgccggcagcctgctgggcagcggccagatgcagatcaccctgtggggcagcctggccgccgtggccatcttcttcgtgatcaccttcctgatcttcctgtgcagcagctgcgacagagagaagaagcccagacagcacagcggcgaccacgagaacctgatgaacgtgcccagcgacaaggagatgttcagcagaagcgtgaccagcctggccaccgacgcccccgccagcagcgagcagaacggcgccctgaccaacggcgacatcctgagcgaggacagcaccctgacctgcatgcagcactacgaggaggtgcagaccagcgccagcgacctgctggacagccaggacagcaccggcaagcccaagtgccaccagagcagagagctgcccagaatcccccccgagagcgccgtggacaccatgctgaccgccagaagcgtggacggcgaccagggcctgggcatggagggcccctacgaggtgctgaaggacagcagcagccaggagaacatggtggaggactgcctgtacgagaccgtgaaggagatcaaggaggtggccgccgccgcccacctggagaagggccacagcggcaaggccaagagcaccagcgccagcaaggagctgcccggcccccagaccgagggcaaggccgagttcgccgagtacgccagcgtggacagaaacaagaagtgcagacagagcgtgaacgtggagagcatcctgggcaacagctgcgaccccgaggaggaggcccccccccccgtgcccgtgaagctgctggacgagaacgagaacctgcaggagaaggagggcggcgaggccgaggagagcgccaccgacaccaccagcgagaccaacaagagattcagcagcctgagctacaagagcagagaggaggaccccaccctgaccgaggaggagatcagcgccatgtacagcagcgtgaacaagcccggccagctggtgaacaagagcggccagagcctgaccgtgcccgagagcacctacaccagcatccagggcgacccccagagaagccccagcagctgcaacgacctgtacgccaccgtgaaggacttcgagaagacccccaacagcaccctgccccccgccggcagacccagcgaggagcccgagcccgactacgaggccatccagaccctgaacagagaggaggagaaggccaccctgggcaccaacggccaccacggcctggtgcccaaggagaacgactacgagagcatcagcgacctgcagcagggcagagacatcaccagactgtag

SEQ ID NO: 102460 - DNA, 8136 bp, synthetic construct
  misc_feature 1..8136: note = Description of Artificial Sequence: Synthetic coding sequence
  source 1..8136: mol_type = other DNA
atggccctggtgctggagatcttcaccctgctggccagcatctgctgggtgagcgccaacatcttcgagtaccaggtggacgcccagcccctgagaccctgcgagctgcagagagagaccgccttcctgaagcaggccgactacgtgccccagtgcgccgaggacggcagcttccagaccgtgcagtgccagaacgacggcagaagctgctggtgcgtgggcgccaacggcagcgaggtgctgggcagcagacagcccggcagacccgtggcctgcctgagcttctgccagctgcagaagcagcagatcctgctgagcggctacatcaacagcaccgacaccagctacctgccccagtgccaggacagcggcgactacgcccccgtgcagtgcgacgtgcagcaggtgcagtgctggtgcgtggacgccgagggcatggaggtgtacggcaccagacagctgggcagacccaagagatgccccagaagctgcgagatcagaaacagaagactgctgcacggcgtgggcgacaagagccccccccagtgcagcgccgagggcgagttcatgcccgtgcagtgcaagttcgtgaacaccaccgacatgatgatcttcgacctggtgcacagctacaacagattccccgacgccttcgtgaccttcagcagcttccagagaagattccccgaggtgagcggctactgccactgcgccgacagccagggcagagagctggccgagaccggcctggagctgctgctggacgagatctacgacaccatcttcgccggcctggacctgcccagcaccttcaccgagaccaccctgtacagaatcctgcagagaagattcctggccgtgcagagcgtgatcagcggcagattcagatgccccaccaagtgcgaggtggagagattcaccgccaccagcttcggccacccctacgtgcccagctgcagaagaaacggcgactaccaggccgtgcagtgccagaccgagggcccctgctggtgcgtggacgcccagggcaaggagatgcacggcaccagacagcagggcgagccccccagctgcgccgagggccagagctgcgccagcgagagacagcaggccctgagcagactgtacttcggcaccagcggctacttcagccagcacgacctgttcagcagccccgagaagagatgggccagccccagagtggccagattcgccaccagctgcccccccaccatcaaggagctgttcgtggacagcggcctgctgagacccatggtggagggccagagccagcagttcagcgtgagcgagaacctgctgaaggaggccatcagagccatcttccccagcagaggcctggccagactggccctgcagttcaccaccaaccccaagagactgcagcagaacctgttcggcggcaagttcctggtgaacgtgggccagttcaacctgagcggcgccctgggcaccagaggcaccttcaacttcagccagttcttccagcagctgggcctggccagcttcctgaacggcggcagacaggaggacctggccaagcccctgagcgtgggcctggacagcaacagcagcaccggcacccccgaggccgccaagaaggacggcaccatgaacaagcccaccgtgggcagcttcggcttcgagatcaacctgcaggagaaccagaacgccctgaagttcctggccagcctgctggagctgcccgagttcctgctgttcctgcagcacgccatcagcgtgcccgaggacgtggccagagacctgggcgacgtgatggagaccgtgctgagcagccagacctgcgagcagacccccgagagactgttcgtgcccagctgcaccaccgagggcagctacgaggacgtgcagtgcttcagcggcgagtgctggtgcgtgaacagctggggcaaggagctgcccggcagcagagtgagaggcggccagcccagatgccccaccgactgcgagaagcagagagccagaatgcagagcctgatgggcagccagcccgccggcagcaccctgttcgtgcccgcctgcaccagcgagggccacttcctgcccgtgcagtgcttcaacagcgagtgctactgcgtggacgccgagggccaggccatccccggcaccagaagcgccatcggcaagcccaagaagtgccccaccccctgccagctgcagagcgagcaggccttcctgagaaccgtgcaggccctgctgagcaacagcagcatgctgcccaccctgagcgacacctacatcccccagtgcagcaccgacggccagtggagacaggtgcagtgcaacggcccccccgagcaggtgttcgagctgtaccagagatgggaggcccagaacaagggccaggacctgacccccgccaagctgctggtgaagatcatgagctacagagaggccgccagcggcaacttcagcctgttcatccagagcctgtacgaggccggccagcaggacgtgttccccgtgctgagccagtaccccagcctgcaggacgtgcccctggccgccctggagggcaagagaccccagcccagagagaacatcctgctggagccctacctgttctggcagatcctgaacggccagctgagccagtaccccggcagctacagcgacttcagcacccccctggcccacttcgacctgagaaactgctggtgcgtggacgaggccggccaggagctggagggcatgagaagcgagcccagcaagctgcccacctgccccggcagctgcgaggaggccaagctgagagtgctgcagttcatcagagagaccgaggagatcgtgagcgccagcaacagcagcagattccccctgggcgagagcttcctggtggccaagggcatcagactgagaaacgaggacctgggcctgccccccctgttcccccccagagaggccttcgccgagcagttcctgagaggcagcgactacgccatcagactggccgcccagagcaccctgagcttctaccagagaagaagattcagccccgacgacagcgccggcgccagcgccctgctgagaagcggcccctacatgccccagtgcgacgccttcggcagctgggagcccgtgcagtgccacgccggcaccggccactgctggtgcgtggacgagaagggcggcttcatccccggcagcctgaccgccagaagcctgcagatcccccagtgccccaccacctgcgagaagagcagaaccagcggcctgctgagcagctggaagcaggccagaagccaggagaaccccagccccaaggacctgttcgtgcccgcctgcctggagaccggcgagtacgccagactgcaggccagcggcgccggcacctggtgcgtggaccccgccagcggcgaggagctgagacccggcagcagcagcagcgcccagtgccccagcctgtgcaacgtgctgaagagcggcgtgctgagcagaagagtgagccccggctacgtgcccgcctgcagagccgaggacggcggcttcagccccgtgcagtgcgaccaggcccagggcagctgctggtgcgtgatggacagcggcgaggaggtgcccggcaccagagtgaccggcggccagcccgcctgcgagagccccagatgccccctgcccttcaacgccagcgaggtggtgggcggcaccatcctgtgcgagaccatcagcggccccaccggcagcgccatgcagcagtgccagctgctgtgcagacagggcagctggagcgtgttcccccccggccccctgatctgcagcctggagagcggcagatgggagagccagctgccccagcccagagcctgccagagaccccagctgtggcagaccatccagacccagggccacttccagctgcagctgccccccggcaagatgtgcagcgccgactacgccgacctgctgcagaccttccaggtgttcatcctggacgagctgaccgccagaggcttctgccagatccaggtgaagaccttcggcaccctggtgagcatccccgtgtgcaacaacagcagcgtgcaggtgggctgcctgaccagagagagactgggcgtgaacgtgacctggaagagcagactggaggacatccccgtggccagcctgcccgacctgcacgacatcgagagagccctggtgggcaaggacctgctgggcagattcaccgacctgatccagagcggcagcttccagctgcacctggacagcaagaccttccccgccgagaccatcagattcctgcagggcgaccacttcggcaccagccccagaacctggttcggctgcagcgagggcttctaccaggtgctgaccagcgaggccagccaggacggcctgggctgcgtgaagtgccccgagggcagctacagccaggacgaggagtgcatcccctgccccgtgggcttctaccaggagcaggccggcagcctggcctgcgtgccctgccccgtgggcagaaccaccatcagcgccggcgccttcagccagacccacctgatgcagaagttcgagaaggtgcccgagagcaaggtgatcttcgacgccaacgcccccgtggccgtgagaagcaaggtgcccgacagcgagttccccgtgatgcagtgcctgaccgactgcaccgaggacgaggcctgcagcttcttcaccgtgagcaccaccgagcccgagatcagctgcgacttctacgcctggaccagcgacaacgtggcctgcatgaccagcgaccagaagagagacgccctgggcaacagcaaggccaccagcttcggcagcctgagatgccaggtgaaggtgagaagccacggccaggacagccccgccgtgtacctgaagaagggccagggcagcaccaccaccctgcagaagagattcgagcccaccggcttccagaacatgctgagcggcctgtacaaccccatcgtgttcagcgccagcggcgccaacctgaccgacgcccacctgttctgcctgctggcctgcgacagagacctgtgctgcgacggcttcgtgctgacccaggtgcagggcggcgccatcatctgcggcctgctgagcagccccagcgtgctgctgtgcaacgtgaaggactggatggaccccagcgaggcctgggccaacgccacctgccccggcgtgacctacgaccaggagagccaccaggtgatcctgagactgggcgaccaggagttcatcaagagcctgacccccctggagggcacccaggacaccttcaccaacttccagcaggtgtacctgtggaaggacagcgacatgggcagcagacccgagagcatgggctgcagaaaggacaccgtgcccagacccgccagccccaccgaggccggcctgaccaccgagctgttcagccccgtggacctgaaccaggtgatcgtgaacggcaaccagagcctgagcagccagaagcactggctgttcaagcacctgttcagcgcccagcaggccaacctgtggtgcctgagcagatgcgtgcaggagcacagcttctgccagctggccgagatcaccgagagcgccagcctgtacttcacctgcaccctgtaccccgaggcccaggtgtgcgacgacatcatggagagcaacgcccagggctgcagactgatcctgccccagatgcccaaggccctgttcagaaagaaggtgatcctggaggacaaggtgaagaacttctacaccagactgcccttccagaagctgatgggcatcagcatcagaaacaaggtgcccatgagcgagaagagcatcagcaacggcttcttcgagtgcgagagaagatgcgacgccgacccctgctgcaccggcttcggcttcctgaacgtgagccagctgaagggcggcgaggtgacctgcctgaccctgaacagcctgggcatccagatgtgcagcgaggagaacggcggcgcctggagaatcctggactgcggcagccccgacatcgaggtgcacacctaccccttcggctggtaccagaagcccatcgcccagaacaacgcccccagcttctgccccctggtggtgctgcccagcctgaccgagaaggtgagcctggacagctggcagagcctggccctgagcagcgtggtggtggaccccagcatcagacacttcgacgtggcccacgtgagcaccgccgccaccagcaacttcagcgccgtgagagacctgtgcctgagcgagtgcagccagcacgaggcctgcctgatcaccaccctgcagacccagcccggcgccgtgagatgcatgttctacgccgacacccagagctgcacccacagcctgcagggccagaactgcagactgctgctgagagaggaggccacccacatctacagaaagcccggcatcagcctgctgagctacgaggccagcgtgcccagcgtgcccatcagcacccacggcagactgctgggcagaagccaggccatccaggtgggcaccagctggaagcaggtggaccagttcctgggcgtgccctacgccgccccccccctggccgagagaagattccaggcccccgagcccctgaactggaccggcagctgggacgccagcaagcccagagccagctgctggcagcccggcaccagaaccagcaccagccccggcgtgagcgaggactgcctgtacctgaacgtgttcatcccccagaacgtggcccccaacgccagcgtgctggtgttcttccacaacaccatggacagagaggagagcgagggctggcccgccatcgacggcagcttcctggccgccgtgggcaacctgatcgtggtgaccgccagctacagagtgggcgtgttcggcttcctgagcagcggcagcggcgaggtgagcggcaactggggcctgctggaccaggtggccgccctgacctgggtgcagacccacatcagaggcttcggcggcgaccccagaagagtgagcctggccgccgacagaggcggcgccgacgtggccagcatccacctgctgaccgccagagccaccaacagccagctgttcagaagagccgtgctgatgggcggcagcgccctgagccccgccgccgtgatcagccacgagagagcccagcagcaggccatcgccctggccaaggaggtgagctgccccatgagcagcagccaggaggtggtgagctgcctgagacagaagcccgccaacgtgctgaacgacgcccagaccaagctgctggccgtgagcggccccttccactactggggccccgtgatcgacggccacttcctgagagagccccccgccagagccctgaagagaagcctgtgggtggaggtggacctgctgatcggcagcagccaggacgacggcctgatcaacagagccaaggccgtgaagcagttcgaggagagcagaggcagaaccagcagcaagaccgccttctaccaggccctgcagaacagcctgggcggcgaggacagcgacgccagagtggaggccgccgccacctggtactacagcctggagcacagcaccgacgactacgccagcttcagcagagccctggagaacgccaccagagactacttcatcatctgccccatcatcgacatggccagcgcctgggccaagagagccagaggcaacgtgttcatgtaccacgcccccgagaactacggccacggcagcctggagctgctggccgacgtgcagttcgccctgggcctgcccttctaccccgcctacgagggccagttcagcctggaggagaagagcctgagcctgaagatcatgcagtacttcagccacttcatcagaagcggcaaccccaactacccctacgagttcagcagaaaggtgcccaccttcgccaccccctggcccgacttcgtgcccagagccggcggcgagaactacaaggagttcagcgagctgctgcccaacagacagggcctgaagaaggccgactgcagcttctggagcaagtacatcagcagcctgaagaccagcgccgacggcgccaagggcggccagagcgccgagagcgaggaggaggagctgaccgccggcagcggcctgagagaggacctgctgagcctgcaggagcccggcagcaagacctacagcaagtag

SEQ ID NO: 102461 - DNA, 2664 bp, synthetic construct
  misc_feature 1..2664: note = Description of Artificial Sequence: Synthetic coding sequence
  source 1..2664: mol_type = other DNA
atggccctggtgctggagatcttcaccctgctggccagcatctgctgggtgagcgccaacatcttcgagtaccaggtggacgcccagcccctgagaccctgcgagctgcagagagagaccgccttcctgaagcaggccgactacgtgccccagtgcgccgaggacggcagcttccagaccgtgcagtgccagaacgacggcagaagctgctggtgcgtgggcgccaacggcagcgaggtgctgggcagcagacagcccggcagacccgtggcctgcctgagcttctgccagctgcagaagcagcagatcctgctgagcggctacatcaacagcaccgacaccagctacctgccccagtgccaggacagcggcgactacgcccccgtgcagtgcgacgtgcagcaggtgcagtgctggtgcgtggacgccgagggcatggaggtgtacggcaccagacagctgggcagacccaagagatgccccagaagctgcgagatcagaaacagaagactgctgcacggcgtgggcgacaagagccccccccagtgcagcgccgagggcgagttcatgcccgtgcagtgcaagttcgtgaacaccaccgacatgatgatcttcgacctggtgcacagctacaacagattccccgacgccttcgtgaccttcagcagcttccagagaagattccccgaggtgagcggctactgccactgcgccgacagccagggcagagagctggccgagaccggcctggagctgctgctggacgagatctacgacaccatcttcgccggcctggacctgcccagcaccttcaccgagaccaccctgtacagaatcctgcagagaagattcctggccgtgcagagcgtgatcagcggcagattcagatgccccaccaagtgcgaggtggagagattcaccgccaccagcttcggccacccctacgtgcccagctgcagaagaaacggcgactaccaggccgtgcagtgccagaccgagggcccctgctggtgcgtggacgcccagggcaaggagatgcacggcaccagacagcagggcgagccccccagctgcgccgagggccagagctgcgccagcgagagacagcaggccctgagcagactgtacttcggcaccagcggctacttcagccagcacgacctgttcagcagccccgagaagagatgggccagccccagagtggccagattcgccaccagctgcccccccaccatcaaggagctgttcgtggacagcggcctgctgagacccatggtggagggccagagccagcagttcagcgtgagcgagaacctgctgaaggaggccatcagagccatcttccccagcagaggcctggccagactggccctgcagttcaccaccaaccccaagagactgcagcagaacctgttcggcggcaagttcctggtgaacgtgggccagttcaacctgagcggcgccctgggcaccagaggcaccttcaacttcagccagttcttccagcagctgggcctggccagcttcctgaacggcggcagacaggaggacctggccaagcccctgagcgtgggcctggacagcaacagcagcaccggcacccccgaggccgccaagaaggacggcaccatgaacaagcccaccgtgggcagcttcggcttcgagatcaacctgcaggagaaccagaacgccctgaagttcctggccagcctgctggagctgcccgagttcctgctgttcctgcagcacgccatcagcgtgcccgaggacgtggccagagacctgggcgacgtgatggagaccgtgctgagcagccagacctgcgagcagacccccgagagactgttcgtgcccagctgcaccaccgagggcagctacgaggacgtgcagtgcttcagcggcgagtgctggtgcgtgaacagctggggcaaggagctgcccggcagcagagtgagaggcggccagcccagatgccccaccgactgcgagaagcagagagccagaatgcagagcctgatgggcagccagcccgccggcagcaccctgttcgtgcccgcctgcaccagcgagggccacttcctgcccgtgcagtgcttcaacagcgagtgctactgcgtggacgccgagggccaggccatccccggcaccagaagcgccatcggcaagcccaagaagtgccccaccccctgccagctgcagagcgagcaggccttcctgagaaccgtgcaggccctgctgagcaacagcagcatgctgcccaccctgagcgacacctacgagggccagttcagcctggaggagaagagcctgagcctgaagatcatgcagtacttcagccacttcatcagaagcggcaaccccaactacccctacgagttcagcagaaaggtgcccaccttcgccaccccctggcccgacttcgtgcccagagccggcggcgagaactacaaggagttcagcgagctgctgcccaacagacagggcctgaagaaggccgactgcagcttctggagcaagtacatcagcagcctgaagaccagcgccgacggcgccaagggcggccagagcgccgagagcgaggaggaggagctgaccgccggcagcggcctgagagaggacctgctgagcctgcaggagcccggcagcaagacctacagcaagtag

SEQ ID NO: 102462 - DNA, 3417 bp, synthetic construct
  misc_feature 1..3417: note = Description of Artificial Sequence: Synthetic coding sequence
  source 1..3417: mol_type = other DNA
atgatgcagaagttcgagaaggtgcccgagagcaaggtgatcttcgacgccaacgcccccgtggccgtgagaagcaaggtgcccgacagcgagttccccgtgatgcagtgcctgaccgactgcaccgaggacgaggcctgcagcttcttcaccgtgagcaccaccgagcccgagatcagctgcgacttctacgcctggaccagcgacaacgtggcctgcatgaccagcgaccagaagagagacgccctgggcaacagcaaggccaccagcttcggcagcctgagatgccaggtgaaggtgagaagccacggccaggacagccccgccgtgtacctgaagaagggcgccatcatctgcggcctgctgagcagccccagcgtgctgctgtgcaacgtgaaggactggatggaccccagcgaggcctgggccaacgccacctgccccggcgtgacctacgaccaggagagccaccaggtgatcctgagactgggcgaccaggagttcatcaagagcctgacccccctggagggcacccaggacaccttcaccaacttccagcaggtgtacctgtggaaggacagcgacatgggcagcagacccgagagcatgggctgcagaaaggacaccgtgcccagacccgccagccccaccgaggccggcctgaccaccgagctgttcagccccgtggacctgaaccaggtgatcgtgaacggcaaccagagcctgagcagccagaagcactggctgttcaagcacctgttcagcgcccagcaggccaacctgtggtgcctgagcagatgcgtgcaggagcacagcttctgccagctggccgagatcaccgagagcgccagcctgtacttcacctgcaccctgtaccccgaggcccaggtgtgcgacgacatcatggagagcaacgcccagggctgcagactgatcctgccccagatgcccaaggccctgttcagaaagaaggtgatcctggaggacaaggtgaagaacttctacaccagactgcccttccagaagctgatgggcatcagcatcagaaacaaggtgcccatgagcgagaagagcatcagcaacggcttcttcgagtgcgagagaagatgcgacgccgacccctgctgcaccggcttcggcttcctgaacgtgagccagctgaagggcggcgaggtgacctgcctgaccctgaacagcctgggcatccagatgtgcagcgaggagaacggcggcgcctggagaatcctggactgcggcagccccgacatcgaggtgcacacctaccccttcggctggtaccagaagcccatcgcccagaacaacgcccccagcttctgccccctggtggtgctgcccagcctgaccgagaaggtgagcctggacagctggcagagcctggccctgagcagcgtggtggtggaccccagcatcagacacttcgacgtggcccacgtgagcaccgccgccaccagcaacttcagcgccgtgagagacctgtgcctgagcgagtgcagccagcacgaggcctgcctgatcaccaccctgcagacccagcccggcgccgtgagatgcatgttctacgccgacacccagagctgcacccacagcctgcagggccagaactgcagactgctgctgagagaggaggccacccacatctacagaaagcccggcatcagcctgctgagctacgaggccagcgtgcccagcgtgcccatcagcacccacggcagactgctgggcagaagccaggccatccaggtgggcaccagctggaagcaggtggaccagttcctgggcgtgccctacgccgccccccccctggccgagagaagattccaggcccccgagcccctgaactggaccggcagctgggacgccagcaagcccagagccagctgctggcagcccggcaccagaaccagcaccagccccggcgtgagcgaggactgcctgtacctgaacgtgttcatcccccagaacgtggcccccaacgccagcgtgctggtgttcttccacaacaccatggacagagaggagagcgagggctggcccgccatcgacggcagcttcctggccgccgtgggcaacctgatcgtggtgaccgccagctacagagtgggcgtgttcggcttcctgagcagcggcagcggcgaggtgagcggcaactggggcctgctggaccaggtggccgccctgacctgggtgcagacccacatcagaggcttcggcggcgaccccagaagagtgagcctggccgccgacagaggcggcgccgacgtggccagcatccacctgctgaccgccagagccaccaacagccagctgttcagaagagccgtgctgatgggcggcagcgccctgagccccgccgccgtgatcagccacgagagagcccagcagcaggccatcgccctggccaaggaggtgagctgccccatgagcagcagccaggaggtggtgagctgcctgagacagaagcccgccaacgtgctgaacgacgcccagaccaagctgctggccgtgagcggccccttccactactggggccccgtgatcgacggccacttcctgagagagccccccgccagagccctgaagagaagcctgtgggtggaggtggacctgctgatcggcagcagccaggacgacggcctgatcaacagagccaaggccgtgaagcagttcgaggagagcagaggcagaaccagcagcaagaccgccttctaccaggccctgcagaacagcctgggcggcgaggacagcgacgccagagtggaggccgccgccacctggtactacagcctggagcacagcaccgacgactacgccagcttcagcagagccctggagaacgccaccagagactacttcatcatctgccccatcatcgacatggccagcgcctgggccaagagagccagaggcaacgtgttcatgtaccacgcccccgagaactacggccacggcagcctggagctgctggccgacgtgcagttcgccctgggcctgcccttctaccccgcctacgagggccagttcagcctggaggagaagagcctgagcctgaagatcatgcagtacttcagccacttcatcagaagcggcaaccccaactacccctacgagttcagcagaaaggtgcccaccttcgccaccccctggcccgacttcgtgcccagagccggcggcgagaactacaaggagttcagcgagctgctgcccaacagacagggcctgaagaaggccgactgcagcttctggagcaagtacatcagcagcctgaagaccagcgccgacggcgccaagggcggccagagcgccgagagcgaggaggaggagctgaccgccggcagcggcctgagagaggacctgctgagcctgcaggagcccggcagcaagacctacagcaagtag

SEQ ID NO: 102463 - DNA, 4725 bp, synthetic construct
  misc_feature 1..4725: note = Description of Artificial Sequence: Synthetic coding sequence
  source 1..4725: mol_type = other DNA
atccccagaaagcccatcagcaagagacccgtgagacccagcctgcccagaagccccagatgccccctgcccttcaacgccagcgaggtggtgggcggcaccatcctgtgcgagaccatcagcggccccaccggcagcgccatgcagcagtgccagctgctgtgcagacagggcagctggagcgtgttcccccccggccccctgatctgcagcctggagagcggcagatgggagagccagctgccccagcccagagcctgccagagaccccagctgtggcagaccatccagacccagggccacttccagctgcagctgccccccggcaagatgtgcagcgccgactacgccgacctgctgcagaccttccaggtgttcatcctggacgagctgaccgccagaggcttctgccagatccaggtgaagaccttcggcaccctggtgagcatccccgtgtgcaacaacagcagcgtgcaggtgggctgcctgaccagagagagactgggcgtgaacgtgacctggaagagcagactggaggacatccccgtggccagcctgcccgacctgcacgacatcgagagagccctggtgggcaaggacctgctgggcagattcaccgacctgatccagagcggcagcttccagctgcacctggacagcaagaccttccccgccgagaccatcagattcctgcagggcgaccacttcggcaccagccccagaacctggttcggctgcagcgagggcttctaccaggtgctgaccagcgaggccagccaggacggcctgggctgcgtgaagtgccccgagggcagctacagccaggacgaggagtgcatcccctgccccgtgggcttctaccaggagcaggccggcagcctggcctgcgtgccctgccccgtgggcagaaccaccatcagcgccggcgccttcagccagacccactgcgtgaccgactgccagagaaacgaggccggcctgcagtgcgaccagaacggccagtacagagccagccagaaggacagaggcagcggcaaggccttctgcgtggacggcgagggcagaagactgccctggtgggagaccgaggcccccctggaggacagccagtgcctgatgatgcagaagttcgagaaggtgcccgagagcaaggtgatcttcgacgccaacgcccccgtggccgtgagaagcaaggtgcccgacagcgagttccccgtgatgcagtgcctgaccgactgcaccgaggacgaggcctgcagcttcttcaccgtgagcaccaccgagcccgagatcagctgcgacttctacgcctggaccagcgacaacgtggcctgcatgaccagcgaccagaagagagacgccctgggcaacagcaaggccaccagcttcggcagcctgagatgccaggtgaaggtgagaagccacggccaggacagccccgccgtgtacctgaagaagggccagggcagcaccaccaccctgcagaagagattcgagcccaccggcttccagaacatgctgagcggcctgtacaaccccatcgtgttcagcgccagcggcgccaacctgaccgacgcccacctgttctgcctgctggcctgcgacagagacctgtgctgcgacggcttcgtgctgacccaggtgcagggcggcgccatcatctgcggcctgctgagcagccccagcgtgctgctgtgcaacgtgaaggactggatggaccccagcgaggcctgggccaacgccacctgccccggcgtgacctacgaccaggagagccaccaggtgatcctgagactgggcgaccaggagttcatcaagagcctgacccccctggagggcacccaggacaccttcaccaacttccagcaggtgtacctgtggaaggacagcgacatgggcagcagacccgagagcatgggctgcagaaaggacaccgtgcccagacccgccagccccaccgaggccggcctgaccaccgagctgttcagccccgtggacctgaaccaggtgatcgtgaacggcaaccagagcctgagcagccagaagcactggctgttcaagcacctgttcagcgcccagcaggccaacctgtggtgcctgagcagatgcgtgcaggagcacagcttctgccagctggccgagatcaccgagagcgccagcctgtacttcacctgcaccctgtaccccgaggcccaggtgtgcgacgacatcatggagagcaacgcccagggctgcagactgatcctgccccagatgcccaaggccctgttcagaaagaaggtgatcctggaggacaaggtgaagaacttctacaccagactgcccttccagaagctgatgggcatcagcatcagaaacaaggtgcccatgagcgagaagagcatcagcaacggcttcttcgagtgcgagagaagatgcgacgccgacccctgctgcaccggcttcggcttcctgaacgtgagccagctgaagggcggcgaggtgacctgcctgaccctgaacagcctgggcatccagatgtgcagcgaggagaacggcggcgcctggagaatcctggactgcggcagccccgacatcgaggtgcacacctaccccttcggctggtaccagaagcccatcgcccagaacaacgcccccagcttctgccccctggtggtgctgcccagcctgaccgagaaggtgagcctggacagctggcagagcctggccctgagcagcgtggtggtggaccccagcatcagacacttcgacgtggcccacgtgagcaccgccgccaccagcaacttcagcgccgtgagagacctgtgcctgagcgagtgcagccagcacgaggcctgcctgatcaccaccctgcagacccagcccggcgccgtgagatgcatgttctacgccgacacccagagctgcacccacagcctgcagggccagaactgcagactgctgctgagagaggaggccacccacatctacagaaagcccggcatcagcctgctgagctacgaggccagcgtgcccagcgtgcccatcagcacccacggcagactgctgggcagaagccaggccatccaggtgggcaccagctggaagcaggtggaccagttcctgggcgtgccctacgccgccccccccctggccgagagaagattccaggcccccgagcccctgaactggaccggcagctgggacgccagcaagcccagagccagctgctggcagcccggcaccagaaccagcaccagccccggcgtgagcgaggactgcctgtacctgaacgtgttcatcccccagaacgtggcccccaacgccagcgtgctggtgttcttccacaacaccatggacagagaggagagcgagggctggcccgccatcgacggcagcttcctggccgccgtgggcaacctgatcgtggtgaccgccagctacagagtgggcgtgttcggcttcctgagcagcggcagcggcgaggtgagcggcaactggggcctgctggaccaggtggccgccctgacctgggtgcagacccacatcagaggcttcggcggcgaccccagaagagtgagcctggccgccgacagaggcggcgccgacgtggccagcatccacctgctgaccgccagagccaccaacagccagctgttcagaagagccgtgctgatgggcggcagcgccctgagccccgccgccgtgatcagccacgagagagcccagcagcaggccatcgccctggccaaggaggtgagctgccccatgagcagcagccaggaggtggtgagctgcctgagacagaagcccgccaacgtgctgaacgacgcccagaccaagctgctggccgtgagcggccccttccactactggggccccgtgatcgacggccacttcctgagagagccccccgccagagccctgaagagaagcctgtgggtggaggtggacctgctgatcggcagcagccaggacgacggcctgatcaacagagccaaggccgtgaagcagttcgaggagagcagaggcagaaccagcagcaagaccgccttctaccaggccctgcagaacagcctgggcggcgaggacagcgacgccagagtggaggccgccgccacctggtactacagcctggagcacagcaccgacgactacgccagcttcagcagagccctggagaacgccaccagagactacttcatcatctgccccatcatcgacatggccagcgcctgggccaagagagccagaggcaacgtgttcatgtaccacgcccccgagaactacggccacggcagcctggagctgctggccgacgtgcagttcgccctgggcctgcccttctaccccgcctacgagggccagttcagcctggaggagaagagcctgagcctgaagatcatgcagtacttcagccacttcatcagaagcggcaaccccaactacccctacgagttcagcagaaaggtgcccaccttcgccaccccctggcccgacttcgtgcccagagccggcggcgagaactacaaggagttcagcgagctgctgcccaacagacagggcctgaagaaggccgactgcagcttctggagcaagtacatcagcagcctgaagaccagcgccgacggcgccaagggcggccagagcgccgagagcgaggaggaggagctgaccgccggcagcggcctgagagaggacctgctgagcctgcaggagcccggcagcaagacctacagcaagtag

SEQ ID NO: 102464 - DNA, 1356 bp, synthetic construct
  misc_feature 1..1356: note = Description of Artificial Sequence: Synthetic coding sequence
  source 1..1356: mol_type = other DNA
atggagcagaagcccagcaaggtggagtgcggcagcgaccccgaggagaacagcgccagaagccccgacggcaagagaaagagaaagaacggccagtgcagcctgaagaccagcatgagcggctacatccccagctacctggacaaggacgagcagtgcgtggtgtgcggcgacaaggccaccggctaccactacagatgcatcacctgcgagggctgcaagggcttcttcagaagaaccatccagaagaacctgcaccccacctacagctgcaagtacgacagctgctgcgtgatcgacaagatcaccagaaaccagtgccagctgtgcagattcaagaagtgcatcgccgtgggcatggccatggacctggtgctggacgacagcaagagagtggccaagagaaagctgatcgagcagaacagagagagaagaagaaaggaggagatgatcagaagcctgcagcagagacccgagcccacccccgaggagtgggacctgatccacatcgccaccgaggcccacagaagcaccaacgcccagggcagccactggaagcagagaagaaagttcctgcccgacgacatcggccagagccccatcgtgagcatgcccgacggcgacaaggtggacctggaggccttcagcgagttcaccaagatcatcacccccgccatcaccagagtggtggacttcgccaagaagctgcccatgttcagcgagctgccctgcgaggaccagatcatcctgctgaagggctgctgcatggagatcatgagcctgagagccgccgtgagatacgaccccgagagcgacaccctgaccctgagcggcgagatggccgtgaagagagagcagctgaagaacggcggcctgggcgtggtgagcgacgccatcttcgagctgggcaagagcctgagcgccttcaacctggacgacaccgaggtggccctgctgcaggccgtgctgctgatgagcaccgacagaagcggcctgctgtgcgtggacaagatcgagaagagccaggaggcctacctgctggccttcgagcactacgtgaaccacagaaagcacaacatcccccacttctggcccaagctgctgatgaagggcccccaggtgagacagctggagcagcagctgggcgaggccggcagcctgcagggccccgtgctgcagcaccagagccccaagagcccccagcagagactgctggagctgctgcacagaagcggcatcctgcacgccagagccgtgtgcggcgaggacgacagcagcgaggccgacagccccagcagcagcgaggaggagcccgaggtgtgcgaggacctggccggcaacgccgccagcccctag

SEQ ID NO: 102465 - DNA, 5940 bp, synthetic construct
  misc_feature 1..5940: note = Description of Artificial Sequence: Synthetic coding sequence
  source 1..5940: mol_type = other DNA
atgagcagctggctgggcggcctgggcagcggcctgggccagagcctgggccaggtgggcggcagcctggccagcctgaccggccagatcagcaacttcaccaaggacatgctgatggagggcaccgaggaggtggaggccgagctgcccgacagcagaaccaaggagatcgaggccatccacgccatcctgagaagcgagaacgagagactgaagaagctgtgcaccgacctggaggagaagcacgaggccagcgagatccagatcaagcagcagagcaccagctacagaaaccagctgcagcagaaggaggtggagatcagccacctgaaggccagacagatcgccctgcaggaccagctgctgaagctgcagagcgccgcccagagcgtgcccagcggcgccggcgtgcccgccaccaccgccagcagcagcttcgcctacggcatcagccaccaccccagcgccttccacgacgacgacatggacttcggcgacatcatcagcagccagcaggagatcaacagactgagcaacgaggtgagcagactggagagcgaggtgggccactggagacacatcgcccagaccagcaaggcccagggcaccgacaacagcgaccagagcgagatctgcaagctgcagaacatcatcaaggagctgaagcagaacagaagccaggagatcgacgaccaccagcacgagatgagcgtgctgcagaacgcccaccagcagaagctgaccgagatcagcagaagacacagagaggagctgagcgactacgaggagagaatcgaggagctggagaacctgctgcagcagggcggcagcggcgtgatcgagaccgacctgagcaagatctacgagatgcagaagaccatccaggtgctgcagatcgagaaggtggagagcaccaagaagatggagcagctggaggacaagatcaaggacatcaacaagaagctgagcagcgccgagaacgacagagacatcctgagaagagagcaggagcagctgaacgtggagaagagacagatcatggaggagtgcgagaacctgaagctggagtgcagcaagctgcagcccagcgccgtgaagcagagcgacaccatgaccgagaaggagagaatcctggcccagagcgccagcgtggaggaggtgttcagactgcagcaggccctgagcgacgccgagaacgagatcatgagactgagcagcctgaaccaggacaacagcctggccgaggacaacctgaagctgaagatgagaatcgaggtgctggagaaggagaagagcctgctgagccaggagaaggaggagctgcagatgagcctgctgaagctgaacaacgagtacgaggtgatcaagagcaccgccaccagagacatcagcctggacagcgagctgcacgacctgagactgaacctggaggccaaggagcaggagctgaaccagagcatcagcgagaaggagaccctgatcgccgagatcgaggagctggacagacagaaccaggaggccaccaagcacatgatcctgatcaaggaccagctgagcaagcagcagaacgagggcgacagcatcatcagcaagctgaagcaggacctgaacgacgagaagaagagagtgcaccagctggaggacgacaagatggacatcaccaaggagctggacgtgcagaaggagaagctgatccagagcgaggtggccctgaacgacctgcacctgaccaagcagaagctggaggacaaggtggagaacctggtggaccagctgaacaagagccaggagagcaacgtgagcatccagaaggagaacctggagctgaaggagcacatcagacagaacgaggaggagctgagcagaatcagaaacgagctgatgcagagcctgaaccaggacagcaacagcaacttcaaggacaccctgctgaaggagagagaggccgaggtgagaaacctgaagcagaacctgagcgagctggagcagctgaacgagaacctgaagaaggtggccttcgacgtgaagatggagaacgagaagctggtgctggcctgcgaggacgtgagacaccagctggaggagtgcctggccggcaacaaccagctgagcctggagaagaacaccatcgtggagaccctgaagatggagaagggcgagatcgaggccgagctgtgctgggccaagaagagactgctggaggaggccaacaagtacgagaagaccatcgaggagctgagcaacgccagaaacctgaacaccagcgccctgcagctggagcacgagcacctgatcaagctgaaccagaagaaggacatggagatcgccgagctgaagaagaacatcgagcagatggacaccgaccacaaggagaccaaggacgtgctgagcagcagcctggaggagcagaagcagctgacccagctgatcaacaagaaggagatcttcatcgagaagctgaaggagagaagcagcaagctgcaggaggagctggacaagtacagccaggccctgagaaagaacgagatcctgagacagaccatcgaggagaaggacagaagcctgggcagcatgaaggaggagaacaaccacctgcaggaggagctggagagactgagagaggagcagagcagaaccgcccccgtggccgaccccaagaccctggacagcgtgaccgagctggccagcgaggtgagccagctgaacaccatcaaggagcacctggaggaggagatcaagcaccaccagaagatcatcgaggaccagaaccagagcaagatgcagctgctgcagagcctgcaggagcagaagaaggagatggacgagttcagataccagcacgagcagatgaacgccacccacacccagctgttcctggagaaggacgaggagatcaagagcctgcagaagaccatcgagcagatcaagacccagctgcacgaggagagacaggacatccagaccgacaacagcgacatcttccaggagaccaaggtgcagagcctgaacatcgagaacggcagcgagaagcacgacctgagcaaggccgagaccgagagactggtgaagggcatcaaggagagagagctggagatcaagctgctgaacgagaagaacatcagcctgaccaagcagatcgaccagctgagcaaggacgaggtgggcaagctgacccagatcatccagcagaaggacctggagatccaggccctgcacgccagaatcagcagcaccagccacacccaggacgtggtgtacctgcagcagcagctgcaggcctacgccatggagagagagaaggtgttcgccgtgctgaacgagaagaccagagagaacagccacctgaagaccgagtaccacaagatgatggacatcgtggccgccaaggaggccgccctgatcaagctgcaggacgagaacaagaagctgagcaccagattcgagagcagcggccaggacatgttcagagagaccatccagaacctgagcagaatcatcagagagaaggacatcgagatcgacgccctgagccagaagtgccagaccctgctggccgtgctgcagaccagcagcaccggcaacgaggccggcggcgtgaacagcaaccagttcgaggagctgctgcaggagagagacaagctgaagcagcaggtgaagaagatggaggagtggaagcagcaggtgatgaccaccgtgcagaacatgcagcacgagagcgcccagctgcaggaggagctgcaccagctgcaggcccaggtgctggtggacagcgacaacaacagcaagctgcaggtggactacaccggcctgatccagagctacgagcagaacgagaccaagctgaagaacttcggccaggagctggcccaggtgcagcacagcatcggccagctgtgcaacaccaaggacctgctgctgggcaagctggacatcatcagcccccagctgagcagcgccagcctgctgaccccccagagcgccgagtgcctgagagccagcaagagcgaggtgctgagcgagagcagcgagctgctgcagcaggagctggaggagctgagaaagagcctgcaggagaaggacgccaccatcagaaccctgcaggagaacaaccacagactgagcgacagcatcgccgccaccagcgagctggagagaaaggagcacgagcagaccgacagcgagatcaagcagctgaaggagaagcaggacgtgctgcagaagctgctgaaggagaaggacctgctgatcaaggccaagagcgaccagctgctgagcagcaacgagaacttcaccaacaaggtgaacgagaacgagctgctgagacaggccgtgaccaacctgaaggagagaatcctgatcctggagatggacatcggcaagctgaagggcgagaacgagaagatcgtggagacctacagaggcaaggagaccgagtaccaggccctgcaggagaccaacatgaagttcagcatgatgctgagagagaaggagttcgagtgccacagcatgaaggagaaggccctggccttcgagcagctgctgaaggagaaggagcagggcaagaccggcgagctgaaccagctgctgaacgccgtgaagagcatgcaggagaagaccgtggtgttccagcaggagagagaccaggtgatgctggccctgaagcagaagcagatggagaacaccgccctgcagaacgaggtgcagagactgagagacaaggagttcagaagcaaccaggagctggagagactgagaaaccacctgctggagagcgaggacagctacaccagagaggccctggccgccgaggacagagaggccaagctgagaaagaaggtgaccgtgctggaggagaagctggtgagcagcagcaacgccatggagaacgccagccaccaggccagcgtgcaggtggagagcctgcaggagcagctgaacgtggtgagcaagcagagagacgagaccgccctgcagctgagcgtgagccaggagcaggtgaagcagtacgccctgagcctggccaacctgcagatggtgctggagcacttccagcaggaggagaaggccatgtacagcgccgagctggagaagcagaagcagctgatcgccgagtggaagaagaacgccgagaacctggagggcaaggtgatcagcctgcaggagtgcctggacgaggccaacgccgccctggacagcgccagcagactgaccgagcagctggacgtgaaggaggagcagatcgaggagctgaagagacagaacgagctgagacaggagatgctggacgacgtgcagaagaagctgatgagcctggccaacagcagcgagggcaaggtggacaaggtgctgatgagaaacctgttcatcggccacttccacacccccaagaaccagagacacgaggtgctgagactgatgggcagcatcctgggcgtgagaagagaggagatggagcagctgttccacgacgaccagggcggcgtgaccagatggatgaccggctggctgggcggcggcagcaagagcgtgcccaacacccccctgagacccaaccagcagagcgtggtgaacagcagcttcagcgagctgttcgtgaagttcctggagaccgagagccaccccagcatccccccccccaagctgagcgtgcacgacatgaagcccctggacagccccggcagaagaaagagagacaccaacgcccccgagagcttcaaggacaccgccgagagcagaagcggcagaagaaccgacgtgaaccccttcctggcccccagaagcgccgccgtgcccctgatcaaccccgccggcctgggccccggcggccccggccacctgctgctgaagcccatcagcgacgtgctgcccaccttcacccccctgcccgccctgcccgacaacagcgccggcgtggtgctgaaggacctgctgaagcagtag

SEQ ID NO: 102466 - DNA, 5148 bp, synthetic construct
  misc_feature 1..5148: note = Description of Artificial Sequence: Synthetic coding sequence
  source 1..5148: mol_type = other DNA
atgagcgtgctgcagaacgcccaccagcagaagctgaccgagatcagcagaagacacagagaggagctgagcgactacgaggagagaatcgaggagctggagaacctgctgcagcagggcggcagcggcgtgatcgagaccgacctgagcaagatctacgagatgcagaagaccatccaggtgctgcagatcgagaaggtggagagcaccaagaagatggagcagctggaggacaagatcaaggacatcaacaagaagctgagcagcgccgagaacgacagagacatcctgagaagagagcaggagcagctgaacgtggagaagagacagatcatggaggagtgcgagaacctgaagctggagtgcagcaagctgcagcccagcgccgtgaagcagagcgacaccatgaccgagaaggagagaatcctggcccagagcgccagcgtggaggaggtgttcagactgcagcaggccctgagcgacgccgagaacgagatcatgagactgagcagcctgaaccaggaggagctgcagatgagcctgctgaagctgaacaacgagtacgaggtgatcaagagcaccgccaccagagacatcagcctggacagcgagctgcacgacctgagactgaacctggaggccaaggagcaggagctgaaccagagcatcagcgagaaggagaccctgatcgccgagatcgaggagctggacagacagaaccaggaggccaccaagcacatgatcctgatcaaggaccagctgagcaagcagcagaacgagggcgacagcatcatcagcaagctgaagcaggacctgaacgacgagaagaagagagtgcaccagctggaggacgacaagatggacatcaccaaggagctggacgtgcagaaggagaagctgatccagagcgaggtggccctgaacgacctgcacctgaccaagcagaagctggaggacaaggtggagaacctggtggaccagctgaacaagagccaggagagcaacgtgagcatccagaaggagaacctggagctgaaggagcacatcagacagaacgaggaggagctgagcagaatcagaaacgagctgatgcagagcctgaaccaggacagcaacagcaacttcaaggacaccctgctgaaggagagagaggccgaggtgagaaacctgaagcagaacctgagcgagctggagcagctgaacgagaacctgaagaaggtggccttcgacgtgaagatggagaacgagaagctggtgctggcctgcgaggacgtgagacaccagctggaggagtgcctggccggcaacaaccagctgagcctggagaagaacaccatcgtggagaccctgaagatggagaagggcgagatcgaggccgagctgtgctgggccaagaagagactgctggaggaggccaacaagtacgagaagaccatcgaggagctgagcaacgccagaaacctgaacaccagcgccctgcagctggagcacgagcacctgatcaagctgaaccagaagaaggacatggagatcgccgagctgaagaagaacatcgagcagatggacaccgaccacaaggagaccaaggacgtgctgagcagcagcctggaggagcagaagcagctgacccagctgatcaacaagaaggagatcttcatcgagaagctgaaggagagaagcagcaagctgcaggaggagctggacaagtacagccaggccctgagaaagaacgagatcctgagacagaccatcgaggagaaggacagaagcctgggcagcatgaaggaggagaacaaccacctgcaggaggagctggagagactgagagaggagcagagcagaaccgcccccgtggccgaccccaagaccctggacagcgtgaccgagctggccagcgaggtgagccagctgaacaccatcaaggagcacctggaggaggagatcaagcaccaccagaagatcatcgaggaccagaaccagagcaagatgcagctgctgcagagcctgcaggagcagaagaaggagatggacgagttcagataccagcacgagcagatgaacgccacccacacccagctgttcctggagaaggacgaggagatcaagagcctgcagaagaccatcgagcagatcaagacccagctgcacgaggagagacaggacatccagaccgacaacagcgacatcttccaggagaccaaggtgcagagcctgaacatcgagaacggcagcgagaagcacgacctgagcaaggccgagaccgagagactggtgaagggcatcaaggagagagagctggagatcaagctgctgaacgagaagaacatcagcctgaccaagcagatcgaccagctgagcaaggacgaggtgggcaagctgacccagatcatccagcagaaggacctggagatccaggccctgcacgccagaatcagcagcaccagccacacccaggacgtggtgtacctgcagcagcagctgcaggcctacgccatggagagagagaaggtgttcgccgtgctgaacgagaagaccagagagaacagccacctgaagaccgagtaccacaagatgatggacatcgtggccgccaaggaggccgccctgatcaagctgcaggacgagaacaagaagctgagcaccagattcgagagcagcggccaggacatgttcagagagaccatccagaacctgagcagaatcatcagagagaaggacatcgagatcgacgccctgagccagaagtgccagaccctgctggccgtgctgcagaccagcagcaccggcaacgaggccggcggcgtgaacagcaaccagttcgaggagctgctgcaggagagagacaagctgaagcagcaggtgaagaagatggaggagtggaagcagcaggtgatgaccaccgtgcagaacatgcagcacgagagcgcccagctgcaggaggagctgcaccagctgcaggcccaggtgctggtggacagcgacaacaacagcaagctgcaggtggactacaccggcctgatccagagctacgagcagaacgagaccaagctgaagaacttcggccaggagctggcccaggtgcagcacagcatcggccagctgtgcaacaccaaggacctgctgctgggcaagctggacatcatcagcccccagctgagcagcgccagcctgctgaccccccagagcgccgagtgcctgagagccagcaagagcgaggtgctgagcgagagcagcgagctgctgcagcaggagctggaggagctgagaaagagcctgcaggagaaggacgccaccatcagaaccctgcaggagaacaaccacagactgagcgacagcatcgccgccaccagcgagctggagagaaaggagcacgagcagaccgacagcgagatcaagcagctgaaggagaagcaggacgtgctgcagaagctgctgaaggagaaggacctgctgatcaaggccaagagcgaccagctgctgagcagcaacgagaacttcaccaacaaggtgaacgagaacgagctgctgagacaggccgtgaccaacctgaaggagagaatcctgatcctggagatggacatcggcaagctgaagggcgagaacgagaagatcgtggagacctacagaggcaaggagaccgagtaccaggccctgcaggagaccaacatgaagttcagcatgatgctgagagagaaggagttcgagtgccacagcatgaaggagaaggccctggccttcgagcagctgctgaaggagaaggagcagggcaagaccggcgagctgaaccagctgctgaacgccgtgaagagcatgcaggagaagaccgtggtgttccagcaggagagagaccaggtgatgctggccctgaagcagaagcagatggagaacaccgccctgcagaacgaggtgcagagactgagagacaaggagttcagaagcaaccaggagctggagagactgagaaaccacctgctggagagcgaggacagctacaccagagaggccctggccgccgaggacagagaggccaagctgagaaagaaggtgaccgtgctggaggagaagctggtgagcagcagcaacgccatggagaacgccagccaccaggccagcgtgcaggtggagagcctgcaggagcagctgaacgtggtgagcaagcagagagacgagaccgccctgcagctgagcgtgagccaggagcaggtgaagcagtacgccctgagcctggccaacctgcagatggtgctggagcacttccagcaggaggagaaggccatgtacagcgccgagctggagaagcagaagcagctgatcgccgagtggaagaagaacgccgagaacctggagggcaaggtgatcagcctgcaggagtgcctggacgaggccaacgccgccctggacagcgccagcagactgaccgagcagctggacgtgaaggaggagcagatcgaggagctgaagagacagaacgagctgagacaggagatgctggacgacgtgcagaagaagctgatgagcctggccaacagcagcgagggcaaggtggacaaggtgctgatgagaaacctgttcatcggccacttccacacccccaagaaccagagacacgaggtgctgagactgatgggcagcatcctgggcgtgagaagagaggagatggagcagctgttccacgacgaccagggcggcgtgaccagatggatgaccggctggctgggcggcggcagcaagagcgtgcccaacacccccctgagacccaaccagcagagcgtggtgaacagcagcttcagcgagctgttcgtgaagttcctggagaccgagagccaccccagcatccccccccccaagctgagcgtgcacgacatgaagcccctggacagccccggcagaagaaagagagacaccaacgcccccgagagcttcaaggacaccgccgagagcagaagcggcagaagaaccgacgtgaaccccttcctggcccccagaagcgccgccgtgcccctgatcaaccccgccggcctgggccccggcggccccggccacctgctgctgaagcccatcagcgacgtgctgcccaccttcacccccctgcccgccctgcccgacaacagcgccggcgtggtgctgaaggacctgctgaagcagtag

SEQ ID NO: 102467 - DNA, 5979 bp, synthetic construct
  misc_feature 1..5979: note = Description of Artificial Sequence: Synthetic coding sequence
  source 1..5979: mol_type = other DNA
atgagcaacagacccaacaacaaccccggcggcagcctgagaagaagccagagaaacaccgccggcgcccagccccaggacgacagcatcggcggcagaagctgcagcagcagcagcgccgtgatcgtgccccagcccgaggaccccgacagagccaacaccagcgagagacagaagaccggccaggtgcccaagaaggacaacagcagaggcgtgaagagaagcgccagccccgactacaacagaaccaacagccccagcagcgccaagaagcccaaggccctgcagcacaccgagagccccagcgagaccaacaagccccacagcaagagcaagaagagacacctggaccaggagcagcagctgaagagcgcccagagccccagcaccagcaaggcccacaccagaaagagcggcgccaccggcggcagcagaagccagaagagaaagagaaccgagagcagctgcgtgaagagcggcagcggcagcgagagcaccggcgccgaggagagaagcgccaagcccaccaagctggccagcaagagcgccaccagcgccaaggccggctgcagcaccatcaccgacagcagcagcgccgccagcaccagcagcagcagcagcgccgtggccagcgccagcagcaccgtgccccccggcgccagagtgaagcagggcaaggaccagaacaaggccagaagaagcagaagcgccagcagccccagccccagaagaagcagcagagagaaggagcagagcaagaccggcggcagcagcaagttcgactgggccgccagattcagccccaaggtgagcctgcccaagaccaagctgagcctgcccggcagcagcaagagcgagaccagcaagcccggccccagcggcctgcaggccaagctggccagcctgagaaagagcaccaagaagagaagcgagagcccccccgccgagctgcccagcctgagaagaagcaccagacagaagaccaccggcagctgcgccagcaccagcagaagaggcagcggcctgggcaagagaggcgccgccgaggccagaagacaggagaagatggccgaccccgagagcaaccaggaggccgtgaacagcagcgccgccagaaccgacgaggccccccagggcgccgccggcgccgtgggcatgaccaccagcggcgagagcgagagcgacgacagcgagatgggcagactgcaggccctgctggaggccagaggcctgcccccccacctgttcggccccctgggccccagaatgagccagctgttccacagaaccatcggcagcggcgccagcagcaaggcccagcagctgctgcagggcctgcaggccagcgacgagagccagcagctgcaggccgtgatcgagatgtgccagctgctggtgatgggcaacgaggagaccctgggcggcttccccgtgaagagcgtggtgcccgccctgatcaccctgctgcagatggagcacaacttcgacatcatgaaccacgcctgcagagccctgacctacatgatggaggccctgcccagaagcagcgccgtggtggtggacgccatccccgtgttcctggagaagctgcaggtgatccagtgcatcgacgtggccgagcaggccctgaccgccctggagatgctgagcagaagacacagcaaggccatcctgcaggccggcggcctggccgactgcctgctgtacctggagttcttcagcatcaacgcccagagaaacgccctggccatcgccgccaactgctgccagagcatcacccccgacgagttccacttcgtggccgacagcctgcccctgctgacccagagactgacccaccaggacaagaagagcgtggagagcacctgcctgtgcttcgccagactggtggacaacttccagcacgaggagaacctgctgcagcaggtggccagcaaggacctgctgaccaacgtgcagcagctgctggtggtgaccccccccatcctgagcagcggcatgttcatcatggtggtgagaatgttcagcctgatgtgcagcaactgccccaccctggccgtgcagctgatgaagcagaacatcgccgagaccctgcacttcctgctgtgcggcgccagcaacggcagctgccaggagcagatcgacctggtgcccagaagcccccaggagctgtacgagctgaccagcctgatctgcgagctgatgccctgcctgcccaaggagggcatcttcgccgtggacaccatgctgaagaagggcaacgcccagaacaccgacggcgccatctggcagtggagagacgacagaggcctgtggcacccctacaacagaatcgacagcagaatcatcgagcagatcaacgaggacaccggcaccgccagagccatccagagaaagcccaaccccctggccaacagcaacaccagcggctacagcgagagcaagaaggacgacgccagagcccagctgatgaaggaggaccccgagctggccaagagcttcatcaagaccctgttcggcgtgctgtacgaggtgtacagcagcagcgccggccccgccgtgagacacaagtgcctgagagccatcctgagaatcatctacttcgccgacgccgagctgctgaaggacgtgctgaagaaccacgccgtgagcagccacatcgccagcatgctgagcagccaggacctgaagatcgtggtgggcgccctgcagatggccgagatcctgatgcagaagctgcccgacatcttcagcgtgtacttcagaagagagggcgtgatgcaccaggtgaagcacctggccgagagcgagagcctgctgaccagcccccccaaggcctgcaccaacggcagcggcagcatgggcagcaccaccagcgtgagcagcggcaccgccaccgccgccacccacgccgccgccgacctgggcagccccagcctgcagcacagcagagacgacagcctggacctgagcccccagggcagactgagcgacgtgctgaagagaaagagactgcccaagagaggccccagaagacccaagtacagcccccccagagacgacgacaaggtggacaaccaggccaagagccccaccaccacccagagccccaagagcagcttcctggccagcctgaaccccaagacctggggcagactgagcacccagagcaacagcaacaacatcgagcccgccagaaccgccggcggcagcggcctggccagagccgccagcaaggacaccatcagcaacaacagagagaagatcaagggctggatcaaggagcaggcccacaagttcgtggagagatacttcagcagcgagaacatggacggcagcaaccccgccctgaacgtgctgcagagactgtgcgccgccaccgagcagctgaacctgcaggtggacggcggcgccgagtgcctggtggagatcagaagcatcgtgagcgagagcgacgtgagcagcttcgagatccagcacagcggcttcgtgaagcagctgctgctgtacctgaccagcaagagcgagaaggacgccgtgagcagagagatcagactgaagagattcctgcacgtgttcttcagcagccccctgcccggcgaggagcccatcggcagagtggagcccgtgggcaacgcccccctgctggccctggtgcacaagatgaacaactgcctgagccagatggagcagttccccgtgaaggtgcacgacttccccagcggcaacggcaccggcggcagcttcagcctgaacagaggcagccaggccctgaagttcttcaacacccaccagctgaagtgccagctgcagagacaccccgactgcgccaacgtgaagcagtggaagggcggccccgtgaagatcgaccccctggccctggtgcaggccatcgagagatacctggtggtgagaggctacggcagagtgagagaggacgacgaggacagcgacgacgacggcagcgacgaggagatcgacgagagcctggccgcccagttcctgaacagcggcaacgtgagacacagactgcagttctacatcggcgagcacctgctgccctacaacatgaccgtgtaccaggccgtgagacagttcagcatccaggccgaggacgagagagagagcaccgacgacgagagcaaccccctgggcagagccggcatctggaccaagacccacaccatctggtacaagcccgtgagagaggacgaggagagcaacaaggactgcgtgggcggcaagagaggcagagcccagaccgcccccaccaagaccagccccagaaacgccaagaagcacgacgagctgtggcacgacggcgtgtgccccagcgtgagcaaccccctggaggtgtacctgatccccaccccccccgagaacatcaccttcgaggaccccagcctggacgtgatcctgctgctgagagtgctgcacgccatcagcagatactggtactacctgtacgacaacgccatgtgcaaggagatcatccccaccagcgagttcatcaacagcaagctgaccgccaaggccaacagacagctgcaggaccccctggtgatcatgaccggcaacatccccacctggctgaccgagctgggcaagacctgccccttcttcttccccttcgacaccagacagatgctgttctacgtgaccgccttcgacagagacagagccatgcagagactgctggacaccaaccccgagatcaaccagagcgacagccaggacagcagagtggcccccagactggacagaaagaagagaaccgtgaacagagaggagctgctgaagcaggccgagagcgtgatgcaggacctgggcagcagcagagccatgctggagatccagtacgagaacgaggtgggcaccggcctgggccccaccctggagttctacgccctggtgagccaggagctgcagagagccgacctgggcctgtggagaggcgaggaggtgaccctgagcaaccccaagggcagccaggagggcaccaagtacatccagaacctgcagggcctgttcgccctgcccttcggcagaaccgccaagcccgcccacatcgccaaggtgaagatgaagttcagattcctgggcaagctgatggccaaggccatcatggacttcagactggtggacctgcccctgggcctgcccttctacaagtggatgctgagacaggagaccagcctgaccagccacgacctgttcgacatcgaccccgtggtggccagaagcgtgtaccacctggaggacatcgtgagacagaagaagagactggagcaggacaagagccagaccaaggagagcctgcagtacgccctggagaccctgaccatgaacggctgcagcgtggaggacctgggcctggacttcaccctgcccggcttccccaacatcgagctgaagaagggcggcaaggacatccccgtgaccatccacaacctggaggagtacctgagactggtgatcttctgggccctgaacgagggcgtgagcagacagttcgacagcttcagagacggcttcgagagcgtgttccccctgagccacctgcagtacttctaccccgaggagctggaccagctgctgtgcggcagcaaggccgacacctgggacgccaagaccctgatggagtgctgcagacccgaccacggctacacccacgacagcagagccgtgaagttcctgttcgagatcctgagcagcttcgacaacgagcagcagagactgttcctgcagttcgtgaccggcagccccagactgcccgtgggcggcttcagaagcctgaacccccccctgaccatcgtgagaaagaccttcgagagcaccgagaaccccgacgacttcctgcccagcgtgatgacctgcgtgaactacctgaagctgcccgactacagcagcatcgagatcatgagagagaagctgctgatcgccgccagagagggccagcagagcttccacctgagctag

SEQ ID NO: 102468 - DNA, 300 bp, synthetic construct
  misc_feature 1..300: note = Description of Artificial Sequence: Synthetic coding sequence
  source 1..300: mol_type = other DNA
atgagcaacagacccaacaacaaccccggcggcagcctgagaagaagccagagaaacaccgccggcgcccagccccaggacgacagcatcggcggcagaagctgcagcagcagcagcgccgtgatcgtgccccagcccgaggaccccgacagagccaacaccagcgagagacagaagaccggccaggtgcccaagaaggacaacagcagaggcgtgaagagaagcgccagccccgactacaacagaaccaacagccccagcagcgccaagaagcccaaggccctgcagcacaccgagtag

SEQ ID NO: 102469 - DNA, 6123 bp, synthetic construct
  misc_feature 1..6123: note = Description of Artificial Sequence: Synthetic coding sequence
  source 1..6123: mol_type = other DNA
atgagcaacagacccaacaacaaccccggcggcagcctgagaagaagccagagaaacaccgccggcgcccagccccaggacgacagcatcggcggcagaagccacctgggccaggccaagcacaagggctacagcccccccgagagcagaaagagcaacagcaaggcccccaaggtgcagagcaacaccaccagcgagctgagcagaggccacctgagcaagagaagctgcagcagcagcagcgccgtgatcgtgccccagcccgaggaccccgacagagccaacaccagcgagagacagaagaccggccaggtgcccaagaaggacaacagcagaggcgtgaagagaagcgccagccccgactacaacagaaccaacagccccagcagcgccaagaagcccaaggccctgcagcacaccgagagccccagcgagaccaacaagccccacagcaagagcaagaagagacacctggaccaggagcagcagctgaagagcgcccagagccccagcaccagcaaggcccacaccagaaagagcggcgccaccggcggcagcagaagccagaagagaaagagaaccgagagcagctgcgtgaagagcggcagcggcagcgagagcaccggcgccgaggagagaagcgccaagcccaccaagctggccagcaagagcgccaccagcgccaaggccggctgcagcaccatcaccgacagcagcagcgccgccagcaccagcagcagcagcagcgccgtggccagcgccagcagcaccgtgccccccggcgccagagtgaagcagggcaaggaccagaacaaggccagaagaagcagaagcgccagcagccccagccccagaagaagcagcagagagaaggagcagagcaagaccggcggcagcagcaagttcgactgggccgccagattcagccccaaggtgagcctgcccaagaccaagctgagcctgcccggcagcagcaagagcgagaccagcaagcccggccccagcggcctgcaggccaagctggccagcctgagaaagagcaccaagaagagaagcgagagcccccccgccgagctgcccagcctgagaagaagcaccagacagaagaccaccggcagctgcgccagcaccagcagaagaggcagcggcctgggcaagagaggcgccgccgaggccagaagacaggagaagatggccgaccccgagagcaaccaggaggccgtgaacagcagcgccgccagaaccgacgaggccccccagggcgccgccgccagcagcagcgtggccggcgccgtgggcatgaccaccagcggcgagagcgagagcgacgacagcgagatgggcagactgcaggccctgctggaggccagaggcctgcccccccacctgttcggccccctgggccccagaatgagccagctgttccacagaaccatcggcagcggcgccagcagcaaggcccagcagctgctgcagggcctgcaggccagcgacgagagccagcagctgcaggccgtgatcgagatgtgccagctgctggtgatgggcaacgaggagaccctgggcggcttccccgtgaagagcgtggtgcccgccctgatcaccctgctgcagatggagcacaacttcgacatcatgaaccacgcctgcagagccctgacctacatgatggaggccctgcccagaagcagcgccgtggtggtggacgccatccccgtgttcctggagaagctgcaggtgatccagtgcatcgacgtggccgagcaggccctgaccgccctggagatgctgagcagaagacacagcaaggccatcctgcaggccggcggcctggccgactgcctgctgtacctggagttcttcagcatcaacgcccagagaaacgccctggccatcgccgccaactgctgccagagcatcacccccgacgagttccacttcgtggccgacagcctgcccctgctgacccagagactgacccaccaggacaagaagagcgtggagagcacctgcctgtgcttcgccagactggtggacaacttccagcacgaggagaacctgctgcagcaggtggccagcaaggacctgctgaccaacgtgcagcagctgctggtggtgaccccccccatcctgagcagcggcatgttcatcatggtggtgagaatgttcagcctgatgtgcagcaactgccccaccctggccgtgcagctgatgaagcagaacatcgccgagaccctgcacttcctgctgtgcggcgccagcaacggcagctgccaggagcagatcgacctggtgcccagaagcccccaggagctgtacgagctgaccagcctgatctgcgagctgatgccctgcctgcccaaggagggcatcttcgccgtggacaccatgctgaagaagggcaacgcccagaacaccgacggcgccatctggcagtggagagacgacagaggcctgtggcacccctacaacagaatcgacagcagaatcatcgagcagatcaacgaggacaccggcaccgccagagccatccagagaaagcccaaccccctggccaacagcaacaccagcggctacagcgagagcaagaaggacgacgccagagcccagctgatgaaggaggaccccgagctggccaagagcttcatcaagaccctgttcggcgtgctgtacgaggtgtacagcagcagcgccggccccgccgtgagacacaagtgcctgagagccatcctgagaatcatctacttcgccgacgccgagctgctgaaggacgtgctgaagaaccacgccgtgagcagccacatcgccagcatgctgagcagccaggacctgaagatcgtggtgggcgccctgcagatggccgagatcctgatgcagaagctgcccgacatcttcagcgtgtacttcagaagagagggcgtgatgcaccaggtgaagcacctggccgagagcgagagcctgctgaccagcccccccaaggcctgcaccaacggcagcggcagcatgggcagcaccaccagcgtgagcagcggcaccgccaccgccgccacccacgccgccgccgacctgggcagccccagcctgcagcacagcagagacgacagcctggacctgagcccccagggcagactgagcgacgtgctgaagagaaagagactgcccaagagaggccccagaagacccaagtacagcccccccagagacgacgacaaggtggacaaccaggccaagagccccaccaccacccagagccccaagagcagcttcctggccagcctgaaccccaagacctggggcagactgagcacccagagcaacagcaacaacatcgagcccgccagaaccgccggcggcagcggcctggccagagccgccagcaaggacaccatcagcaacaacagagagaagatcaagggctggatcaaggagcaggcccacaagttcgtggagagatacttcagcagcgagaacatggacggcagcaaccccgccctgaacgtgctgcagagactgtgcgccgccaccgagcagctgaacctgcaggtggacggcggcgccgagtgcctggtggagatcagaagcatcgtgagcgagagcgacgtgagcagcttcgagatccagcacagcggcttcgtgaagcagctgctgctgtacctgaccagcaagagcgagaaggacgccgtgagcagagagatcagactgaagagattcctgcacgtgttcttcagcagccccctgcccggcgaggagcccatcggcagagtggagcccgtgggcaacgcccccctgctggccctggtgcacaagatgaacaactgcctgagccagatggagcagttccccgtgaaggtgcacgacttccccagcggcaacggcaccggcggcagcttcagcctgaacagaggcagccaggccctgaagttcttcaacacccaccagctgaagtgccagctgcagagacaccccgactgcgccaacgtgaagcagtggaagggcggccccgtgaagatcgaccccctggccctggtgcaggccatcgagagatacctggtggtgagaggctacggcagagtgagagaggacgacgaggacagcgacgacgacggcagcgacgaggagatcgacgagagcctggccgcccagttcctgaacagcggcaacgtgagacacagactgcagttctacatcggcgagcacctgctgccctacaacatgaccgtgtaccaggccgtgagacagttcagcatccaggccgaggacgagagagagagcaccgacgacgagagcaaccccctgggcagagccggcatctggaccaagacccacaccatctggtacaagcccgtgagagaggacgaggagagcaacaaggactgcgtgggcggcaagagaggcagagcccagaccgcccccaccaagaccagccccagaaacgccaagaagcacgacgagctgtggcacgacggcgtgtgccccagcgtgagcaaccccctggaggtgtacctgatccccaccccccccgagaacatcaccttcgaggaccccagcctggacgtgatcctgctgctgagagtgctgcacgccatcagcagatactggtactacctgtacgacaacgccatgtgcaaggagatcatccccaccagcgagttcatcaacagcaagctgaccgccaaggccaacagacagctgcaggaccccctggtgatcatgaccggcaacatccccacctggctgaccgagctgggcaagacctgccccttcttcttccccttcgacaccagacagatgctgttctacgtgaccgccttcgacagagacagagccatgcagagactgctggacaccaaccccgagatcaaccagagcgacagccaggacagcagagtggcccccagactggacagaaagaagagaaccgtgaacagagaggagctgctgaagcaggccgagagcgtgatgcaggacctgggcagcagcagagccatgctggagatccagtacgagaacgaggtgggcaccggcctgggccccaccctggagttctacgccctggtgagccaggagctgcagagagccgacctgggcctgtggagaggcgaggaggtgaccctgagcaaccccaagggcagccaggagggcaccaagtacatccagaacctgcagggcctgttcgccctgcccttcggcagaaccgccaagcccgcccacatcgccaaggtgaagatgaagttcagattcctgggcaagctgatggccaaggccatcatggacttcagactggtggacctgcccctgggcctgcccttctacaagtggatgctgagacaggagaccagcctgaccagccacgacctgttcgacatcgaccccgtggtggccagaagcgtgtaccacctggaggacatcgtgagacagaagaagagactggagcaggacaagagccagaccaaggagagcctgcagtacgccctggagaccctgaccatgaacggctgcagcgtggaggacctgggcctggacttcaccctgcccggcttccccaacatcgagctgaagaagggcggcaaggacatccccgtgaccatccacaacctggaggagtacctgagactggtgatcttctgggccctgaacgagggcgtgagcagacagttcgacagcttcagagacggcttcgagagcgtgttccccctgagccacctgcagtacttctaccccgaggagctggaccagctgctgtgcggcagcaaggccgacacctgggacgccaagaccctgatggagtgctgcagacccgaccacggctacacccacgacagcagagccgtgaagttcctgttcgagatcctgagcagcttcgacaacgagcagcagagactgttcctgcagttcgtgaccggcagccccagactgcccgtgggcggcttcagaagcctgaacccccccctgaccatcgtgagaaagaccttcgagagcaccgagaaccccgacgacttcctgcccagcgtgatgacctgcgtgaactacctgaagctgcccgactacagcagcatcgagatcatgagagagaagctgctgatcgccgccagagagggccagcagagcttccacctgagctag

SEQ ID NO: 102470 - DNA, 5169 bp, synthetic construct
  misc_feature 1..5169: note = Description of Artificial Sequence: Synthetic coding sequence
  source 1..5169: mol_type = other DNA
atgagcaacagacccaacaacaaccccggcggcagcctgagaagaagccagagaaacaccgccggcgcccagccccaggacgacagcatcggcggcagcagaagaggcagcggcctgggcaagagaggcgccgccgaggccagaagacaggagaagatggccgaccccgagagcaaccaggaggccgtgaacagcagcgccgccagaaccgacgaggccccccagggcgccgccgccagcagcagcgtggccggcgccgtgggcatgaccaccagcggcgagagcgagagcgacgacagcgagatgggcagactgcaggccctgctggaggccagaggcctgcccccccacctgttcggccccctgggccccagaatgagccagctgttccacagaaccatcggcagcggcgccagcagcaaggcccagcagctgctgcagggcctgcaggccagcgacgagagccagcagctgcaggccgtgatcgagatgtgccagctgctggtgatgggcaacgaggagaccctgggcggcttccccgtgaagagcgtggtgcccgccctgatcaccctgctgcagatggagcacaacttcgacatcatgaaccacgcctgcagagccctgacctacatgatggaggccctgcccagaagcagcgccgtggtggtggacgccatccccgtgttcctggagaagctgcaggtgatccagtgcatcgacgtggccgagcaggccctgaccgccctggagatgctgagcagaagacacagcaaggccatcctgcaggccggcggcctggccgactgcctgctgtacctggagttcttcagcatcaacgcccagagaaacgccctggccatcgccgccaactgctgccagagcatcacccccgacgagttccacttcgtggccgacagcctgcccctgctgacccagagactgacccaccaggacaagaagagcgtggagagcacctgcctgtgcttcgccagactggtggacaacttccagcacgaggagaacctgctgcagcaggtggccagcaaggacctgctgaccaacgtgcagcagctgctggtggtgaccccccccatcctgagcagcggcatgttcatcatggtggtgagaatgttcagcctgatgtgcagcaactgccccaccctggccgtgcagctgatgaagcagaacatcgccgagaccctgcacttcctgctgtgcggcgccagcaacggcagctgccaggagcagatcgacctggtgcccagaagcccccaggagctgtacgagctgaccagcctgatctgcgagctgatgccctgcctgcccaaggagggcatcttcgccgtggacaccatgctgaagaagggcaacgcccagaacaccgacggcgccatctggcagtggagagacgacagaggcctgtggcacccctacaacagaatcgacagcagaatcatcgaggccgcccaccaggtgggcgaggacgagatcagcctgagcaccctgggcagagtgtacaccatcgacttcaacagcatgcagcagatcaacgaggacaccggcaccgccagagccatccagagaaagcccaaccccctggccaacagcaacaccagcggctacagcgagagcaagaaggacgacgccagagcccagctgatgaaggaggaccccgagctggccaagagcttcatcaagaccctgttcggcgtgctgtacgaggtgtacagcagcagcgccggccccgccgtgagacacaagtgcctgagagccatcctgagaatcatctacttcgccgacgccgagctgctgaaggacgtgctgaagaaccacgccgtgagcagccacatcgccagcatgctgagcagccaggacctgaagatcgtggtgggcgccctgcagatggccgagatcctgatgcagaagctgcccgacatcttcagcgtgtacttcagaagagagggcgtgatgcaccaggtgaagcacctggccgagagcgagagcctgctgaccagcccccccaaggcctgcaccaacggcagcggcagcatgggcagcaccaccagcgtgagcagcggcaccgccaccgccgccacccacgccgccgccgacctgggcagccccagcctgcagcacagcagagacgacagcctggacctgagcccccagggcagactgagcgacgtgctgaagagaaagagactgcccaagagaggccccagaagacccaagtacagcccccccagagacgacgacaaggtggacaaccaggccaagagccccaccaccacccagagccccaagagcagcttcctggccagcctgaaccccaagacctggggcagactgagcacccagagcaacagcaacaacatcgagcccgccagaaccgccggcggcagcggcctggccagagccgccagcaaggacaccatcagcaacaacagagagaagatcaagggctggatcaaggagcaggcccacaagttcgtggagagatacttcagcagcgagaacatggacggcagcaaccccgccctgaacgtgctgcagagactgtgcgccgccaccgagcagctgaacctgcaggtggacggcggcgccgagtgcctggtggagatcagaagcatcgtgagcgagagcgacgtgagcagcttcgagatccagcacagcggcttcgtgaagcagctgctgctgtacctgaccagcaagagcgagaaggacgccgtgagcagagagatcagactgaagagattcctgcacgtgttcttcagcagccccctgcccggcgaggagcccatcggcagagtggagcccgtgggcaacgcccccctgctggccctggtgcacaagatgaacaactgcctgagccagatggagcagttccccgtgaaggtgcacgacttccccagcggcaacggcaccggcggcagcttcagcctgaacagaggcagccaggccctgaagttcttcaacacccaccagctgaagtgccagctgcagagacaccccgactgcgccaacgtgaagcagtggaagggcggccccgtgaagatcgaccccctggccctggtgcaggccatcgagagatacctggtggtgagaggctacggcagagtgagagaggacgacgaggacagcgacgacgacggcagcgacgaggagatcgacgagagcctggccgcccagttcctgaacagcggcaacgtgagacacagactgcagttctacatcggcgagcacctgctgccctacaacatgaccgtgtaccaggccgtgagacagttcagcatccaggccgaggacgagagagagagcaccgacgacgagagcaaccccctgggcagagccggcatctggaccaagacccacaccatctggtacaagcccgtgagagaggacgaggagagcaacaaggactgcgtgggcggcaagagaggcagagcccagaccgcccccaccaagaccagccccagaaacgccaagaagcacgacgagctgtggcacgacggcgtgtgccccagcgtgagcaaccccctggaggtgtacctgatccccaccccccccgagaacatcaccttcgaggaccccagcctggacgtgatcctgctgctgagagtgctgcacgccatcagcagatactggtactacctgtacgacaacgccatgtgcaaggagatcatccccaccagcgagttcatcaacagcaagctgaccgccaaggccaacagacagctgcaggaccccctggtgatcatgaccggcaacatccccacctggctgaccgagctgggcaagacctgccccttcttcttccccttcgacaccagacagatgctgttctacgtgaccgccttcgacagagacagagccatgcagagactgctggacaccaaccccgagatcaaccagagcgacagccaggacagcagagtggcccccagactggacagaaagaagagaaccgtgaacagagaggagctgctgaagcaggccgagagcgtgatgcaggacctgggcagcagcagagccatgctggagatccagtacgagaacgaggtgggcaccggcctgggccccaccctggagttctacgccctggtgagccaggagctgcagagagccgacctgggcctgtggagaggcgaggaggtgaccctgagcaaccccaagggcagccaggagggcaccaagtacatccagaacctgcagggcctgttcgccctgcccttcggcagaaccgccaagcccgcccacatcgccaaggtgaagatgaagttcagattcctgggcaagctgatggccaaggccatcatggacttcagactggtggacctgcccctgggcctgcccttctacaagtggatgctgagacaggagaccagcctgaccagccacgacctgttcgacatcgaccccgtggtggccagaagcgtgtaccacctggaggacatcgtgagacagaagaagagactggagcaggacaagagccagaccaaggagagcctgcagtacgccctggagaccctgaccatgaacggctgcagcgtggaggacctgggcctggacttcaccctgcccggcttccccaacatcgagctgaagaagggcggcaaggacatccccgtgaccatccacaacctggaggagtacctgagactggtgatcttctgggccctgaacgagggcgtgagcagacagttcgacagcttcagagacggcttcgagagcgtgttccccctgagccacctgcagtacttctaccccgaggagctggaccagctgctgtgcggcagcaaggccgacacctgggacgccaagaccctgatggagtgctgcagacccgaccacggctacacccacgacagcagagccgtgaagttcctgttcgagatcctgagcagcttcgacaacgagcagcagagactgttcctgcagttcgtgaccggcagccccagactgcccgtgggcggcttcagaagcctgaacccccccctgaccatcgtgagaaagaccttcgagagcaccgagaaccccgacgacttcctgcccagcgtgatgacctgcgtgaactacctgaagctgcccgactacagcagcatcgagatcatgagagagaagctgctgatcgccgccagagagggccagcagagcttccacctgagctag

SEQ ID NO: 102471 - DNA, 450 bp, synthetic construct
  misc_feature 1..450: note = Description of Artificial Sequence: Synthetic coding sequence
  source 1..450: mol_type = other DNA
atgagcaacagacccaacaacaaccccggcggcagcctgagaagaagccagagaaacaccgccggcgcccagccccaggacgacagcatcggcggcagaagctgcagcagcagcagcgccgtgatcgtgccccagcccgaggaccccgacagagccaacaccagcgagagacagaagaccggccaggtgcccaagaaggacaacagcagaggcgtgaagagaagcgccagccccgactacaacagaaccaacagccccagcagcgccaagaagcccaaggccctgcagcacaccgagagccccagcgagaccaacaagccccacagcaagagcaagaagagacacctggaccaggagcagcagctgaagagcgcccagagccccagcaccagcaaggcccacaccagaaagagcggcgccaccggcggcagcagaagccagaagagatag

SEQ ID NO: 102472 - DNA, 465 bp, synthetic construct
  misc_feature 1..465: note = Description of Artificial Sequence: Synthetic coding sequence
  source 1..465: mol_type = other DNA
atgagcaacagacccaacaacaaccccggcggcagcctgagaagaagccagagaaacaccgccggcgcccagccccaggacgacagcatcggcggcagaagctgcagcagcagcagcgccgtgatcgtgccccagcccgaggaccccgacagagccaacaccagcgagagacagaagaccggccaggtgcccaagaaggacaacagcagaggcgtgaagagaagcgccagccccgactacaacagaaccaacagccccagcagcgccaagaagcccaaggccctgcagcacaccgagagccccagcgagaccaacaagccccacagcaagagcaagaagagacacctggaccaggagcagcagctgaagagcgcccagagccccagcaccagcaaggcccacaccagaaagagcggcgccaccggcggcagcagaagccagaagagaaagagaaccgagagctag

SEQ ID NO: 102473 - DNA, 1041 bp, synthetic construct
  misc_feature 1..1041: note = Description of Artificial Sequence: Synthetic coding sequence
  source 1..1041: mol_type = other DNA
atgagcaacagacccaacaacaaccccggcggcagcctgagaagaagccagagaaacaccgccggcgcccagccccaggacgacagcatcggcggcagaagccacctgggccaggccaagcacaagggctacagcccccccgagagcagaaagagcaacagcaaggcccccaaggtgcagagcaacaccaccagcgagctgagcagaggccacctgagcaagagaagctgcagcagcagcagcgccgtgatcgtgccccagcccgaggaccccgacagagccaacaccagcgagagacagaagaccggccaggtgcccaagaaggacaacagcagaggcgtgaagagaagcgccagccccgactacaacagaaccaacagccccagcagcgccaagaagcccaaggccctgcagcacaccgagagccccagcgagaccaacaagccccacagcaagagcaagaagagacacctggaccaggagcagcagctgaagagcgcccagagccccagcaccagcaaggcccacaccagaaagagcggcgccaccggcggcagcagaagccagaagagaaagagaaccgagagcagctgcgtgaagagcggcagcggcagcgagagcaccggcgccgaggagagaagcgccaagcccaccaagctggccagcaagagcgccaccagcgccaaggccggctgcagcaccatcaccgacagcagcagcgccgccagcaccagcagcagcagcagcgccgtggccagcgccagcagcaccgtgccccccggcgccagagtgaagcagggcaaggaccagaacaaggccagaagaagcagaagcgccagcagccccagccccagaagaagcagcagagagaaggagcagagcaagaccggcggcagcagcaagttcgactgggccgccagattcagccccaaggtgagcctgcccaagaccaagctgagcctgcccggcagcagcaagagcgagaccagcaagcccggccccagcggcctgcaggccaaggtgctgaccagcaagagatag

SEQ ID NO: 102474 - DNA, 1746 bp, synthetic construct
  misc_feature 1..1746: note = Description of Artificial Sequence: Synthetic coding sequence
  source 1..1746: mol_type = other DNA
atggccgtggccggcgccgtgagcggcgagcccctggtgcactggtgcacccagcagctgagaaagaccttcggcctggacgtgagcgaggagatcatccagtacgtgctgagcatcgagagcgccgaggagatcagagagtacgtgaccgacctgctgcagggcaacgagggcaagaagggccagttcatcgaggagctgatcaccaagtggcagaagaacgaccaggagctgatcagcgaccccctgcagcagtgcttcaagaaggacgagatcctggacggccagaagagcggcgaccacctgaagagaggcagaaagaagggcagaaacagacaggaggtgcccgccttcaccgagcccgacaccaccgccgaggtgaagacccccttcgacctggccaaggcccaggagaacagcaacagcgtgaagaagaagaccaagttcgtgaacctgtacaccagagagggccaggacagactggccgtgctgctgcccggcagacacccctgcgactgcctgggccagaagcacaagctgatcaacaactgcctgatctgcggcagaatcgtgtgcgagcaggagggcagcggcccctgcctgttctgcggcaccctggtgtgcacccacgaggagcaggacatcctgcagagagacagcaacaagagccagaagctgctgaagaagctgatgagcggcgtggagaacagcggcaaggtggacatcagcaccaaggacctgctgccccaccaggagctgagaatcaagagcggcctggagaaggccatcaagcacaaggacaagctgctggagttcgacagaaccagcatcagaagaacccaggtgatcgacgacgagagcgactacttcgccagcgacagcaaccagtggctgagcaagctggagagagagaccctgcagaagagagaggaggagctgagagagctgagacacgccagcagactgagcaagaaggtgaccatcgacttcgccggcagaaagatcctggaggaggagaacagcctggccgagtaccacagcagactggacgagaccatccaggccatcgccaacggcaccctgaaccagcccctgaccaagctggacagaagcagcgaggagcccctgggcgtgctggtgaaccccaacatgtaccagagccccccccagtgggtggaccacaccggcgccgccagccagaagaaggccttcagaagcagcggcttcggcctggagttcaacagcttccagcaccagctgagaatccaggaccaggagttccaggagggcttcgacggcggctggtgcctgagcgtgcaccagccctgggccagcctgctggtgagaggcatcaagagagtggagggcagaagctggtacaccccccacagaggcagactgtggatcgccgccaccgccaagaagcccagcccccaggaggtgagcgagctgcaggccacctacagactgctgagaggcaaggacgtggagttccccaacgactaccccagcggctgcctgctgggctgcgtggacctgatcgactgcctgagccagaagcagttcaaggagcagttccccgacatcagccaggagagcgacagccccttcgtgttcatctgcaagaacccccaggagatggtggtgaagttccccatcaagggcaaccccaagatctggaagctggacagcaagatccaccagggcgccaagaagggcctgatgaagcagaacaaggccgtgtag

SEQ ID NO: 102475 - DNA, 1431 bp, synthetic construct
  misc_feature 1..1431: note = Description of Artificial Sequence: Synthetic coding sequence
  source 1..1431: mol_type = other DNA
atgagcggccccacctggctgccccccaagcagcccgagcccgccagagccccccagggcagagccatccccagaggcacccccggccccccccccgcccacggcgccgccctgcagccccaccccagagtgaacttctgccccctgcccagcgagcagtgctaccaggcccccggcggccccgaggacagaggccccgcctgggtgggcagccacggcgtgctgcagcacacccagggcctgcccgccgacagaggcggcctgagacccggcagcctggacgccgagatcgacctgctgagcagcaccctggccgagctgaacggcggcagaggccacgccagcagaagacccgacagacaggcctacgagcccccccccccccccgcctacagaaccggcagcctgaagcccaaccccgccagccccctgcccgccagcccctacggcggccccacccccgccagctacaccaccgccagcacccccgccggccccgccttccccgtgcaggtgaaggtggcccagcccgtgagaggctgcggcccccccagaagaggcgccagccaggccagcggccccctgcccggcccccacttccccctgcccggcagaggcgaggtgtggggccccggctacagaagccagagagagcccggccccggcgccaaggaggaggccgccggcgtgagcggccccgccggcagaggcagaggcggcgagcacggcccccaggtgcccctgagccagccccccgaggacgagctggacagactgaccaagaagctggtgcacgacatgaaccacccccccagcggcgagtacttcggccagtgcggcggctgcggcgaggacgtggtgggcgacggcgccggcgtggtggccctggacagagtgttccacgtgggctgcttcgtgtgcagcacctgcagagcccagctgagaggccagcacttctacgccgtggagagaagagcctactgcgagggctgctacgtggccaccctggagaagtgcgccacctgcagccagcccatcctggacagaatcctgagagccatgggcaaggcctaccaccccggctgcttcacctgcgtggtgtgccacagaggcctggacggcatccccttcaccgtggacgccaccagccagatccactgcatcgaggacttccacagaaagttcgcccccagatgcagcgtgtgcggcggcgccatcatgcccgagcccggccaggaggagaccgtgagaatcgtggccctggacagaagcttccacatcggctgctacaagtgcgaggagtgcggcctgctgctgagcagcgagggcgagtgccagggctgctaccccctggacggccacatcctgtgcaaggcctgcagcgcctggagaatccaggagctgagcgccaccgtgaccaccgactgctag

SEQ ID NO: 102476 - DNA, 1473 bp, synthetic construct
  misc_feature 1..1473: note = Description of Artificial Sequence: Synthetic coding sequence
  source 1..1473: mol_type = other DNA
atggagcagaagcccagcaaggtggagtgcggcagcgaccccgaggagaacagcgccagaagccccgacggcaagagaaagagaaagaacggccagtgcagcctgaagaccagcatgagcggctacatccccagctacctggacaaggacgagcagtgcgtggtgtgcggcgacaaggccaccggctaccactacagatgcatcacctgcgagggctgcaagggcttcttcagaagaaccatccagaagaacctgcaccccacctacagctgcaagtacgacagctgctgcgtgatcgacaagatcaccagaaaccagtgccagctgtgcagattcaagaagtgcatcgccgtgggcatggccatggacctggtgctggacgacagcaagagagtggccaagagaaagctgatcgagcagaacagagagagaagaagaaaggaggagatgatcagaagcctgcagcagagacccgagcccacccccgaggagtgggacctgatccacatcgccaccgaggcccacagaagcaccaacgcccagggcagccactggaagcagagaagaaagttcctgcccgacgacatcggccagagccccatcgtgagcatgcccgacggcgacaaggtggacctggaggccttcagcgagttcaccaagatcatcacccccgccatcaccagagtggtggacttcgccaagaagctgcccatgttcagcgagctgccctgcgaggaccagatcatcctgctgaagggctgctgcatggagatcatgagcctgagagccgccgtgagatacgaccccgagagcgacaccctgaccctgagcggcgagatggccgtgaagagagagcagctgaagaacggcggcctgggcgtggtgagcgacgccatcttcgagctgggcaagagcctgagcgccttcaacctggacgacaccgaggtggccctgctgcaggccgtgctgctgatgagcaccgacagaagcggcctgctgtgcgtggacaagatcgagaagagccaggaggcctacctgctggccttcgagcactacgtgaaccacagaaagcacaacatcccccacttctggcccaagctgctgatgaaggagagagaggtgcagagcagcatcctgtacaagggcgccgccgccgagggcagacccggcggcagcctgggcgtgcaccccgagggccagcagctgctgggcatgcacgtggtgcagggcccccaggtgagacagctggagcagcagctgggcgaggccggcagcctgcagggccccgtgctgcagcaccagagccccaagagcccccagcagagactgctggagctgctgcacagaagcggcatcctgcacgccagagccgtgtgcggcgaggacgacagcagcgaggccgacagccccagcagcagcgaggaggagcccgaggtgtgcgaggacctggccggcaacgccgccagcccctag

SEQ ID NO: 102477 - DNA, 1473 bp, synthetic construct; identical to SEQ ID NO: 102476
  misc_feature 1..1473: note = Description of Artificial Sequence: Synthetic coding sequence
  source 1..1473: mol_type = other DNA

SEQ ID NO: 102478 - DNA, 1233 bp, synthetic construct
  misc_feature 1..1233: note = Description of Artificial Sequence: Synthetic coding sequence
  source 1..1233: mol_type = other DNA
atggagcagaagcccagcaaggtggagtgcggcagcgaccccgaggagaacagcgccagaagccccgacggcaagagaaagagaaagaacggccagtgcagcctgaagaccagcatgagcggctacatccccagctacctggacaaggacgagcagtgcgtggtgtgcggcgacaaggccaccggctaccactacagatgcatcacctgcgagggctgcaagggcttcttcagaagaaccatccagaagaacctgcaccccacctacagctgcaagtacgacagctgctgcgtgatcgacaagatcaccagaaaccagtgccagctgtgcagattcaagaagtgcatcgccgtgggcatggccatggacctggtgctggacgacagcaagagagtggccaagagaaagctgatcgagcagaacagagagagaagaagaaaggaggagatgatcagaagcctgcagcagagacccgagcccacccccgaggagtgggacctgatccacatcgccaccgaggcccacagaagcaccaacgcccagggcagccactggaagcagagaagaaagttcctgcccgacgacatcggccagagccccatcgtgagcatgcccgacggcgacaaggtggacctggaggccttcagcgagttcaccaagatcatcacccccgccatcaccagagtggtggacttcgccaagaagctgcccatgttcagcgagctgccctgcgaggaccagatcatcctgctgaagggctgctgcatggagatcatgagcctgagagccgccgtgagatacgaccccgagagcgacaccctgaccctgagcggcgagatggccgtgaagagagagcagctgaagaacggcggcctgggcgtggtgagcgacgccatcttcgagctgggcaagagcctgagcgccttcaacctggacgacaccgaggtggccctgctgcaggccgtgctgctgatgagcaccgacagaagcggcctgctgtgcgtggacaagatcgagaagagccaggaggcctacctgctggccttcgagcactacgtgaaccacagaaagcacaacatcccccacttctggcccaagctgctgatgaaggtgaccgacctgagaatgatcggcgcctgccacgccagcagattcctgcacatgaaggtggagtgccccaccgagctgttcccccccctgttcctggaggtgttcgaggaccaggaggtgtag

SEQ ID NO: 102479 - DNA, 1233 bp, synthetic construct; identical to SEQ ID NO: 102478
  misc_feature 1..1233: note = Description of Artificial Sequence: Synthetic coding sequence
  source 1..1233: mol_type = other DNA

SEQ ID NO: 102480 - DNA, 1386 bp, synthetic construct
  misc_feature 1..1386: note = Description of Artificial Sequence: Synthetic coding sequence
  source 1..1386: mol_type = other DNA
atgacccccaacagcatgaccgagaacggcctgaccgcctgggacaagcccaagcactgccccgacagagagcacgactggaagctggtgggcatgagcgaggcctgcctgcacagaaagagccacagcgagagaagaagcaccctgaagaacgagcagagcagcccccacctgatccagaccacctggaccagcagcatcttccacctggaccacgacgacgtgaacgaccagagcgtgagcagcgcccagaccttccagaccgaggagaagaagtgcaagggctacatccccagctacctggacaaggacgagctgtgcgtggtgtgcggcgacaaggccaccggctaccactacagatgcatcacctgcgagggctgcaagggcttcttcagaagaaccatccagaagaacctgcaccccagctacagctgcaagtacgagggcaagtgcgtgatcgacaaggtgaccagaaaccagtgccaggagtgcagattcaagaagtgcatctacgtgggcatggccaccgacctggtgctggacgacagcaagagactggccaagagaaagctgatcgaggagaacagagagaagagaagaagagaggagctgcagaagagcatcggccacaagcccgagcccaccgacgaggagtgggagctgatcaagaccgtgaccgaggcccacgtggccaccaacgcccagggcagccactggaagcagaagagaaagttcctgcccgaggacatcggccaggcccccatcgtgaacgcccccgagggcggcaaggtggacctggaggccttcagccacttcaccaagatcatcacccccgccatcaccagagtggtggacttcgccaagaagctgcccatgttctgcgagctgccctgcgaggaccagatcatcctgctgaagggctgctgcatggagatcatgagcctgagagccgccgtgagatacgaccccgagagcgagaccctgaccctgaacggcgagatggccgtgaccagaggccagctgaagaacggcggcctgggcgtggtgagcgacgccatcttcgacctgggcatgagcctgagcagcttcaacctggacgacaccgaggtggccctgctgcaggccgtgctgctgatgagcagcgacagacccggcctggcctgcgtggagagaatcgagaagtaccaggacagcttcctgctggccttcgagcactacatcaactacagaaagcaccacgtgacccacttctggcccaagctgctgatgaaggtgaccgacctgagaatgatcggcgcctgccacgccagcagattcctgcacatgaaggtggagtgccccaccgagctgttcccccccctgttcctggaggtgttcgaggactag

SEQ ID NO: 102481 - DNA, 1386 bp, synthetic construct; identical to SEQ ID NO: 102480
  misc_feature 1..1386: note = Description of Artificial Sequence: Synthetic coding sequence
  source 1..1386: mol_type = other DNA

SEQ ID NO: 102482 - DNA, 1386 bp, synthetic construct; identical to SEQ ID NO: 102480
  misc_feature 1..1386: note = Description of Artificial Sequence: Synthetic coding sequence
  source 1..1386: mol_type = other DNA

SEQ ID NO: 102483 - DNA, 87 bp, synthetic construct
  misc_feature 1..87: note = Description of Artificial Sequence: Synthetic coding sequence
  source 1..87: mol_type = other DNA
atgacccccaacagcatgaccgagatggccctgcagcccggcaccaacagaagcaccgtgcagaccgagaacaccaccggcagctag

SEQ ID NO: 102484 - DNA, 366 bp, synthetic construct
  misc_feature 1..366: note = Description of Artificial Sequence: Synthetic coding sequence
  source 1..366: mol_type = other DNA
atgacccccaacagcatgaccgagaacggcctgaccgcctgggacaagcccaagcactgccccgacagagagcacgactggaagctggtgggcatgagcgaggcctgcctgcacagaaagagccacagcgagagaagaagcaccctgaagaacgagcagagcagcccccacctgatccagaccacctggaccagcagcatcttccacctggaccacgacgacgtgaacgaccagagcgtgagcagcgcccagaccttccagaccgaggagaagaagtgcaagggctacatccccagctacctggacaaggacgagctgtgcgtggtgtgcggcgacaaggccaccggctaccactacagatgctag

SEQ ID NO: 102485 - DNA, 441 bp, synthetic construct
  misc_feature 1..441: note = Description of Artificial Sequence: Synthetic coding sequence
  source 1..441: mol_type = other DNA
atgcaggtgctgaccaagagataccccaagaactgcctgctgaccgtgatggacagatacgccgccgaggtgcacaacatggagcaggtggtgatgatccccagcctgctgagagacgtgcagctgagcggccccggcggccaggcccaggccgaggcccccgacctgtacacctacttcaccatgctgaaggccatctgcgtggacgtggaccacggcctgctgcccagagaggagtggcaggccaaggtggccggcagcgaggagaacggcaccgccgagaccgaggaggtggaggacgagagcgccagcggcgagctggacctggaggcccagttccacctgcacttcagcagcctgcaccacatcctgatgcacctgaccgagaaggcccaggaggtgaccagaaagtaccaggagatgaccggccaggtgtggtag

SEQ ID NO: 102486 - DNA, 2802 bp, synthetic construct
  misc_feature 1..2802: note = Description of Artificial Sequence: Synthetic coding sequence
  source 1..2802: mol_type = other DNA
atgagagccctggccgtgctgagcgtgaccctggtgatggcctgcaccgaggccttcttccccttcatcagcagaggcaaggagctgctgtggggcaagcccgaggagagcagagtgagcagcgtgctggaggagagcaagagactggtggacaccgccatgtacgccaccatgcagagaaacctgaagaagagaggcatcctgagccccgcccagctgctgagcttcagcaagctgcccgagcccaccagcggcgtgatcgccagagccgccgagatcatggagaccagcatccaggccatgaagagaaaggtgaacctgaagacccagcagagccagcaccccaccgacgccctgagcgaggacctgctgagcatcatcgccaacatgagcggctgcctgccctacatgctgccccccaagtgccccaacacctgcctggccaacaagtacagacccatcaccggcgcctgcaacaacagagaccaccccagatggggcgccagcaacaccgccctggccagatggctgccccccgtgtacgaggacggcttcagccagcccagaggctggaaccccggcttcctgtacaacggcttccccctgccccccgtgagagaggtgaccagacacgtgatccaggtgagcaacgaggtggtgaccgacgacgacagatacagcgacctgctgatggcctggggccagtacatcgaccacgacatcgccttcaccccccagagcaccagcaaggccgccttcggcggcggcgccgactgccagatgacctgcgagaaccagaacccctgcttccccatccagctgcccgaggaggccagacccgccgccggcaccgcctgcctgcccttctacagaagcagcgccgcctgcggcaccggcgaccagggcgccctgttcggcaacctgagcaccgccaaccccagacagcagatgaacggcctgaccagcttcctggacgccagcaccgtgtacggcagcagccccgccctggagagacagctgagaaactggaccagcgccgagggcctgctgagagtgcacgccagactgagagacagcggcagagcctacctgcccttcgtgccccccagagcccccgccgcctgcgcccccgagcccggcatccccggcgagaccagaggcccctgcttcctggccggcgacggcagagccagcgaggtgcccagcctgaccgccctgcacaccctgtggctgagagagcacaacagactggccgccgccctgaaggccctgaacgcccactggagcgccgacgccgtgtaccaggaggccagaaaggtggtgggcgccctgcaccagatcatcaccctgagagactacatccccagaatcctgggccccgaggccttccagcagtacgtgggcccctacgagggctacgacagcaccgccaaccccaccgtgagcaacgtgttcagcaccgccgccttcagattcggccacgccaccatccaccccctggtgagaagactggacgccagcttccaggagcaccccgacctgcccggcctgtggctgcaccaggccttcttcagcccctggaccctgctgagaggcggcggcctggaccccctgatcagaggcctgctggccagacccgccaagctgcaggtgcaggaccagctgatgaacgaggagctgaccgagagactgttcgtgctgagcaacagcagcaccctggacctggccagcatcaacctgcagagaggcagagaccacggcctgcccggctacaacgagtggagagagttctgcggcctgcccagactggagacccccgccgacctgagcaccgccatcgccagcagaagcgtggccgacaagatcctggacctgtacaagcaccccgacaacatcgacgtgtggctgggcggcctggccgagaacttcctgcccagagccagaaccggccccctgttcgcctgcctgatcggcaagcagatgaaggccctgagagacggcgactggttctggtgggagaacagccacgtgttcaccgacgcccagagaagagagctggagaagcacagcctgagcagagtgatctgcgacaacaccggcctgaccagagtgcccatggacgccttccaggtgggcaagttccccgaggacttcgagagctgcgacagcatcaccggcatgaacctggaggcctggagagagaccttcccccaggacgacaagtgcggcttccccgagagcgtggagaacggcgacttcgtgcactgcgaggagagcggcagaagagtgctggtgtacagctgcagacacggctacgagctgcagggcagagagcagctgacctgcacccaggagggctgggacttccagccccccctgtgcaaggacgtgaacgagtgcgccgacggcgcccaccccccctgccacgccagcgccagatgcagaaacaccaagggcggcttccagtgcctgtgcgccgacccctacgagctgggcgacgacggcagaacctgcgtggacagcggcagactgcccagagtgacctggatcagcatgagcctggccgccctgctgatcggcggcttcgccggcctgaccagcaccgtgatctgcagatggaccagaaccggcaccaagagcaccctgcccatcagcgagaccggcggcggcacccccgagctgagatgcggcaagcaccaggccgtgggcaccagcccccagagagccgccgcccaggacagcgagcaggagagcgccggcatggagggcagagacacccacagactgcccagagccctgtag

SEQ ID NO: 102487 - DNA, 2790 bp, synthetic construct
  misc_feature 1..2790: note = Description of Artificial Sequence: Synthetic coding sequence
  source 1..2790: mol_type = other DNA
atgagagccctggccgtgctgagcgtgaccctggtgatggcctgcaccgaggccttcttccccttcatcagcagaggcaaggagctgctgtggggcaagcccgaggagagcagagtgagcagcgtgctggaggagagcaagagactggtggacaccgccatgtacgccaccatgcagagaaacctgaagaagagaggcatcctgagccccgcccagctgctgagcttcagcaagctgcccgagcccaccagcggcgtgatcgccagagccgccgagatcatggagaccagcatccaggccatgaagagaaaggtgaacctgaagacccagcagagccagcaccccaccgacgccctgagcgaggacctgctgagcatcatcgccaacatgagcggctgcctgccctacatgctgccccccaagtgccccaacacctgcctggccaacaagtacagacccatcaccggcgcctgcaacaacagagaccaccccagatggggcgccagcaacaccgccctggccagatggctgccccccgtgtacgaggacggcttcagccagcccagaggctggaaccccggcttcctgtacaacggcttccccctgccccccgtgagagaggtgaccagacacgtgatccaggtgagcaacgaggtggtgaccgacgacgacagatacagcgacctgctgatggcctggggccagtacatcgaccacgacatcgccttcaccccccagagcaccagcaaggccgccttcggcggcggcgccgactgccagatgacctgcgagaaccagaacccctgcttccccatccagctgcccgaggaggccagacccgccgccggcaccgcctgcctgcccttctacagaagcagcgccgcctgcggcaccggcgaccagggcgccctgttcggcaacctgagcaccgccaaccccagacagcagatgaacggcctgaccagcttcctggacgccagcaccgtgtacggcagcagccccgccctggagagacagctgagaaactggaccagcgccgagggcctgctgagagtgcacgccagactgagagacagcggcagagcctacctgcccttcgtgccccccagagcccccgccgcctgcgcccccgagcccggcatccccggcgagaccagaggcccctgcttcctggccggcgacggcagagccagcgaggtgcccagcctgaccgccctgcacaccctgtggctgagagagcacaacagactggccgccgccctgaaggccctgaacgcccactggagcgccgacgccgtgtaccaggaggccagaaaggtggtgggcgccctgcaccagatcatcaccctgagagactacatccccagaatcctgggccccgaggccttccagcagtacgtgggcccctacgagggctacgacagcaccgccaaccccaccgtgagcaacgtgttcagcaccgccgccttcagattcggccacgccaccatccaccccctggtgagaagactggacgccagcttccaggagcaccccgacctgcccggcctgtggctgcaccaggccttcttcagcccctggaccctgctgagaggcggcggcctggaccccctgatcagaggcctgctggccagacccgccaagctgcaggtgcaggaccagctgatgaacgaggagctgaccgagagactgttcgtgctgagcaacagcagcaccctggacctggccagcatcaacctgcagagaggcagagaccacggcctgcccggctacaacgagtggagagagttctgcggcctgcccagactggagacccccgccgacctgagcaccgccatcgccagcagaagcgtggccgacaagatcctggacctgtacaagcaccccgacaacatcgacgtgtggctgggcggcctggccgagaacttcctgcccagagccagaaccggccccctgttcgcctgcctgatcggcaagcagatgaaggccctgagagacggcgactggttctggtgggagaacagccacgtgttcaccgacgcccagagaagagagctggagaagcacagcctgagcagagtgatctgcgacaacaccggcctgaccagagtgcccatggacgccttccaggtgggcaagttccccgaggacttcgagagctgcgacagcatcaccggcatgaacctggaggcctggagagagaccttcccccaggacgacaagtgcggcttccccgagagcgtggagaacggcgacttcgtgcactgcgaggagagcggcagaagagtgctggtgtacagctgcagacacggctacgagctgcagggcagagagcagctgacctgcacccaggagggctgggacttccagccccccctgtgcaaggacgtgaacgagtgcgccgacggcgcccaccccccctgccacgccagcgccagatgcagaaacaccaagggcggcttccagtgcctgtgcgccgacccctacgagctgggcgacgacggcagaacctgcgtggacagcggcagactgcccagagtgacctggatcagcatgagcctggccgccctgctgatcggcggcttcgccggcctgaccagcaccgtgatctgcagatggagagtgctgggctggaaggccggcatcctgaccggctgcagagagcccagcgagggcaaggtggccggccactgcagaaccgccagctgcagccagaaccacagaaccaccctgttccagacccaggccaaccccaagagcgccggcagactgttcagccagcacggctag

SEQ ID NO: 102488 - DNA, 2802 bp, synthetic construct; identical to SEQ ID NO: 102486
  misc_feature 1..2802: note = Description of Artificial Sequence: Synthetic coding sequence
  source 1..2802: mol_type = other DNA

SEQ ID NO: 102489 - DNA, 2670 bp, synthetic construct
  misc_feature 1..2670: note = Description of Artificial Sequence: Synthetic coding sequence
  source 1..2670: mol_type = other DNA
atgagagccctggccgtgctgagcgtgaccctggtgatggcctgcaccgaggccttcttccccttcatcagcagaggcaaggagctgctgtggggcaagcccgaggagagcagagtgagcagcgtgctggaggagagcaagagactggtggacaccgccatgtacgccaccatgcagagaaacctgaagaagagaggcatcctgagccccgcccagctgctgagcttcagcaagctgcccgagcccaccagcggcgtgatcgccagagccgccgagatcatggagaccagcatccaggccatgaagagaaaggtgaacctgaagacccagcagagccagcaccccaccgacgccctgagcgaggacctgctgagcatcatcgccaacatgagcggctgcctgccctacatgctgccccccaagtgccccaacacctgcctggccaacaagtacagacccatcaccggcgcctgcaacaacagagaccaccccagatggggcgccagcaacaccgccctggccagatggctgccccccgtgtacgaggacggcttcagccagcccagaggctggaaccccggcttcctgtacaacggcttccccctgccccccgtgagagaggtgaccagacacgtgatccaggtgagcaacgaggtggtgaccgacgacgacagatacagcgacctgctgatggcctggggccagtacatcgaccacgacatcgccttcaccccccagagcaccagcaaggccgccttcggcggcggcgccgactgccagatgacctgcgagaaccagaacccctgcttccccatccagctgcccgaggaggccagacccgccgccggcaccgcctgcctgcccttctacagaagcagcgccgcctgcggcaccggcgaccagggcgccctgttcggcaacctgagcaccgccaaccccagacagcagatgaacggcctgaccagcttcctggacgccagcaccgtgtacggcagcagccccgccctggagagacagctgagaaactggaccagcgccgagggcctgctgagagtgcacgccagactgagagacagcggcagagcctacctgcccttcgtgccccccagagcccccgccgcctgcgcccccgagcccggcatccccggcgagaccagaggcccctgcttcctggccggcgacggcagagccagcgaggtgcccagcctgaccgccctgcacaccctgtggctgagagagcacaacagactggccgccgccctgaaggccctgaacgcccactggagcgccgacgccgtgtaccaggaggccagaaaggtggtgggcgccctgcaccagatcatcaccctgagagactacatccccagaatcctgggccccgaggccttccagcagtacgtgggcccctacgagggctacgacagcaccgccaaccccaccgtgagcaacgtgttcagcaccgccgccttcagattcggccacgccaccatccaccccctggtgagaagactggacgccagcttccaggagcaccccgacctgcccggcctgtggctgcaccaggccttcttcagcccctggaccctgctgagaggcggcggcctggaccccctgatcagaggcctgctggccagacccgccaagctgcaggtgcaggaccagctgatgaacgaggagctgaccgagagactgttcgtgctgagcaacagcagcaccctggacctggccagcatcaacctgcagagaggcagagaccacggcctgcccggctacaacgagtggagagagttctgcggcctgcccagactggagacccccgccgacctgagcaccgccatcgccagcagaagcgtggccgacaagatcctggacctgtacaagcaccccgacaacatcgacgtgtggctgggcggcctggccgagaacttcctgcccagagccagaaccggccccctgttcgcctgcctgatcggcaagcagatgaaggccctgagagacggcgactggttctggtgggagaacagccacgtgttcaccgacgcccagagaagagagctggagaagcacagcctgagcagagtgatctgcgacaacaccggcctgaccagagtgcccatggacgccttccaggtgggcaagttccccgaggacttcgagagctgcgacagcatcaccggcatgaacctggaggcctggagagagaccttcccccaggacgacaagtgcggcttccccgagagcgtggagaacggcgacttcgtgcactgcgaggagagcggcagaagagtgctggtgtacagctgcagacacggctacgagctgcagggcagagagcagctgacctgcacccaggagggctgggacttccagccccccctgtgcaaggacagcggcagactgcccagagtgacctggatcagcatgagcctggccgccctgctgatcggcggcttcgccggcctgaccagcaccgtgatctgcagatggaccagaaccggcaccaagagcaccctgcccatcagcgagaccggcggcggcacccccgagctgagatgcggcaagcaccaggccgtgggcaccagcccccagagagccgccgcccaggacagcgagcaggagagcgccggcatggagggcagagacacccacagactgcccagagccctgtag

SEQ ID NO: 102490 - DNA, 2283 bp, synthetic construct
  misc_feature 1..2283: note = Description of Artificial Sequence: Synthetic coding sequence
  source 1..2283: mol_type = other DNA
atgagagccctggccgtgctgagcgtgaccctggtgatggcctgcaccgaggccttcttccccttcatcagcagaggcaaggagctgctgtggggcaagcccgaggagagcagagtgagcagcgtgctggaggagagcaagagactggtggacaccgccatgtacgccaccatgcagagaaacctgaagaagagaggcatcctgagccccgcccagctgctgagcttcagcaagctgcccgagcccaccagcggcgtgatcgccagagccgccgagatcatggagaccagcatccaggccatgaagagaaaggtgaacctgaagacccagcagagccagcaccccaccgacgccctgagcgaggacctgctgagcatcatcgccaacatgagcggctgcctgccctacatgctgccccccaagtgccccaacacctgcctggccaacaagtacagacccatcaccggcgcctgcaacaacagagaccaccccagatggggcgccagcaacaccgccctggccagatggctgccccccgtgtacgaggacggcttcagccagcccagaggctggaaccccggcttcctgtacaacggcttccccctgccccccgtgagagaggtgaccagacacgtgatccaggtgagcaacgaggtggtgaccgacgacgacagatacagcgacctgctgatggcctggggccagtacatcgaccacgacatcgccttcaccccccagagcaccagcaaggccgccttcggcggcggcgccgactgccagatgacctgcgagaaccagaacccctgcttccccatccagatcatcaccctgagagactacatccccagaatcctgggccccgaggccttccagcagtacgtgggcccctacgagggctacgacagcaccgccaaccccaccgtgagcaacgtgttcagcaccgccgccttcagattcggccacgccaccatccaccccctggtgagaagactggacgccagcttccaggagcaccccgacctgcccggcctgtggctgcaccaggccttcttcagcccctggaccctgctgagaggcggcggcctggaccccctgatcagaggcctgctggccagacccgccaagctgcaggtgcaggaccagctgatgaacgaggagctgaccgagagactgttcgtgctgagcaacagcagcaccctggacctggccagcatcaacctgcagagaggcagagaccacggcctgcccggctacaacgagtggagagagttctgcggcctgcccagactggagacccccgccgacctgagcaccgccatcgccagcagaagcgtggccgacaagatcctggacctgtacaagcaccccgacaacatcgacgtgtggctgggcggcctggccgagaacttcctgcccagagccagaaccggccccctgttcgcctgcctgatcggcaagcagatgaaggccctgagagacggcgactggttctggtgggagaacagccacgtgttcaccgacgcccagagaagagagctggagaagcacagcctgagcagagtgatctgcgacaacaccggcctgaccagagtgcccatggacgccttccaggtgggcaagttccccgaggacttcgagagctgcgacagcatcaccggcatgaacctggaggcctggagagagaccttcccccaggacgacaagtgcggcttccccgagagcgtggagaacggcgacttcgtgcactgcgaggagagcggcagaagagtgctggtgtacagctgcagacacggctacgagctgcagggcagagagcagctgacctgcacccaggagggctgggacttccagccccccctgtgcaaggacgtgaacgagtgcgccgacggcgcccaccccccctgccacgccagcgccagatgcagaaacaccaagggcggcttccagtgcctgtgcgccgacccctacgagctgggcgacgacggcagaacctgcgtggacagcggcagactgcccagagtgacctggatcagcatgagcctggccgccctgctgatcggcggcttcgccggcctgaccagcaccgtgatctgcagatggaccagaaccggcaccaagagcaccctgcccatcagcgagaccggcggcggcacccccgagctgagatgcggcaagcaccaggccgtgggcaccagcccccagagagccgccgcccaggacagcgagcaggagagcgccggcatggagggcagagacacccacagactgcccagagccctgtag

SEQ ID NO: 102491 - DNA, 2283 bp, synthetic construct; identical to SEQ ID NO: 102490
  misc_feature 1..2283: note = Description of Artificial Sequence: Synthetic coding sequence
  source 1..2283: mol_type = other DNA

SEQ ID NO: 102492 - DNA, 2631 bp, synthetic construct
  misc_feature 1..2631: note = Description of Artificial Sequence: Synthetic coding sequence
  source 1..2631: mol_type = other DNA
atgagagccctggccgtgctgagcgtgaccctggtgatggcctgcaccgaggccttcttccccttcatcagcagaggcaaggagctgctgtggggcaagcccgaggagagcagagtgagcagcgtgctggaggagagcaagagactggtggacaccgccatgtacgccaccatgcagagaaacctgaagaagagaggcatcctgagccccgcccagctgctgagcttcagcaagctgcccgagcccaccagcggcgtgatcgccagagccgccgagatcatggagaccagcatccaggccatgaagagaaaggtgaacctgaagacccagcagagccagcaccccaccgacgccctgagcgaggacctgctgagcatcatcgccaacatgagcggctgcctgccctacatgctgccccccaagtgccccaacacctgcctggccaacaagtacagacccatcaccggcgcctgcaacaacagagaccaccccagatggggcgccagcaacaccgccctggccagatggctgccccccgtgtacgaggacggcttcagccagcccagaggctggaaccccggcttcctgtacaacggcttccccctgccccccgtgagagaggtgaccagacacgtgatccaggtgagcaacgaggtggtgaccgacgacgacagatacagcgacctgctgatggcctggggccagtacatcgaccacgacatcgccttcaccccccagagcaccagcaaggccgccttcggcggcggcgccgactgccagatgacctgcgagaaccagaacccctgcttccccatccagctgcccgaggaggccagacccgccgccggcaccgcctgcctgcccttctacagaagcagcgccgcctgcggcaccggcgaccagggcgccctgttcggcaacctgagcaccgccaaccccagacagcagatgaacggcctgaccagcttcctggacgccagcaccgtgtacggcagcagccccgccctggagagacagctgagaaactggaccagcgccgagggcctgctgagagtgcacgccagactgagagacagcggcagagcctacctgcccttcgtgccccccagagcccccgccgcctgcgcccccgagcccggcatccccggcgagaccagaggcccctgcttcctggccggcgacggcagagccagcgaggtgcccagcctgaccgccctgcacaccctgtggctgagagagcacaacagactggccgccgccctgaaggccctgaacgcccactggagcgccgacgccgtgtaccaggaggccagaaaggtggtgggcgccctgcaccagatcatcaccctgagagactacatccccagaatcctgggccccgaggccttccagcagtacgtgggcccctacgagggctacgacagcaccgccaaccccaccgtgagcaacgtgttcagcaccgccgccttcagattcggccacgccaccatccaccccctggtgagaagactggacgccagcttccaggagcaccccgacctgcccggcctgtggctgcaccaggccttcttcagcccctggaccctgctgagaggcggctacaacgagtggagagagttctgcggcctgcccagactggagacccccgccgacctgagcaccgccatcgccagcagaagcgtggccgacaagatcctggacctgtacaagcaccccgacaacatcgacgtgtggctgggcggcctggccgagaacttcctgcccagagccagaaccggccccctgttcgcctgcctgatcggcaagcagatgaaggccctgagagacggcgactggttctggtgggagaacagccacgtgttcaccgacgcccagagaagagagctggagaagcacagcctgagcagagtgatctgcgacaacaccggcctgaccagagtgcccatggacgccttccaggtgggcaagttccccgaggacttcgagagctgcgacagcatcaccggcatgaacctggaggcctggagagagaccttcccccaggacgacaagtgcggcttccccgagagcgtggagaacggcgacttcgtgcactgcgaggagagcggcagaagagtgctggtgtacagctgcagacacggctacgagctgcagggcagagagcagctgacctgcacccaggagggctgggacttccagccccccctgtgcaaggacgtgaacgagtgcgccgacggcgcccaccccccctgccacgccagcgccagatgcagaaacaccaagggcggcttccagtgcctgtgcgccgacccctacgagctgggcgacgacggcagaacctgcgtggacagcggcagactgcccagagtgacctggatcagcatgagcctggccgccctgctgatcggcggcttcgccggcctgaccagcaccgtgatctgcagatggaccagaaccggcaccaagagcaccctgcccatcagcgagaccggcggcggcacccccgagctgagatgcggcaagcaccaggccgtgggcaccagcccccagagagccgccgcccaggacagcgagcaggagagcgccggcatggagggcagagacacccacagactgcccagagccctgtag

SEQ ID NO: 102493 - DNA, 519 bp, synthetic construct
  misc_feature 1..519: note = Description of Artificial Sequence: Synthetic coding sequence
  source 1..519: mol_type = other DNA
atgagagccctggccgtgctgagcgtgaccctggtgatggcctgcaccgaggccttcttccccttcatcagcagaggcaaggagctgctgtggggcaagcccgaggagagcagagtgagcagcgtgctggaggagagcaagagactggtggacaccgccatgtacgccaccatgcagagaaacctgaagaagagaggcatcctgagccccgcccagctgctgagcttcagcaagctgcccgagcccaccagcggcgtgatcgccagagccgccgagatcatggagaccagcatccaggccatgaagagaaaggtgaacctgaagacccagcagagccagcaccccaccgacgccctgagcgaggacctgctgagcatcatcgccaacatgagcggctgcctgccctacatgctgccccccaagtgccccaacacctgcctggccaacaagtacagacccatcaccggcgcctgcaacaacagagaccaccccagatggggcgccagcaacaccgcctag

SEQ ID NO: 102494 - DNA, 462 bp, synthetic construct
  misc_feature 1..462: note = Description of Artificial Sequence: Synthetic coding sequence
  source 1..462: mol_type = other DNA
atgaacggcctgaccagcttcctggacgccagcaccgtgtacggcagcagccccgccctggagagacagctgagaaactggaccagcgccgagggcctgctgagagtgcacgccagactgagagacagcggcagagcctacctgcccttcgtgccccccagagcccccgccgcctgcgcccccgagcccggcatccccggcgagaccagaggcccctgcttcctggccggcgaccccagacagagaggccccctgcccgacggcaccgcccacgccgtggccgccagagcccagccccccggcagaggcgcccagggcccccagtgcgccctggagagaggcagaagagtgcccggcggcgcccagggcagaggcagaagcgcccccgaccaccaccccgagggcctgcacccccaggaccccggcaccagaggcctgcccgccgtgagaggcagcctgtag

SEQ ID NO: 102495 - DNA, 525 bp, synthetic construct
  misc_feature 1..525: note = Description of Artificial Sequence: Synthetic coding sequence
  source 1..525: mol_type = other DNA
atgagagccctggccgtgctgagcgtgaccctggtgatggcctgcaccgaggccttcttccccttcatcagcagaggcaaggagctgctgtggggcaagcccgaggagagcagagtgagcagcgtgctggaggagagcaagagactggtggacaccgccatgtacgccaccatgcagagaaacctgaagaagagaggcatcctgagccccgcccagctgctgagcttcagcaagctgcccgagcccaccagcggcgtgatcgccagagccgccgagatcatggagaccagcatccaggccatgaagagaaaggtgaacctgaagacccagcagagccagcaccccaccgacgccctgagcgaggacctgctgagcatcatcgccaacatgagcggctgcctgccctacatgctgccccccaagtgccccaacacctgcctggccaacaagtacagacccatcaccggcgcctgcaacaacagaaagatgaagtacaagcccgaccacagcgagaccgccaactag

SEQ ID NO: 102496 - DNA, 2295 bp, synthetic construct
  misc_feature 1..2295: note = Description of Artificial Sequence: Synthetic coding sequence
  source 1..2295: mol_type = other DNA
atgagacccgccgacctgctgcagctggtgctgctgctggacctgcccagagacctgggcggcatgggctgcagcagccccccctgcgagtgccaccaggaggaggacttcagagtgacctgcaaggacatccagagaatccccagcctgccccccagcacccagaccctgaagctgatcgagacccacctgagaaccatccccagccacgccttcagcaacctgcccaacatcagcagaatctacgtgagcatcgacgtgaccctgcagcagctggagagccacagcttctacaacctgagcaaggtgacccacatcgagatcagaaacaccagaaacctgacctacatcgaccccgacgccctgaaggagctgcccctgctgaagttcctgggcatcttcaacaccggcctgaagatgttccccgacctgaccaaggtgtacagcaccgacatcttcttcatcctggagatcaccgacaacccctacatgaccagcatccccgtgaacgccttccagggcctgtgcaacgagaccctgaccctgaagctgtacaacaacggcttcaccagcgtgcagggctacgccttcaacggcaccaagctggacgccgtgtacctgaacaagaacaagtacctgaccgtgatcgacaaggacgccttcggcggcgtgtacagcggccccagcctgctggacgtgagccagaccagcgtgaccgccctgcccagcaagggcctggagcacctgaaggagctgatcgccagaaacacctggaccctgaagaagctgcccctgagcctgagcttcctgcacctgaccagagccgacctgagctaccccagccactgctgcgccttcaagaaccagaagaagatcagaggcatcctggagagcctgatgtgcaacgagagcagcatgcagagcctgagacagagaaagagcgtgaacgccctgaacagccccctgcaccaggagtacgaggagaacctgggcgacagcatcgtgggctacaaggagaagagcaagttccaggacacccacaacaacgcccactactacgtgttcttcgaggagcaggaggacgagatcatcggcttcggccaggagctgaagaacccccaggaggagaccctgcaggccttcgacagccactacgactacaccatctgcggcgacagcgaggacatggtgtgcacccccaagagcgacgagttcaacccctgcgaggacatcatgggctacaagttcctgagaatcgtggtgtggttcgtgagcctgctggccctgctgggcaacgtgttcgtgctgctgatcctgctgaccagccactacaagctgaacgtgcccagattcctgatgtgcaacctggccttcgccgacttctgcatgggcatgtacctgctgctgatcgccagcgtggacctgtacacccacagcgagtactacaaccacgccatcgactggcagaccggccccggctgcaacaccgccggcttcttcaccgtgttcgccagcgagctgagcgtgtacaccctgaccgtgatcaccctggagagatggtacgccatcaccttcgccatgagactggacagaaagatcagactgagacacgcctgcgccatcatggtgggcggctgggtgtgctgcttcctgctggccctgctgcccctggtgggcatcagcagctacgccaaggtgagcatctgcctgcccatggacaccgagacccccctggccctggcctacatcgtgttcgtgctgaccctgaacatcgtggccttcgtgatcgtgtgctgctgctacgtgaagatctacatcaccgtgagaaacccccagtacaaccccggcgacaaggacaccaagatcgccaagagaatggccgtgctgatcttcaccgacttcatctgcatggcccccatcagcttctacgccctgagcgccatcctgaacaagcccctgatcaccgtgagcaacagcaagatcctgctggtgctgttctaccccctgaacagctgcgccaaccccttcctgtacgccatcttcaccaaggccttccagagagacgtgttcatcctgctgagcaagttcggcatctgcaagagacaggcccaggcctacagaggccagagagtgccccccaagaacagcaccgacatccaggtgcagaaggtgacccacgagatgagacagggcctgcacaacatggaggacgtgtacgagctgatcgagaacagccacctgacccccaagaagcagggccagatcagcgaggagtacatgcagaccgtgctgtag

SEQ ID NO: 102497 - DNA, 762 bp, synthetic construct
  misc_feature 1..762: note = Description of Artificial Sequence: Synthetic coding sequence
  source 1..762: mol_type = other DNA
atgagacccgccgacctgctgcagctggtgctgctgctggacctgcccagagacctgggcggcatgggctgcagcagccccccctgcgagtgccaccaggaggaggacttcagagtgacctgcaaggacatccagagaatccccagcctgccccccagcacccagaccctgaagctgatcgagacccacctgagaaccatccccagccacgccttcagcaacctgcccaacatcagcagaatctacgtgagcatcgacgtgaccctgcagcagctggagagccacagcttctacaacctgagcaaggtgacccacatcgagatcagaaacaccagaaacctgacctacatcgaccccgacgccctgaaggagctgcccctgctgaagttcctgggcatcttcaacaccggcctgaagatgttccccgacctgaccaaggtgtacagcaccgacatcttcttcatcctggagatcaccgacaacccctacatgaccagcatccccgtgaacgccttccagggcctgtgcaacgagaccctgaccctgaagctgtacaacaacggcttcaccagcgtgcagggctacgccttcaacggcaccaagctggacgccgtgtacctgaacaagaacaagtacctgaccgtgatcgacaaggacgccttcggcggcgtgtacagcggccccagcctgctgctgcccctgggcagaaagagcctgagcttcgagacccagaaggcccccagaagcagcatgcccagctag

SEQ ID NO: 102498 - DNA, 1236 bp, synthetic construct
  misc_feature 1..1236: note = Description of Artificial Sequence: Synthetic coding sequence
  source 1..1236: mol_type = other DNA
atgagacccgccgacctgctgcagctggtgctgctgctggacctgcccagagacctgggcggcatgggctgcagcagccccccctgcgagtgccaccaggaggaggacttcagagtgacctgcaaggacatccagagaatccccagcctgccccccagcacccagaccctgaagctgatcgagacccacctgagaatcgtggtgtggttcgtgagcctgctggccctgctgggcaacgtgttcgtgctgctgatcctgctgaccagccactacaagctgaacgtgcccagattcctgatgtgcaacctggccttcgccgacttctgcatgggcatgtacctgctgctgatcgccagcgtggacctgtacacccacagcgagtactacaaccacgccatcgactggcagaccggccccggctgcaacaccgccggcttcttcaccgtgttcgccagcgagctgagcgtgtacaccctgaccgtgatcaccctggagagatggtacgccatcaccttcgccatgagactggacagaaagatcagactgagacacgcctgcgccatcatggtgggcggctgggtgtgctgcttcctgctggccctgctgcccctggtgggcatcagcagctacgccaaggtgagcatctgcctgcccatggacaccgagacccccctggccctggcctacatcgtgttcgtgctgaccctgaacatcgtggccttcgtgatcgtgtgctgctgctacgtgaagatctacatcaccgtgagaaacccccagtacaaccccggcgacaaggacaccaagatcgccaagagaatggccgtgctgatcttcaccgacttcatctgcatggcccccatcagcttctacgccctgagcgccatcctgaacaagcccctgatcaccgtgagcaacagcaagatcctgctggtgctgttctaccccctgaacagctgcgccaaccccttcctgtacgccatcttcaccaaggccttccagagagacgtgttcatcctgctgagcaagttcggcatctgcaagagacaggcccaggcctacagaggccagagagtgccccccaagaacagcaccgacatccaggtgcagaaggtgacccacgagatgagacagggcctgcacaacatggaggacgtgtacgagctgatcgagaacagccacctgacccccaagaagcagggccagatcagcgaggagtacatgcagaccgtgctgtag

SEQ ID NO: 102499 - DNA, 2295 bp, synthetic construct; identical to SEQ ID NO: 102496
  misc_feature 1..2295: note = Description of Artificial Sequence: Synthetic coding sequence
  source 1..2295: mol_type = other DNA

SEQ ID NO: 102500 - DNA, 825 bp, synthetic construct
  misc_feature 1..825: note = Description of Artificial Sequence: Synthetic coding sequence
  source 1..825: mol_type = other DNA
atgagacccgccgacctgctgcagctggtgctgctgctggacctgcccagagacctgggcggcatgggctgcagcagccccccctgcgagtgccaccaggaggaggacttcagagtgacctgcaaggacatccagagaatccccagcctgccccccagcacccagaccctgaagctgatcgagacccacctgagaaccatccccagccacgccttcagcaacctgcccaacatcagcagaatctacgtgagcatcgacgtgaccctgcagcagctggagagccacagcttctacaacctgagcaaggtgacccacatcgagatcagaaacaccagaaacctgacctacatcgaccccgacgccctgaaggagctgcccctgctgaagttcctgggcatcttcaacaccggcctgaagatgttccccgacctgaccaaggtgtacagcaccgacatcttcttcatcctggagatcaccgacaacccctacatgaccagcatccccgtgaacgccttccagggcctgtgcaacgagaccctgaccctgaagctgtacaacaacggcttcaccagcgtgcagggctacgccttcaacggcaccaagctggacgccgtgtacctgaacaagaacaagtacctgaccgtgatcgacaaggacgccttcggcggcgtgtacagcggccccagcctgctggtggagaacgtggccgtgagcggcaagggcttctgcaagagcctgttcagctggctgtacagactgcccctgggcagaaagagcctgagcttcgagacccagaaggcccccagaagcagcatgcccagctag

SEQ ID NO: 102501 - DNA, 912 bp, synthetic construct
  misc_feature 1..912: note = Description of Artificial Sequence: Synthetic coding sequence
  source 1..912: mol_type = other DNA
atgagcgacgccggcggcggcaagaagccccccgtggacccccaggccggccccggccccggccccggcagagccgccggcgagagaggcctgagcggcagcttccccctggtgctgaagaagctgatggagaacccccccagagaggccagactggacaaggagaagggcaaggagaagctggaggaggacgaggccgccgccgccagcaccatggccgtgagcgccagcctgatgccccccatctgggacaagaccatcccctacgacggcgagagcttccacctggagtacatggacctggacgagttcctgctggagaacggcatccccgccagccccacccacctggcccacaacctgctgctgcccgtggccgagctggagggcaaggagagcgccagcagcagcaccgccagcccccccagcagcagcaccgccatcttccagcccagcgagaccgtgagcagcaccgagagcagcctggagaaggagagagagacccccagccccatcgaccccaactgcgtggaggtggacgtgaacttcaaccccgaccccgccgacctggtgctgagcagcgtgcccggcggcgagctgttcaaccccagaaagcacaagttcgccgaggaggacctgaagccccagcccatgatcaagaaggccaagaaggtgttcgtgcccgacgagcagaaggacgagaagtactggaccagaagaaagaagaacaacgtggccgccaagagaagcagagacgccagaagactgaaggagaaccagatcaccatcagagccgccttcctggagaaggagaacaccgccctgagaaccgaggtggccgagctgagaaaggaggtgggcaagtgcaagaccatcgtgagcaagtacgagaccaagtacggccccctgtag

SEQ ID NO: 102502 - DNA, 555 bp, synthetic construct
  misc_feature 1..555: note = Description of Artificial Sequence: Synthetic coding sequence
  source 1..555: mol_type = other DNA
tgattcatcttcctgcccagacccggcaccagcctgggcagaatcagaaaggccgacaaggagaagggcaaggagaagctggaggaggacgaggccgccgccgccagcaccatggccgtgagcgccagcctgatgccccccatctgggacaagaccatcccctacgacggcgagagcttccacctggagtacatggacctggacgagttcctgctggagaacggcatccccgccagccccacccacctggcccacaacctgctgctgcccgtggccgagctggagggcaaggagagcgccagcagcagcaccgccagcccccccagcagcagcaccgccatcttccagcccagcgagaccgtgagcagcaccgagagcagcctggagaaggagagagagacccccagccccatcgaccccaactgcgtggaggtggacgtgaacttcaaccccgaccccgccgacctggtgctgagcagcgtgcccggcggcgagctgttcaaccccagaaagcacaagttcgccgaggaggacctgaagccccagcccatgtag

SEQ ID NO: 102503 - DNA, 822 bp, synthetic construct
  misc_feature 1..822: note = Description of Artificial Sequence: Synthetic coding sequence
  source 1..822: mol_type = other DNA
atggacatgcccgaggtgctgaagagcctgctggagcacagcctgccctggcccgagaagagaaccgacaaggagaagggcaaggagaagctggaggaggacgaggccgccgccgccagcaccatggccgtgagcgccagcctgatgccccccatctgggacaagaccatcccctacgacggcgagagcttccacctggagtacatggacctggacgagttcctgctggagaacggcatccccgccagccccacccacctggcccacaacctgctgctgcccgtggccgagctggagggcaaggagagcgccagcagcagcaccgccagcccccccagcagcagcaccgccatcttccagcccagcgagaccgtgagcagcaccgagagcagcctggagaaggagagagagacccccagccccatcgaccccaactgcgtggaggtggacgtgaacttcaaccccgaccccgccgacctggtgctgagcagcgtgcccggcggcgagctgttcaaccccagaaagcacaagttcgccgaggaggacctgaagccccagcccatgatcaagaaggccaagaaggtgttcgtgcccgacgagcagaaggacgagaagtactggaccagaagaaagaagaacaacgtggccgccaagagaagcagagacgccagaagactgaaggagaaccagatcaccatcagagccgccttcctggagaaggagaacaccgccctgagaaccgaggtggccgagctgagaaaggaggtgggcaagtgcaagaccatcgtgagcaagtacgagaccaagtacggccccctgtag

SEQ ID NO: 102504 - DNA, 822 bp, synthetic construct; identical to SEQ ID NO: 102503
  misc_feature 1..822: note = Description of Artificial Sequence: Synthetic coding sequence
  source 1..822: mol_type = other DNA

SEQ ID NO: 102505 - DNA, 729 bp, synthetic construct
  misc_feature 1..729: note = Description of Artificial Sequence: Synthetic coding sequence
  source 1..729: mol_type = other DNA
atgcccggcccctggctgctgctggccctggccctgaccctgaacctgaccggcgtgcccggcggcagagcccagcccgaggccgcccagcaggaggccgtgaccgccgccgagcaccccggcctggacgacttcctgagacaggtggagagactgctgttcctgagagagaacatccagagactgcagggcgaccagggcgagcacagcgccagccagatcttccagagcgactggctgagcaagagacagcaccccggcaagagagaggaggaggaggaggagggcgtggaggaggaggaggaggaggagggcggcgccgtgggcccccacaagagacagcaccccggcagaagagaggacgaggccagctggagcgtggacgtgacccagcacaagagacagcaccccggcagaagaagcccctggctggcctacgccgtgcccaagagacagcaccccggcagaagactggccgaccccaaggcccagagaagctgggaggaggaggaggaggaggaggagagagaggaggacctgatgcccgagaagagacagcaccccggcaagagagccctgggcggcccctgcggcccccagggcgcctacggccaggccggcctgctgctgggcctgctggacgacctgagcagaagccagggcgccgaggagaagagacagcaccccggcagaagagccgcctgggtgagagagcccctggaggagtag

SEQ ID NO: 102506 - DNA, 3075 bp, synthetic construct
  misc_feature 1..3075: note = Description of Artificial Sequence: Synthetic coding sequence
  source 1..3075: mol_type = other DNA
atgggcgaggacgacgccgccctgagagccggcagcagaggcctgagcgacccctgggccgacagcgtgggcgtgagacccagaaccaccgagagacacatcgccgtgcacaagagactggtgctggccttcgccgtgagcctggtggccctgctggccgtgaccatgctggccgtgctgctgagcctgagattcgacgagtgcggcgccagcgccacccccggcgccgacggcggccccagcggcttccccgagagaggcggcaacggcagcctgcccggcagcgccagaagaaaccaccacgccggcggcgacagctggcagcccgaggccggcggcgtggccagccccggcaccaccagcgcccagccccccagcgaggaggagagagagccctgggagccctggacccagctgagactgagcggccacctgaagcccctgcactacaacctgatgctgaccgccttcatggagaacttcaccttcagcggcgaggtgaacgtggagatcgcctgcagaaacgccaccagatacgtggtgctgcacgccagcagagtggccgtggagaaggtgcagctggccgaggacagagccttcggcgccgtgcccgtggccggcttcttcctgtacccccagacccaggtgctggtggtggtgctgaacagaaccctggacgcccagagaaactacaacctgaagatcatctacaacgccctgatcgagaacgagctgctgggcttcttcagaagcagctacgtgctgcacggcgagagaagattcctgggcgtgacccagttcagccccacccacgccagaaaggccttcccctgcttcgacgagcccatctacaaggccaccttcaagatcagcatcaagcaccaggccacctacctgagcctgagcaacatgcccgtggagaccagcgtgttcgaggaggacggctgggtgaccgaccacttcagccagacccccctgatgagcacctactacctggcctgggccatctgcaacttcacctacagagagaccaccaccaagagcggcgtggtggtgagactgtacgccagacccgacgccatcagaagaggcagcggcgactacgccctgcacatcaccaagagactgatcgagttctacgaggactacttcaaggtgccctacagcctgcccaagctggacctgctggccgtgcccaagcacccctacgccgccatggagaactggggcctgagcatcttcgtggagcagagaatcctgctggaccccagcgtgagcagcatcagctacctgctggacgtgaccatggtgatcgtgcacgagatctgccaccagtggttcggcgacctggtgacccccgtgtggtgggaggacgtgtggctgaaggagggcttcgcccactacttcgagttcgtgggcaccgactacctgtaccccggctggaacatggagaagcagagattcctgaccgacgtgctgcacgaggtgatgctgctggacggcctggccagcagccaccccgtgagccaggaggtgctgcaggccaccgacatcgacagagtgttcgactggatcgcctacaagaagggcgccgccctgatcagaatgctggccaacttcatgggccacagcgtgttccagagaggcctgcaggactacctgaccatccacaagtacggcaacgccgccagaaacgacctgtggaacaccctgagcgaggccctgaagagaaacggcaagtacgtgaacatccaggaggtgatggaccagtggaccctgcagatgggctaccccgtgatcaccatcctgggcaacaccaccgccgagaacagaatcatcatcacccagcagcacttcatctacgacatcagcgccaagaccaaggccctgaagctgcagaacaacagctacctgtggcagatccccctgaccatcgtggtgggcaacagaagccacgtgagcagcgaggccatcatctgggtgagcaacaagagcgagcaccacagaatcacctacctggacaagggcagctggctgctgggcaacatcaaccagaccggctacttcagagtgaactacgacctgagaaactggagactgctgatcgaccagctgatcagaaaccacgaggtgctgagcgtgagcaacagagccggcctgatcgacgacgccttcagcctggccagagccggctacctgccccagaacatccccctggagatcatcagatacctgagcgaggagaaggacttcctgccctggcacgccgccagcagagccctgtaccccctggacaagctgctggacagaatggagaactacaacatcttcaacgagtacatcctgaagcaggtggccaccacctacatcaagctgggctggcccaagaacaacttcaacggcagcctggtgcaggccagctaccagcacgaggagctgagaagagaggtgatcatgctggcctgcagcttcggcaacaagcactgccaccagcaggccagcaccctgatcagcgactggatcagcagcaacagaaacagaatccccctgaacgtgagagacatcgtgtactgcaccggcgtgagcctgctggacgaggacgtgtgggagttcatctggatgaagttccacagcaccaccgccgtgagcgagaagaagatcctgctggaggccctgacctgcagcgacgacagaaacctgctgaacagactgctgaacctgagcctgaacagcgaggtggtgctggaccaggacgccatcgacgtgatcatccacgtggccagaaacccccacggcagagacctggcctggaagttcttcagagacaagtggaagatcctgaacaccagatacggcgaggccctgttcatgaacagcaagctgatcagcggcgtgaccgagttcctgaacaccgagggcgagctgaaggagctgaagaacttcatgaagaactacgacggcgtggccgccgccagcttcagcagagccgtggagaccgtggaggccaacgtgagatggaagatgctgtaccaggacgagctgttccagtggctgggcaaggccctgagacactag

SEQ ID NO: 102507 - DNA, 1197 bp, synthetic construct
  misc_feature 1..1197: note = Description of Artificial Sequence: Synthetic coding sequence
  source 1..1197: mol_type = other DNA
atggagaacgagaccgtgagcgagctgaaccagacccagctgcagcccagagccgtggtggccctggagtaccaggtggtgaccatcctgctggtgctgatcatctgcggcctgggcatcgtgggcaacatcatggtggtgctggtggtgatgagaaccaagcacatgagaacccccaccaactgctacctggtgagcctggccgtggccgacctgatggtgctggtggccgccggcctgcccaacatcaccgacagcatctacggcagctgggtgtacggctacgtgggctgcctgtgcatcacctacctgcagtacctgggcatcaacgccagcagctgcagcatcaccgccttcaccatcgagagatacatcgccatctgccaccccatcaaggcccagttcctgtgcaccttcagcagagccaagaagatcatcatcttcgtgtgggccttcaccagcctgtactgcatgctgtggttcttcctgctggacctgaacatcagcacctacaaggacgccatcgtgatcagctgcggctacaagatcagcagaaactactacagccccatctacctgatggacttcggcgtgttctacgtggtgcccatgatcctggccaccgtgctgtacggcttcatcgccagaatcctgttcctgaaccccatccccagcgaccccaaggagaacagcaagacctggaagaacgacagcacccaccagaacaccaacctgaacgtgaacaccagcaacagatgcttcaacagcaccgtgagcagcagaaagcaggtgaccaagatgctggccgtggtggtgatcctgttcgccctgctgtggatgccctacagaaccctggtggtggtgaacagcttcctgagcagccccttccaggagaactggttcctgctgttctgcagaatctgcatctacctgaacagcgccatcaaccccgtgatctacaacctgatgagccagaagttcagagccgccttcagaaagctgtgcaactgcaagcagaagcccaccgagaagcccgccaactacagcgtggccctgaactacagcgtgatcaaggagagcgaccacttcagcaccgagctggacgacatcaccgtgaccgacacctacctgagcgccaccaaggtgagcttcgacgacacctgcctggccagcgaggtgagcttcagccagagctag

SEQ ID NO: 102508 - DNA, 1197 bp, synthetic construct; identical to SEQ ID NO: 102507
  misc_feature 1..1197: note = Description of Artificial Sequence: Synthetic coding sequence
  source 1..1197: mol_type = other DNA

SEQ ID NO: 102509 - DNA, 1128 bp, synthetic construct
  misc_feature 1..1128: note = Description of Artificial Sequence: Synthetic coding sequence
  source 1..1128: mol_type = other DNA
atggaggacgagatgcccaagaccctgtacgtgggcaacctgagcagagacgtgaccgaggccctgatcctgcagctgttcagccagatcggcccctgcaagaactgcaagatgatcatggacaccgccggcaacgacccctactgcttcgtggagttccacgagcacagacacgccgccgccgccctggccgccatgaacggcagaaagatcatgggcaaggaggtgaaggtgaactgggccaccacccccagcagccagaagaaggacaccagcaaccacttccacgtgttcgtgggcgacctgagccccgagatcaccaccgaggacatcaaggccgccttcgcccccttcggcagaatcagcgacgccagagtggtgaaggacatggccaccggcaagagcaagggctacggcttcgtgagcttcttcaacaagtgggacgccgagaacgccatccagcagatgggcggccagtggctgggcggcagacagatcagaaccaactgggccaccagaaagccccccgcccccaagagcacctacgagagcaacaccaagcagctgagctacgacgaggtggtgaaccagagcagccccagcaactgcaccgtgtactgcggcggcgtgaccagcggcctgaccgagcagctgatgagacagaccttcagccccttcggccagatcatggagatcagagtgttccccgacaagggctacagcttcgtgagattcaacagccacgagagcgccgcccacgccatcgtgagcgtgaacggcaccaccatcgagggccacgtggtgaagtgctactggggcaaggagaccctggacatgatcaaccccgtgcagcagcagaaccagatcggctacccccagccctacggccagtggggccagtggtacggcaacgcccagcagatcggccagtacatgcccaacggctggcaggtgcccgcctacggcatgtacggccaggcctggaaccagcagggcttcaaccagacccagagcagcgccccctggatgggccccaactacggcgtgcagcccccccagggccagaacggcagcatgctgcccaaccagcccagcggctacagagtggccggctacgagacccagtag

SEQ ID NO: 102510 - DNA, 1161 bp, synthetic construct
  misc_feature 1..1161: note = Description of Artificial Sequence: Synthetic coding sequence
  source 1..1161: mol_type = other DNA
atggaggacgagatgcccaagaccctgtacgtgggcaacctgagcagagacgtgaccgaggccctgatcctgcagctgttcagccagatcggcccctgcaagaactgcaagatgatcatggacaccgccggcaacgacccctactgcttcgtggagttccacgagcacagacacgccgccgccgccctggccgccatgaacggcagaaagatcatgggcaaggaggtgaaggtgaactgggccaccacccccagcagccagaagaaggacaccagcagcagcaccgtggtgagcacccagagaagccaggaccacttccacgtgttcgtgggcgacctgagccccgagatcaccaccgaggacatcaaggccgccttcgcccccttcggcagaatcagcgacgccagagtggtgaaggacatggccaccggcaagagcaagggctacggcttcgtgagcttcttcaacaagtgggacgccgagaacgccatccagcagatgggcggccagtggctgggcggcagacagatcagaaccaactgggccaccagaaagccccccgcccccaagagcacctacgagagcaacaccaagcagctgagctacgacgaggtggtgaaccagagcagccccagcaactgcaccgtgtactgcggcggcgtgaccagcggcctgaccgagcagctgatgagacagaccttcagccccttcggccagatcatggagatcagagtgttccccgacaagggctacagcttcgtgagattcaacagccacgagagcgccgcccacgccatcgtgagcgtgaacggcaccaccatcgagggccacgtggtgaagtgctactggggcaaggagaccctggacatgatcaaccccgtgcagcagcagaaccagatcggctacccccagccctacggccagtggggccagtggtacggcaacgcccagcagatcggccagtacatgcccaacggctggcaggtgcccgcctacggcatgtacggccaggcctggaaccagcagggcttcaaccagacccagagcagcgccccctggatgggccccaactacggcgtgcagcccccccagggccagaacggcagcatgctgcccaaccagcccagcggctacagagtggccggctacgagacccagtag

SEQ ID NO: 102511 - DNA, 1392 bp, synthetic construct
  misc_feature 1..1392: note = Description of Artificial Sequence: Synthetic coding sequence
  source 1..1392: mol_type = other DNA
cccctggtgagcagagagacccccctgagctgcagccacaacagactgaacgacctgggcggcagcgagggccagggcgccggccccggcggcgccgccgccaccgccgccgccatggaggacgagatgcccaagaccctgtacgtgggcaacctgagcagagacgtgaccgaggccctgatcctgcagctgttcagccagatcggcccctgcaagaactgcaagatgatcatggacaccgccggcaacgacccctactgcttcgtggagttccacgagcacagacacgccgccgccgccctggccgccatgaacggcagaaagatcatgggcaaggaggtgaaggtgaactgggccaccacccccagcagccagaagaaggacaccagcagcagcaccgtggtgagcacccagagaagccaggaccacttccacgtgttcgtgggcgacctgagccccgagatcaccaccgaggacatcaaggccgccttcgcccccttcggcagaatcagcgacgccagagtggtgaaggacatggccaccggcaagagcaagggctacggcttcgtgagcttcttcaacaagtgggacgccgagaacgccatccagcagatgggcggccagtggctgggcggcagacagatcagaaccaactgggccaccagaaagccccccgcccccaagagcacctacgagtgcagatgcatcggcgaggagaaggagatgtggaacttcggcgagaagtacgccagattctgcagcagaagactgatcgccgagatcgacgagaagcagatcaagaccaccatccagaagagcaacaccaagcagctgagctacgacgaggtggtgaaccagagcagccccagcaactgcaccgtgtactgcggcggcgtgaccagcggcctgaccgagcagctgatgagacagaccttcagccccttcggccagatcatggagatcagagtgttccccgacaagggctacagcttcgtgagattcaacagccacgagagcgccgcccacgccatcgtgagcgtgaacggcaccaccatcgagggccacgtggtgaagtgctactggggcaaggagaccctggacatgatcaaccccgtgcagcagaaccagatcggctacccccagccctacggccagtggggccagtggtacggcaacgcccagcagatcggccagtacatgcccaacggctggcaggtgcccgcctacggcatgtacggccaggcctggaaccagcagggcttcaaccagacccagagcagcgccccctggatgggccccaactacggcgtgcagcccccccagggccagaacggcagcatgctgcccaaccagcccagcggctacagagtggccggctacgagacccagtag

SEQ ID NO: 102512 - DNA, 258 bp, synthetic construct
  misc_feature 1..258: note = Description of Artificial Sequence: Synthetic coding sequence
  source 1..258: mol_type = other DNA
atgatcaccgagcacaccagcaacgacccctactgcttcgtggagttctacgagcacagagacgccgccgccgccctggccgccatgaacggcagaaagatcctgggcaaggaggtgaaggtgaactgggccaccacccccagcagccagaagaaggacaccagcaaccacttccacgtgttcgtgggcgacctgagccccgagatcaccaccgaggacatcaagagcgccttcgcccccttcggcaagatcagctag

SEQ ID NO: 102513 - DNA, 759 bp, synthetic construct
  misc_feature 1..759: note = Description of Artificial Sequence: Synthetic coding sequence
  source 1..759: mol_type = other DNA
atggacgccagagtggtgaaggacatggccaccggcaagagcaagggctacggcttcgtgagcttctacaacaagctggacgccgagaacgccatcgtgcacatgggcggccagtggctgggcggcagacagatcagaaccaactgggccaccagaaagccccccgcccccaagagcacccaggagaacaacaccaagcagctgagattcgaggacgtggtgaaccagagcagccccaagaactgcaccgtgtactgcggcggcatcgccagcggcctgaccgaccagctgatgagacagaccttcagccccttcggccagatcatggagatcagagtgttccccgagaagggctacagcttcgtgagattcagcacccacgagagcgccgcccacgccatcgtgagcgtgaacggcaccaccatcgagggccacgtggtgaagtgctactggggcaaggagagccccgacatgaccaagaacttccagcaggtggactacagccagtggggccagtggagccaggtgtacggcaacccccagcagtacggccagtacatggccaacggctggcaggtgcccccctacggcgtgtacggccagccctggaaccagcagggcttcggcgtggaccagagccccagcgccgcctggatgggcggcttcggcgcccagcccccccagggccaggcccccccccccgtgatccccccccccaaccaggccggctacggcatggccagctaccagacccagtag

SEQ ID NO: 102514 - DNA, 1179 bp, synthetic construct
  misc_feature 1..1179: note = Description of Artificial Sequence: Synthetic coding sequence
  source 1..1179: mol_type = other DNA
atgatggaggacgacggccagcccagaaccctgtacgtgggcaacctgagcagagacgtgaccgaggtgctgatcctgcagctgttcagccagatcggcccctgcaagagctgcaagatgatcaccgagcagcccgacagcagaagagtgaacagcagcgtgggcttcagcgtgctgcagcacaccagcaacgacccctactgcttcgtggagttctacgagcacagagacgccgccgccgccctggccgccatgaacggcagaaagatcctgggcaaggaggtgaaggtgaactgggccaccacccccagcagccagaagaaggacaccagcaaccacttccacgtgttcgtgggcgacctgagccccgagatcaccaccgaggacatcaagagcgccttcgcccccttcggcaagatcagcgacgccagagtggtgaaggacatggccaccggcaagagcaagggctacggcttcgtgagcttctacaacaagctggacgccgagaacgccatcgtgcacatgggcggccagtggctgggcggcagacagatcagaaccaactgggccaccagaaagccccccgcccccaagagcacccaggagaacaacaccaagcagctgagattcgaggacgtggtgaaccagagcagccccaagaactgcaccgtgtactgcggcggcatcgccagcggcctgaccgaccagctgatgagacagaccttcagccccttcggccagatcatggagatcagagtgttccccgagaagggctacagcttcgtgagattcagcacccacgagagcgccgcccacgccatcgtgagcgtgaacggcaccaccatcgagggccacgtggtgaagtgctactggggcaaggagagccccgacatgaccaagaacttccagcaggtggactacagccagtggggccagtggagccaggtgtacggcaacccccagcagtacggccagtacatggccaacggctggcaggtgcccccctacggcgtgtacggccagccctggaaccagcagggcttcggcgtggaccagagccccagcgccgcctggatgggcggcttcggcgcccagcccccccagggccaggcccccccccccgtgatccccccccccaaccaggccggctacggcatggccagctaccagacccagtag

SEQ ID NO: 102515 - DNA, 399 bp, synthetic construct
  misc_feature 1..399: note = Description of Artificial Sequence: Synthetic coding sequence
  source 1..399: mol_type = other DNA
atgatcaccgagcacaccagcaacgacccctactgcttcgtggagttctacgagcacagagacgccgccgccgccctggccgccatgaacggcagaaagatcctgggcaaggaggtgaaggtgaactgggccaccacccccagcagccagaagaaggacaccagcaaccacttccacgtgttcgtgggcgacctgagccccgagatcaccaccgaggacatcaagagcgccttcgcccccttcggcaagatcagcgacgccagagtggtgaaggacatggccaccggcaagagcaagggctacggcttcgtgagcttctacaacaagctggacgccgagaacgccatcgtgcacatgggcggccagtggctgggcggcagacagatcagaaccaactag

SEQ ID NO: 102516 - DNA, 1128 bp, synthetic construct
  misc_feature 1..1128: note = Description of Artificial Sequence: Synthetic coding sequence
  source 1..1128: mol_type = other DNA
atgatggaggacgacggccagcccagaaccctgtacgtgggcaacctgagcagagacgtgaccgaggtgctgatcctgcagctgttcagccagatcggcccctgcaagagctgcaagatgatcaccgagcacaccagcaacgacccctactgcttcgtggagttctacgagcacagagacgccgccgccgccctggccgccatgaacggcagaaagatcctgggcaaggaggtgaaggtgaactgggccaccacccccagcagccagaagaaggacaccagcaaccacttccacgtgttcgtgggcgacctgagccccgagatcaccaccgaggacatcaagagcgccttcgcccccttcggcaagatcagcgacgccagagtggtgaaggacatggccaccggcaagagcaagggctacggcttcgtgagcttctacaacaagctggacgccgagaacgccatcgtgcacatgggcggccagtggctgggcggcagacagatcagaaccaactgggccaccagaaagccccccgcccccaagagcacccaggagaacaacaccaagcagctgagattcgaggacgtggtgaaccagagcagccccaagaactgcaccgtgtactgcggcggcatcgccagcggcctgaccgaccagctgatgagacagaccttcagccccttcggccagatcatggagatcagagtgttccccgagaagggctacagcttcgtgagattcagcacccacgagagcgccgcccacgccatcgtgagcgtgaacggcaccaccatcgagggccacgtggtgaagtgctactggggcaaggagagccccgacatgaccaagaacttccagcaggtggactacagccagtggggccagtggagccaggtgtacggcaacccccagcagtacggccagtacatggccaacggctggcaggtgcccccctacggcgtgtacggccagccctggaaccagcagggcttcggcgtggaccagagccccagcgccgcctggatgggcggcttcggcgcccagcccccccagggccaggcccccccccccgtgatccccccccccaaccaggccggctacggcatggccagctaccagacccagtag

SEQ ID NO: 102517 - DNA, 1776 bp, synthetic construct
  misc_feature 1..1776: note = Description of Artificial Sequence: Synthetic coding sequence
  source 1..1776: mol_type = other DNA
atggccagcaagtgcagcagcgagagaaagagcagaaccagcctgaccctgaaccagaagctggagatgatcaagctgagcgaggagggcatgagcaaggccgagatcggcagaagactgggcctgctgagacagaccgtgagccaggtggtgaacgccaaggagaagttcctgaaggaggtgaagagcgccacccccatgaacaccagaatgatcagaaagagaaacagcctgatcgccgacatggagaaggtgctggtggtgtggatcgaggaccagaccagcagaaacatccccctgagccagagcctgatccagaacaaggccctgaccctgttcaacagcatgaaggccgagagaggcgtggaggccgccgaggagaagttcgaggccagcagaggctggttcatgagattcaaggagagaagccacttccacaacatcaaggcccagggcgaggccgccagcgccgacgtggaggccgccgccagctaccccgaggccctggccaagatcatcgacgagggcggctacaccaagcagcagatcttcaacgtggacgagaccgccttctactggaagaagatgcccagcagaaccttcatcgccagagaggagaagagcgtgcccggcttcaaggccagcaaggacagactgaccctgctgctgggcgccaacgccgccggcgacttcaagctgaagcccatgctgatctaccacagcgagaaccccagagccctgaagaactacaccaagagcaccctgcccgtgctgtacaagtggaacagcaaggccagaatgaccgcccacctgttcaccgcctggttcaccgagtacttcaagcccaccgtggagacctactgcagcgagaagaagatccccttcaagatcctgctgctgatcgacaacgcccccagccaccccagagccctgatggagatctacgaggagatcaacgtgatcttcatgcccgccaacaccaccagcatcctgcagcccatggaccagggcgtgatcagcaccttcaagagctactacctgagaaacaccttccacaaggccctggccgccatggacagcgacgtgagcgacggcagcggccagagcaagctgaagaccttctggaagggcttcaccatcctggacgccatcaagaacatcagagacagctgggaggaggtgaagctgagcaccctgaccggcgtgtggaagaagctgatccccaccctgatcgacgactacgagggcttcaagaccagcgtggaggaggtgagcgccgacgtggtggagatcgccaaggagctggagctggaggtggagcccgaggacgtgaccgagctgctgcagagccacgacaagaccctgaccgacgaggagctgttcctgatggacgcccagagaaagtggttcctggagatggagagcacccccggcgaggacgccgtgaacatcgtggagatgaccaccaaggacctggagtactacatcaacctggtggacaaggccgccgccggcttcgagagaatcgacagcaacttcgagagaagcagcaccgtgggcaagatgctgagcaacagcatcgcctgctacagagagatcttccacgagagaaagagccagctgatgagaaaggccagccccatgagctacttcagaaagctgccccagcccccccagcccagcgccgccaccaccctgaccagccagcagcccagcaccagcagacaggaccccccccccgccaagagagtgagactgaccgagggcagcgactag

SEQ ID NO: 102518 - DNA, 1578 bp, synthetic construct
  misc_feature 1..1578: note = Description of Artificial Sequence: Synthetic coding sequence
  source 1..1578: mol_type = other DNA
atgctgggcaagagaaagagagtggtgctgaccatcaaggacaagctggacatcatcaagaagctggaggagggcatcagcttcaagaagctgagcgtggtgtacggcatcggcgagagcaccgtgagagacatcaagaagaacaaggagagaatcatcaactacgccaacagcagcgaccccaccagcggcgtgagcaagagaaagagcatgaagagcagcacctacgaggagctggacagagtgatgatcgagtggttcaaccagcagaagaccgacggcatccccgtgagcggcaccatctgcgccaagcaggccaagttcttcttcgacgccctgggcatggagggcgacttcaacgccagcagcggctggctgaccagattcaagcagagacacggcatccccaaggccgccggcaagggcaccaagctgaagggcgacgagaccgccgccagagagttctgcggcagcttccaggagttcgtggagaaggagaacctgcagcccgagcagatctacggcgccgaccagaccggcctgttctggaagtgcctgcccagcagaaccctgaccctggagaccgaccagagcaccagcggctgcagaagcagcagagagagaatcatcatcatgtgctgcgccaacgccaccggcctgcacaagctgaacctgtgcgtggtgggcaaggccaagaagcccagagccttcaagggcaccgacctgagcaacctgcccgtgacctactacagccagaagggcgcctggatcgagcagagcgtgttcagacagtggttcgagaagtacttcgtgccccaggtgcagaagcacctgaagagcaagggcctgctggagaaggccgtgctgctgctggacttcccccccgccagacccaacgaggagatgctgagcagcgacgacggcagaatcatcgtgaagtacctgccccccaacgtgaccagcctgatccagcccatgagccagggcgtgctggccaccgtgaagagatactacagagccggcctgctgcagaagtacatggacgagggcaacgaccccaagatcttctggaagaacctgaccgtgctggacgccatctacgaggtgagcagagcctggaacatggtgaagagcagcaccatcaccaaggcctggaagaagctgttccccggcaacgaggagaacagcggcatgaacatcgacgagggcgccatcctggccgccaacctggccaccgtgctgcagaacaccgaggagtgcgagcacgtggacatcgagaacatcgaccagtggttcgacagcagaagcagcgacagcagctgccaggtgctgaccgacagcgagagcgccgaggaccagaccaaggccgccgagcagaagcccagcagcaagagcagaaagaccgagctgaaccccgagaagcacatcagccacaaggccgccctggagtggaccgagaacctgctggactacctggagcagcaggacgacatgctgctgagcgacaagctggtgctgagaagactgagaaccatcatcagaaagaagcagaagatccagaacaacaagaaccactag

SEQ ID NO: 102519 - DNA, 1650 bp, synthetic construct
  misc_feature 1..1650: note = Description of Artificial Sequence: Synthetic coding sequence
  source 1..1650: mol_type = other DNA
atgaacaagagaggcaagtacaccaccctgaacctggaggagaagatgaaggtgctgagcagaatcgaggccggcagaagcctgaagagcgtgatggacgagttcggcatcagcaagagcaccttctacgacatcaagaagaacaagaagctgatcctggacttcgtgctgaagcaggacatgcccctggtgggcgccgagaagagaaagagaaccaccggcgccaagtacggcgacgtggacgacgccgtgtacatgtggtaccagcagaagagaagcgccggcgtgcccgtgagaggcgtggagctgcaggccgccgccgagagattcgccagatgcttcggcagaaccgacttcaaggccagcaccggctggctgttcagattcagaaacagacacgccatcggcaacagaaagggctgcggcgagcaggtgctgagcagcgtgagcgagaacgtggagcccttcagacagaagctgagcatgatcatcaaggaggagaagctgtgcctggcccagctgtacagcggcgacgagaccgacctgttctggaagagcatgcccgagaacagccaggccagcagaaaggacatctgcctgcccggcaagaagatcaacaaggagagactgagcgccttcctgtgcgccaacgccgacggcacccacaagctgaagagcatcatcatcggcaagagcaagctgcccaagagcgtgaaggaggacaccagcaccctgcccgtgatctacaagcccagcaaggacgtgtggttcaccagagagctgttcagcgagtggttcttccagaacttcgtgcccgaggtgagacacttccagctgaacgtgctgagattccacgacgaggacgtgagagccctgctgctgctggacagctgccccgcccaccccagcagcgagagcctgaccagcgaggacggcagaatcaagtgcatgttcttcccccacaacaccagcaccctgatccagcccatgaaccagggcgtgatcctgagctgcaagagactgtacagatggaagcagctggaggagagcctggtgatcttcgaggagagcgacgacgagcaggagaagggcgacaagggcgtgagcaagatcaagatctacaacatcaagagcgccatcttcaactgggccaagagctgggaggaggtgaagcagatcaccatcgccaacgcctgggagaacctgctgtacaagaaggagcccgagtacgacttccagggcctggagcacggcgactacagagagatcctggagaagtgcggcgagctggagaccaagctggacgacgacagagtgtggctgaacggcgacgaggagaagggctgcctgctgaagaccaagggcggcatcaccaaggaggtggtgcagaagggcggcgaggccgagaagcagaccgccgagttcaagctgagcgccgtgagagagagcctggactacctgctggacttcgtggacgccacccccgagttccagagattccacttcaccctgaaggagatgcagcaggagatcgtgaagaagcagttccagagcaagatccacagcagaatcggcagcttcctgaagcccagaccccacaacatcaaggacagcttcagcggccccagcaccagcggcagcaaccactag

SEQ ID NO: 102520 - DNA, 1650 bp, synthetic construct; identical to SEQ ID NO: 102519
  misc_feature 1..1650: note = Description of Artificial Sequence: Synthetic coding sequence
  source 1..1650: mol_type = other DNA

SEQ ID NO: 102521 - DNA, 1536 bp, synthetic construct
  misc_feature 1..1536: note = Description of Artificial Sequence: Synthetic coding sequence
  source 1..1536: mol_type = other DNA
atgaacaagagaggcaagtacaccaccctgaacctggaggagaagatgaaggtgctgagcagaatcgaggccggcagaagcctgaagagcgtgatggacgagttcggcatcagcaagagcaccttctacgacatcaagaagaacaagaagctgatcctggacttcgtgctgaagcaggacatgcccctggtgggcgccgagaagagaaagagaaccaccggcgccaagtacggcgacgtggacgacgccgtgtacatgtggtaccagcagaagagaagcgccggcgtgcccgtgagaggcgtggagctgcaggccgccgccgagagattcgccagatgcttcggcagaaccgacttcaaggccagcaccggctggctgttcagattcagaaacagacacgccatcggcaacagaaagggctgcggcgagcaggtgctgagcagcgtgagcgagaacgtggagcccttcagacagaagctgagcatgatcatcaaggaggagaagctgtgcctggcccagctgtacagcggcgacgagaccgacctgttctggaagagcatgcccgagaacagccaggccagcagaaaggacatctgcctgcccggcaagaagatcaacaaggagagactgagcgccttcctgtgcgccaacgccgacggcacccacaagctgaagagcatcatcatcggcaagagcaagctgcccaagagcgtgaaggaggacaccagcaccctgcccgtgatctacaagcccagcaaggacgtgtggttcaccagagagctgttcagcgagtggttcttccagaacttcgtgcccgaggtgagacacttccagctgaacgtgctgagattccacgacgaggacgtgagagccctgctgctgctggacagctgccccgcccaccccagcagcgagagcctgaccagcgaggacggcagaatcaagtgcatgttcttcccccacaacaccagcaccctgatccagcccatgaaccagggcgtgatcctgagctgcaagagactgtacagatggaagcagctggaggagagcctggtgatcttcgaggagagcgacgacgagcaggagaagggcgacaagggcgtgagcaagatcaagatctacaacatcaagagcgccatcttcaactgggccaagagctgggaggaggtgaagcagatcaccatcgccaacgcctgggagaacctgctgtacaagaaggagcccgagtacgacttccagggcctggagcacggcgactacagagagatcctggagaagtgcggcgagctggagaccaagctggacgacgacagagtgtggctgaacggcgacgaggagaagggctgcctgctgaagaccaagggcggcatcaccaaggaggtggtgcagaagggcggcgaggccgagaagcagaccgccgagttcaagctgagcgccgtgagagagagcctggactacctgctggacttcgtggacgccacccccgagttccagagattccacttcaccctgtgcgagttcagcgacgacagctag

SEQ ID NO: 102522 - DNA, 1644 bp, synthetic construct
  misc_feature 1..1644: note = Description of Artificial Sequence: Synthetic coding sequence
  source 1..1644: mol_type = other DNA
atgaccagcgccgcccccgccaagaagccctacagaaaggccccccccgagcacagagagctgagactggagatccccggcagcagactggagcaggaggagcccctgaccgacgccgagagaatgaagctgctgcaggaggagaacgaggagctgagaagaagactggccagcgccaccagaagaaccgaggccctggagagagagctggagatcggccaggactgcctggagctggagctgggccagagcagagaggagctggacaagttcaaggacaagttcagaagactgcagaacagctacaccgccagccagagaaccaaccaggagctggaggacaagctgcacaccctgatcaagaaggccgagatggacagaaagaccctggactgggagatcgtggagctgaccaacaagctgctggacgccaagaacaccatcaacaagctggaggagctgaacgagagatacagactggactgcaacctggccgtgcagctgctgaagtgcaacaagagccacttcagaaaccacaagttcgccgacctgccctgcgagctgcaggacatggtgagaaagcacctgcacagcggccaggaggccgccagccccggccccgcccccagcctggcccccggcgccgtggtgcccaccagcgtgatcgccagagtgctggagaagcccgagagcctgctgctgaacagcgcccagagcggcagcgccggcagacccctggccgaggacgtgttcgtgcacgtggacatgagcgagggcgtgcccggcgaccccgccagcccccccgcccccggcagccccaccccccagcccaacggcgagtgccacagcctgggcaccgccagaggcagccccgaggaggagctgcccctgcccgccttcgagaagctgaacccctaccccacccccagccccccccaccccctgtaccccggcagaagagtgatcgagttcagcgaggacaaggtgagaatccccagaaacagccccctgcccaactgcacctacgccaccagacaggccatcagcctgagcctggtggaggagggcagcgagagagccagacccagccccgtgcccagcacccccgccagcgcccaggccagcccccaccaccagcccagccccgcccccctgaccctgagcgcccccgccagcagcgccagcagcgaggaggacctgctggtgagctggcagagagccttcgtggacagaacccccccccccgccgccgtggcccagagaaccgccttcggcagagacgccctgcccgagctgcagagacacttcgcccacagccccgccgacagagacgaggtggtgcaggcccccagcgccagacccgaggagagcgagctgctgctgcccaccgagcccgacagcggcttccccagagaggaggaggagctgaacctgcccatcagccccgaggaggagagacagagcctgctgcccatcaacagaggcaccgaggagggccccggcaccagccacaccgagggcagagcctggcccctgcccagcagcagcagaccccagagaagccccaagagaatgggcgtgcaccacctgcacagaaaggacagcctgacccaggcccaggagcagggcaacctgctgaactag

SEQ ID NO: 102523 - DNA, 1644 bp, synthetic construct; identical to SEQ ID NO: 102522
  misc_feature 1..1644: note = Description of Artificial Sequence: Synthetic coding sequence
  source 1..1644: mol_type = other DNA

SEQ ID NO: 102524 - DNA, 1674 bp, synthetic construct
  misc_feature 1..1674: note = Description of Artificial Sequence: Synthetic coding sequence
  source 1..1674: mol_type = other DNA
atgaccagcgccgcccccgccaagaagccctacagaaaggccccccccgagcacagagagctgagactggagatccccggcagcagactggagcaggaggagcccctgaccgacgccgagagaatgaagctgctgcaggaggagaacgaggagctgagaagaagactggccagcgccaccagaagaaccgaggccctggagagagagctggagatcggccaggactgcctggagctggagctgggccagagcagagaggagctggacaagttcaaggacaagttcagaagactgcagaacagctacaccgccagccagagaaccaaccaggagctggaggacaagctgcacaccctggccagcctgagccacagctggatcttcgccatcaagaaggccgagatggacagaaagaccctggactgggagatcgtggagctgaccaacaagctgctggacgccaagaacaccatcaacaagctggaggagctgaacgagagatacagactggactgcaacctggccgtgcagctgctgaagtgcaacaagagccacttcagaaaccacaagttcgccgacctgccctgcgagctgcaggacatggtgagaaagcacctgcacagcggccaggaggccgccagccccggccccgcccccagcctggcccccggcgccgtggtgcccaccagcgtgatcgccagagtgctggagaagcccgagagcctgctgctgaacagcgcccagagcggcagcgccggcagacccctggccgaggacgtgttcgtgcacgtggacatgagcgagggcgtgcccggcgaccccgccagcccccccgcccccggcagccccaccccccagcccaacggcgagtgccacagcctgggcaccgccagaggcagccccgaggaggagctgcccctgcccgccttcgagaagctgaacccctaccccacccccagccccccccaccccctgtaccccggcagaagagtgatcgagttcagcgaggacaaggtgagaatccccagaaacagccccctgcccaactgcacctacgccaccagacaggccatcagcctgagcctggtggaggagggcagcgagagagccagacccagccccgtgcccagcacccccgccagcgcccaggccagcccccaccaccagcccagccccgcccccctgaccctgagcgcccccgccagcagcgccagcagcgaggaggacctgctggtgagctggcagagagccttcgtggacagaacccccccccccgccgccgtggcccagagaaccgccttcggcagagacgccctgcccgagctgcagagacacttcgcccacagccccgccgacagagacgaggtggtgcaggcccccagcgccagacccgaggagagcgagctgctgctgcccaccgagcccgacagcggcttccccagagaggaggaggagctgaacctgcccatcagccccgaggaggagagacagagcctgctgcccatcaacagaggcaccgaggagggccccggcaccagccacaccgagggcagagcctggcccctgcccagcagcagcagaccccagagaagccccaagagaatgggcgtgcaccacctgcacagaaaggacagcctgacccaggcccaggagcagggcaacctgctgaactag

SEQ ID NO: 102525 - DNA, 1674 bp, synthetic construct; identical to SEQ ID NO: 102524
  misc_feature 1..1674: note = Description of Artificial Sequence: Synthetic coding sequence
  source 1..1674: mol_type = other DNA

SEQ ID NO: 102526 - DNA, 1644 bp, synthetic construct; identical to SEQ ID NO: 102522
  misc_feature 1..1644: note = Description of Artificial Sequence: Synthetic coding sequence
  source 1..1644: mol_type = other DNA

SEQ ID NO: 102527 - DNA, 1644 bp, synthetic construct; identical to SEQ ID NO: 102522
  misc_feature 1..1644: note = Description of Artificial Sequence: Synthetic coding sequence
  source 1..1644: mol_type = other DNA

SEQ ID NO: 102528 - DNA, 1644 bp, synthetic construct; identical to SEQ ID NO: 102522
  misc_feature 1..1644: note = Description of Artificial Sequence: Synthetic coding sequence
  source 1..1644: mol_type = other DNA

SEQ ID NO: 102529 - DNA, 1674 bp, synthetic construct; identical to SEQ ID NO: 102524
  misc_feature 1..1674: note = Description of Artificial Sequence: Synthetic coding sequence
  source 1..1674: mol_type = other DNA

SEQ ID NO: 102530 - DNA, 582 bp, synthetic construct
  misc_feature 1..582: note = Description of Artificial Sequence: Synthetic coding sequence
  source 1..582: mol_type = other DNA
atgaccagcgccgcccccgccaagaagccctacagaaaggccccccccgagcacagagagctgagactggagatccccggcagcagactggagcaggaggagcccctgaccgacgccgagagaatgaagctgctgcaggaggagaacgaggagctgagaagaagactggccagcgccaccagaagaaccgaggccctggagagagagctggagatcggccaggactgcctggagctggagctgggccagagcagagaggagctggacaagttcaaggacaagttcagaagactgcagaacagctacaccgccagccagagaaccaaccaggagctggaggacaagctgcacaccctggccagcctgagccacagctggatcttcgccatcaagaaggccgagatggacagaaagaccctggactgggagatcgtggagctgaccaacaagctgctggacgccaagaacaccatcaacaagctggaggagctgaacgagagatacagactggactgcaacctggccgtgcagctgctgaagtgcaacaagagccacttcagaaaccacaagttcgccgactag

SEQ ID NO: 102531 - DNA, 720 bp, synthetic construct
  misc_feature 1..720: note = Description of Artificial Sequence: Synthetic coding sequence
  source 1..720: mol_type = other DNA
tgactgctgcaggaggagaacgaggagctgagaagaagactggccagcgccaccagaagaaccgaggccctggagagagagctggagatcggccaggactgcctggagctggagctgggccagagcagagaggagctggacaagttcaaggacaagttcagaagactgcagaacagctacaccgccagccagagaaccaaccaggagctggaggacaagctgcacaccctgatcaagaaggccgagatggacagaaagaccctggactgggagatcgtggagctgaccaacaagctgctggacgccaagaacaccatcaacaagctggaggagctgaacgagagatacagactggactgcaacctggccgtgcagctgctgaagtgcaacaagagccacttcagaaaccacaagttcgccgacgtgagcagaacccaccccctgcccgcccacatcgaccacagcggccactgcagaacccccctgacccccgtgagcgcccccctgagcgtgctgctgttccccctgtgcccccccctggccagcatgagccccctgaagcccgtgaacagcgccaccggctggtgccccgtgtactgccccggccccatcaccagcagcggcggccccgccctgctggtgagcgtgaccgagaccgagagagaggaccccggccaggagggcgagggcagccagagctacctgcccaaggagtactag

SEQ ID NO: 102532 - DNA, 5247 bp, synthetic construct
  misc_feature 1..5247: note = Description of Artificial Sequence: Synthetic coding sequence
  source 1..5247: mol_type = other DNA
atgagcgccagagccgccgccgccaagagcaccgccatggaggagaccgccatctgggagcagcacaccgtgaccctgcacagagcccccggcttcggcttcggcatcgccatcagcggcggcagagacaacccccacttccagagcggcgagaccagcatcgtgatcagcgacgtgctgaagggcggccccgccgagggccagctgcaggagaacgacagagtggccatggtgaacggcgtgagcatggacaacgtggagcacgccttcgccgtgcagcagctgagaaagagcggcaagaacgccaagatcaccatcagaagaaagaagaaggtgcagatccccgtgagcagacccgaccccgagcccgtgagcgacaacgaggaggacagctacgacgaggagatccacgaccccagaagcggcagaagcggcgtggtgaacagaagaagcgagaagatctggcccagagacagaagcgccagcagagagagaagcctgagccccagaagcgacagaagaagcgtggccagcagccagcccgccaagcccaccaaggtgaccctggtgaagagcagaaagaacgaggagtacggcctgagactggccagccacatcttcgtgaaggagatcagccaggacagcctggccgccagagacggcaacatccaggagggcgacgtggtgctgaagatcaacggcaccgtgaccgagaacatgagcctgaccgacgccaagaccctgatcgagagaagcaagggcaagctgaagatggtggtgcagagagacgagagagccaccctgctgaacgtgcccgacctgagcgacagcatccacagcgccaacgccagcgagagagacgacatcagcgagatccagagcctggccagcgaccacagcggcagaagccacgacagaccccccagaagaagcagaagcagaagccccgaccagagaagcgagcccagcgaccacagcagacacagcccccagcagcccagcaacggcagcctgagaagcagagacgaggagagaatcagcaagcccggcgccgtgagcacccccgtgaagcacgccgacgaccacacccccaagaccgtggaggaggtgaccgtggagagaaacgagaagcagacccccagcctgcccgagcccaagcccgtgtacgcccaggtgggccagcccgacgtggacctgcccgtgagccccagcgacggcgtgctgcccaacagcacccacgaggacggcatcctgagacccagcatgaagctggtgaagttcagaaagggcgacagcgtgggcctgagactggccggcggcaacgacgtgggcatcttcgtggccggcgtgctggaggacagccccgccgccaaggagggcctggaggagggcgaccagatcctgagagtgaacaacgtggacttcaccaacatcatcagagaggaggccgtgctgttcctgctggacctgcccaagggcgaggaggtgaccatcctggcccagaagaagaaggacgtgtacagaagaatcgtggagagcgacgtgggcgacagcttctacatcagaacccacttcgagtacgagaaggagagcccctacggcctgagcttcaacaagggcgaggtgttcagagtggtggacaccctgtacaacggcaagctgggcagctggctggccatcagaatcggcaagaaccacaaggaggtggagagaggcatcatccccaacaagaacagagccgagcagctggccagcgtgcagtacaccctgcccaagaccgccggcggcgacagagccgacttctggagattcagaggcctgagaagcagcaagagaaacctgagaaagagcagagaggacctgagcgcccagcccgtgcagaccaagttccccgcctacgagagagtggtgctgagagaggccggcttcctgagacccgtgaccatcttcggccccatcgccgacgtggccagagagaagctggccagagaggagcccgacatctaccagatcgccaagagcgagcccagagacgccggcaccgaccagagaagcagcggcatcatcagactgcacaccatcaagcagatcatcgaccaggacaagcacgccctgctggacgtgacccccaacgccgtggacagactgaactacgcccagtggtaccccatcgtggtgttcctgaaccccgacagcaagcagggcgtgaagaccatgagaatgagactgtgccccgagagcagaaagagcgccagaaagctgtacgagagaagccacaagctgagaaagaacaaccaccacctgttcaccaccaccatcaacctgaacagcatgaacgacggctggtacggcgccctgaaggaggccatccagcagcagcagaaccagctggtgtgggtgagcgagggcaaggccgacggcgccaccagcgacgacctggacctgcacgacgacagactgagctacctgagcgcccccggcagcgagtacagcatgtacagcaccgacagcagacacaccagcgactacgaggacaccgacaccgagggcggcgcctacaccgaccaggagctggacgagaccctgaacgacgaggtgggcaccccccccgagagcgccatcaccagaagcagcgagcccgtgagagaggacagcagcggcatgcaccacgagaaccagacctaccccccctacagcccccaggcccagccccagcccatccacagaatcgacagccccggcttcaagcccgccagccagcagaaggccgaggccagcagccccgtgccctacctgagccccgagaccaaccccgccagcagcaccagcgccgtgaaccacaacgtgaacctgaccaacgtgagactggaggagcccacccccgcccccagcaccagctacagcccccaggccgacagcctgagaacccccagcaccgaggccgcccacatcatgctgagagaccaggagcccagcctgagcagccacgtggaccccaccaaggtgtacagaaaggacccctaccccgaggagatgatgagacagaaccacgtgctgaagcagcccgccgtgagccaccccggccacagacccgacaaggagcccaacctgacctacgagccccagctgccctacgtggagaagcaggccagcagagacctggagcagcccacctacagatacgagagcagcagctacaccgaccagttcagcagaaactacgagcacagactgagatacgaggacagagtgcccatgtacgaggagcagtggagctactacgacgacaagcagccctaccccagcagaccccccttcgacaaccagcacagccaggacctggacagcagacagcaccccgaggagagcagcgagagaggctacttccccagattcgaggagcccgcccccctgagctacgacagcagacccagatacgagcaggcccccagagccagcgccctgagacacgaggagcagcccgcccccggctacgacacccacggcagactgagacccgaggcccagccccaccccagcgccggccccaagcccgccgagagcaagcagtacttcgagcagtacagcagaagctacgagcaggtgcccccccagggcttcaccagcagagccggccacttcgagcccctgcacggcgccgccgccgtgccccccctgatccccagcagccagcacaagcccgaggccctgcccagcaacaccaagcccctgccccccccccccacccagaccgaggaggaggaggaccccgccatgaagccccagagcgtgctgaccagagtgaagatgttcgagaacaagagaagcgccagcctggagaccaagaaggacgtgaacgacaccggcagcttcaagccccccgaggtggccagcaagcccagcggcgcccccatcatcggccccaagcccaccagccagaaccagttcagcgagcacgacaagaccctgtacagaatccccgagccccagaagccccagctgaagccccccgaggacatcgtgagaagcaaccactacgaccccgaggaggacgaggagtactacagaaagcagctgagctacttcgacagaagaagcttcgagaacaagccccccgcccacatcgccgccagccacctgagcgagcccgccaagcccgcccacagccagaaccagagcaacttcagcagctacagcagcaagggcaagccccccgaggccgacggcgtggacagaagcttcggcgagaagagatacgagcccatccaggccacccccccccccccccccctgcccagccagtacgcccagcccagccagcccgtgaccagcgccagcctgcacatccacagcaagggcgcccacggcgagggcaacagcgtgagcctggacttccagaacagcctggtgagcaagcccgaccccccccccagccagaacaagcccgccaccttcagaccccccaacagagaggacaccgcccaggccgccttctacccccagaagagcttccccgacaaggcccccgtgaacggcaccgagcagacccagaagaccgtgacccccgcctacaacagattcacccccaagccctacaccagcagcgccagacccttcgagagaaagttcgagagccccaagttcaaccacaacctgctgcccagcgagaccgcccacaagcccgacctgagcagcaagacccccaccagccccaagaccctggtgaagagccacagcctggcccagccccccgagttcgacagcggcgtggagaccttcagcatccacgccgagaagcccaagtaccagatcaacaacatcagcaccgtgcccaaggccatccccgtgagccccagcgccgtggaggaggacgaggacgaggacggccacaccgtggtggccaccgccagaggcatcttcaacagcaacggcggcgtgctgagcagcatcgagaccggcgtgagcatcatcatcccccagggcgccatccccgagggcgtggagcaggagatctacttcaaggtgtgcagagacaacagcatcctgccccccctggacaaggagaagggcgagaccctgctgagccccctggtgatgtgcggcccccacggcctgaagttcctgaagcccgtggagctgagactgccccactgcgaccccaagacctggcagaacaagtgcctgcccggcgaccccaactacctggtgggcgccaactgcgtgagcgtgctgatcgaccacttctag

SEQ ID NO: 102533 - DNA, 5007 bp, synthetic construct
  misc_feature 1..5007: note = Description of Artificial Sequence: Synthetic coding sequence
  source 1..5007: mol_type = other DNA
atgagcgccagagccgccgccgccaagagcaccgccatggaggagaccgccatctgggagcagcacaccgtgaccctgcacagagcccccggcttcggcttcggcatcgccatcagcggcggcagagacaacccccacttccagagcggcgagaccagcatcgtgatcagcgacgtgctgaagggcggccccgccgagggccagctgcaggagaacgacagagtggccatggtgaacggcgtgagcatggacaacgtggagcacgccttcgccgtgcagcagctgagaaagagcggcaagaacgccaagatcaccatcagaagaaagaagaaggtgcagatccccgtgagcagacccgaccccgagcccgtgagcgacaacgaggaggacagctacgacgaggagatccacgaccccagaagcggcagaagcggcgtggtgaacagaagaagcgagaagatctggcccagagacagaagcgccagcagagagagaagcctgagccccagaagcgacagaagaagcgtggccagcagccagcccgccaagcccaccaaggtgaccctggtgaagagcagaaagaacgaggagtacggcctgagactggccagccacatcttcgtgaaggagatcagccaggacagcctggccgccagagacggcaacatccaggagggcgacgtggtgctgaagatcaacggcaccgtgaccgagaacatgagcctgaccgacgccaagaccctgatcgagagaagcaagggcaagctgaagatggtggtgcagagagacgagagagccaccctgctgaacgtgcccgacctgagcgacagcatccacagcgccaacgccagcgagagagacgacatcagcgagatccagagcctggccagcgaccacagcggcagaagccacgacagaccccccagaagaagcagaagcagaagccccgaccagagaagcgagcccagcgaccacagcagacacagcccccagcagcccagcaacggcagcctgagaagcagagacgaggagagaatcagcaagcccggcgccgtgagcacccccgtgaagcacgccgacgaccacacccccaagaccgtggaggaggtgaccgtggagagaaacgagaagcagacccccagcctgcccgagcccaagcccgtgtacgcccaggtgggccagcccgacgtggacctgcccgtgagccccagcgacggcgtgctgcccaacagcacccacgaggacggcatcctgagacccagcatgaagctggtgaagttcagaaagggcgacagcgtgggcctgagactggccggcggcaacgacgtgggcatcttcgtggccggcgtgctggaggacagccccgccgccaaggagggcctggaggagggcgaccagatcctgagagtgaacaacgtggacttcaccaacatcatcagagaggaggccgtgctgttcctgctggacctgcccaagggcgaggaggtgaccatcctggcccagaagaagaaggacgtgtacagaagaatcgtggagagcgacgtgggcgacagcttctacatcagaacccacttcgagtacgagaaggagagcccctacggcctgagcttcaacaagggcgaggtgttcagagtggtggacaccctgtacaacggcaagctgggcagctggctggccatcagaatcggcaagaaccacaaggaggtggagagaggcatcatccccaacaagaacagagccgagcagctggccagcgtgcagtacaccctgcccaagaccgccggcggcgacagagccgacttctggagattcagaggcctgagaagcagcaagagaaacctgagaaagagcagagaggacctgagcgcccagcccgtgcagaccaagttccccgcctacgagagagtggtgctgagagaggccggcttcctgagacccgtgaccatcttcggccccatcgccgacgtggccagagagaagctggccagagaggagcccgacatctaccagatcgccaagagcgagcccagagacgccggcaccgaccagagaagcagcggcatcatcagactgcacaccatcaagcagatcatcgaccaggacaagcacgccctgctggacgtgacccccaacgccgtggacagactgaactacgcccagtggtaccccatcgtggtgttcctgaaccccgacagcaagcagggcgtgaagaccatgagaatgagactgtgccccgagagcagaaagagcgccagaaagctgtacgagagaagccacaagctgagaaagaacaaccaccacctgttcaccaccaccatcaacctgaacagcatgaacgacggctggtacggcgccctgaaggaggccatccagcagcagcagaaccagctggtgtgggtgagcgagggcaaggccgacggcgccaccagcgacgacctggacctgcacgacgacagactgagctacctgagcgcccccggcagcgagtacagcatgtacagcaccgacagcagacacaccagcgactacgaggacaccgacaccgagggcggcgcctacaccgaccaggagctggacgagaccctgaacgacgaggtgggcaccccccccgagagcgccatcaccagaagcagcgagcccgtgagagaggacagcagcggcatgcaccacgagaaccagacctaccccccctacagcccccaggcccagccccagcccatccacagaatcgacagccccggcttcaagcccgccagccagcaggtgtacagaaaggacccctaccccgaggagatgatgagacagaaccacgtgctgaagcagcccgccgtgagccaccccggccacagacccgacaaggagcccaacctgacctacgagccccagctgccctacgtggagaagcaggccagcagagacctggagcagcccacctacagatacgagagcagcagctacaccgaccagttcagcagaaactacgagcacagactgagatacgaggacagagtgcccatgtacgaggagcagtggagctactacgacgacaagcagccctaccccagcagaccccccttcgacaaccagcacagccaggacctggacagcagacagcaccccgaggagagcagcgagagaggctacttccccagattcgaggagcccgcccccctgagctacgacagcagacccagatacgagcaggcccccagagccagcgccctgagacacgaggagcagcccgcccccggctacgacacccacggcagactgagacccgaggcccagccccaccccagcgccggccccaagcccgccgagagcaagcagtacttcgagcagtacagcagaagctacgagcaggtgcccccccagggcttcaccagcagagccggccacttcgagcccctgcacggcgccgccgccgtgccccccctgatccccagcagccagcacaagcccgaggccctgcccagcaacaccaagcccctgccccccccccccacccagaccgaggaggaggaggaccccgccatgaagccccagagcgtgctgaccagagtgaagatgttcgagaacaagagaagcgccagcctggagaccaagaaggacgtgaacgacaccggcagcttcaagccccccgaggtggccagcaagcccagcggcgcccccatcatcggccccaagcccaccagccagaaccagttcagcgagcacgacaagaccctgtacagaatccccgagccccagaagccccagctgaagccccccgaggacatcgtgagaagcaaccactacgaccccgaggaggacgaggagtactacagaaagcagctgagctacttcgacagaagaagcttcgagaacaagccccccgcccacatcgccgccagccacctgagcgagcccgccaagcccgcccacagccagaaccagagcaacttcagcagctacagcagcaagggcaagccccccgaggccgacggcgtggacagaagcttcggcgagaagagatacgagcccatccaggccacccccccccccccccccctgcccagccagtacgcccagcccagccagcccgtgaccagcgccagcctgcacatccacagcaagggcgcccacggcgagggcaacagcgtgagcctggacttccagaacagcctggtgagcaagcccgaccccccccccagccagaacaagcccgccaccttcagaccccccaacagagaggacaccgcccaggccgccttctacccccagaagagcttccccgacaaggcccccgtgaacggcaccgagcagacccagaagaccgtgacccccgcctacaacagattcacccccaagccctacaccagcagcgccagacccttcgagagaaagttcgagagccccaagttcaaccacaacctgctgcccagcgagaccgcccacaagcccgacctgagcagcaagacccccaccagccccaagaccctggtgaagagccacagcctggcccagccccccgagttcgacagcggcgtggagaccttcagcatccacgccgagaagcccaagtaccagatcaacaacatcagcaccgtgcccaaggccatccccgtgagccccagcgccgtggaggaggacgaggacgaggacggccacaccgtggtggccaccgccagaggcatcttcaacagcaacggcggcgtgctgagcagcatcgagaccggcgtgagcatcatcatcccccagggcgccatccccgagggcgtggagcaggagatctacttcaaggtgtgcagagacaacagcatcctgccccccctggacaaggagaagggcgagaccctgctgagccccctggtgatgtgcggcccccacggcctgaagttcctgaagcccgtggagctgagactgccccactgcgaccccaagacctggcagaacaagtgcctgcccggcgaccccaactacctggtgggcgccaactgcgtgagcgtgctgatcgaccacttctag

SEQ ID NO: 102534 - DNA, 2982 bp, synthetic construct
  misc_feature 1..2982: note = Description of Artificial Sequence: Synthetic coding sequence
  source 1..2982: mol_type = other DNA
atgcccgtgagaggcgacagaggcttcccccccagaagagagctgagcggctggctgagagcccccggcatggaggagctgatctgggagcagtacaccgtgaccctgcagaaggacagcaagagaggcttcggcatcgccgtgagcggcggcagagacaacccccacttcgagaacggcgagaccagcatcgtgatcagcgacgtgctgcccggcggccccgccgacggcctgctgcaggagaacgacagagtggtgatggtgaacggcacccccatggaggacgtgctgcacagcttcgccgtgcagcagctgagaaagagcggcaaggtggccgccatcgtggtgaagagacccagaaaggtgcaggtggccgccctgcaggccagcccccccctggaccaggacgacagagccttcgaggtgatggacgagttcgacggcagaagcttcagaagcggctacagcgagagaagcagactgaacagccacggcggcagaagcagaagctgggaggacagccccgagagaggcagaccccacgagagagccagaagcagagagagagacctgagcagagacagaagcagaggcagaagcctggagagaggcctggaccaggaccacgccagaaccagagacagaagcagaggcagaagcctggagagaggcctggaccacgacttcggccccagcagagacagagacagagacagaagcagaggcagaagcatcgaccaggactacgagagagcctaccacagagcctacgaccccgactacgagagagcctacagccccgagtacagaagaggcgccagacacgacgccagaagcagaggccccagaagcagaagcagagagcacccccacagcagaagccccagccccgagcccagaggcagacccggccccatcggcgtgctgctgatgaagagcagagccaacgaggagtacggcctgagactgggcagccagatcttcgtgaaggagatgaccagaaccggcctggccaccaaggacggcaacctgcacgagggcgacatcatcctgaagatcaacggcaccgtgaccgagaacatgagcctgaccgacgccagaaagctgatcgagaagagcagaggcaagctgcagctggtggtgctgagagacagccagcagaccctgatcaacatccccagcctgaacgacagcgacagcgagatcgaggacatcagcgagatcgagagcaacagaagcttcagccccgaggagagaagacaccagtacagcgactacgactaccacagcagcagcgagaagctgaaggagagacccagcagcagagaggacacccccagcagactgagcagaatgggcgccacccccacccccttcaagagcaccggcgacatcgccggcaccgtggtgcccgagaccaacaaggagcccagataccaggaggacccccccgccccccagcccaaggccgcccccagaaccttcctgagacccagccccgaggacgaggccatctacggccccaacaccaagatggtgagattcaagaagggcgacagcgtgggcctgagactggccggcggcaacgacgtgggcatcttcgtggccggcatccaggagggcaccagcgccgagcaggagggcctgcaggagggcgaccagatcctgaaggtgaacacccaggacttcagaggcctggtgagagaggacgccgtgctgtacctgctggagatccccaagggcgagatggtgaccatcctggcccagagcagagccgacgtgtacagagacatcctggcctgcggcagaggcgacagcttcttcatcagaagccacttcgagtgcgagaaggagaccccccagagcctggccttcaccagaggcgaggtgttcagagtggtggacaccctgtacgacggcaagctgggcaactggctggccgtgagaatcggcaacgagctggagaagggcctgatccccaacaagagcagagccgagcagatggccagcgtgcagaacgcccagagagacaacgccggcgacagagccgacttctggagaatgagaggccagagaagcggcgtgaagaagaacctgagaaagagcagagaggacctgaccgccgtggtgagcgtgagcaccaagttccccgcctacgagagagtgctgctgagagaggccggcttcaagagacccgtggtgctgttcggccccatcgccgacatcgccatggagaagctggccaacgagctgcccgactggttccagaccgccaagaccgagcccaaggacgccggcagcgagaagagcaccggcgtggtgagactgaacaccgtgagacagatcatcgagcaggacaagcacgccctgctggacgtgacccccaaggccgtggacctgctgaactacacccagtggttccccatcgtgatcttcttcaaccccgacagcagacagggcgtgaagaccatgagacagagactgaaccccaccagcaacaagagcagcagaaagctgttcgaccaggccaacaagctgaagaagacctgcgcccacctgttcaccgccaccatcaacctgaacagcgccaacgacagctggttcggcagcctgaaggacaccatccagcaccagcagggcgaggccgtgtgggtgagcgagggcaagatggagggcatggacgacgaccccgaggacagaatgagctacctgaccgccatgggcgccgactacctgagctgcgacagcagactgatcagcgacttcgaggacaccgacggcgagggcggcgcctacaccgacaacgagctggacgagcccgccgaggagcccctggtgagcagcatcaccagaagcagcgagcccgtgcagcacgaggaggtgagaagaggcagacccagagccggcaccggcgagcccggcgtgttcctggccctgagctggaccgccgtgtgcagcggctgctgcggcagacacagctag

SEQ ID NO: 102535 - DNA, 3132 bp, synthetic construct
  misc_feature 1..3132: note = Description of Artificial Sequence: Synthetic coding sequence
  source 1..3132: mol_type = other DNA
atgcccgtgagaggcgacagaggcttcccccccagaagagagctgagcggctggctgagagcccccggcatggaggagctgatctgggagcagtacaccgtgaccctgcagaaggacagcaagagaggcttcggcatcgccgtgagcggcggcagagacaacccccacttcgagaacggcgagaccagcatcgtgatcagcgacgtgctgcccggcggccccgccgacggcctgctgcaggagaacgacagagtggtgatggtgaacggcacccccatggaggacgtgctgcacagcttcgccgtgcagcagctgagaaagagcggcaaggtggccgccatcgtggtgaagagacccagaaaggtgcaggtggccgccctgcaggccagcccccccctggaccaggacgacagagccttcgaggtgatggacgagttcgacggcagaagcttcagaagcggctacagcgagagaagcagactgaacagccacggcggcagaagcagaagctgggaggacagccccgagagaggcagaccccacgagagagccagaagcagagagagagacctgagcagagacagaagcagaggcagaagcctggagagaggcctggaccaggaccacgccagaaccagagacagaagcagaggcagaagcctggagagaggcctggaccacgacttcggccccagcagagacagagacagagacagaagcagaggcagaagcatcgaccaggactacgagagagcctaccacagagcctacgaccccgactacgagagagcctacagccccgagtacagaagaggcgccagacacgacgccagaagcagaggccccagaagcagaagcagagagcacccccacagcagaagccccagccccgagcccagaggcagacccggccccatcggcgtgctgctgatgaagagcagagccaacgaggagtacggcctgagactgggcagccagatcttcgtgaaggagatgaccagaaccggcctggccaccaaggacggcaacctgcacgagggcgacatcatcctgaagatcaacggcaccgtgaccgagaacatgagcctgaccgacgccagaaagctgatcgagaagagcagaggcaagctgcagctggtggtgctgagagacagccagcagaccctgatcaacatccccagcctgaacgacagcgacagcgagatcgaggacatcagcgagatcgagagcaacagaagcttcagccccgaggagagaagacaccagtacagcgactacgactaccacagcagcagcgagaagctgaaggagagacccagcagcagagaggacacccccagcagactgagcagaatgggcgccacccccacccccttcaagagcaccggcgacatcgccggcaccgtggtgcccgagaccaacaaggagcccagataccaggaggacccccccgccccccagcccaaggccgcccccagaaccttcctgagacccagccccgaggacgaggccatctacggccccaacaccaagatggtgagattcaagaagggcgacagcgtgggcctgagactggccggcggcaacgacgtgggcatcttcgtggccggcatccaggagggcaccagcgccgagcaggagggcctgcaggagggcgaccagatcctgaaggtgaacacccaggacttcagaggcctggtgagagaggacgccgtgctgtacctgctggagatccccaagggcgagatggtgaccatcctggcccagagcagagccgacgtgtacagagacatcctggcctgcggcagaggcgacagcttcttcatcagaagccacttcgagtgcgagaaggagaccccccagagcctggccttcaccagaggcgaggtgttcagagtggtggacaccctgtacgacggcaagctgggcaactggctggccgtgagaatcggcaacgagctggagaagggcctgatccccaacaagagcagagccgagcagatggccagcgtgcagaacgcccagagagacaacgccggcgacagagccgacttctggagaatgagaggccagagaagcggcgtgaagaagaacctgagaaagagcagagaggacctgaccgccgtggtgagcgtgagcaccaagttccccgcctacgagagagtgctgctgagagaggccggcttcaagagacccgtggtgctgttcggccccatcgccgacatcgccatggagaagctggccaacgagctgcccgactggttccagaccgccaagaccgagcccaaggacgccggcagcgagaagagcaccggcgtggtgagactgaacaccgtgagacagatcatcgagcaggacaagcacgccctgctggacgtgacccccaaggccgtggacctgctgaactacacccagtggttccccatcgtgatcttcttcaaccccgacagcagacagggcgtgaagaccatgagacagagactgaaccccaccagcaacaagagcagcagaaagctgttcgaccaggccaacaagctgaagaagacctgcgcccacctgttcaccgccaccatcaacctgaacagcgccaacgacagctggttcggcagcctgaaggacaccatccagcaccagcagggcgaggccgtgtgggtgagcgagggcaagatggagggcatggacgacgaccccgaggacagaatgagctacctgaccgccatgggcgccgactacctgagctgcgacagcagactgatcagcgacttcgaggacaccgacggcgagggcggcgcctacaccgacaacgagctggacgagcccgccgaggagcccctggtgagcagcatcaccagaagcagcgagcccgtgcagcacgaggagatcgagatcgcccagaagcaccccgacatctacgccgtgcccatcaagacccacaagcccgaccccggcaccccccagcacaccagcagcagaccccccgagccccagaaggcccccagcagaccctaccaggacaccagaggcagctacggcagcgacgccgaggaggaggagtacagacagcagctgagcgagcacagcaagagaggctactacggccagagcgccagatacagagacaccgagctgtag

SEQ ID NO: 102536 - DNA, 3573 bp, synthetic construct
  misc_feature 1..3573: note = Description of Artificial Sequence: Synthetic coding sequence
  source 1..3573: mol_type = other DNA
atgcccgtgagaggcgacagaggcttcccccccagaagagagctgagcggctggctgagagcccccggcatggaggagctgatctgggagcagtacaccgtgaccctgcagaaggacagcaagagaggcttcggcatcgccgtgagcggcggcagagacaacccccacttcgagaacggcgagaccagcatcgtgatcagcgacgtgctgcccggcggccccgccgacggcctgctgcaggagaacgacagagtggtgatggtgaacggcacccccatggaggacgtgctgcacagcttcgccgtgcagcagctgagaaagagcggcaaggtggccgccatcgtggtgaagagacccagaaaggtgcaggtggccgccctgcaggccagcccccccctggaccaggacgacagagccttcgaggtgatggacgagttcgacggcagaagcttcagaagcggctacagcgagagaagcagactgaacagccacggcggcagaagcagaagctgggaggacagccccgagagaggcagaccccacgagagagccagaagcagagagagagacctgagcagagacagaagcagaggcagaagcctggagagaggcctggaccaggaccacgccagaaccagagacagaagcagaggcagaagcctggagagaggcctggaccacgacttcggccccagcagagacagagacagagacagaagcagaggcagaagcatcgaccaggactacgagagagcctaccacagagcctacgaccccgactacgagagagcctacagccccgagtacagaagaggcgccagacacgacgccagaagcagaggccccagaagcagaagcagagagcacccccacagcagaagccccagccccgagcccagaggcagacccggccccatcggcgtgctgctgatgaagagcagagccaacgaggagtacggcctgagactgggcagccagatcttcgtgaaggagatgaccagaaccggcctggccaccaaggacggcaacctgcacgagggcgacatcatcctgaagatcaacggcaccgtgaccgagaacatgagcctgaccgacgccagaaagctgatcgagaagagcagaggcaagctgcagctggtggtgctgagagacagccagcagaccctgatcaacatccccagcctgaacgacagcgacagcgagatcgaggacatcagcgagatcgagagcaacagaagcttcagccccgaggagagaagacaccagtacagcgactacgactaccacagcagcagcgagaagctgaaggagagacccagcagcagagaggacacccccagcagactgagcagaatgggcgccacccccacccccttcaagagcaccggcgacatcgccggcaccgtggtgcccgagaccaacaaggagcccagataccaggaggacccccccgccccccagcccaaggccgcccccagaaccttcctgagacccagccccgaggacgaggccatctacggccccaacaccaagatggtgagattcaagaagggcgacagcgtgggcctgagactggccggcggcaacgacgtgggcatcttcgtggccggcatccaggagggcaccagcgccgagcaggagggcctgcaggagggcgaccagatcctgaaggtgaacacccaggacttcagaggcctggtgagagaggacgccgtgctgtacctgctggagatccccaagggcgagatggtgaccatcctggcccagagcagagccgacgtgtacagagacatcctggcctgcggcagaggcgacagcttcttcatcagaagccacttcgagtgcgagaaggagaccccccagagcctggccttcaccagaggcgaggtgttcagagtggtggacaccctgtacgacggcaagctgggcaactggctggccgtgagaatcggcaacgagctggagaagggcctgatccccaacaagagcagagccgagcagatggccagcgtgcagaacgcccagagagacaacgccggcgacagagccgacttctggagaatgagaggccagagaagcggcgtgaagaagaacctgagaaagagcagagaggacctgaccgccgtggtgagcgtgagcaccaagttccccgcctacgagagagtgctgctgagagaggccggcttcaagagacccgtggtgctgttcggccccatcgccgacatcgccatggagaagctggccaacgagctgcccgactggttccagaccgccaagaccgagcccaaggacgccggcagcgagaagagcaccggcgtggtgagactgaacaccgtgagacagatcatcgagcaggacaagcacgccctgctggacgtgacccccaaggccgtggacctgctgaactacacccagtggttccccatcgtgatcttcttcaaccccgacagcagacagggcgtgaagaccatgagacagagactgaaccccaccagcaacaagagcagcagaaagctgttcgaccaggccaacaagctgaagaagacctgcgcccacctgttcaccgccaccatcaacctgaacagcgccaacgacagctggttcggcagcctgaaggacaccatccagcaccagcagggcgaggccgtgtgggtgagcgagggcaagatggagggcatggacgacgaccccgaggacagaatgagctacctgaccgccatgggcgccgactacctgagctgcgacagcagactgatcagcgacttcgaggacaccgacggcgagggcggcgcctacaccgacaacgagctggacgagcccgccgaggagcccctggtgagcagcatcaccagaagcagcgagcccgtgcagcacgaggagagcatcagaaagcccagccccgagcccagagcccagatgagaagagccgccagcagcgaccagctgagagacaacagccccccccccgccttcaagcccgagccccccaaggccaagacccagaacaaggaggagagctacgacttcagcaagagctacgagtacaagagcaaccccagcgccgtggccggcaacgagacccccggcgccagcaccaagggctaccccccccccgtggccgccaagcccaccttcggcagaagcatcctgaagcccagcacccccatccccccccaggagggcgaggaggtgggcgagagcagcgaggagcaggacaacgcccccaagagcgtgctgggcaaggtgaagatcttcgagaagatggaccacaaggccagactgcagagaatgcaggagctgcaggaggcccagaacgccagaatcgagatcgcccagaagcaccccgacatctacgccgtgcccatcaagacccacaagcccgaccccggcaccccccagcacaccagcagcagaccccccgagccccagaaggcccccagcagaccctaccaggacaccagaggcagctacggcagcgacgccgaggaggaggagtacagacagcagctgagcgagcacagcaagagaggctactacggccagagcgccagatacagagacaccgagctgtag

SEQ ID NO: 102537 - DNA, 306 bp, synthetic construct
  misc_feature 1..306: note = Description of Artificial Sequence: Synthetic coding sequence
  source 1..306: mol_type = other DNA
atggaggagctgatctgggagcagtacaccgtgaccctgcagaaggacagcaagagaggcttcggcatcgccgtgagcggcggcagagacaacccccacttcgagaacggcgagaccagcatcgtgatcagcgacgtgctgcccggcggccccgccgacggcctgctgcaggagaacgacagagtggtgatggtgaacggcacccccatggaggacgtgctgcacagcttcgccgtgcagcagctgagaaagagcggcaaggtggccgccatcgtgagcaccggcttcgccttcagcctgccctag

SEQ ID NO: 102538 - DNA, 486 bp, synthetic construct
  misc_feature 1..486: note = Description of Artificial Sequence: Synthetic coding sequence
  source 1..486: mol_type = other DNA
atggaggagctgatctgggagcagtacaccgtgaccctgcagaaggacagcaagagaggcttcggcatcgccgtgagcggcggcagagacaacccccacttcgagaacggcgagaccagcatcgtgatcagcgacgtgctgcccggcggccccgccgacggcctgctgcaggagaacgacagagtggtgatggtgaacggcacccccatggaggacgtgctgcacagcttcgccgtgcagcagctgagaaagagcggcaaggtggccgccatcgtggtgaagagacccagaaaggtgcaggtggccgccctgcaggccagcccccccctggaccaggacgacagagccttcgaggtgatggacgagttcgacggcagaagcttcagaagcggctacagcgagagaagcagactgaacagccacggcggcagaagcagaagctgggaggacagccccgagagaggcagaccccacgagagagcctag

SEQ ID NO: 102539 - DNA, 3063 bp, synthetic construct
  misc_feature 1..3063: note = Description of Artificial Sequence: Synthetic coding sequence
  source 1..3063: mol_type = other DNA
atggaggagctgatctgggagcagtacaccgtgaccctgcagaaggacagcaagagaggcttcggcatcgccgtgagcggcggcagagacaacccccacttcgagaacggcgagaccagcatcgtgatcagcgacgtgctgcccggcggccccgccgacggcctgctgcaggagaacgacagagtggtgatggtgaacggcacccccatggaggacgtgctgcacagcttcgccgtgcagcagctgagaaagagcggcaaggtggccgccatcgtggtgaagagacccagaaaggtgcaggtggccgccctgcaggccagcccccccctggaccaggacgacagagccttcgaggtgatggacgagttcgacggcagaagcttcagaagcggctacagcgagagaagcagactgaacagccacggcggcagaagcagaagctgggaggacagccccgagagaggcagaccccacgagagagccagaagcagagagagagacctgagcagagacagaagcagaggcagaagcctggagagaggcctggaccaggaccacgccagaaccagagacagaagcagaggcagaagcctggagagaggcctggaccacgacttcggccccagcagagacagagacagagacagaagcagaggcagaagcatcgaccaggactacgagagagcctaccacagagcctacgaccccgactacgagagagcctacagccccgagtacagaagaggcgccagacacgacgccagaagcagaggccccagaagcagaagcagagagcacccccacagcagaagccccagccccgagcccagaggcagacccggccccatcggcgtgctgctgatgaagagcagagccaacgaggagtacggcctgagactgggcagccagatcttcgtgaaggagatgaccagaaccggcctggccaccaaggacggcaacctgcacgagggcgacatcatcctgaagatcaacggcaccgtgaccgagaacatgagcctgaccgacgccagaaagctgatcgagaagagcagaggcaagctgcagctggtggtgctgagagacagccagcagaccctgatcaacatccccagcctgaacgacagcgacagcgagatcgaggacatcagcgagatcgagagcaacagaagcttcagccccgaggagagaagacaccagtacagcgactacgactaccacagcagcagcgagaagctgaaggagagacccagcagcagagaggacacccccagcagactgagcagaatgggcgccacccccacccccttcaagagcaccggcgacatcgccggcaccgtggtgcccgagaccaacaaggagcccagataccaggaggacccccccgccccccagcccaaggccgcccccagaaccttcctgagacccagccccgaggacgaggccatctacggccccaacaccaagatggtgagattcaagaagggcgacagcgtgggcctgagactggccggcggcaacgacgtgggcatcttcgtggccggcatccaggagggcaccagcgccgagcaggagggcctgcaggagggcgaccagatcctgaaggtgaacacccaggacttcagaggcctggtgagagaggacgccgtgctgtacctgctggagatccccaagggcgagatggtgaccatcctggcccagagcagagccgacgtgtacagagacatcctggcctgcggcagaggcgacagcttcttcatcagaagccacttcgagtgcgagaaggagaccccccagagcctggccttcaccagaggcgaggtgttcagagtggtggacaccctgtacgacggcaagctgggcaactggctggccgtgagaatcggcaacgagctggagaagggcctgatccccaacaagagcagagccgagcagatggccagcgtgcagaacgcccagagagacaacgccggcgacagagccgacttctggagaatgagaggccagagaagcggcgtgaagaagaacctgagaaagagcagagaggacctgaccgccgtggtgagcgtgagcaccaagttccccgcctacgagagagtgctgctgagagaggccggcttcaagagacccgtggtgctgttcggccccatcgccgacatcgccatggagaagctggccaacgagctgcccgactggttccagaccgccaagaccgagcccaaggacgccggcagcgagaagagcaccggcgtggtgagactgaacaccgtgagacagatcatcgagcaggacaagcacgccctgctggacgtgacccccaaggccgtggacctgctgaactacacccagtggttccccatcgtgatcttcttcaaccccgacagcagacagggcgtgaagaccatgagacagagactgaaccccaccagcaacaagagcagcagaaagctgttcgaccaggccaacaagctgaagaagacctgcgcccacctgttcaccgccaccatcaacctgaacagcgccaacgacagctggttcggcagcctgaaggacaccatccagcaccagcagggcgaggccgtgtgggtgagcgagggcaagatggagggcatggacgacgaccccgaggacagaatgagctacctgaccgccatgggcgccgactacctgagctgcgacagcagactgatcagcgacttcgaggacaccgacggcgagggcggcgcctacaccgacaacgagctggacgagcccgccgaggagcccctggtgagcagcatcaccagaagcagcgagcccgtgcagcacgaggagatcgagatcgcccagaagcaccccgacatctacgccgtgcccatcaagacccacaagcccgaccccggcaccccccagcacaccagcagcagaccccccgagccccagaaggcccccagcagaccctaccaggacaccagaggcagctacggcagcgacgccgaggaggaggagtacagacagcagctgagcgagcacagcaagagaggctactacggccagagcgccagatacagagacaccgagctgtag

SEQ ID NO: 102540 - DNA, 3474 bp, synthetic construct
  misc_feature 1..3474: note = Description of Artificial Sequence: Synthetic coding sequence
  source 1..3474: mol_type = other DNA
atgaagaccgcccaggccctgcacagaatgtggatccaggccgtgaagaagctgagaagatggaagggcagagcccccggcatggaggagctgatctgggagcagtacaccgtgaccctgcagaaggacagcaagagaggcttcggcatcgccgtgagcggcggcagagacaacccccacttcgagaacggcgagaccagcatcgtgatcagcgacgtgctgcccggcggccccgccgacggcctgctgcaggagaacgacagagtggtgatggtgaacggcacccccatggaggacgtgctgcacagcttcgccgtgcagcagctgagaaagagcggcaaggtggccgccatcgtggtgaagagacccagaaaggtgcaggtggccgccctgcaggccagcccccccctggaccaggacgacagagccttcgaggtgatggacgagttcgacggcagaagcttcagaagcggctacagcgagagaagcagactgaacagccacggcggcagaagcagaagctgggaggacagccccgagagaggcagaccccacgagagagccagaagcagagagagagacctgagcagagacagaagcagaggcagaagcctggagagaggcctggaccaggaccacgccagaaccagagacagaagcagaggcagaagcctggagagaggcctggaccacgacttcggccccagcagagacagagacagagacagaagcagaggcagaagcatcgaccaggactacgagagagcctaccacagagcctacgaccccgactacgagagagcctacagccccgagtacagaagaggcgccagacacgacgccagaagcagaggccccagaagcagaagcagagagcacccccacagcagaagccccagccccgagcccagaggcagacccggccccatcggcgtgctgctgatgaagagcagagccaacgaggagtacggcctgagactgggcagccagatcttcgtgaaggagatgaccagaaccggcctggccaccaaggacggcaacctgcacgagggcgacatcatcctgaagatcaacggcaccgtgaccgagaacatgagcctgaccgacgccagaaagctgatcgagaagagcagaggcaagctgcagctggtggtgctgagagacagccagcagaccctgatcaacatccccagcctgaacgacagcgacagcgagatcgaggacatcagcgagatcgagagcaacagaagcttcagccccgaggagagaagacaccagtacagcgactacgactaccacagcagcagcgagaagctgaaggagagacccagcagcagagaggacacccccagcagactgagcagaatgggcgccacccccacccccttcaagagcaccggcgacatcgccggcaccgtggtgcccgagaccaacaaggagcccagataccaggaggacccccccgccccccagcccaaggccgcccccagaaccttcctgagacccagccccgaggacgaggccatctacggccccaacaccaagatggtgagattcaagaagggcgacagcgtgggcctgagactggccggcggcaacgacgtgggcatcttcgtggccggcatccaggagggcaccagcgccgagcaggagggcctgcaggagggcgaccagatcctgaaggtgaacacccaggacttcagaggcctggtgagagaggacgccgtgctgtacctgctggagatccccaagggcgagatggtgaccatcctggcccagagcagagccgacgtgtacagagacatcctggcctgcggcagaggcgacagcttcttcatcagaagccacttcgagtgcgagaaggagaccccccagagcctggccttcaccagaggcgaggtgttcagagtggtggacaccctgtacgacggcaagctgggcaactggctggccgtgagaatcggcaacgagctggagaagggcctgatccccaacaagagcagagccgagcagatggccagcgtgcagaacgcccagagagacaacgccggcgacagagccgacttctggagaatgagaggccagagaagcggcgtgaagaagaacctgagaaagagcagagaggacctgaccgccgtggtgagcgtgagcaccaagttccccgcctacgagagagtgctgctgagagaggccggcttcaagagacccgtggtgctgttcggccccatcgccgacatcgccatggagaagctggccaacgagctgcccgactggttccagaccgccaagaccgagcccaaggacgccggcagcgagaagagcaccggcgtggtgagactgaacaccgtgagacagatcatcgagcaggacaagcacgccctgctggacgtgacccccaaggccgtggacctgctgaactacacccagtggttccccatcgtgatcttcttcaaccccgacagcagacagggcgtgaagaccatgagacagagactgaaccccaccagcaacaagagcagcagaaagctgttcgaccaggccaacaagctgaagaagacctgcgcccacctgttcaccgccaccatcaacctgaacagcgccaacgacagctggttcggcagcctgaaggacaccatccagcaccagcagggcgaggccgtgtgggtgagcgagggcaagatggagggcatggacgacgaccccgaggacagaatgagctacctgaccgccatgggcgccgactacctgagctgcgacagcagactgatcagcgacttcgaggacaccgacggcgagggcggcgcctacaccgacaacgagctggacgagcccgccgaggagcccctggtgagcagcatcaccagaagcagcgagcccgtgcagcacgaggaggccaagacccagaacaaggaggagagctacgacttcagcaagagctacgagtacaagagcaaccccagcgccgtggccggcaacgagacccccggcgccagcaccaagggctaccccccccccgtggccgccaagcccaccttcggcagaagcatcctgaagcccagcacccccatccccccccaggagggcgaggaggtgggcgagagcagcgaggagcaggacaacgcccccaagagcgtgctgggcaaggtgaagatcttcgagaagatggaccacaaggccagactgcagagaatgcaggagctgcaggaggcccagaacgccagaatcgagatcgcccagaagcaccccgacatctacgccgtgcccatcaagacccacaagcccgaccccggcaccccccagcacaccagcagcagaccccccgagccccagaaggcccccagcagaccctaccaggacaccagaggcagctacggcagcgacgccgaggaggaggagtacagacagcagctgagcgagcacagcaagagaggctactacggccagagcgccagatacagagacaccgagctgtag

SEQ ID NO: 102541 - DNA, 3666 bp, synthetic construct
  misc_feature 1..3666: note = Description of Artificial Sequence: Synthetic coding sequence
  source 1..3666: mol_type = other DNA
atgaagaccgcccaggccctgcacagaatgtggatccaggccgtgaagaagctgagaagatggaagggcagagtgagccccagcgccagcagccccctggtgttccccaacctgagcagctgggagggcgagggcagcaagaccatcctgaccgcccccggcatggaggagctgatctgggagcagtacaccgtgaccctgcagaaggacagcaagagaggcttcggcatcgccgtgagcggcggcagagacaacccccacttcgagaacggcgagaccagcatcgtgatcagcgacgtgctgcccggcggccccgccgacggcctgctgcaggagaacgacagagtggtgatggtgaacggcacccccatggaggacgtgctgcacagcttcgccgtgcagcagctgagaaagagcggcaaggtggccgccatcgtggtgaagagacccagaaaggtgcaggtggccgccctgcaggccagcccccccctggaccaggacgacagagccttcgaggtgatggacgagttcgacggcagaagcttcagaagcggctacagcgagagaagcagactgaacagccacggcggcagaagcagaagctgggaggacagccccgagagaggcagaccccacgagagagccagaagcagagagagagacctgagcagagacagaagcagaggcagaagcctggagagaggcctggaccaggaccacgccagaaccagagacagaagcagaggcagaagcctggagagaggcctggaccacgacttcggccccagcagagacagagacagagacagaagcagaggcagaagcatcgaccaggactacgagagagcctaccacagagcctacgaccccgactacgagagagcctacagccccgagtacagaagaggcgccagacacgacgccagaagcagaggccccagaagcagaagcagagagcacccccacagcagaagccccagccccgagcccagaggcagacccggccccatcggcgtgctgctgatgaagagcagagccaacgaggagtacggcctgagactgggcagccagatcttcgtgaaggagatgaccagaaccggcctggccaccaaggacggcaacctgcacgagggcgacatcatcctgaagatcaacggcaccgtgaccgagaacatgagcctgaccgacgccagaaagctgatcgagaagagcagaggcaagctgcagctggtggtgctgagagacagccagcagaccctgatcaacatccccagcctgaacgacagcgacagcgagatcgaggacatcagcgagatcgagagcaacagaagcttcagccccgaggagagaagacaccagtacagcgactacgactaccacagcagcagcgagaagctgaaggagagacccagcagcagagaggacacccccagcagactgagcagaatgggcgccacccccacccccttcaagagcaccggcgacatcgccggcaccgtggtgcccgagaccaacaaggagcccagataccaggaggacccccccgccccccagcccaaggccgcccccagaaccttcctgagacccagccccgaggacgaggccatctacggccccaacaccaagatggtgagattcaagaagggcgacagcgtgggcctgagactggccggcggcaacgacgtgggcatcttcgtggccggcatccaggagggcaccagcgccgagcaggagggcctgcaggagggcgaccagatcctgaaggtgaacacccaggacttcagaggcctggtgagagaggacgccgtgctgtacctgctggagatccccaagggcgagatggtgaccatcctggcccagagcagagccgacgtgtacagagacatcctggcctgcggcagaggcgacagcttcttcatcagaagccacttcgagtgcgagaaggagaccccccagagcctggccttcaccagaggcgaggtgttcagagtggtggacaccctgtacgacggcaagctgggcaactggctggccgtgagaatcggcaacgagctggagaagggcctgatccccaacaagagcagagccgagcagatggccagcgtgcagaacgcccagagagacaacgccggcgacagagccgacttctggagaatgagaggccagagaagcggcgtgaagaagaacctgagaaagagcagagaggacctgaccgccgtggtgagcgtgagcaccaagttccccgcctacgagagagtgctgctgagagaggccggcttcaagagacccgtggtgctgttcggccccatcgccgacatcgccatggagaagctggccaacgagctgcccgactggttccagaccgccaagaccgagcccaaggacgccggcagcgagaagagcaccggcgtggtgagactgaacaccgtgagacagatcatcgagcaggacaagcacgccctgctggacgtgacccccaaggccgtggacctgctgaactacacccagtggttccccatcgtgatcttcttcaaccccgacagcagacagggcgtgaagaccatgagacagagactgaaccccaccagcaacaagagcagcagaaagctgttcgaccaggccaacaagctgaagaagacctgcgcccacctgttcaccgccaccatcaacctgaacagcgccaacgacagctggttcggcagcctgaaggacaccatccagcaccagcagggcgaggccgtgtgggtgagcgagggcaagatggagggcatggacgacgaccccgaggacagaatgagctacctgaccgccatgggcgccgactacctgagctgcgacagcagactgatcagcgacttcgaggacaccgacggcgagggcggcgcctacaccgacaacgagctggacgagcccgccgaggagcccctggtgagcagcatcaccagaagcagcgagcccgtgcagcacgaggagagcatcagaaagcccagccccgagcccagagcccagatgagaagagccgccagcagcgaccagctgagagacaacagccccccccccgccttcaagcccgagccccccaaggccaagacccagaacaaggaggagagctacgacttcagcaagagctacgagtacaagagcaaccccagcgccgtggccggcaacgagacccccggcgccagcaccaagggctaccccccccccgtggccgccaagcccaccttcggcagaagcatcctgaagcccagcacccccatccccccccaggagggcgaggaggtgggcgagagcagcgaggagcaggacaacgcccccaagagcgtgctgggcaaggtgaagatcttcgagaagatggaccacaaggccagactgcagagaatgcaggagctgcaggaggcccagaacgccagaatcgagatcgcccagaagcaccccgacatctacgccgtgcccatcaagacccacaagcccgaccccggcaccccccagcacaccagcagcagaccccccgagccccagaaggcccccagcagaccctaccaggacaccagaggcagctacggcagcgacgccgaggaggaggagtacagacagcagctgagcgagcacagcaagagaggctactacggccagagcgccagatacagagacaccgagctgtag

SEQ ID NO: 102542 - DNA, 2787 bp, synthetic construct
  misc_feature 1..2787: note = Description of Artificial Sequence: Synthetic coding sequence
  source 1..2787: mol_type = other DNA
atggccgtgagattccaggtggccgacatggaggagctgaccatctgggagcagcacaccgccaccctgagcaaggaccccagaagaggcttcggcatcgccatcagcggcggcagagacagacccggcggcagcatggtggtgagcgacgtggtgcccggcggccccgccgagggcagactgcagaccggcgaccacatcgtgatggtgaacggcgtgagcatggagaacgccaccagcgccttcgccatccagatcctgaagacctgcaccaagatggccaacatcaccgtgaagagacccagaagaatccacctgcccgccaccaaggccagccccagcagccccggcagacaggacagcgacgaggacgacggcccccagagagtggaggaggtggaccagggcagaggctacgacggcgacagcagcagcggcagcggcagaagctgggacgagagaagcagaagacccagacccggcagaagaggcagagccggcagccacggcagaagaagccccggcggcggcagcgaggccaacggcctggccctggtgagcggcttcaagagactgcccagacaggacgtgcagatgaagcccgtgaagagcgtgctggtgaagagaagagacagcgaggagttcggcgtgaagctgggcagccagatcttcatcaagcacatcaccgacagcggcctggccgccagacacagaggcctgcaggagggcgacctgatcctgcagatcaacggcgtgagcagccagaacctgagcctgaacgacaccagaagactgatcgagaagagcgagggcaagctgagcctgctggtgctgagagacagaggccagttcctggtgaacatcccccccgccgtgagcgacagcgacagcagccccctggaggacatcagcgacctggccagcgagctgagccaggccccccccagccacatcccccccccccccagacacgcccagagaagccccgaggccagccagaccgacagccccgtggagagccccagactgagaagagagagcagcgtggacagcagaaccatcagcgagcccgacgagcagagaagcgagctgcccagagagagcagctacgacatctacagagtgcccagcagccagagcatggaggacagaggctacagccccgacaccagagtggtgagattcctgaagggcaagagcatcggcctgagactggccggcggcaacgacgtgggcatcttcgtgagcggcgtgcaggccggcagccccgccgacggccagggcatccaggagggcgaccagatcctgcaggtgaacgacgtgcccttccagaacctgaccagagaggaggccgtgcagttcctgctgggcctgccccccggcgaggagatggagctggtgacccagagaaagcaggacatcttctggaagatggtgcagagcagagtgggcgacagcttctacatcagaacccacttcgagctggagcccagcccccccagcggcctgggcttcaccagaggcgacgtgttccacgtgctggacaccctgcaccccggccccggccagagccacgccagaggcggccactggctggccgtgagaatgggcagagacctgagagagcaggagagaggcatcatccccaaccagagcagagccgagcagctggccagcctggaggccgcccagagagccgtgggcgtgggccccggcagcagcgccggcagcaacgccagagccgagttctggagactgagaggcctgagaagaggcgccaagaagaccacccagagaagcagagaggacctgagcgccctgaccagacagggcagataccccccctacgagagagtggtgctgagagaggccagcttcaagagacccgtggtgatcctgggccccgtggccgacatcgccatgcagaagctgaccgccgagatgcccgaccagttcgagatcgccgagaccgtgagcagaaccgacagccccagcaagatcatcaagctggacaccgtgagagtgatcgccgagaaggacaagcacgccctgctggacgtgacccccagcgccatcgagagactgaactacgtgcagtactaccccatcgtggtgttcttcatccccgagagcagacccgccctgaaggccctgagacagtggctggcccccgccagcagaagaagcaccagaagactgtacgcccaggcccagaagctgagaaagcacagcagccacctgttcaccgccaccatccccctgaacggcaccagcgacacctggtaccaggagctgaaggccatcatcagagagcagcagaccagacccatctggaccgccgaggaccagctggacggcagcctggaggacaacctggacctgccccaccacggcctggccgacagcagcgccgacctgagctgcgacagcagagtgaacagcgactacgagaccgacggcgagggcggcgcctacaccgacggcgagggctacaccgacggcgagggcggcccctacaccgacgtggacgacgagccccccgcccccgccctggccagaagcagcgagcccgtgcaggccgacgagagccagagccccagagacagaggcagaatcagcgcccaccagggcgcccaggtggacagcagacacccccagggccagtggagacaggacagcatgagaacctacgagagagaggccctgaagaagaagttcatgagagtgcacgacgccgagagcagcgacgaggacggctacgactggggccccgccaccgacctgtag

SEQ ID NO: 102543 - DNA, 2859 bp, synthetic construct
  misc_feature 1..2859: note = Description of Artificial Sequence: Synthetic coding sequence
  source 1..2859: mol_type = other DNA
atgaacctgtgcggcctgatgcccatcttccccgcccccctggaccaggtggccgacatggaggagctgaccatctgggagcagcacaccgccaccctgagcaaggaccccagaagaggcttcggcatcgccatcagcggcggcagagacagacccggcggcagcatggtggtgagcgacgtggtgcccggcggccccgccgagggcagactgcagaccggcgaccacatcgtgatggtgaacggcgtgagcatggagaacgccaccagcgccttcgccatccagatcctgaagacctgcaccaagatggccaacatcaccgtgaagagacccagaagaatccacctgcccgccaccaaggccagccccagcagccccggcagacaggacagcgacgaggacgacggcccccagagagtggaggaggtggaccagggcagaggctacgacggcgacagcagcagcggcagcggcagaagctgggacgagagaagcagaagacccagacccggcagaagaggcagagccggcagccacggcagaagaagccccggcggcggcagcgaggccaacggcctggccctggtgagcggcttcaagagactgcccagacaggacgtgcagatgaagcccgtgaagagcgtgctggtgaagagaagagacagcgaggagttcggcgtgaagctgggcagccagatcttcatcaagcacatcaccgacagcggcctggccgccagacacagaggcctgcaggagggcgacctgatcctgcagatcaacggcgtgagcagccagaacctgagcctgaacgacaccagaagactgatcgagaagagcgagggcaagctgagcctgctggtgctgagagacagaggccagttcctggtgaacatcccccccgccgtgagcgacagcgacagcagccccctggaggagggcgtgaccatggccgacgagatgagcagcccccccgccgacatcagcgacctggccagcgagctgagccaggccccccccagccacatcccccccccccccagacacgcccagagaagccccgaggccagccagaccgacagccccgtggagagccccagactgagaagagagagcagcgtggacagcagaaccatcagcgagcccgacgagcagagaagcgagctgcccagagagagcagctacgacatctacagagtgcccagcagccagagcatggaggacagaggctacagccccgacaccagagtggtgagattcctgaagggcaagagcatcggcctgagactggccggcggcaacgacgtgggcatcttcgtgagcggcgtgcaggccggcagccccgccgacggccagggcatccaggagggcgaccagatcctgcaggtgaacgacgtgcccttccagaacctgaccagagaggaggccgtgcagttcctgctgggcctgccccccggcgaggagatggagctggtgacccagagaaagcaggacatcttctggaagatggtgcagagcagagtgggcgacagcttctacatcagaacccacttcgagctggagcccagcccccccagcggcctgggcttcaccagaggcgacgtgttccacgtgctggacaccctgcaccccggccccggccagagccacgccagaggcggccactggctggccgtgagaatgggcagagacctgagagagcaggagagaggcatcatccccaaccagagcagagccgagcagctggccagcctggaggccgcccagagagccgtgggcgtgggccccggcagcagcgccggcagcaacgccagagccgagttctggagactgagaggcctgagaagaggcgccaagaagaccacccagagaagcagagaggacctgagcgccctgaccagacagggcagataccccccctacgagagagtggtgctgagagaggccagcttcaagagacccgtggtgatcctgggccccgtggccgacatcgccatgcagaagctgaccgccgagatgcccgaccagttcgagatcgccgagaccgtgagcagaaccgacagccccagcaagatcatcaagctggacaccgtgagagtgatcgccgagaaggacaagcacgccctgctggacgtgacccccagcgccatcgagagactgaactacgtgcagtactaccccatcgtggtgttcttcatccccgagagcagacccgccctgaaggccctgagacagtggctggcccccgccagcagaagaagcaccagaagactgtacgcccaggcccagaagctgagaaagcacagcagccacctgttcaccgccaccatccccctgaacggcaccagcgacacctggtaccaggagctgaaggccatcatcagagagcagcagaccagacccatctggaccgccgaggaccagctggacggcagcctggaggacaacctggacctgccccaccacggcctggccgacagcagcgccgacctgagctgcgacagcagagtgaacagcgactacgagaccgacggcgagggcggcgcctacaccgacggcgagggctacaccgacggcgagggcggcccctacaccgacgtggacgacgagccccccgcccccgccctggccagaagcagcgagcccgtgcaggccgacgagagccagagccccagagacagaggcagaatcagcgcccaccagggcgcccaggtggacagcagacacccccagggccagtggagacaggacagcatgagaacctacgagagagaggccctgaagaagaagttcatgagagtgcacgacgccgagagcagcgacgaggacggctacgactggggccccgccaccgacctgtag

SEQ ID NO: 102544 - DNA, 2802 bp, synthetic construct
  misc_feature 1..2802: note = Description of Artificial Sequence: Synthetic coding sequence
  source 1..2802: mol_type = other DNA
atggaggagctgaccatctgggagcagcacaccgccaccctgagcaaggaccccagaagaggcttcggcatcgccatcagcggcggcagagacagacccggcggcagcatggtggtgagcgacgtggtgcccggcggccccgccgagggcagactgcagaccggcgaccacatcgtgatggtgaacggcgtgagcatggagaacgccaccagcgccttcgccatccagatcctgaagacctgcaccaagatggccaacatcaccgtgaagagacccagaagaatccacctgcccgccaccaaggccagccccagcagccccggcagacaggacagcgacgaggacgacggcccccagagagtggaggaggtggaccagggcagaggctacgacggcgacagcagcagcggcagcggcagaagctgggacgagagaagcagaagacccagacccggcagaagaggcagagccggcagccacggcagaagaagccccggcggcggcagcgaggccaacggcctggccctggtgagcggcttcaagagactgcccagacaggacgtgcagatgaagcccgtgaagagcgtgctggtgaagagaagagacagcgaggagttcggcgtgaagctgggcagccagatcttcatcaagcacatcaccgacagcggcctggccgccagacacagaggcctgcaggagggcgacctgatcctgcagatcaacggcgtgagcagccagaacctgagcctgaacgacaccagaagactgatcgagaagagcgagggcaagctgagcctgctggtgctgagagacagaggccagttcctggtgaacatcccccccgccgtgagcgacagcgacagcagccccctggaggagggcgtgaccatggccgacgagatgagcagcccccccgccgacatcagcgacctggccagcgagctgagccaggccccccccagccacatcccccccccccccagacacgcccagagaagccccgaggccagccagaccgacagccccgtggagagccccagactgagaagagagagcagcgtggacagcagaaccatcagcgagcccgacgagcagagaagcgagctgcccagagagagcagctacgacatctacagagtgcccagcagccagagcatggaggacagaggctacagccccgacaccagagtggtgagattcctgaagggcaagagcatcggcctgagactggccggcggcaacgacgtgggcatcttcgtgagcggcgtgcaggccggcagccccgccgacggccagggcatccaggagggcgaccagatcctgcaggtgaacgacgtgcccttccagaacctgaccagagaggaggccgtgcagttcctgctgggcctgccccccggcgaggagatggagctggtgacccagagaaagcaggacatcttctggaagatggtgcagagcagagtgggcgacagcttctacatcagaacccacttcgagctggagcccagcccccccagcggcctgggcttcaccagaggcgacgtgttccacgtgctggacaccctgcaccccggccccggccagagccacgccagaggcggccactggctggccgtgagaatgggcagagacctgagagagcaggagagaggcatcatccccaaccagagcagagccgagcagctggccagcctggaggccgcccagagagccgtgggcgtgggccccggcagcagcgccggcagcaacgccagagccgagttctggagactgagaggcctgagaagaggcgccaagaagaccacccagagaagcagagaggacctgagcgccctgaccagacagggcagataccccccctacgagagagtggtgctgagagaggccagcttcaagagacccgtggtgatcctgggccccgtggccgacatcgccatgcagaagctgaccgccgagatgcccgaccagttcgagatcgccgagaccgtgagcagaaccgacagccccagcaagatcatcaagctggacaccgtgagagtgatcgccgagaaggacaagcacgccctgctggacgtgacccccagcgccatcgagagactgaactacgtgcagtactaccccatcgtggtgttcttcatccccgagagcagacccgccctgaaggccctgagacagtggctggcccccgccagcagaagaagcaccagaagactgtacgcccaggcccagaagctgagaaagcacagcagccacctgttcaccgccaccatccccctgaacggcaccagcgacacctggtaccaggagctgaaggccatcatcagagagcagcagaccagacccatctggaccgccgaggaccagctggacggcagcctggaggacaacctggacctgccccaccacggcctggccgacagcagcgccgacctgagctgcgacagcagagtgaacagcgactacgagaccgacggcgagggcggcgcctacaccgacggcgagggctacaccgacggcgagggcggcccctacaccgacgtggacgacgagccccccgcccccgccctggccagaagcagcgagcccgtgcaggccgacgagagccagagccccagagacagaggcagaatcagcgcccaccagggcgcccaggtggacagcagacacccccagggccagtggagacaggacagcatgagaacctacgagagagaggccctgaagaagaagttcatgagagtgcacgacgccgagagcagcgacgaggacggctacgactggggccccgccaccgacctgtag

SEQ ID NO: 102545 - DNA, 2652 bp, synthetic construct
  misc_feature 1..2652: note = Description of Artificial Sequence: Synthetic coding sequence
  source 1..2652: mol_type = other DNA
atggtggtgagcgacgtggtgcccggcggccccgccgagggcagactgcagaccggcgaccacatcgtgatggtgaacggcgtgagcatggagaacgccaccagcgccttcgccatccagatcctgaagacctgcaccaagatggccaacatcaccgtgaagagacccagaagaatccacctgcccgccaccaaggccagccccagcagccccggcagacaggacagcgacgaggacgacggcccccagagagtggaggaggtggaccagggcagaggctacgacggcgacagcagcagcggcagcggcagaagctgggacgagagaagcagaagacccagacccggcagaagaggcagagccggcagccacggcagaagaagccccggcggcggcagcgaggccaacggcctggccctggtgagcggcttcaagagactgcccagacaggacgtgcagatgaagcccgtgaagagcgtgctggtgaagagaagagacagcgaggagttcggcgtgaagctgggcagccagatcttcatcaagcacatcaccgacagcggcctggccgccagacacagaggcctgcaggagggcgacctgatcctgcagatcaacggcgtgagcagccagaacctgagcctgaacgacaccagaagactgatcgagaagagcgagggcaagctgagcctgctggtgctgagagacagaggccagttcctggtgaacatcccccccgccgtgagcgacagcgacagcagccccctggaggacatcagcgacctggccagcgagctgagccaggccccccccagccacatcccccccccccccagacacgcccagagaagccccgaggccagccagaccgacagccccgtggagagccccagactgagaagagagagcagcgtggacagcagaaccatcagcgagcccgacgagcagagaagcgagctgcccagagagagcagctacgacatctacagagtgcccagcagccagagcatggaggacagaggctacagccccgacaccagagtggtgagattcctgaagggcaagagcatcggcctgagactggccggcggcaacgacgtgggcatcttcgtgagcggcgtgcaggccggcagccccgccgacggccagggcatccaggagggcgaccagatcctgcaggtgaacgacgtgcccttccagaacctgaccagagaggaggccgtgcagttcctgctgggcctgccccccggcgaggagatggagctggtgacccagagaaagcaggacatcttctggaagatggtgcagagcagagtgggcgacagcttctacatcagaacccacttcgagctggagcccagcccccccagcggcctgggcttcaccagaggcgacgtgttccacgtgctggacaccctgcaccccggccccggccagagccacgccagaggcggccactggctggccgtgagaatgggcagagacctgagagagcaggagagaggcatcatccccaaccagagcagagccgagcagctggccagcctggaggccgcccagagagccgtgggcgtgggccccggcagcagcgccggcagcaacgccagagccgagttctggagactgagaggcctgagaagaggcgccaagaagaccacccagagaagcagagaggacctgagcgccctgaccagacagggcagataccccccctacgagagagtggtgctgagagaggccagcttcaagagacccgtggtgatcctgggccccgtggccgacatcgccatgcagaagctgaccgccgagatgcccgaccagttcgagatcgccgagaccgtgagcagaaccgacagccccagcaagatcatcaagctggacaccgtgagagtgatcgccgagaaggacaagcacgccctgctggacgtgacccccagcgccatcgagagactgaactacgtgcagtactaccccatcgtggtgttcttcatccccgagagcagacccgccctgaaggccctgagacagtggctggcccccgccagcagaagaagcaccagaagactgtacgcccaggcccagaagctgagaaagcacagcagccacctgttcaccgccaccatccccctgaacggcaccagcgacacctggtaccaggagctgaaggccatcatcagagagcagcagaccagacccatctggaccgccgaggaccagctggacggcagcctggaggacaacctggacctgccccaccacggcctggccgacagcagcgccgacctgagctgcgacagcagagtgaacagcgactacgagaccgacggcgagggcggcgcctacaccgacggcgagggctacaccgacggcgagggcggcccctacaccgacgtggacgacgagccccccgcccccgccctggccagaagcagcgagcccgtgcaggccgacgagagccagagccccagagacagaggcagaatcagcgcccaccagggcgcccaggtggacagcagacacccccagggccagtggagacaggacagcatgagaacctacgagagagaggccctgaagaagaagttcatgagagtgcacgacgccgagagcagcgacgaggacggctacgactggggccccgccaccgacctgtag

SEQ ID NO: 102546 - DNA, 2760 bp, synthetic construct
  misc_feature 1..2760: note = Description of Artificial Sequence: Synthetic coding sequence
  source 1..2760: mol_type = other DNA
atggaggagctgaccatctgggagcagcacaccgccaccctgagcaaggaccccagaagaggcttcggcatcgccatcagcggcggcagagacagacccggcggcagcatggtggtgagcgacgtggtgcccggcggccccgccgagggcagactgcagaccggcgaccacatcgtgatggtgaacggcgtgagcatggagaacgccaccagcgccttcgccatccagatcctgaagacctgcaccaagatggccaacatcaccgtgaagagacccagaagaatccacctgcccgccaccaaggccagccccagcagccccggcagacaggacagcgacgaggacgacggcccccagagagtggaggaggtggaccagggcagaggctacgacggcgacagcagcagcggcagcggcagaagctgggacgagagaagcagaagacccagacccggcagaagaggcagagccggcagccacggcagaagaagccccggcggcggcagcgaggccaacggcctggccctggtgagcggcttcaagagactgcccagacaggacgtgcagatgaagcccgtgaagagcgtgctggtgaagagaagagacagcgaggagttcggcgtgaagctgggcagccagatcttcatcaagcacatcaccgacagcggcctggccgccagacacagaggcctgcaggagggcgacctgatcctgcagatcaacggcgtgagcagccagaacctgagcctgaacgacaccagaagactgatcgagaagagcgagggcaagctgagcctgctggtgctgagagacagaggccagttcctggtgaacatcccccccgccgtgagcgacagcgacagcagccccctggaggacatcagcgacctggccagcgagctgagccaggccccccccagccacatcccccccccccccagacacgcccagagaagccccgaggccagccagaccgacagccccgtggagagccccagactgagaagagagagcagcgtggacagcagaaccatcagcgagcccgacgagcagagaagcgagctgcccagagagagcagctacgacatctacagagtgcccagcagccagagcatggaggacagaggctacagccccgacaccagagtggtgagattcctgaagggcaagagcatcggcctgagactggccggcggcaacgacgtgggcatcttcgtgagcggcgtgcaggccggcagccccgccgacggccagggcatccaggagggcgaccagatcctgcaggtgaacgacgtgcccttccagaacctgaccagagaggaggccgtgcagttcctgctgggcctgccccccggcgaggagatggagctggtgacccagagaaagcaggacatcttctggaagatggtgcagagcagagtgggcgacagcttctacatcagaacccacttcgagctggagcccagcccccccagcggcctgggcttcaccagaggcgacgtgttccacgtgctggacaccctgcaccccggccccggccagagccacgccagaggcggccactggctggccgtgagaatgggcagagacctgagagagcaggagagaggcatcatccccaaccagagcagagccgagcagctggccagcctggaggccgcccagagagccgtgggcgtgggccccggcagcagcgccggcagcaacgccagagccgagttctggagactgagaggcctgagaagaggcgccaagaagaccacccagagaagcagagaggacctgagcgccctgaccagacagggcagataccccccctacgagagagtggtgctgagagaggccagcttcaagagacccgtggtgatcctgggccccgtggccgacatcgccatgcagaagctgaccgccgagatgcccgaccagttcgagatcgccgagaccgtgagcagaaccgacagccccagcaagatcatcaagctggacaccgtgagagtgatcgccgagaaggacaagcacgccctgctggacgtgacccccagcgccatcgagagactgaactacgtgcagtactaccccatcgtggtgttcttcatccccgagagcagacccgccctgaaggccctgagacagtggctggcccccgccagcagaagaagcaccagaagactgtacgcccaggcccagaagctgagaaagcacagcagccacctgttcaccgccaccatccccctgaacggcaccagcgacacctggtaccaggagctgaaggccatcatcagagagcagcagaccagacccatctggaccgccgaggaccagctggacggcagcctggaggacaacctggacctgccccaccacggcctggccgacagcagcgccgacctgagctgcgacagcagagtgaacagcgactacgagaccgacggcgagggcggcgcctacaccgacggcgagggctacaccgacggcgagggcggcccctacaccgacgtggacgacgagccccccgcccccgccctggccagaagcagcgagcccgtgcaggccgacgagagccagagccccagagacagaggcagaatcagcgcccaccagggcgcccaggtggacagcagacacccccagggccagtggagacaggacagcatgagaacctacgagagagaggccctgaagaagaagttcatgagagtgcacgacgccgagagcagcgacgaggacggctacgactggggccccgccaccgacctgtag

SEQ ID NO: 102547 - DNA, 1623 bp, synthetic construct; identical to SEQ ID NO: 75790
  misc_feature 1..1623: note = Description of Artificial Sequence: Synthetic coding sequence
  source 1..1623: mol_type = other DNA

SEQ ID NO: 102548 - DNA, 3627 bp, synthetic construct
  misc_feature 1..3627: note = Description of Artificial Sequence: Synthetic coding sequence
  source 1..3627: mol_type = other DNA
atggacctgcacatgatgaactgcgagctgctggccacctgcagcgccctgggctacctggagggcgacacctaccacaaggagcccgactgcctggagagcgtgaaggacctgatcagatacctgagacacgaggacgagaccagagacgtgagacagcagctgggcgccgcccagatcctgcagagcgacctgctgcccatcctgacccagcaccaccaggacaagcccctgttcgacgccgtgatcagactgatggtgaacctgacccagcccgccctgctgtgcttcggcaacctgcccaaggagcccagcttcagacaccacttcctgcaggtgctgacctacctgcaggcctacaaggaggccttcgccagcgagaaggccttcggcgtgctgagcgagaccctgtacgagctgctgcagctgggctgggaggagagacaggaggaggacaacctgctgatcgagagaatcctgctgctggtgagaaacatcctgcacgtgcccgccgacctggaccaggagaagaagatcgacgacgacgccagcgcccacgaccagctgctgtgggccatccacctgagcggcctggacgacctgctgctgttcctggccagcagcagcgccgaggagcagtggagcctgcacgtgctggagatcgtgagcctgatgttcagagaccagaaccccgagcagctggccggcgtgggccagggcagactggcccaggagagaagcgccgacttcgccgagctggaggtgctgagacagagagagatggccgagaagaagaccagagccctgcagagaggcaacagacacagcagattcggcggcagctacatcgtgcagggcctgaagagcatcggcgagagagacctgatcttccacaagggcctgcacaacctgagaaactacagcagcgacctgggcaagcagcccaagaaggtgcccaagagaagacaggccgccagagagctgagcatccagagaagaagcgccctgaacgtgagactgttcctgagagacttctgcagcgagttcctggagaactgctacaacagactgatgggcagcgtgaaggaccacctgctgagagagaaggcccagcagcacgacgagacctactacatgtgggccctggccttcttcatggccttcaacagagccgccagcttcagacccggcctggtgagcgagaccctgagcgtgagaaccttccacttcatcgagcagaacctgaccaactactacgagatgatgctgaccgacagaaaggaggccgccagctgggccagaagaatgcacctggccctgaaggcctaccaggagctgctggccaccgtgaacgagatggacatcagccccgacgaggccgtgagagagagcagcagaatcatcaagaacaacatcttctacgtgatggagtacagagagctgttcctggccctgttcagaaagttcgacgagagatgccagcccagaagcttcctgagagacctggtggagaccacccacctgttcctgaagatgctggagagattctgcagaagcagaggcaacctggtggtgcagaacaagcagaagaagagaagaaagaagaagaagaaggtgctggaccaggccatcgtgagcggcaacgtgcccagcagccccgaggaggtggaggccgtgtggcccgccctggccgagcagctgcagtgctgcgcccagaacagcgagctgagcatggacagcgtggtgcccttcgacgccgccagcgaggtgcccgtggaggagcagagagccgaggccatggtgagaatccaggactgcctgctggccggccaggccccccaggccctgaccctgctgagaagcgccagagaggtgtggcccgagggcgacgtgttcggcagccaggacatcagccccgaggaggagatccagctgctgaagcagatcctgagcgcccccctgcccagacagcagggccccgaggagagaggcgccgaggaggaggaggaggaggaggaggaggaggaggaggagctgcaggtggtgcaggtgagcgagaaggagttcaacttcctggactacctgaagagattcgcctgcagcaccgtggtgagagcctacgtgctgctgctgagaagctaccagcagaacagcgcccacaccaaccactgcatcgtgaagatgctgcacagactggcccacgacctgaagatggaggccctgctgttccagctgagcgtgttctgcctgttcaacagactgctgagcgaccccgccgccggcgcctacaaggagctggtgaccttcgccaagtacatcctgggcaagttcttcgccctggccgccgtgaaccagaaggccttcgtggagctgctgttctggaagaacaccgccgtggtgagagagatgaccgagggctacggcagcctggacgacagaagcagcagcagaagagcccccacctggagccccgaggaggaggcccacctgagagagctgtacctggccaacaaggacgtggagggccaggacgtggtggaggccatcctggcccacctgaacaccgtgcccagaaccagaaagcagatcatccaccacctggtgcagatgggcctggccgacagcgtgaaggacttccagagaaagggcacccacatcgtgctgtggaccggcgaccaggagctggagctgcagagactgttcgaggagttcagagacagcgacgacgtgctgggccacatcatgaagaacatcaccgccaagagaagcagagccagaatcgtggacaagctgctggccctgggcctggtggccgagagaagagagctgtacaagaagagacagaagaagctggccagcagcatcctgcccaacggcgccgagagcctgaaggacttctgccaggaggacctggaggaggaggagaacctgcccgaggaggacagcgaggaggaggaggagggcggcagcgaggccgagcaggtgcagggcagcctggtgctgagcaacgagaacctgggccagagcctgcaccaggagggcttcagcatccccctgctgtggctgcagaactgcctgatcagagccgccgacgacagagaggaggacggctgcagccaggccgtgcccctggtgcccctgaccgaggagaacgaggaggccatggagaacgagcagttccagcagctgctgagaaagctgggcgtgagaccccccgccagcggccaggagaccttctggagaatccccgccaagctgagccccacccagctgagaagagccgccgccagcctgagccagcccgaggaggagcagaagctgcagcccgagctgcagcccaaggtgcccggcgagcagggcagcgacgaggagcactgcaaggagcacagagcccaggccctgagagccctgctgctggcccacaagaagaaggccggcctggccagccccgaggaggaggacgccgtgggcaaggagcccctgaaggccgcccccaagaagagacagctgctggacagcgacgaggagcaggaggaggacgagggcagaaacagagcccccgagctgggcgcccccggcatccagaagaagaagagataccagatcgaggacgacgaggacgactag

SEQ ID NO: 102549 - DNA, 906 bp, synthetic construct
  misc_feature 1..906: note = Description of Artificial Sequence: Synthetic coding sequence
  source 1..906: mol_type = other DNA
atgctggagccccaggagaacggcgtgatcgacctgcccgactacgagcacgtggaggacgagaccttcccccccttccccccccccgccagccccgagagacaggacggcgagggcaccgagcccgacgaggagagcggcaacggcgcccccgtgagagtgccccccaagagaaccgtgaagagaaacatccccaagctggacgcccagagactgatcagcgagagaggcctgcccgccctgagacacgtgttcgacaaggccaagttcaagggcaagggccacgaggccgaggacctgaagatgctgatcagacacatggagcactgggcccacagactgttccccaagctgcagttcgaggacttcatcgacagagtggagtacctgggcagcaagaaggaggtgcagacctgcctgaagagaatcagactggacctgcccatcctgcacgaggacttcgtgagcaacaacgacgaggtggccgagaacaacgagcacgacgtgaccagcaccgagctggaccccttcctgaccaacctgagcgagagcgagatgttcgccagcgagctgagcagaagcctgaccgaggagcagcagcagagaatcgagagaaacaagcagctggccctggagagaagacaggccaagctgctgagcaacagccagaccctgggcaacgacatgctgatgaacacccccagagcccacaccgtggaggaggtgaacaccgacgaggaccagaaggaggagagcaacggcctgaacgaggacatcctggacaacccctgcaacgacgccatcgccaacaccctgaacgaggaggagaccctgctggaccagagcttcaagaacgtgcagcagcagctggacgccaccagcagaaacatcaccgaggccagatag

SEQ ID NO: 102550 - DNA, 603 bp, synthetic construct
  misc_feature 1..603: note = Description of Artificial Sequence: Synthetic coding sequence
  source 1..603: mol_type = other DNA
atgctgatcagacacatggagcactgggcccacagactgttccccaagctgcagttcgaggacttcatcgacagagtggagtacctgggcagcaagaaggaggtgcagacctgcctgaagagaatcagactggacctgcccatcctgcacgaggacttcgtgagcaacaacgacgaggtggccgagaacaacgagcacgacgtgaccagcaccgagctggaccccttcctgaccaacctgagcgagagcgagatgttcgccagcgagctgagcagaagcctgaccgaggagcagcagcagagaatcgagagaaacaagcagctggccctggagagaagacaggccaagctgctgagcaacagccagaccctgggcaacgacatgctgatgaacacccccagagcccacaccgtggaggaggtgaacaccgacgaggaccagaaggaggagagcaacggcctgaacgaggacatcctggacaacccctgcaacgacgccatcgccaacaccctgaacgaggaggagaccctgctggaccagagcttcaagaacgtgcagcagcagctggacgccaccagcagaaacatcaccgaggccagatag

SEQ ID NO: 102551 - DNA, 537 bp, synthetic construct
  misc_feature 1..537: note = Description of Artificial Sequence: Synthetic coding sequence
  source 1..537: mol_type = other DNA
atgatgatccacggcttccagagcagccacagagacttctgcttcggcccctggaagctgaccgccagcaagacccacatcatgaagagcgccgacgtggagaagctggccgacgagctgcacatgcccagcctgcccgagatgatgttcggcgacaacgtgctgagaatccagcacggcagcggcttcggcatcgagttcaacgccaccgacgccctgagatgcgtgaacaactaccagggcatgctgaaggtggcctgcgccgaggagtggcaggagagcagaaccgagggcgagcacagcaaggaggtgatcaagccctacgactggacctacaccaccgactacaagggcaccctgctgggcgagagcctgaagctgaaggtggtgcccaccaccgaccacatcgacaccgagaagctgaaggccagagagcagatcaagttcttcgaggaggtgctgctgttcgaggacgagctgcacgaccacggcgtgagcagcctgagcgtgaagatccccggcggcggccacctgtag

SEQ ID NO: 102552 - DNA, 819 bp, synthetic construct
  misc_feature 1..819: note = Description of Artificial Sequence: Synthetic coding sequence
  source 1..819: mol_type = other DNA
atgatgatccacggcttccagagcagccacagagacttctgcttcggcccctggaagctgaccgccagcaagacccacatcatgaagagcgccgacgtggagaagctggccgacgagctgcacatgcccagcctgcccgagatgatgttcggcgacaacgtgctgagaatccagcacggcagcggcttcggcatcgagttcaacgccaccgacgccctgagatgcgtgaacaactaccagggcatgctgaaggtggcctgcgccgaggagtggcaggagagcagaaccgagggcgagcacagcaaggaggtgatcaagccctacgactggacctacaccaccgactacaagggcaccctgctgggcgagagcctgaagctgaaggtggtgcccaccaccgaccacatcgacaccgagaagctgaaggccagagagcagatcaagttcttcgaggaggtgctgctgttcgaggacgagctgcacgaccacggcgtgagcagcctgagcgtgaagatcagagtgatgcccagcagcttcttcctgctgctgagattcttcctgagaatcgacggcgtgctgatcagaatgaacgacaccagactgtaccacgaggccgacaagacctacatgctgagagagtacaccagcagagagagcaagatcagcagcctgatgcacgtgccccccagcctgttcaccgagcccaacgagatcagccagtacctgcccatcaaggaggccgtgtgcgagaagctgatcttccccgagagaatcgaccccaaccccgccgacagccagaagagcacccaggtggagtag

SEQ ID NO: 102553 - DNA, 1143 bp, synthetic construct; identical to SEQ ID NO: 90505
  misc_feature 1..1143: note = Description of Artificial Sequence: Synthetic coding sequence
  source 1..1143: mol_type = other DNA

SEQ ID NO: 102554 - DNA, 756 bp, synthetic construct
  misc_feature 1..756: note = Description of Artificial Sequence: Synthetic coding sequence
  source 1..756: mol_type = other DNA
atgatctacaccatgaagaaggtgcacgccctgtgggccagcgtgtgcctgctgctgaacctggcccccgcccccctgaacgccgacagcgaggaggacgaggagcacaccatcatcaccgacaccgagctgccccccctgaagctgatgcacagcttctgcgccttcaaggccgacgacggcccctgcaaggccatcatgaagagattcttcttcaacatcttcaccagacagtgcgaggagttcatctacggcggctgcgagggcaaccagaacagattcgagagcctggaggagtgcaagaagatgtgcaccagagacaacgccaacagaatcatcaagaccaccctgcagcaggagaagcccgacttctgcttcctggaggaggaccccggcatctgcagaggctacatcaccagatacttctacaacaaccagaccaagcagtgcgagagattcaagtacggcggctgcctgggcaacatgaacaacttcgagaccctggaggagtgcaagaacatctgcgaggacggccccaacggcttccaggtggacaactacggcacccagctgaacgccgtgaacaacagcctgaccccccagagcaccaaggtgcccagcctgttcgtgaccaaggagggcaccaacgacggctggaagaacgccgcccacatctaccaggtgttcctgaacgccttctgcatccacgccagcatgttcttcctgggcctggacagcatcagctgcctgtgctag

SEQ ID NO: 102555 - DNA, 915 bp, synthetic construct; identical to SEQ ID NO: 90362
  misc_feature 1..915: note = Description of Artificial Sequence: Synthetic coding sequence
  source 1..915: mol_type = other DNA

SEQ ID NO: 102556 - DNA, 756 bp, synthetic construct; identical to SEQ ID NO: 102554
  misc_feature 1..756: note = Description of Artificial Sequence: Synthetic coding sequence
  source 1..756: mol_type = other DNA

SEQ ID NO: 102557 - DNA, 231 bp, synthetic construct
  misc_feature 1..231: note = Description of Artificial Sequence: Synthetic coding sequence
  source 1..231: mol_type = other DNA
atgatctacaccatgaagaaggtgcacgccctgtgggccagcgtgtgcctgctgctgaacctggcccccgcccccctgaacgccgacagcgaggaggacgaggagcacaccatcatcaccgacaccgagctgccccccctgaagctgatgcacagcttctgcgccttcaaggccgacgacggcccctgcaaggccatcatgaagagattcttcttcaacatcttcacctag

SEQ ID NO: 102558 - DNA, 186 bp, synthetic construct
  misc_feature 1..186: note = Description of Artificial Sequence: Synthetic coding sequence
  source 1..186: mol_type = other DNA
atgatctacaccatgaagaaggtgcacgccctgtgggccagcgtgtgcctgctgctgaacctggcccccgcccccctgaacgccgacagcgaggaggacgaggagcacaccatcatcaccgacaccgagctgccccccctgaagctgatgcacagcttctgcgccttcaaggccgacgacggctag

SEQ ID NO: 102559 - DNA, 321 bp, synthetic construct
  misc_feature 1..321: note = Description of Artificial Sequence: Synthetic coding sequence
  source 1..321: mol_type = other DNA
atgatctacaccatgaagaaggtgcacgccctgtgggccagcgtgtgcctgctgctgaacctggcccccgcccccctgaacgccgacagcgaggaggacgaggagcacaccatcatcaccgacaccgagctgccccccctgaagctgatgcacagcttctgcgccttcaaggccgacgacggcccctgcaaggccatcatgaagagattcttcttcaacatcttcaccagacagtgcgaggagttcatctacggcggctgcgagggcaaccagaacagattcgagagcctggaggagtgcaagaagatgtgcaccagatag

SEQ ID NO: 102560 - DNA, 867 bp, synthetic construct
  misc_feature 1..867: note = Description of Artificial Sequence: Synthetic coding sequence
  source 1..867: mol_type = other DNA
atgatctacaccatgaagaaggtgcacgccctgtgggccagcgtgtgcctgctgctgaacctggcccccgcccccctgaacgccgacagcgaggaggacgaggagcacaccatcatcaccgacaccgagctgccccccctgaagctgatgcacagcttctgcgccttcaaggccgacgacggcccctgcaaggccatcatgaagagattcttcttcaacatcttcaccagacagtgcgaggagttcatctacggcggctgcgagggcaaccagaacagattcgagagcctggaggagtgcaagaagatgtgcaccagagacaacgccaacagaatcatcaagaccaccctgcagcaggagaagcccgacttctgcttcctggaggaggaccccggcatctgcagaggctacatcaccagatacttctacaacaaccagaccaagcagtgcgagagattcaagtacggcggctgcctgggcaacatgaacaacttcgagaccctggaggagtgcaagaacatctgcgaggacggccccaacggcttccaggtggacaactacggcacccagctgaacgccgtgaacaacagcctgaccccccagagcaccaaggtgcccagcctgttcgagttccacggccccagctggtgcctgacccccgccgacagaggcctgtgcagagccaacgagaacagattctactacaacagcgtgatcggcaagtgcagacccttcaagtacagcggctgcggcggcaacgagaacaacttcaccagcaagcaggagtgcctgagagcctgcaagaagggcttcatccagagaatcagcaagggcggcctgatcaagaccaagagaaagagaaagtag

SEQ ID NO: 102561 - DNA, 321 bp, synthetic construct; identical to SEQ ID NO: 102559
  misc_feature 1..321: note = Description of Artificial Sequence: Synthetic coding sequence
  source 1..321: mol_type = other DNA

SEQ ID NO: 102562 - DNA, 318 bp, synthetic construct
  misc_feature 1..318: note = Description of Artificial Sequence: Synthetic coding sequence
  source 1..318: mol_type = other DNA
atgatctacaccatgaagaaggtgcacgccctgtgggccagcgtgtgcctgctgctgaacctggcccccgcccccctgaacgccgacagcgaggaggacgaggagcacaccatcatcaccgacaccgagctgccccccctgaagctgatgcacagcttctgcgccttcaaggccgacgacggcccctgcaaggccatcatgaagagattcttcttcaacatcttcaccagacagtgcgaggagttcatctacggcggctgcgagggcaaccagaacagattcgagagcctggaggagtgcaagaagatgtgcacctag

SEQ ID NO: 102563 - DNA, 966 bp, synthetic construct
  misc_feature 1..966: note = Description of Artificial Sequence: Synthetic coding sequence
  source 1..966: mol_type = other DNA
atgggcgagccccagggcagcatgagaatcctggtgaccggcggcagcggcctggtgggcaaggccatccagaaggtggtggccgacggcgccggcctgcccggcgaggactgggtgttcgtgagcagcaaggacgccgacctgaccgacaccgcccagaccagagccctgttcgagaaggtgcagcccacccacgtgatccacctggccgccatggtgggcggcctgttcagaaacatcaagtacaacctggacttctggagaaagaacgtgcacatgaacgacaacgtgctgcacagcgccttcgaggtgggcgccagaaaggtggtgagctgcctgagcacctgcatcttccccgacaagaccacctaccccatcgacgagaccatgatccacaacggccccccccacaacagcaacttcggctacagctacgccaagagaatgatcgacgtgcagaacagagcctacttccagcagtacggctgcaccttcaccgccgtgatccccaccaacgtgttcggcccccacgacaacttcaacatcgaggacggccacgtgctgcccggcctgatccacaaggtgcacctggccaagagcagcggcagcgccctgaccgtgtggggcaccggcaaccccagaagacagttcatctacagcctggacctggcccagctgttcatctgggtgctgagagagtacaacgaggtggagcccatcatcctgagcgtgggcgaggaggacgaggtgagcatcaaggaggccgccgaggccgtggtggaggccatggacttccacggcgaggtgaccttcgacaccaccaagagcgacggccagttcaagaagaccgccagcaacagcaagctgagaacctacctgcccgacttcagattcacccccttcaagcaggccgtgaaggagacctgcgcctggttcaccgacaactacgagcaggccagaaagtag

SEQ ID NO: 102564 - DNA, 360 bp, synthetic construct
  misc_feature 1..360: note = Description of Artificial Sequence: Synthetic coding sequence
  source 1..360: mol_type = other DNA
atgggcgagccccagggcagcatgagaatcctggtgaccggcggcagcggcctggtgggcaaggccatccagaaggtggtggccgacggcgccggcctgcccggcgaggactgggtgttcgtgagcagcaaggacgccgacctgaccgacaccgcccagaccagagccctgttcgagaaggtgcagcccacccacgtgatccacctggccgccatggtgggcggcctgttcagaaacatcaagtacaacctggacttctggagaaagaacgtgcacatgaacgacaacgtgctgcacagcgccttcgaggtgggcgccagaaaggtggtgagctgcctgagcacctgcatcttcccctag

SEQ ID NO: 102565 - DNA, 807 bp, synthetic construct
  misc_feature 1..807: note = Description of Artificial Sequence: Synthetic coding sequence
  source 1..807: mol_type = other DNA
atgggcgagccccagggcagcatgagaatcctggtgaccggcggcagcggcctggtgggcaaggccatccagaaggtggtggccgacggcgccggcctgcccggcgaggactgggtgttcgtgagcagcaaggacgccgacctgaccgacaccgcccagaccagagccctgttcgagaaggtgcagcccacccacgtgatccacctggccgccatggtgggcggcctgttcagaaacatcaagtacaacctggacttctggagaaagaacgtgcacatgaacgacaacgtgctgcacagcgccttcgaggtgggcgccagaaaggtggtgagctgcctgagcacctgcatcttccccgacaagaccacctaccccatcgacgagaccatgatccacaacggccccccccacaacagcaacttcggctacagctacgccaagagaatgatcgacgtgcagaacagagcctacttccagcagtacggctgcaccttcaccgccgtgatccccaccaacgtgttcggcccccacgacaacttcaacatcgaggacggccacgtgctgcccggcctgatccacaaggtgcacctggccaagagcagcggcagcgccctgaccgtgtggggcaccggcaaccccagaagacagttcatctacagcctggacctggcccagctgttcatctgggtgctgagagagtacaacgaggtggagcccatcatcctgagcgtgggcgaggaggacgaggtgagcatcaaggaggccgccgaggccgtggtggaggccatggacttccacggcgagtag

SEQ ID NO: 102566 - DNA, 966 bp, synthetic construct; identical to SEQ ID NO: 102563
  misc_feature 1..966: note = Description of Artificial Sequence: Synthetic coding sequence
  source 1..966: mol_type = other DNA

SEQ ID NO: 102567 - DNA, 597 bp, synthetic construct
  misc_feature 1..597: note = Description of Artificial Sequence: Synthetic coding sequence
  source 1..597: mol_type = other DNA
atgggcgagccccagggcagcatgagaatcctggtgaccggcggcagcggcctggtgggcaaggccatccagaaggtggtggccgacggcgccggcctgcccggcgaggactgggtgttcgtgagcagcaaggacgccgacctgaccgacaccgcccagaccagagccctgttcgagaaggtgcagcccacccacgtgatccacctggccgccatggtgggcggcctgttcagaaacatcaagtacaacctggacttctggagaaagaacgtgcacatgaacgacaacgtgctgcacagcgccttcgaggtgggcgccagaaaggtggtgagctgcctgagcacctgcatcttccccgacaagaccacctaccccatcgacgagaccatgatccacaacggccccccccacaacagcaacttcggctacagctacgccaagagaatgatcgacgtgcagaacagagcctacttccagcagtacggctgcaccttcaccgccgtgatccccaccaacgtgttcggcccccacgacaacttcaacatcgaggacggccacgtgctgcccggcctgatccacaaggtgcacctggcctag

SEQ ID NO: 102568 - DNA, 2658 bp, synthetic construct
  misc_feature 1..2658: note = Description of Artificial Sequence: Synthetic coding sequence
  source 1..2658: mol_type = other DNA
atggtggagaagagcagcatcgacgagaacagcatcagcctggagaaggaggtgagacacgtgcaggagcagaacctggacatcctgaagaccgacctgagcctgaagagcttcagcgaggagatctacagcgagagctgcgccctgctgcccaccagcagcgccgacatcgaggagaccgacctgagcgagaagagctgccccctggagaacggcggcagaagcagcatcagccacctgaagaaggccgccagcgaggagaagcccctgggcgtgggcgagatggaggaggagtgcaccctggagcccgagctggccgccttccccaagcaggacggcggcacccaggagtacaccgacgccaccctggaggaccacagaggcgacgtgcaggaggccgacaccctgcacagacagctgagcctgagccagtgcttccccctgctgatgaccgaggagcagcagaaccccggcgagcagatcagcaccaacatccacgccagcggcgaggagaagtgctacgaggaggtgcaggtgcagaacgaggccagcttcagcaccctggagggcgagatgatcgagaccagcttcagccagaacatccccaagctggacgaggcccacaccaccgaggccgccgagagcgagaccagcctgacccagtacctgctggccgccggcaagagagaggtgcccgagaccaaggacaccagagaccaggccaagctggtgcagagcgagagcatcaccagcatggaggtggaggaggtgaccttcaacaccgtgtacgagtactacaaccagaagcaggagagcctgggcagacccctgagccccgagagcgacatcagcatcggcgtgggcagcaccaccagcgaggagatcagcgagctggaccagttctacaccccccccagcagcgtggagtacttcgagagccccaagagccccgacctgtacttcaaccccagcgacatcaccaagcagagcagcatccacagcggcggcgagaccgtggagagatacagcacccccctgggcgaggtggccgagagatacagcacccccagcgagggcgaggtgggcgagagatacagcaccccccccggcgagaccctggagagatacagcaccccccccggcgagaccctggagagatacagcaccccccccggcgaggccctggagagatacagcatccccaccggcggccccaaccccaccggcaccttcaagacctaccccagcaagatcgagagagaggacggcacccccaacgagcacttctacacccccaccgaggagagaggcagcgcctacgagatctggagaagcgacagcttcggcacccccaacgaggccatcgagcccaaggacaacgagatgccccccagcttcatcgagcccctgaccaagagaaaggtgtacgagaacaccaccctgggcttcatcgtggaggtggagggcctgcccgtgcccggcgtgaagtggtacagaaacaagagcctgctggagcccgacgagagaatcaagatggagagagtgggcaacgtgtgcagcctggagatcagcaacatccagaagggcgagggcggcgagtacatgtgccacgccgtgaacatcatcggcgaggccaagagcttcgccaacgtggacatcatgccccaggaggagagagtggtggccctgcccccccccgtgacccaccagcacgtgatggagttcgacctggagcacaccaccagcagcagaacccccagcccccaggagatcgtgctggaggtggagctgagcgagaaggacgtgaaggagttcgagaagcaggtgaagatcgtgaccgtgcccgagttcacccccgaccacaagagcatgatcgtgagcctggacgtgctgcccttcaacttcgtggaccccaacatggacagcagagagggcgaggacaaggagctgaagatcgacctggaggtgttcgagatgccccccagattcatcatgcccatctgcgacttcaagatccccgagaacagcgacgccgtgttcaagtgcagcgtgatcggcatccccacccccgaggtgaagtggtacaaggagtacatgtgcatcgagcccgacaacatcaagtacgtgatcagcgaggagaagggcagccacaccctgaagatcagaaacgtgtgcctgagcgacagcgccacctacagatgcagagccgtgaactgcgtgggcgaggccatctgcagaggcttcctgaccatgggcgacagcgagatcttcgccgtgatcgccaagaagagcaaggtgaccctgagcagcctgatggaggagctggtgctgaagagcaactacaccgacagcttcttcgagttccaggtggtggagggcccccccagattcatcaagggcatcagcgactgctacgcccccatcggcaccgccgcctacttccagtgcctggtgagaggcagccccagacccaccgtgtactggtacaaggacggcaagctggtgcagggcagaagattcaccgtggaggagagcggcaccggcttccacaacctgttcatcaccagcctggtgaagagcgacgagggcgagtacagatgcgtggccaccaacaagagcggcatggccgagagcttcgccgccctgaccctgacctag

SEQ ID NO: 102569 - DNA, 16815 bp, synthetic construct
  misc_feature 1..16815: note = Description of Artificial Sequence: Synthetic coding sequence
  source 1..16815: mol_type = other DNA
atgaccacccaggcccccaccttcacccagcccctgcagagcgtggtggtgctggagggcagcaccgccaccttcgaggcccacatcagcggcttccccgtgcccgaggtgagctggttcagagacggccaggtgatcagcaccagcaccctgcccggcgtgcagatcagcttcagcgacggcagagccaagctgaccatccccgccgtgaccaaggccaacagcggcagatacagcctgaaggccaccaacggcagcggccaggccaccagcaccgccgagctgctggtgaaggccgagaccgccccccccaacttcgtgcagagactgcagagcatgaccgtgagacagggcagccaggtgagactgcaggtgagagtgaccggcatccccacccccgtggtgaagttctacagagacggcgccgagatccagagcagcctggacttccagatcagccaggagggcgacctgtacagcctgctgatcgccgaggcctaccccgaggacagcggcacctacagcgtgaacgccaccaacagcgtgggcagagccaccagcaccgccgagctgctggtgcagggcgaggaggaggtgcccgccaagaagaccaagaccatcgtgagcaccgcccagatcagcgagagcagacagaccagaatcgagaagaagatcgaggcccacttcgacgccagaagcatcgccaccgtggagatggtgatcgacggcgccgccggccagcagctgccccacaagaccccccccagaatcccccccaagcccaagagcagaagccccaccccccccagcatcgccgccaaggcccagctggccagacagcagagccccagccccatcagacacagccccagccccgtgagacacgtgagagcccccacccccagccccgtgagaagcgtgagccccgccgccagaatcagcaccagccccatcagaagcgtgagaagccccctgctgatgagaaagacccaggccagcaccgtggccaccggccccgaggtgccccccccctggaagcaggagggctacgtggccagcagcagcgaggccgagatgagagagaccaccctgaccaccagcacccagatcagaaccgaggagagatgggagggcagatacggcgtgcaggagcaggtgaccatcagcggcgccgccggcgccgccgccagcgtgagcgccagcgccagctacgccgccgaggccgtggccaccggcgccaaggaggtgaagcaggacgccgacaagagcgccgccgtggccaccgtggtggccgccgtggacatggccagagtgagagagcccgtgatcagcgccgtggagcagaccgcccagagaaccaccaccaccgccgtgcacatccagcccgcccaggagcaggtgagaaaggaggccgagaagaccgccgtgaccaaggtggtggtggccgccgacaaggccaaggagcaggagctgaagagcagaaccaaggaggtgatcaccaccaagcaggagcagatgcacgtgacccacgagcagatcagaaaggagaccgagaagaccttcgtgcccaaggtggtgatcagcgccgccaaggccaaggagcaggagaccagaatcagcgaggagatcaccaagaagcagaagcaggtgacccaggaggccatcagacaggagaccgagatcaccgccgccagcatggtggtggtggccaccgccaagagcaccaagctggagaccgtgcccggcgcccaggaggagaccaccacccagcaggaccagatgcacctgagctacgagaagatcatgaaggagaccagaaagaccgtggtgcccaaggtgatcgtggccacccccaaggtgaaggagcaggacctggtgagcagaggcagagagggcatcaccaccaagagagagcaggtgcagatcacccaggagaagatgagaaaggaggccgagaagaccgccctgagcaccatcgccgtggccaccgccaaggccaaggagcaggagaccatcctgagaaccagagagaccatggccaccagacaggagcagatccaggtgacccacggcaaggtggacgtgggcaagaaggccgaggccgtggccaccgtggtggccgccgtggaccaggccagagtgagagagcccagagagcccggccacctggaggagagctacgcccagcagaccaccctggagtacggctacaaggagagaatcagcgccgccaaggtggccgagcccccccagagacccgccagcgagccccacgtggtgcccaaggccgtgaagcccagagtgatccaggcccccagcgagacccacatcaagaccaccgaccagaagggcatgcacatcagcagccagatcaagaagaccaccgacctgaccaccgagagactggtgcacgtggacaagagacccagaaccgccagcccccacttcaccgtgagcaagatcagcgtgcccaagaccgagcacggctacgaggccagcatcgccggcagcgccatcgccaccctgcagaaggagctgagcgccaccagcagcgcccagaagatcaccaagagcgtgaaggcccccaccgtgaagcccagcgagaccagagtgagagccgagcccacccccctgccccagttccccttcgccgacacccccgacacctacaagagcgaggccggcgtggaggtgaagaaggaggtgggcgtgagcatcaccggcaccaccgtgagagaggagagattcgaggtgctgcacggcagagaggccaaggtgaccgagaccgccagagtgcccgcccccgtggagatccccgtgaccccccccaccctggtgagcggcctgaagaacgtgaccgtgatcgagggcgagagcgtgaccctggagtgccacatcagcggctaccccagccccaccgtgacctggtacagagaggactaccagatcgagagcagcatcgacttccagatcaccttccagagcggcatcgccagactgatgatcagagaggccttcgccgaggacagcggcagattcacctgcagcgccgtgaacgaggccggcaccgtgagcaccagctgctacctggccgtgcaggtgagcgaggagttcgagaaggagaccaccgccgtgaccgagaagttcaccaccgaggagaagagattcgtggagagcagagacgtggtgatgaccgacaccagcctgaccgaggagcaggccggccccggcgagcccgccgccccctacttcatcaccaagcccgtggtgcagaagctggtggagggcggcagcgtggtgttcggctgccaggtgggcggcaaccccaagccccacgtgtactggaagaagagcggcgtgcccctgaccaccggctacagatacaaggtgagctacaacaagcagaccggcgagtgcaagctggtgatcagcatgaccttcgccgacgacgccggcgagtacaccatcgtggtgagaaacaagcacggcgagaccagcgccagcgccagcctgctggaggaggccgactacgagctgctgatgaagagccagcaggagatgctgtaccagacccaggtgaccgccttcgtgcaggagcccaaggtgggcgagaccgcccccggcttcgtgtacagcgagtacgagaaggagtacgagaaggagcaggccctgatcagaaagaagatggccaaggacaccgtggtggtgagaacctacgtggaggaccaggagttccacatcagcagcttcgaggagagactgatcaaggagatcgagtacagaatcatcaagaccaccctggaggagctgctggaggaggacggcgaggagaagatggccgtggacatcagcgagagcgaggccgtggagagcggcttcgacagcagaatcaagaactacagaatcctggagggcatgggcgtgaccttccactgcaagatgagcggctaccccctgcccaagatcgcctggtacaaggacggcaagagaatcaagcacggcgagagataccagatggacttcctgcaggacggcagagccagcctgagaatccccgtggtgctgcccgaggacgagggcatctacaccgccttcgccagcaacatcaagggcaacgccatctgcagcggcaagctgtacgtggagcccgccgcccccctgggcgcccccacctacatccccaccctggagcccgtgagcagaatcagaagcctgagccccagaagcgtgagcagaagccccatcagaatgagccccgccagaatgagccccgccagaatgagccccgccagaatgagccccgccagaatgagccccggcagaagactggaggagaccgacgagagccagctggagagactgtacaagcccgtgttcgtgctgaagcccgtgagcttcaagtgcctggagggccagaccgccagattcgacctgaaggtggtgggcagacccatgcccgagaccttctggttccacgacggccagcagatcgtgaacgactacacccacaaggtggtgatcaaggaggacggcacccagagcctgatcatcgtgcccgccacccccagcgacagcggcgagtggaccgtggtggcccagaacagagccggcagaagcagcatcagcgtgatcctgaccgtggaggccgtggagcaccaggtgaagcccatgttcgtggagaagctgaagaacgtgaacatcaaggagggcagcagactggagatgaaggtgagagccaccggcaaccccaaccccgacatcgtgtggctgaagaacagcgacatcatcgtgccccacaagtaccccaagatcagaatcgagggcaccaagggcgaggccgccctgaagatcgacagcaccgtgagccaggacagcgcctggtacaccgccaccgccatcaacaaggccggcagagacaccaccagatgcaaggtgaacgtggaggtggagttcgccgagcccgagcccgagagaaagctgatcatccccagaggcacctacagagccaaggagatcgccgcccccgagctggagcccctgcacctgagatacggccaggagcagtgggaggagggcgacctgtacgacaaggagaagcagcagaagcccttcttcaagaagaagctgaccagcctgagactgaagagattcggccccgcccacttcgagtgcagactgacccccatcggcgaccccaccatggtggtggagtggctgcacgacggcaagcccctggaggccgccaacagactgagaatgatcaacgagttcggctactgcagcctggactacggcgtggcctacagcagagacagcggcatcatcacctgcagagccaccaacaagtacggcaccgaccacaccagcgccaccctgatcgtgaaggacgagaagagcctggtggaggagagccagctgcccgagggcagaaagggcctgcagagaatcgaggagctggagagaatggcccacgagggcgccctgaccggcgtgaccaccgaccagaaggagaagcagaagcccgacatcgtgctgtaccccgagcccgtgagagtgctggagggcgagaccgccagattcagatgcagagtgaccggctacccccagcccaaggtgaactggtacctgaacggccagctgatcagaaagagcaagagattcagagtgagatacgacggcatccactacctggacatcgtggactgcaagagctacgacaccggcgaggtgaaggtgaccgccgagaaccccgagggcgtgatcgagcacaaggtgaagctggagatccagcagagagaggacttcagaagcgtgctgagaagagcccccgagcccagacccgagttccacgtgcacgagcccggcaagctgcagttcgaggtgcagaaggtggacagacccgtggacaccaccgagaccaaggaggtggtgaagctgaagagagccgagagaatcacccacgagaaggtgcccgaggagagcgaggagctgagaagcaagttcaagagaagaaccgaggagggctactacgaggccatcaccgccgtggagctgaagagcagaaagaaggacgagagctacgaggagctgctgagaaagaccaaggacgagctgctgcactggaccaaggagctgaccgaggaggagaagaaggccctggccgaggagggcaagatcaccatccccaccttcaagcccgacaagatcgagctgagccccagcatggaggcccccaagatcttcgagagaatccagagccagaccgtgggccagggcagcgacgcccacttcagagtgagagtggtgggcaagcccgaccccgagtgcgagtggtacaagaacggcgtgaagatcgagagaagcgacagaatctactggtactggcccgaggacaacgtgtgcgagctggtgatcagagacgtgaccgccgaggacagcgccagcatcatggtgaaggccatcaacatcgccggcgagaccagcagccacgccttcctgctggtgcaggccaagcagctgatcaccttcacccaggagctgcaggacgtggtggccaaggagaaggacaccatggccaccttcgagtgcgagaccagcgagcccttcgtgaaggtgaagtggtacaaggacggcatggaggtgcacgagggcgacaagtacagaatgcacagcgacagaaaggtgcacttcctgagcatcctgaccatcgacaccagcgacgccgaggactacagctgcgtgctggtggaggacgagaacgtgaagaccaccgccaagctgatcgtggagggcgccgtggtggagttcgtgaaggagctgcaggacatcgaggtgcccgagagctacagcggcgagctggagtgcatcgtgagccccgagaacatcgagggcaagtggtaccacaacgacgtggagctgaagagcaacggcaagtacaccatcaccagcagaagaggcagacagaacctgaccgtgaaggacgtgaccaaggaggaccagggcgagtacagcttcgtgatcgacggcaagaagaccacctgcaagctgaagatgaagcccagacccatcgccatcctgcagggcctgagcgaccagaaggtgtgcgagggcgacatcgtgcagctggaggtgaaggtgagcctggagagcgtggagggcgtgtggatgaaggacggccaggaggtgcagcccagcgacagagtgcacatcgtgatcgacaagcagagccacatgctgctgatcgaggacatgaccaaggaggacgccggcaactacagcttcaccatccccgccctgggcctgagcaccagcggcagagtgagcgtgtacagcgtggacgtgatcacccccctgaaggacgtgaacgtgatcgagggcaccaaggccgtgctggagtgcaaggtgagcgtgcccgacgtgaccagcgtgaagtggtacctgaacgacgagcagatcaagcccgacgacagagtgcaggccatcgtgaagggcaccaagcagagactggtgatcaacagaacccacgccagcgacgagggcccctacaagctgatcgtgggcagagtggagaccaactgcaacctgagcgtggagaagatcaagatcatcagaggcctgagagacctgacctgcaccgagacccagaacgtggtgttcgaggtggagctgagccacagcggcatcgacgtgctgtggaacttcaaggacaaggagatcaagcccagcagcaagtacaagatcgaggcccacggcaagatctacaagctgaccgtgctgaacatgatgaaggacgacgagggcaagtacaccttctacgccggcgagaacatgaccagcggcaagctgaccgtggccggcggcgccatcagcaagcccctgaccgaccagaccgtggccgagagccaggaggccgtgttcgagtgcgaggtggccaaccccgacagcaagggcgagtggctgagagacggcaagcacctgcccctgaccaacaacatcagaagcgagagcgacggccacaagagaagactgatcatcgccgccaccaagctggacgacatcggcgagtacacctacaaggtggccaccagcaagaccagcgccaagctgaaggtggaggccgtgaagatcaagaagaccctgaagaacctgaccgtgaccgagacccaggacgccgtgttcaccgtggagctgacccaccccaacgtgaagggcgtgcagtggatcaagaacggcgtggtgctggagagcaacgagaagtacgccatcagcgtgaagggcaccatctacagcctgagaatcaagaactgcgccatcgtggacgagagcgtgtacggcttcagactgggcagactgggcgccagcgccagactgcacgtggagaccgtgaagatcatcaagaagcccaaggacgtgaccgccctggagaacgccaccgtggccttcgaggtgagcgtgagccacgacaccgtgcccgtgaagtggttccacaagagcgtggagatcaagcccagcgacaagcacagactggtgagcgagagaaaggtgcacaagctgatgctgcagaacatcagccccagcgacgccggcgagtacaccgccgtggtgggccagctggagtgcaaggccaagctgttcgtggagaccctgcacatcaccaagaccatgaagaacatcgaggtgcccgagaccaagaccgccagcttcgagtgcgaggtgagccacttcaacgtgcccagcatgtggctgaagaacggcgtggagatcgagatgagcgagaagttcaagatcgtggtgcagggcaagctgcaccagctgatcatcatgaacaccagcaccgaggacagcgccgagtacaccttcgtgtgcggcaacgaccaggtgagcgccaccctgaccgtgacccccatcatgatcaccagcatgctgaaggacatcaacgccgaggagaaggacaccatcaccttcgaggtgaccgtgaactacgagggcatcagctacaagtggctgaagaacggcgtggagatcaagagcaccgacaagtgccagatgagaaccaagaagctgacccacagcctgaacatcagaaacgtgcacttcggcgacgccgccgactacaccttcgtggccggcaaggccaccagcaccgccaccctgtacgtggaggccagacacatcgagttcagaaagcacatcaaggacatcaaggtgctggagaagaagagagccatgttcgagtgcgaggtgagcgagcccgacatcaccgtgcagtggatgaaggacgaccaggagctgcagatcaccgacagaatcaagatccagaaggagaagtacgtgcacagactgctgatccccagcaccagaatgagcgacgccggcaagtacaccgtggtggccggcggcaacgtgagcaccgccaagctgttcgtggagggcagagacgtgagaatcagaagcatcaagaaggaggtgcaggtgatcgagaagcagagagccgtggtggagttcgaggtgaacgaggacgacgtggacgcccactggtacaaggacggcatcgagatcaacttccaggtgcaggagagacacaagtacgtggtggagagaagaatccacagaatgttcatcagcgagaccagacagagcgacgccggcgagtacaccttcgtggccggcagaaacagaagcagcgtgaccctgtacgtgaacgcccccgagcccccccaggtgctgcaggagctgcagcccgtgaccgtgcagagcggcaagcccgccagattctgcgccgtgatcagcggcagaccccagcccaagatcagctggtacaaggaggagcagctgctgagcaccggcttcaagtgcaagttcctgcacgacggccaggagtacaccctgctgctgatcgaggccttccccgaggacgccgccgtgtacacctgcgaggccaagaacgactacggcgtggccaccaccagcgccagcctgagcgtggaggtgcccgaggtggtgagccccgaccaggagatgcccgtgtacccccccgccatcatcacccccctgcaggacaccgtgaccagcgagggccagcccgccagattccagtgcagagtgagcggcaccgacctgaaggtgagctggtacagcaaggacaagaagatcaagcccagcagattcttcagaatgacccagttcgaggacacctaccagctggagatcgccgaggcctaccccgaggacgagggcacctacaccttcgtggccagcaacgccgtgggccaggtgagcagcaccgccaacctgagcctggaggcccccgagagcatcctgcacgagagaatcgagcaggagatcgagatggagatgaaggagctgttcagcgagggcgagagcgagcacagcgagagagacaccagagacgccttcagcgacagcgaggacatcgaccacaagagcatggccgccaagagatacgccagcagaatcagcagcaccagcagctggcccgagtacttcaagcccagcttcacccagaagctgaccttcaagtacgtgctggagggcgagcccgtggtgttcacctgcagactgatcgcctgccccacccccgagatgacctggttccacaacaacagacccatccccaccggcctgagaagaatcatcaaggccgagagcgacctgcaccaccacagcagcagcctggagatcaagagagtgcaggacagagacagcggcagctacagactgctggccatcaacagcgagggcagcgccgagagcaccgccagcctgctggtgatccagaagggccaggacgagaagtacctggagttcctgaagagagccgagagaacccacgagaacgtggaggccctggtggagagaggcgaggacagaatcaaggtggacctgagattcaccggcagccccttcaacaagaagcaggacgtggagcagaagggcatgatgagaaccatccacttcaagaccatgagcagcgccaagaagaccgactacatgtacgacgaggagtacctggagagcaagagcgacatcagaggctggctgaacgtgggcgagagcttcctggacaaggagaccaaggtgaagctgcagagactgagagaggccagaaagaccctgatggagaagaagaagctgagcctgctggacaccagcagcgagatcagcagcagaaccctgagaagcgaggccagcgacaaggacatcctgttcagcagagaggacatgaagatcagaagcatgagcgacctggccgagagctacaaggtggaccacagcgccgagagcatcgtgcagaacccccacgccctgagcaaccagatggaccagaacatcgagagcgaggagctgcccaccagcttccagaccatcgtggacgaggagatcttccagaccgagatcagaatgagccaggaggccctggtgaaggagagcctgcccaaggaccacctgtacggcgagatcctggtgaacgagaacacccaggccagaggccagctggaggagatcatggccaacaccaccatcggcgagagcagcacctacatcaccaacgtgtgcgagaaggaggaggtgtacgagacccccgagaacgtgagccaggccatcaccccccacgccagcgagagcttcggcaccctggtgaacgtggaggagagcgaggagatcgccagcgagagaatcaagaaggacgacctgagagagctgcagctgagcgccagcaccagaatcgacgagttcaagaccgagcagaaggaggagaacatgagattcttcgagaacagcttcagaaagagaccccagagatgcccccccagcttcctgcaggagatcgagagccaggaggtgtacgagggcgacagctgcaacttcgtgtgccacttccagggctacccccagcccatcgtgacctggtacaacaacgacatgcccatccccagaaaccagaacttcatcatccacagcctggagaactacagcatcctgaccctgagcagcgtgcaccaccagaacgagggcagcatcacctgcgtgctgttcaaccagtacggcaccgtgaagaccaccagcatgctgaaggtgaaggccaagcagaagcacgacgtgaaggcccacaaggtgcccgtgttccacgactacctggacgaggaggaggagctggccctggtgttcgaccaggccaagggcgcccaccccagcatgagccaggagggccagaccaacctgcacctgctgaagaccaacccccccgtgccccccagcggcgacaccgagctgctgagcttccccgtggagatccaggtgaccgccgccacccccatccccgagcaggacaaggagagcaaggaggtgttccagaccgaggagctggagcccaaggccatgccccaggaccaggtgacccagagccccaagcacagattcgtgttcctgagcgacatcaccaacgagccccccaagatgctgcaggagatgcccaagcacgccagatgcagagagggcgacagcatcatcctggagtgcctgatcagcggcgagccccagcccgtggtgacctggttccagaacggcgtgctgctgaagcagaaccagaagttccagttcgaggaggtgaactgcagccaccagctgtacatcaaggacgtgaacagccaggacagcggcaagtacaagtgcgtggccgagaacaacagcggcgccgtggagagcgtgagcgacctgaccgtggagcccgtgacctacagagagaacagccagttcgagaacatcggcgagatctacggcaagtacagcagagaccagcagctgcaggaccagggcgagagcgtgagagcccacttctacgactaccccgccggccccttcaccccctggaccaacgtgaaggagtacagcgtgagagactacttccagagcctggagaccatcgagcagatcgaccagaaggagcaggtgagatgcatccccagcagagagaagatccccagattcgtgcacggcgccagcagaaccatcaagatcagcaagcccatcagagccgagttcatccagtgccaggccgagggcaaggagagacacgtgagcgagaagagcaagctgcaccaggccgagggcaccgtgtaccccttcgtggacgacttcagcgacgtgaccatcaagaaggagatcagaaacaacttcggcaagctgggcagaagcgagaaggagaacgtgcaggagtgcgcccagagcgactacctgcccaacatccacagcgagagaatcagcgacagctacaacaccaaggacagcagcgccatcgtgtacgaggagagcctgggcgaggagatccactaccccggcaagaaggtgaagcacagaatcatcgagttcgagaagctgcacgtggagaagggcgtgctggagaagagacccaccagaaccagcatcgtgaaccccccccagaagaagatcgacgacaaggccttcagcctgaagcagagagagagcagaagcagcaacctgaacgccaacatgtaccaggccgagaagatgagccccaacaccgagagcgacagcagcaacatcgccatcaacctgaagctgctgagcagccagacccacaaggagttcgacgcccaggagagagagcagcaggagaagatcagcctgatcgacaagcccgccatcagcaagagagccgagcacgagagccccatcaccttcgacctgaagcagttccacacccagatcaagcacaccgacgtgaagttccaggagctggacagcggccagcccgaggaggcctacttcaagatccagcaccccgccgacaccgagaacatcgtgttcgacctgaagcagatgtacagccacatcggcgaccccgccctggagttccagggccaggagaccagagagcagcaggagatccactacaaggagaagatccccagccccgagaccctgcagcccgacacccacaacatcagcaagagcgtgcagaacaacgtgttcgccagccaggagatcagcagcagccaggagctgagcaacagaaccatggtggagaagagcagcatcgacgagaacagcatcagcctggagaaggaggtgagacacgtgcaggagcagaacctggacatcctgaagaccgacctgagcctgaagagcttcagcgaggagatctacagcgagagctgcgccctgctgcccaccagcagcgccgacatcgaggagaccgacctgagcgagaagagctgccccctggagaacggcggcagaagcagcatcagccacctgaagaaggccgccagcgaggagaagcccctgggcgtgggcgagatggaggaggagtgcaccctggagcccgagctggccgccttccccaagcaggacggcggcacccaggagtacaccgacgccaccctggaggaccacagaggcgacgtgcaggaggccgacaccctgcacagacagctgagcctgagccagtgcttccccctgctgatgaccgaggagcagcagaaccccggcgagcagatcagcaccaacatccacgccagcggcgaggagaagtgctacgaggaggtgcaggtgcagaacgaggccagcttcagcaccctggagggcgagatgatcgagaccagcttcagccagaacatccccaagctggacgaggcccacaccaccgaggccgccgagagcgagaccagcctgacccagtacctgctggccgccggcaagagagaggtgcccgagaccaaggacaccagagaccaggccaagctggtgcagagcgagagcatcaccagcatggaggtggaggaggtgaccttcaacaccgtgtacgagtactacaaccagaagcaggagagcctgggcagacccctgagccccgagagcgacatcagcatcggcgtgggcagcaccaccagcgaggagatcagcgagctggaccagttctacaccccccccagcagcgtggagtacttcgagagccccaagagccccgacctgtacttcaaccccagcgacatcaccaagcagagcagcatccacagcggcggcgagaccgtggagagatacagcacccccctgggcgaggtggccgagagatacagcacccccagcgagggcgaggtgggcgagagatacagcaccccccccggcgagaccctggagagatacagcaccccccccggcgagaccctggagagatacagcaccccccccggcgagaccctggagagatacagcaccccccccggcgagaccctggagagatacagcaccccccccggcgagaccctggagagatacagcaccccccccggcgaggccctggagagatacagcatccccaccggcggccccaaccccaccggcaccttcaagacctaccccagcaagatcgagagagaggacggcacccccaacgagcacttctacacccccaccgaggagagaggcagcgcctacgagatctggagaagcgacagcttcggcacccccaacgaggccatcgagcccaaggacaacgagatgccccccagcttcatcgagcccctgaccaagagaaaggtgtacgagaacaccaccctgggcttcatcgtggaggtggagggcctgcccgtgcccggcgtgaagtggtacagaaacaagagcctgctggagcccgacgagagaatcaagatggagagagtgggcaacgtgtgcagcctggagatcagcaacatccagaagggcgagggcggcgagtacatgtgccacgccgtgaacatcatcggcgaggccaagagcttcgccaacgtggacatcatgccccaggaggagagagtggtggccctgcccccccccgtgacccaccagcacgtgatggagttcgacctggagcacaccaccagcagcagaacccccagcccccaggagatcgtgctggaggtggagctgagcgagaaggacgtgaaggagttcgagaagcaggtgaagatcgtgaccgtgcccgagttcacccccgaccacaagagcatgatcgtgagcctggacgtgctgcccttcaacttcgtggaccccaacatggacagcagagagggcgaggacaaggagctgaagatcgacctggaggtgttcgagatgccccccagattcatcatgcccatctgcgacttcaagatccccgagaacagcgacgccgtgttcaagtgcagcgtgatcggcatccccacccccgaggtgaagtggtacaaggagtacatgtgcatcgagcccgacaacatcaagtacgtgatcagcgaggagaagggcagccacaccctgaagatcagaaacgtgtgcctgagcgacagcgccacctacagatgcagagccgtgaactgcgtgggcgaggccatctgcagaggcttcctgaccatgggcgacagcgagatcttcgccgtgatcgccaagaagagcaaggtgaccctgagcagcctgatggaggagctggtgctgaagagcaactacaccgacagcttcttcgagttccaggtggtggagggcccccccagattcatcaagggcatcagcgactgctacgcccccatcggcaccgccgcctacttccagtgcctggtgagaggcagccccagacccaccgtgtactggtacaaggacggcaagctggtgcagggcagaagattcaccgtggaggagagcggcaccggcttccacaacctgttcatcaccagcctggtgaagagcgacgagggcgagtacagatgcgtggccaccaacaagagcggcatggccgagagcttcgccgccctgaccctgacctag

SEQ ID NO: 102570 - DNA, 1419 bp, synthetic construct
  misc_feature 1..1419: note = Description of Artificial Sequence: Synthetic coding sequence
  source 1..1419: mol_type = other DNA
atgtacatctacgaggccagcgaggaggccgtgctggaggagaaggtgctggtgacccagccccagaagaccaagcccaagctggccaaggtgcccgagccccccaagaaggtggtgcccgaggacaagatctacgtgaccatccccaagaagagagagacccccgccaccaaggagcccgacaccaccagaggcatcttccccgaggtggagccccccgaggccatccccgagatccccgagcacccccccaccgaggagttcgaggtgttcaaggaggtgatccccgagggcgagacccccatcgtgaagagaagaaagacccccagccccaccgcccccgaggccatgaaggaggtggtgcccgagatgaagatcttcgaggacgtgcccgaggagcccgagacccccagaatgaagacccccgaggccccccaggagatcatccccgccaagaccgtgcccagcaagaagagagagccccccagcgtgaaggtgcccgaggccctgcaggagatcgtgcccgagaagaagaccctggtggtgcccctgagaaagcccgaggtgctgcccgacgaggtgcccgaggccctgagagaggtggtgcccgagaagaaggtgcaccccccccagagagccgaggtggtgcccgtgaaggtgcacgaggcccccaaggagatcatccccgagaagaaggtgagcgtggtgccccccaagaagcccgaggtgccccccgtgaaggtgcccgaggccagcaaggaggtgatcagagaggagaaggtgcccctggccccccccaaggagcccgaggtgccccccgtgaaggtgcccgagccccccaaggaggtggtgcccgagaagaaggcccccgtggccccccccaaggagcccgaggtgccccccgtgaaggtgcccgaggcccccaaggaggtggtgcccgagaagaaggtgcccgtgcccccccccaagaagcccgaggtgccccccaccaaggtgcccgaggtgcccaaggccgccgtgcccgagaagaagctgcccgaggccatcccccccaagcccgagagccccccccccgaggtgcccgaggtgctgccccccaaggaggtggtgcccgagaagaaggtgcccgtgccccccgccaagaagcccgaggcccccccccccaaggtgcccgaggcccccaaggaggtggtgctggagaagaaggccagcgtggccgtgcccaagaagcccgaggcccccagagccaaggtgcccgaggccgcccaggaggtggtgcccgagaagaagatccccaaggcccccatcaagaagcccgaggcccccgccgtgaccgtgcccgaggtgccccaggagatcgtgcccgagaagaagaccctggtgctgcccaagaagcccgaggtgccccccgtgacctag

SEQ ID NO: 102571 - DNA, 1122 bp, synthetic construct
  misc_feature 1..1122: note = Description of Artificial Sequence: Synthetic coding sequence
  source 1..1122: mol_type = other DNA
gtggtgcccgagaagaaggtgcccctggtggtgcccaagaagcccgaggccccccccgccaaggtgcccgaggtgcccaaggaggtggtgcccgagaagaaggtggccgtgcccaagaagcccgaggtgccccccgccaaggtgcccgaggtgcccaagaagcccgtgctggaggagaagcccgccgtgcccgtgcccgagagagccgagagccccccccccgaggtgtacgaggagcccgaggagatcgcccccgaggaggagatcgcccccgaggaggagaagcccgtgcccgtggccgaggaggaggagcccgaggtgcccccccccgccgtgcccgaggagcccaagaagatcatccccgagaagaaggtgcccgtgatcaagaagcccgaggcccccccccccaaggagcccgagatgcccaagaaggtggtgcccgtgaagaaggtgcccaccgtgaagaagcccgagacccccgccgccaaggtgcccgaggtgcccaagaagctggtgcccgtgaagaaggagcccgtgcccgtgaccaagaagcccgaggtgctgcccgagaaggtgcccaaggtgcccgagaagatcatccccgagaaggaggtgagcgtgcccatccccgccgagcccgaggtgccccccgccgaggtggaggagacccccgaggagatcatctacgaggagaaggccagcatcaccatcggcagaaaggagaccccccccgtggaggagagagagatcgagaagtacatcaagcccgaggagcccgagcccgagccccagcccgaggagatccccgtgaaggagcccgagcccgagaaggtgatcgagaagcccaagctgaagcccagaccccccccccccccccccgccccccccaaggaggacgtgaaggagaagatcttccagctgaaggccatccccaagaagaaggtgcccgagaagccccaggtgcccgagaaggtggagctgacccccctgaaggtgcccgagccccccccccccaagcccgtggaggaggtggaggtgcccaccgtgaccaagagagagagaaagatccccgagcccaccaaggtgcccgagatcaagcccgccatccccctgcccgcctag

SEQ ID NO: 102572 - DNA, 543 bp, synthetic construct
  misc_feature 1..543: note = Description of Artificial Sequence: Synthetic coding sequence
  source 1..543: mol_type = other DNA
aaggtgcccgaggtgcccaagaagcccgtgctggaggagaagcccgccgtgcccgtgcccgagagagccgagagccccccccccgaggtgtacgaggagcccgaggagatcgcccccgaggaggagatcgcccccgaggaggagaagcccgtgcccgtggccgaggaggaggagcccgaggtgcccccccccgccgtgcccgaggagcccaagaagatcatccccgagaagaaggtgcccgtgatcaagaagcccgaggcccccccccccaaggagcccgagcccgagaaggtgatcgagaagcccaagctgaagcccagaccccccccccccccccccgccccccccaaggaggacgtgaaggagaagatcttccagctgaaggccatccccaagaagaaggtgcccgagaagccccaggtgcccgagaaggtggagctgacccccctgaaggtgcccggcggcgagaagaaggtgagaaagctgctgcccgagagaaagcccgagcccaaggaggaggtggtgctgaagagcggcatctag

SEQ ID NO: 102573 - DNA, 438 bp, synthetic construct
  misc_feature 1..438: note = Description of Artificial Sequence: Synthetic coding sequence
  source 1..438: mol_type = other DNA
gaggacacctaccagctggagatcgccgaggcctaccccgaggacgagggcacctacaccttcgtggccagcaacgccgtgggccaggtgagcagcaccgccaacctgagcctggaggcccccgagagcatcctgcacgagagaatcgagcaggagatcgagatggagatgaaggagctgttcagcgagggcgagagcgagcacagcgagagagacaccagagacgccttcagcgacagcgaggacatcgaccacaagagcatggccgccaagagatacgccagcagaatcagcagcaccagcagctggcccgagtacttcaagcccagcttcacccagaagctgaccttcaagtacgtgctggagggcgagcccgtggtgttcacctgcagactgatcgcctgccccacccccgagatgacctggttccacaactag

SEQ ID NO: 102574 - DNA, 546 bp, synthetic construct
  misc_feature 1..546: note = Description of Artificial Sequence: Synthetic coding sequence
  source 1..546: mol_type = other DNA
atgttcttcgccagccacaccgaggaggaggtgagcgtgaccgtgcccgaggtgcagaaggagatcgtgaccgaggagaagatccacgtggccatcagcaagagagtggagcccccccccaaggtgcccgagctgcccgagaagcccgcccccgaggaggtggcccccgtgcccatccccaagaaggtggagccccccgcccccaaggtgcccgaggtgcccaagaagcccgtgcccgaggagaagaagcccgtgcccgtgcccaagaaggagcccgccgccccccccaaggtgcccgaggtgcccaagaagcccgtgcccgaggagaagatccccgtgcccgtggccaagaagaaggaggccccccccgccaaggtgcccgagatccccaagaagaaggtgcccgaggagagaaagcccgtgcccagaaaggaggaggaggtgccccccccccccaaggtgcccgccctgcccaagaagcccgtgcccgaggagaaggtggccgtgcccgtgcccgtggccaagaaggcccccccccccagatag

SEQ ID NO: 102575 - DNA, 2490 bp, synthetic construct
  misc_feature 1..2490: note = Description of Artificial Sequence: Synthetic coding sequence
  source 1..2490: mol_type = other DNA
gtggaggagttcatcaagctggagcagcacagagtggaggaggagcacagagtggagaaggtgcacagagtgatcgaggtgttcgaggccgaggaggtggaggtgttcgagaagcccaaggccccccccaagggccccgagatcagcgagaagatcatcccccccaagaagccccccaccaaggtggtgcccagaaaggagccccccgccaaggtgcccgaggtgcccaagaagatcgtggtggaggagaaggtgagagtgcccgaggagcccagagtgccccccaccaaggcccccgaggtgcccaagaagatcgtgcccgaggagaaggtgagagaggccgtgctgaagaagcccgaggtgccccccgccaaggtgcccggcatgcccaagaagagcgtgcaggaggagaagagccccatcgtgatcagcgaggacaccgagatgtacatctacgaggccagcgaggaggccgtgctggaggagaaggtgctggtgacccagccccagaagaccaagcccaagctggccaaggtgcccgagccccccaagaaggtggtgcccgaggacaagatctacgtgaccatccccaagaagagagagacccccgccaccaaggagcccgacaccaccagaggcatcttccccgaggtggagccccccgaggccatccccgagatccccgagcacccccccaccgaggagttcgaggtgttcaaggaggtgatccccgagggcgagacccccatcgtgaagagaagaaagacccccagccccaccgcccccgaggccatgaaggaggtggtgcccgagatgaagatcttcgaggacgtgcccgaggagcccgagacccccagaatgaagacccccgaggccccccaggagatcatccccgccaagaccgtgcccagcaagaagagagagccccccagcgtgaaggtgcccgaggccctgcaggagatcgtgcccgagaagaagaccctggtggtgcccctgagaaagcccgaggtgctgcccgacgaggtgcccgaggccctgagagaggtggtgcccgagaagaaggtgcaccccccccagagagccgaggtggtgcccgtgaaggtgcacgaggcccccaaggagatcatccccgagaagaaggtgagcgtggtgccccccaagaagcccgaggtgccccccgtgaaggtgcccgaggccagcaaggaggtgatcagagaggagaaggtgcccctggccccccccaaggagcccgaggtgccccccgtgaaggtgcccgagccccccaaggaggtggtgcccgagaagaaggcccccgtggccccccccaaggagcccgaggtgccccccgtgaaggtgcccgaggcccccaaggaggtggtgcccgagaagaaggtgcccgtgcccccccccaagaagcccgaggtgccccccaccaaggtgcccgaggtgcccaaggccgccgtgcccgagaagaagctgcccgaggccatcccccccaagcccgagagccccccccccgaggtgcccgaggtgctgccccccaaggaggtggtgcccgagaagaaggtgcccgtgccccccgccaagaagcccgaggcccccccccccaaggtgcccgaggcccccaaggaggtggtgctggagaagaaggccagcgtggccgtgcccaagaagcccgaggcccccagagccaaggtgcccgaggccgcccaggaggtggtgcccgagaagaagatccccaaggcccccatcaagaagcccgaggcccccgccgtgaccgtgcccgaggtgccccaggagatcgtgcccgagaagaagaccctggtgctgcccaagaagcccgaggtgccccccgtgaccgtgcccgaggcccccaaggaggtggtgctggagaagaaggtgcccagcgccccccccaagaagcccgaggtgccccccgtgaaggtgcccgaggcccccaaggaggtggtgcccgagaagaaggtgcccgtgcccccccccaagaagcccgaggtgccccccaccaaggtgcccgaggtgcccaaggccgccgtgcccgagaagaaggtgcccgaggccatcccccccaagcccgagagccccccccccgaggtgcccgaggtgctgccccccaaggaggtggtgcccgagaagaaggtgcccgtgccccccgccaagaagcccgaggcccccccccccaaggtgcccgaggcccccaaggaggtggtgctggagaagaaggccagcgtggccgtgcccaagaagcccgaggcccccagagccaaggtgcccgaggccgcccaggaggtggtgcccgagaagaagatccccaaggcccccatcaagaagcccgaggcccccgccgtgaccgtgcccgaggtgccccaggaggccgccgagaaggagatccccgtggccccccccaagaagcccgaggcccccatcgtgcccgtgcccgaggcccaggaggtggtgcccgagaagaagtag

SEQ ID NO: 102576 - DNA, 504 bp, synthetic construct
  misc_feature 1..504: note = Description of Artificial Sequence: Synthetic coding sequence
  source 1..504: mol_type = other DNA
atggccaccagcgagctgagctgcgaggtgagcgaggagaactgcgagagaagagaggccttctgggccgagtggaaggacctgaccctgagcaccagacccgaggagggctgcagcctgcacgaggaggacacccagagacacgagacctaccaccagcagggccagtgccaggtgctggtgcagagaagcccctggctgatgatgagaatgggcatcctgggcagaggcctgcaggagtaccagctgccctaccagagagtgctgcccctgcccatcttcacccccgccaagatgggcgccaccaaggaggagagagaggacacccccatccagctgcaggagctgctggccctggagaccgccctgggcggccagtgcgtggacagacaggaggtggccgagatcaccaagcagctgccccccgtggtgcccgtgagcaagcccggcgccctgagaagaagcctgagcagaagcatgagccaggaggcccagagaggctag

SEQ ID NO: 102577 - DNA, 744 bp, synthetic construct
  misc_feature 1..744: note = Description of Artificial Sequence: Synthetic coding sequence
  source 1..744: mol_type = other DNA
atggccggcggcgtgctgcccctgagaggcctgagagccctgtgcagagtgctgctgttcctgagccagttctgcatcctgagcggcggcgagcagagccaggccctggcccagagcatcaaggaccccggccccaccagaaccttcaccgtggtgcccagagccgccgagagcaccgagatccccccctacgtgatgaagtgccccagcaacggcctgtgcagcagactgcccgccgactgcatcgactgcaccaccaacttcagctgcacctacggcaagcccgtgaccttcgactgcgccgtgaagcccagcgtgacctgcgtggaccaggacttcaagagccagaagaacttcatcatcaacatgacctgcagattctgctggcagctgcccgagaccgactacgagtgcaccaacagcaccagctgcatgaccgtgagctgccccagacagagataccccgccaactgcaccgtgagagaccacgtgcactgcctgggcaacagaaccttccccaagatgctgtactgcaactggaccggcggctacaagtggagcaccgccctggccctgagcatcaccctgggcggcttcggcgccgacagattctacctgggccagtggagagagggcctgggcaagctgttcagcttcggcggcctgggcatctggaccctgatcgacgtgctgctgatcggcgtgggctacgtgggccccgccgacggcagcctgtacatctag

SEQ ID NO: 102578 - DNA, 666 bp, synthetic construct
  misc_feature 1..666: note = Description of Artificial Sequence: Synthetic coding sequence
  source 1..666: mol_type = other DNA
atggccggcggcgtgctgcccctgagaggcctgagagccctgtgcagagtgctgctgttcctgagccagttctgcatcctgagcggcggcgagagcaccgagatccccccctacgtgatgaagtgccccagcaacggcctgtgcagcagactgcccgccgactgcatcgactgcaccaccaacttcagctgcacctacggcaagcccgtgaccttcgactgcgccgtgaagcccagcgtgacctgcgtggaccaggacttcaagagccagaagaacttcatcatcaacatgacctgcagattctgctggcagctgcccgagaccgactacgagtgcaccaacagcaccagctgcatgaccgtgagctgccccagacagagataccccgccaactgcaccgtgagagaccacgtgcactgcctgggcaacagaaccttccccaagatgctgtactgcaactggaccggcggctacaagtggagcaccgccctggccctgagcatcaccctgggcggcttcggcgccgacagattctacctgggccagtggagagagggcctgggcaagctgttcagcttcggcggcctgggcatctggaccctgatcgacgtgctgctgatcggcgtgggctacgtgggccccgccgacggcagcctgtacatctag

SEQ ID NO: 102579 - DNA, 1251 bp, synthetic construct
  misc_feature 1..1251: note = Description of Artificial Sequence: Synthetic coding sequence
  source 1..1251: mol_type = other DNA
atggccagcagcagcggcagcagccccagacccgcccccgacgagaacgagttccccttcggctgcccccccaccgtgtgccaggaccccaaggagcccagagccctgtgctgcgccggctgcctgagcgagaaccccagaaacggcgaggaccagatctgccccaagtgcagaggcgaggacctgcagagcatcagccccggcagcagactgagaacccaggagaaggcccaccccgaggtggccgaggccggcatcggctgccccttcgccggcgtgggctgcagcttcaagggcagcccccagagcgtgcaggagcacgaggtgaccagccagaccagccacctgaacctgctgctgggcttcatgaagcagtggaaggccagactgggctgcggcctggagagcggccccatggccctggagcagaacctgagcgacctgcagctgcaggccgccgtggaggtggccggcgacctggaggtggactgctacagagccccctgcagcgagagccaggaggagctggccctgcagcacttcatgaaggagaagctgctggccgagctggagggcaagctgagagtgttcgagaacatcgtggccgtgctgaacaaggaggtggaggccagccacctggccctggccaccagcatccaccagagccagctggacagagagagaatcctgagcctggagcagagagtggtggagctgcagcagaccctggcccagaaggaccaggccctgggcaagctggagcagagcctgagactgatggaggaggccagcttcgacggcaccttcctgtggaagatcaccaacgtgaccagaagatgccacgagagcgcctgcggcagaaccgtgagcctgttcagccccgccttctacaccgccaagtacggctacaagctgtgcctgagactgtacctgaacggcgacggcaccggcaagagaacccacctgagcctgttcatcgtgatcatgagaggcgagtacgacgccctgctgccctggcccttcagaaacaaggtgaccttcatgctgctggaccagaacaacagagagcacgccatcgacgccttcagacccgacctgagcagcgccagcttccagagaccccagagcgagaccaacgtggccagcggctgccccctgttcttccccctgagcaagctgcagagccccaagcacgcctacgtgaaggacgacaccatgttcctgaagtgcatcgtggagaccagcacctag

SEQ ID NO: 102580 - DNA, 1251 bp, synthetic construct; identical to SEQ ID NO: 102579
  misc_feature 1..1251: note = Description of Artificial Sequence: Synthetic coding sequence
  source 1..1251: mol_type = other DNA

SEQ ID NO: 102581 - DNA, 885 bp, synthetic construct
  misc_feature 1..885: note = Description of Artificial Sequence: Synthetic coding sequence
  source 1..885: mol_type = other DNA
atgaagcagtggaaggccagactgggctgcggcctggagagcggccccatggccctggagcagaacctgagcgacctgcagctgcaggccgccgtggaggtggccggcgacctggaggtggactgctacagagccccctgcagcgagagccaggaggagctggccctgcagcacttcatgaaggagaagctgctggccgagctggagggcaagctgagagtgttcgagaacatcgtggccgtgctgaacaaggaggtggaggccagccacctggccctggccaccagcatccaccagagccagctggacagagagagaatcctgagcctggagcagagagtggtggagctgcagcagaccctggcccagaaggaccaggccctgggcaagctggagcagagcctgagactgatggaggaggccagcttcgacggcaccttcctgtggaagatcaccaacgtgaccagaagatgccacgagagcgcctgcggcagaaccgtgagcctgttcagccccgccttctacaccgccaagtacggctacaagctgtgcctgagactgtacctgaacggcgacggcaccggcaagagaacccacctgagcctgttcatcgtgatcatgagaggcgagtacgacgccctgctgccctggcccttcagaaacaaggtgaccttcatgctgctggaccagaacaacagagagcacgccatcgacgccttcagacccgacctgagcagcgccagcttccagagaccccagagcgagaccaacgtggccagcggctgccccctgttcttccccctgagcaagctgcagagccccaagcacgcctacgtgaaggacgacaccatgttcctgaagtgcatcgtggagaccagcacctag

SEQ ID NO: 102582 - DNA, 2076 bp, synthetic construct
  misc_feature 1..2076: note = Description of Artificial Sequence: Synthetic coding sequence
  source 1..2076: mol_type = other DNA
atgaacgccgccgtggtgagaagaacccaggaggccctgggcaaggtgatcagaagaccccccctgaccgagaagctgctgagcaagccccccttcagatacctgcacgacatcatcaccgaggtgatcagaatgaccggcttcatgaagggcctgtacaccgacgccgagatgaagagcgacaacgtgaaggacaaggacgccaagatcagcttcctgcagaaggccatcgacgtggtggtgatggtgagcggcgagcccctgctggccaagcccgccagaatcgtggccggccacgagcccgagagaaccaacgagctgctgcagatcatcggcaagtgctgcctgaacaagctgagcagcgacgacgccgtgagaagagtgctggccggcgagaagggcgaggtgaagggcagagccagcctgaccagcagaagccaggagctggacaacaagaacgtgagagaggaggagagcagagtgcacaagaacaccgaggacagaggcgacgccgagatcaaggagagaagcaccagcagagacagaaagcagaaggaggagctgaaggaggacagaaagcccagagagaaggacaaggacaaggagaaggccaaggagaacggcggcaacagacacagagagggcgagagagagagagccaaggccagagccagacccgacaacgagagacagaaggacagaggcaacagagagagagacagagacagcgagagaaagaaggagaccgagagaaagagcgagggcggcaaggagaaggagagactgagagacagagacagagagagagacagagacaagggcaaggacagagacagaagaagagtgaagaacggcgagcacagctgggacctggacagagagaagaacagagagcacgacaagcccgagaagaagagcgccagcagcggcgagatgagcaagaagctgagcgacggcaccttcaaggacagcaaggccgagaccgagaccgagatcagcaccagagccagcaagagcctgaccaccaagaccagcaagagaagaagcaagaacagcgtggagggcagaaaggaggacaacatcagcgccaagagcctggacagcatcgtgagcggcatcaacaacgagcccaaccaggagaccaccaccagcgagatcggcaccaaggaggccaacatcaacagcaccagcatcagcgacgacaacagcgccagcctgagatgcgagaacatccagcccaaccccaccgagaagcagaagggcgacagcaccagcgacgccgagggcgacgccggccccgccggccaggacaagagcgaggtgcccgagacccccgagatccccaacgagctgagcagcaacatcagaagaatccccagacccggcagcgccagacccgccccccccagagtgaagagacaggacagcatggaggccctgcagatggacagaagcggcagcggcaagaccgtgagcaacgtgatcaccgagagccacaacagcgacaacgaggaggacgaccagttcgtggtggaggccgccccccagctgagcgagatgagcgagatcgagatggtgaccgccgtggagctggaggaggaggagaagcacggcggcctggtgaagaagatcctggagaccaagaaggactacgagaagctgcagcagagccccaagcccggcgagaaggagagaagcctgttcgagagcgcctggaagaaggagaaggacatcgtgagcaaggagatcgagaagctgagaaccagcatccagaccctgtgcaagagcgccctgcccctgggcaagatcatggactacatccaggaggacgtggacgccatgcagaacgagctgcagatgtggcacagcgagaacagacagcacgccgaggccctgcagcaggagcagagaatcaccgactgcgccgtggagcccctgaaggccgagctggccgagctggagcagctgatcaaggaccagcaggacaagatctgcgccgtgaaggccaacatcctgaagaacgaggagaagatccagaagatggtgtacagcatcaacctgaccagcagaagatag

SEQ ID NO: 102583 - DNA, 1878 bp, synthetic construct
  misc_feature 1..1878: note = Description of Artificial Sequence: Synthetic coding sequence
  source 1..1878: mol_type = other DNA
atgaacgccgccgtggtgagaagaacccaggaggccctgggcaaggtgatcagaagaccccccctgaccgagaagctgctgagcaagccccccttcagatacctgcacgacatcatcaccgaggtgatcagaatgaccggcttcatgaagggcctgtacaccgacgccgagatgaagagcgacaacgtgaaggacaaggacgccaagatcagcttcctgcagaaggccatcgacgtggtggtgatggtgagcggcgagcccctgctggccaagcccgccagaatcgtggccggccacgagcccgagagaaccaacgagctgctgcagatcatcggcaagtgctgcctgaacaagctgagcagcgacgacgccgtgagaagagtgctggccggcgagaagggcgaggtgaagggcagagccagcctgaccagcagaagccaggagctggacaacaagaacgtgagagaggaggagagcagagtgcacaagaacaccgaggacagaggcgacgccgagatcaaggagagaagcaccagcagagacagaaagcagaaggaggagctgaaggaggacagaaagcccagagagaaggacaaggacaaggagaaggccaaggagaacggcggcaacagacacagagagggcgagagagagagagccaaggccagagccagacccgacaacgagagacagaaggacagaggcaacagagagagagacagagacagcgagagaaagaaggagaccgagagaaagagcgagggcggcaaggagaaggagagactgagagacagagacagagagagagacagagacaagggcaaggacagagacagaagaagagtgaagaacggcgagcacagctgggacctggacagagagaagaacagagagcacgacaagcccgagaagaagagcgccagcagcggcgagatgagcaagaagctgagcgacggcaccttcaaggacagcaaggccgagaccgagaccgagatcagcaccagagccagcaagagcctgaccaccaagaccagcaagagaagaagcaagaacagcgtggagggcgacagcaccagcgacgccgagggcgacgccggccccgccggccaggacaagagcgaggtgcccgagacccccgagatccccaacgagctgagcagcaacatcagaagaatccccagacccggcagcgccagacccgccccccccagagtgaagagacaggacagcatggaggccctgcagatggacagaagcggcagcggcaagaccgtgagcaacgtgatcaccgagagccacaacagcgacaacgaggaggacgaccagttcgtggtggaggccgccccccagctgagcgagatgagcgagatcgagatggtgaccgccgtggagctggaggaggaggagaagcacggcggcctggtgaagaagatcctggagaccaagaaggactacgagaagctgcagcagagccccaagcccggcgagaaggagagaagcctgttcgagagcgcctggaagaaggagaaggacatcgtgagcaaggagatcgagaagctgagaaccagcatccagaccctgtgcaagagcgccctgcccctgggcaagatcatggactacatccaggaggacgtggacgccatgcagaacgagctgcagatgtggcacagcgagaacagacagcacgccgaggccctgcagcaggagcagagaatcaccgactgcgccgtggagcccctgaaggccgagctggccgagctggagcagctgatcaaggaccagcaggacaagatctgcgccgtgaaggccaacatcctgaagaacgaggagaagatccagaagatggtgtacagcatcaacctgaccagcagaagatag

SEQ ID NO: 102584 - DNA, 2076 bp, synthetic construct
  misc_feature 1..2076: note = Description of Artificial Sequence: Synthetic coding sequence
  source 1..2076: mol_type = other DNA
atgaacgccgccgtggtgagaagaacccaggaggccctgggcaaggtgatcagaagaccccccctgaccgagaagctgctgagcaagccccccttcagatacctgcacgacatcatcaccgaggtgatcagaatgaccggcttcatgaagggcctgtacaccgacgccgagatgaagagcgacaacgtgaaggacaaggacgccaagatcagcttcctgcagaaggccatcgacgtggtggtgatggtgagcggcgagcccctgctggccaagcccgccagaatcgtggccggccacgagcccgagagaaccaacgagctgctgcagatcatcggcaagtgctgcctgaacaagctgagcagcgacgacgccgtgagaagagtgctggccggcgagaagggcgaggtgaagggcagagccagcctgaccagcagaagccaggagctggacaacaagaacgtgagagaggaggagagcagagtgcacaagaacaccgaggacagaggcgacgccgagatcaaggagagaagcaccagcagagacagaaagcagaaggaggagctgaaggaggacagaaagcccagagagaaggacaaggacaaggagaaggccaaggagaacggcggcaacagacacagagagggcgagagagagagagccaaggccagagccagacccgacaacgagagacagaaggacagaggcaacagagagagagacagagacagcgagagaaagaaggagaccgagagaaagagcgagggcggcaaggagaaggagagactgagagacagagacagagagagagacagagacaagggcaaggacagagacagaagaagagtgaagaacggcgagcacagctgggacctggacagagagaagaacagagagcacgacaagcccgagaagaagagcgccagcagcggcgagatgagcaagaagctgagcgacggcaccttcaaggacagcaaggccgagaccgagaccgagatcagcaccagagccagcaagagcctgaccaccaagaccagcaagagaagaagcaagaacagcgtggagggcagaaaggaggacaacatcagcgccaagagcctggacagcatcgtgagcggcatcaacaacgagcccaaccaggagaccaccaccagcgagatcggcaccaaggaggccaacatcaacagcaccagcatcagcgacgacaacagcgccagcctgagatgcgagaacatccagcccaaccccaccgagaagcagaagggcaagaacggcagcgagagagagggcgacgccggccccgccggccaggacaagagcgaggtgcccgagacccccgagatccccaacgagctgagcagcaacatcagaagaatccccagacccggcagcgccagacccgccccccccagagtgaagagacaggacagcatggaggccctgcagatggacagaagcggcagcggcaagaccgtgagcaacgtgatcaccgagagccacaacagcgacaacgaggaggacgaccagttcgtggtggaggccgccccccagctgagcgagatgagcgagatcgagatggtgaccgccgtggagctggaggaggaggagaagcacggcggcctggtgaagaagatcctggagaccaagaaggactacgagaagctgcagcagagccccaagcccggcgagaaggagagaagcctgttcgagagcgcctggaagaaggagaaggacatcgtgagcaaggagatcgagaagctgagaaccagcatccagaccctgtgcaagagcgccctgcccctgggcaagatcatggactacatccaggaggacgtggacgccatgcagaacgagctgcagatgtggcacagcgagaacagacagcacgccgaggccctgcagcaggagcagagaatcaccgactgcgccgtggagcccctgaaggccgagctggccgagctggagcagctgatcaaggaccagcaggacaagatctgcgccgtgaaggccaacatcctgaagaacgaggagaagatccagaagatggtgtacagcatcaacctgaccagcagaagatag

SEQ ID NO: 102585 - DNA, 1878 bp, synthetic construct
  misc_feature 1..1878: note = Description of Artificial Sequence: Synthetic coding sequence
  source 1..1878: mol_type = other DNA
atgaacgccgccgtggtgagaagaacccaggaggccctgggcaaggtgatcagaagaccccccctgaccgagaagctgctgagcaagccccccttcagatacctgcacgacatcatcaccgaggtgatcagaatgaccggcttcatgaagggcctgtacaccgacgccgagatgaagagcgacaacgtgaaggacaaggacgccaagatcagcttcctgcagaaggccatcgacgtggtggtgatggtgagcggcgagcccctgctggccaagcccgccagaatcgtggccggccacgagcccgagagaaccaacgagctgctgcagatcatcggcaagtgctgcctgaacaagctgagcagcgacgacgccgtgagaagagtgctggccggcgagaagggcgaggtgaagggcagagccagcctgaccagcagaagccaggagctggacaacaagaacgtgagagaggaggagagcagagtgcacaagaacaccgaggacagaggcgacgccgagatcaaggagagaagcaccagcagagacagaaagcagaaggaggagctgaaggaggacagaaagcccagagagaaggacaaggacaaggagaaggccaaggagaacggcggcaacagacacagagagggcgagagagagagagccaaggccagagccagacccgacaacgagagacagaaggacagaggcaacagagagagagacagagacagcgagagaaagaaggagaccgagagaaagagcgagggcggcaaggagaaggagagactgagagacagagacagagagagagacagagacaagggcaaggacagagacagaagaagagtgaagaacggcgagcacagctgggacctggacagagagaagaacagagagcacgacaagcccgagaagaagagcgccagcagcggcgagatgagcaagaagctgagcgacggcaccttcaaggacagcaaggccgagaccgagaccgagatcagcaccagagccagcaagagcctgaccaccaagaccagcaagagaagaagcaagaacagcgtggagggcaccgccaagctgatcctggagggcgacgccggccccgccggccaggacaagagcgaggtgcccgagacccccgagatccccaacgagctgagcagcaacatcagaagaatccccagacccggcagcgccagacccgccccccccagagtgaagagacaggacagcatggaggccctgcagatggacagaagcggcagcggcaagaccgtgagcaacgtgatcaccgagagccacaacagcgacaacgaggaggacgaccagttcgtggtggaggccgccccccagctgagcgagatgagcgagatcgagatggtgaccgccgtggagctggaggaggaggagaagcacggcggcctggtgaagaagatcctggagaccaagaaggactacgagaagctgcagcagagccccaagcccggcgagaaggagagaagcctgttcgagagcgcctggaagaaggagaaggacatcgtgagcaaggagatcgagaagctgagaaccagcatccagaccctgtgcaagagcgccctgcccctgggcaagatcatggactacatccaggaggacgtggacgccatgcagaacgagctgcagatgtggcacagcgagaacagacagcacgccgaggccctgcagcaggagcagagaatcaccgactgcgccgtggagcccctgaaggccgagctggccgagctggagcagctgatcaaggaccagcaggacaagatctgcgccgtgaaggccaacatcctgaagaacgaggagaagatccagaagatggtgtacagcatcaacctgaccagcagaagatag

SEQ ID NO: 102586 - DNA, 1674 bp, synthetic construct
  misc_feature 1..1674: note = Description of Artificial Sequence: Synthetic coding sequence
  source 1..1674: mol_type = other DNA
atggcctacagcgaggagcacaagggcatgccctgcggcttcatcagacagaacagcggcaacagcatcagcctggacttcgagcccagcatcgagtaccagttcgtggagagactggaggagagatacaagtgcgccttctgccacagcgtgctgcacaacccccaccagaccggctgcggccacagattctgccagcactgcatcctgagcctgagagagctgaacaccgtgcccatctgccccgtggacaaggaggtgatcaagagccaggaggtgttcaaggacaactgctgcaagagagaggtgctgaacctgtacgtgtactgcagcaacgcccccggctgcaacgccaaggtgatcctgggcagataccaggaccacctgcagcagtgcctgttccagcccgtgcagtgcagcaacgagaagtgcagagagcccgtgctgagaaaggacctgaaggagcacctgagcgccagctgccagttcagaaaggagaagtgcctgtactgcaagaaggacgtggtggtgatcaacctgcagaaccacgaggagaacctgtgccccgagtaccccgtgttctgccccaacaactgcgccaagatcatcctgaagaccgaggtggacgagcacctggccgtgtgccccgaggccgagcaggactgccccttcaagcactacggctgcgccgtgaccgacaagagaagaaacctgcagcagcacgagcacagcgccctgagagagcacatgagactggtgctggagaagaacgtgcagctggaggagcagatcagcgacctgcacaagagcctggagcagaaggagagcaagatccagcagctggccgagaccatcaagaagctggagaaggagttcaagcagttcgcccagctgttcggcaagaacggcagcttcctgcccaacatccaggtgttcgccagccacatcgacaagagcgcctggctggaggcccaggtgcaccagctgctgcagatggtgaaccagcagcagaacaagttcgacctgagacccctgatggaggccgtggacaccgtgaagcagaagatcaccctgctggagaacaacgaccagagactggccgtgctggaggaggagaccaacaagcacgacacccacatcaacatccacaaggcccagctgagcaagaacgaggagagattcaagctgctggagggcacctgctacaacggcaagctgatctggaaggtgaccgactacaagatgaagaagagagaggccgtggacggccacaccgtgagcatcttcagccagagcttctacaccagcagatgcggctacagactgtgcgccagagcctacctgaacggcgacggcagcggcagaggcagccacctgagcctgtacttcgtggtgatgagaggcgagttcgacagcctgctgcagtggcccttcagacagagagtgaccctgatgctgctggaccagagcggcaagaagaacatcatggagaccttcaagcccgaccccaacagcagcagcttcaagagacccgacggcgagatgaacatcgccagcggctgccccagattcgtggcccacagcgtgctggagaacgccaagaacgcctacatcaaggacgacaccctgttcctgaaggtggccgtggacctgaccgacctggaggacctgtag

SEQ ID NO: 102587 - DNA, 1674 bp, synthetic construct; identical to SEQ ID NO: 102586
  misc_feature 1..1674: note = Description of Artificial Sequence: Synthetic coding sequence
  source 1..1674: mol_type = other DNA

SEQ ID NO: 102588 - DNA, 1674 bp, synthetic construct; identical to SEQ ID NO: 102586
  misc_feature 1..1674: note = Description of Artificial Sequence: Synthetic coding sequence
  source 1..1674: mol_type = other DNA

SEQ ID NO: 102589 - DNA, 1356 bp, synthetic construct
  misc_feature 1..1356: note = Description of Artificial Sequence: Synthetic coding sequence
  source 1..1356: mol_type = other DNA
atggcctacagcgaggagcacaagggcatgccctgcggcttcatcagacagaacagcggcaacagcatcagcctggacttcgagcccagcatcgagtaccagttcgtggagagactggaggagagatacaagtgcgccttctgccacagcgtgctgcacaacccccaccagaccggctgcggccacagattctgccagcactgcatcctgagcctgagagagctgaacaccgtgcccatctgccccgtggacaaggaggtgatcaagagccaggaggtgttcaaggacaactgctgcaagagagaggtgctgaacctgtacgtgtactgcagcaacgcccccggctgcaacgccaaggtgatcctgggcagataccaggacaagagaagaaacctgcagcagcacgagcacagcgccctgagagagcacatgagactggtgctggagaagaacgtgcagctggaggagcagatcagcgacctgcacaagagcctggagcagaaggagagcaagatccagcagctggccgagaccatcaagaagctggagaaggagttcaagcagttcgcccagctgttcggcaagaacggcagcttcctgcccaacatccaggtgttcgccagccacatcgacaagagcgcctggctggaggcccaggtgcaccagctgctgcagatggtgaaccagcagcagaacaagttcgacctgagacccctgatggaggccgtggacaccgtgaagcagaagatcaccctgctggagaacaacgaccagagactggccgtgctggaggaggagaccaacaagcacgacacccacatcaacatccacaaggcccagctgagcaagaacgaggagagattcaagctgctggagggcacctgctacaacggcaagctgatctggaaggtgaccgactacaagatgaagaagagagaggccgtggacggccacaccgtgagcatcttcagccagagcttctacaccagcagatgcggctacagactgtgcgccagagcctacctgaacggcgacggcagcggcagaggcagccacctgagcctgtacttcgtggtgatgagaggcgagttcgacagcctgctgcagtggcccttcagacagagagtgaccctgatgctgctggaccagagcggcaagaagaacatcatggagaccttcaagcccgaccccaacagcagcagcttcaagagacccgacggcgagatgaacatcgccagcggctgccccagattcgtggcccacagcgtgctggagaacgccaagaacgcctacatcaaggacgacaccctgttcctgaaggtggccgtggacctgaccgacctggaggacctgtag

SEQ ID NO: 102590 - DNA, 1569 bp, synthetic construct
  misc_feature 1..1569: note = Description of Artificial Sequence: Synthetic coding sequence
  source 1..1569: mol_type = other DNA
atgagcctgctgaactgcgagaacagctgcggcagcagccagagcgagagcgactgctgcgtggccatggccagcagctgcagcgccgtgaccaaggacgacagcgtgggcggcaccgccagcaccggcaacctgagcagcagcttcatggaggagatccagggctacgacgtggagttcgacccccccctggagagcaagtacgagtgccccatctgcctgatggccctgagagaggccgtgcagaccccctgcggccacagattctgcaaggcctgcatcatcaagagcatcagagacgccggccacaagtgccccgtggacaacgagatcctgctggagaaccagctgttccccgacaacttcgccaagagagagatcctgagcctgatggtgaagtgccccaacgagggctgcctgcacaagatggagctgagacacctggaggaccaccaggcccactgcgagttcgccctgatggactgcccccagtgccagagacccttccagaagttccacatcaacatccacatcctgaaggactgccccagaagacaggtgagctgcgacaactgcgccgccagcatggccttcgaggacaaggagatccacgaccagaactgccccctggccaacgtgatctgcgagtactgcaacaccatcctgatcagagagcagatgcccaaccactacgacctggactgccccaccgcccccatcccctgcaccttcagcaccttcggctgccacgagaagatgcagagaaaccacctggccagacacctgcaggagaacacccagagccacatgagaatgctggcccaggccgtgcacagcctgagcgtgatccccgacagcggctacatcagcgaggtgagaaacttccaggagaccatccaccagctggagggcagactggtgagacaggaccaccagatcagagagctgaccgccaagatggagacccagagcatgtacgtgagcgagctgaagagaaccatcagaaccctggaggacaaggtggccgagatcgaggcccagcagtgcaacggcatctacatctggaagatcggcaacttcggcatgcacctgaagtgccaggaggaggagaagcccgtggtgatccacagccccggcttctacaccggcaagcccggctacaagctgtgcatgagactgcacctgcagctgcccaccgcccagagatgcgccaactacatcagcctgttcgtgcacaccatgcagggcgagtacgacagccacctgccctggcccttccagggcaccatcagactgaccatcctggaccagagcgaggcccccgtgagacagaaccacgaggagatcatggacgccaagcccgagctgctggccttccagagacccaccatccccagaaaccccaagggcttcggctacgtgaccttcatgcacctggaggccctgagacagagaaccttcatcaaggacgacaccctgctggtgagatgcgaggtgagcaccagattcgacatgggcagcctgagaagagagggcttccagcccagaagcaccgacgccggcgtgtag

SEQ ID NO: 102591 - DNA, 1569 bp, synthetic construct; identical to SEQ ID NO: 102590
  misc_feature 1..1569: note = Description of Artificial Sequence: Synthetic coding sequence
  source 1..1569: mol_type = other DNA

SEQ ID NO: 102592 - DNA, 2013 bp, synthetic construct
  misc_feature 1..2013: note = Description of Artificial Sequence: Synthetic coding sequence
  source 1..2013: mol_type = other DNA
atgagcagcggcaagagcgccagatacaacagattcagcggcggccccagcaacctgcccacccccgacgtgaccaccggcaccagaatggagaccaccttcggccccgccttcagcgccgtgaccaccatcaccaaggccgacggcaccagcacctacaagcagcactgcagaacccccagcagcagcagcaccctggcctacagccccagagacgaggaggacagcatgccccccatcagcacccccagaagaagcgacagcgccatcagcgtgagaagcctgcacagcgagagcagcatgagcctgagaagcaccttcagcctgcccgaggaggaggaggagcccgagcccctggtgttcgccgagcagcccagcgtgaagctgtgctgccagctgtgctgcagcgtgttcaaggaccccgtgatcaccacctgcggccacaccttctgcagaagatgcgccctgaagagcgagaagtgccccgtggacaacgtgaagctgaccgtggtggtgaacaacatcgccgtggccgagcagatcggcgagctgttcatccactgcagacacggctgcagagtggccggcagcggcaagccccccatcttcgaggtggaccccagaggctgccccttcaccatcaagctgagcgccagaaaggaccacgagggcagctgcgactacagacccgtgagatgccccaacaaccccagctgcccccccctgctgagaatgaacctggaggcccacctgaaggagtgcgagcacatcaagtgcccccacagcaagtacggctgcaccttcatcggcaaccaggacacctacgagacccacctggagacctgcagattcgagggcctgaaggagttcctgcagcagaccgacgacagattccacgagatgcacgtggccctggcccagaaggaccaggagatcgccttcctgagaagcatgctgggcaagctgagcgagaagatcgaccagctggagaagagcctggagctgaagttcgacgtgctggacgagaaccagagcaagctgagcgaggacctgatggagttcagaagagacgccagcatgctgaacgacgagctgagccacatcaacgccagactgaacatgggcatcctgggcagctacgacccccagcagatcttcaagtgcaagggcaccttcgtgggccaccagggccccgtgtggtgcctgtgcgtgtacagcatgggcgacctgctgttcagcggcagcagcgacaagaccatcaaggtgtgggacacctgcaccacctacaagtgccagaagaccctggagggccacgacggcatcgtgctggccctgtgcatccagggctgcaagctgtacagcggcagcgccgactgcaccatcatcgtgtgggacatccagaacctgcagaaggtgaacaccatcagagcccacgacaaccccgtgtgcaccctggtgagcagccacaacgtgctgttcagcggcagcctgaaggccatcaaggtgtgggacatcgtgggcaccgagctgaagctgaagaaggagctgaccggcctgaaccactgggtgagagccctggtggccgcccagagctacctgtacagcggcagctaccagaccatcaagatctgggacatcagaaccctggactgcatccacgtgctgcagaccagcggcggcagcgtgtacagcatcgccgtgaccaaccaccacatcgtgtgcggcacctacgagaacctgatccacgtgtgggacatcgagagcaaggagcaggtgagaaccctgaccggccacgtgggcaccgtgtacgccctggccgtgatcagcacccccgaccagaccaaggtgttcagcgccagctacgacagaagcctgagagtgtggagcatggacaacatgatctgcacccagaccctgctgagacaccagggcagcgtgaccgccctggccgtgagcagaggcagactgttcagcggcgccgtggacagcaccgtgaaggtgtggacctgctag

SEQ ID NO: 102593 - DNA, 2115 bp, synthetic construct
  misc_feature 1..2115: note = Description of Artificial Sequence: Synthetic coding sequence
  source 1..2115: mol_type = other DNA
atggccagagagctgagagccctgctgctgtggggcagaagactgagacccctgctgagagcccccgccctggccgccgtgcccggcggcaagcccatcctgtgccccagaagaaccaccgcccagctgggccccagaagaaaccccgcctggagcctgcaggccggcagactgttcagcacccagaccgccgaggacaaggaggagcccctgcacagcatcatcagcagcaccgagagcgtgcagggcagcaccagcaagcacgagttccaggccgagaccaagaagctgctggacatcgtggccagaagcctgtacagcgagaaggaggtgttcatcagagagctgatcagcaacgccagcgacgccctggagaagctgagacacaagctggtgagcgacggccaggccctgcccgagatggagatccacctgcagaccaacgccgagaagggcaccatcaccatccaggacaccggcatcggcatgacccaggaggagctggtgagcaacctgggcaccatcgccagaagcggcagcaaggccttcctggacgccctgcagaaccaggccgaggccagcagcaagatcatcggccagttcggcgtgggcttctacagcgccttcatggtggccgacagagtggaggtgtacagcagaagcgccgcccccggcagcctgggctaccagtggctgagcgacggcagcggcgtgttcgagatcgccgaggccagcggcgtgagaaccggcaccaagatcatcatccacctgaagagcgactgcaaggagttcagcagcgaggccagagtgagagacgtggtgaccaagtacagcaacttcgtgagcttccccctgtacctgaacggcagaagaatgaacaccctgcaggccatctggatgatggaccccaaggacgtgagagagtggcagcacgaggagttctacagatacgtggcccaggcccacgacaagcccagatacaccctgcactacaagaccgacgcccccctgaacatcagaagcatcttctacgtgcccgacatgaagcccagcatgttcgacgtgagcagagagctgggcagcagcgtggccctgtacagcagaaaggtgctgatccagaccaaggccaccgacatcctgcccaagtggctgagattcatcagaggcgtggtggacagcgaggacatccccctgaacctgagcagagagctgctgcaggagagcgccctgatcagaaagctgagagacgtgctgcagcagagactgatcaagttcttcatcgaccagagcaagaaggacgccgagaagtacgccaagttcttcgaggactacggcctgttcatgagagagggcatcgtgaccgccaccgagcaggaggtgaaggaggacatcgccaagctgctgagatacgagagcagcgccctgcccagcggccagctgaccagcctgagcgagtacgccagcagaatgagagccggcaccagaaacatctactacctgtgcgcccccaacagacacctggccgagcacagcccctactacgaggccatgaagaagaaggacaccgaggtgctgttctgcttcgagcagttcgacgagctgaccctgctgcacctgagagagttcgacaagaagaagctgatcagcgtggagaccgacatcgtggtggaccactacaaggaggagaagttcgaggacagaagccccgccgccgagtgcctgagcgagaaggagaccgaggagctgatggcctggatgagaaacgtgctgggcagcagagtgaccaacgtgaaggtgaccctgagactggacacccaccccgccatggtgaccgtgctggagatgggcgccgccagacacttcctgagaatgcagcagctggccaagacccaggaggagagagcccagctgctgcagcccaccctggagatcaaccccagacacgccctgatcaagaagctgaaccagctgagagccagcgagcccggcctggcccagctgctggtggaccagatctacgagaacgccatgatcgccgccggcctggtggacgaccccagagccatggtgggcagactgaacgagctgctggtgaaggccctggagagacactag

SEQ ID NO: 102594 - DNA, 1956 bp, synthetic construct
  misc_feature 1..1956: note = Description of Artificial Sequence: Synthetic coding sequence
  source 1..1956: mol_type = other DNA
atggccagagagctgagagccctgctgctgtggggcagaagactgagacccctgctgagagcccccgccctggccgccgtgcccggcggcagcaccagcaagcacgagttccaggccgagaccaagaagctgctggacatcgtggccagaagcctgtacagcgagaaggaggtgttcatcagagagctgatcagcaacgccagcgacgccctggagaagctgagacacaagctggtgagcgacggccaggccctgcccgagatggagatccacctgcagaccaacgccgagaagggcaccatcaccatccaggacaccggcatcggcatgacccaggaggagctggtgagcaacctgggcaccatcgccagaagcggcagcaaggccttcctggacgccctgcagaaccaggccgaggccagcagcaagatcatcggccagttcggcgtgggcttctacagcgccttcatggtggccgacagagtggaggtgtacagcagaagcgccgcccccggcagcctgggctaccagtggctgagcgacggcagcggcgtgttcgagatcgccgaggccagcggcgtgagaaccggcaccaagatcatcatccacctgaagagcgactgcaaggagttcagcagcgaggccagagtgagagacgtggtgaccaagtacagcaacttcgtgagcttccccctgtacctgaacggcagaagaatgaacaccctgcaggccatctggatgatggaccccaaggacgtgagagagtggcagcacgaggagttctacagatacgtggcccaggcccacgacaagcccagatacaccctgcactacaagaccgacgcccccctgaacatcagaagcatcttctacgtgcccgacatgaagcccagcatgttcgacgtgagcagagagctgggcagcagcgtggccctgtacagcagaaaggtgctgatccagaccaaggccaccgacatcctgcccaagtggctgagattcatcagaggcgtggtggacagcgaggacatccccctgaacctgagcagagagctgctgcaggagagcgccctgatcagaaagctgagagacgtgctgcagcagagactgatcaagttcttcatcgaccagagcaagaaggacgccgagaagtacgccaagttcttcgaggactacggcctgttcatgagagagggcatcgtgaccgccaccgagcaggaggtgaaggaggacatcgccaagctgctgagatacgagagcagcgccctgcccagcggccagctgaccagcctgagcgagtacgccagcagaatgagagccggcaccagaaacatctactacctgtgcgcccccaacagacacctggccgagcacagcccctactacgaggccatgaagaagaaggacaccgaggtgctgttctgcttcgagcagttcgacgagctgaccctgctgcacctgagagagttcgacaagaagaagctgatcagcgtggagaccgacatcgtggtggaccactacaaggaggagaagttcgaggacagaagccccgccgccgagtgcctgagcgagaaggagaccgaggagctgatggcctggatgagaaacgtgctgggcagcagagtgaccaacgtgaaggtgaccctgagactggacacccaccccgccatggtgaccgtgctggagatgggcgccgccagacacttcctgagaatgcagcagctggccaagacccaggaggagagagcccagctgctgcagcccaccctggagatcaaccccagacacgccctgatcaagaagctgaaccagctgagagccagcgagcccggcctggcccagctgctggtggaccagatctacgagaacgccatgatcgccgccggcctggtggacgaccccagagccatggtgggcagactgaacgagctgctggtgaaggccctggagagacactag

SEQ ID NO: 102595 - DNA, 1911 bp, synthetic construct
  misc_feature 1..1911: note = Description of Artificial Sequence: Synthetic coding sequence
  source 1..1911: mol_type = other DNA
atggagggcagaggcccctacagaatctacgaccccggcggcagcgtgcccagcggcgaggccagcgccgccttcgagagactggtgaaggagaacagcagactgaaggagaagatgcagggcatcaagatgctgggcgagctgctggaggagagccagatggaggccaccagactgagacagaaggccgaggagctggtgaaggacaacgagctgctgcccccccccagccccagcctgggcagcttcgaccccctggccgagctgaccggcaaggacagcaacgtgaccgccagccccaccgcccccgcctgccccagcgacaagcccgcccccgtgcagaagccccccagcagcggcaccagcagcgagttcgaggtggtgacccccgaggagcagaacagccccgagagcagcagccacgccaacgccatggccctgggccccctgcccagagaggacggcaacctgatgctgcacctgcagagactggagaccaccctgagcgtgtgcgccgaggagcccgaccacggccagctgttcacccacctgggcagaatggccctggagttcaacagactggccagcaaggtgcacaagaacgagcagagaaccagcatcctgcagaccctgtgcgagcagctgagaaaggagaacgaggccctgaaggccaagctggacaagggcctggagcagagagaccaggccgccgagagactgagagaggagaacctggagctgaagaagctgctgatgagcaacggcaacaaggagggcgccagcggcagacccggcagccccaagatggagggcaccggcaagaaggccgtggccggccagcagcaggccagcgtgaccgccggcaaggtgcccgaggtggtggccctgggcgccgccgagaagaaggtgaagatgctggagcagcagagaagcgagctgctggaggtgaacaagcagtgggaccagcacttcagaagcatgaagcagcagtacgagcagaagatcaccgagctgagacagaagctggccgacctgcagaagcaggtgaccgacctggaggccgagagagagcagaagcagagagacttcgacagaaagctgctgctggccaagagcaagatcgagatggaggagaccgacaaggagcagctgaccgccgaggccaaggagctgagacagaaggtgaagtacctgcaggaccagctgagccccctgaccagacagagagagtaccaggagaaggagatccagagactgaacaaggccctggaggaggccctgagcatccagaccccccccagcagcccccccaccgccttcggcagccccgagggcgccggcgccctgctgagaaagcaggagctggtgacccagaacgagctgctgaagcagcaggtgaagatcttcgaggaggacttccagagagagagaagcgacagagagagaatgaacgaggagaaggaggagctgaagaagcaggtggagaagctgcaggcccaggtgaccctgagcaacgcccagctgaaggccttcaaggacgaggagaaggccagagaggccctgagacagcagaagagaaaggccaaggccagcggcgagagataccacgtggagccccaccccgagcacctgtgcggcgcctacccctacgcctacccccccatgcccgccatggtgccccaccacggcttcgaggactggagccagatcagatacccccccccccccatggccatggagcaccccccccccctgcccaacagcagactgttccacctgcccgagtacacctggagactgccctgcggcggcgtgagaaaccccaaccagagcagccaggtgatggacccccccaccgccagacccaccgagcccgagagccccaagaacgacagagagggcccccagtag

SEQ ID NO: 102596 - DNA, 1911 bp, synthetic construct; identical to SEQ ID NO: 102595
  misc_feature 1..1911: note = Description of Artificial Sequence: Synthetic coding sequence
  source 1..1911: mol_type = other DNA

SEQ ID NO: 102597 - DNA, 1590 bp, synthetic construct
  misc_feature 1..1590: note = Description of Artificial Sequence: Synthetic coding sequence
  source 1..1590: mol_type = other DNA
atgctgggcgagctgctggaggagagccagatggaggccaccagactgagacagaaggccgaggagctggtgaaggacaacgagctgctgcccccccccagccccagcctgggcagcttcgaccccctggccgagctgaccggcaaggacagcaacgtgaccgccagccccaccgcccccgcctgccccagcgacaagcccgcccccgtgcagaagccccccagcagcggcaccagcagcgagttcgaggtggtgacccccgaggagcagaacagccccgagagcagcagccacgccaacgccatggccctgggccccctgcccagagaggacggcaacctgatgctgcacctgcagagactggagaccaccctgagcgtgtgcgccgaggagcccgaccacggccagctgttcacccacctgggcagaatggccctggagttcaacagactggccagcaaggtgcacaagaacgagcagagaaccagcatcctgcagaccctgtgcgagcagctgagaaaggagaacgaggccctgaaggccaagctggacaagggcctggagcagagagaccaggccgccgagagactgagagaggagaacctggagctgaagaagctgctgatgagcaacggcaacaaggagggcgccagcggcagacccggcagccccaagatggagggcaccggcaagaaggccgtggccggccagcagcaggccagcgtgaccgccggcaaggtgcccgaggtggtggccctgggcgccgccgagaagaaggtgaagatgctggagcagcagagaagcgagctgctggaggtgaacaagcagtgggaccagcacttcagaagcatgaagcagcagtacgagcagaagatcaccgagctgagacagaagctggccgacctgcagaagcaggtgaccgacctggaggccgagagagagcagaagcagagagacttcgacagaaagctgctgctggccaagagcaagatcgagatggaggagaccgacaaggagcagctgaccgccgaggccaaggagctgagacagaaggtgaagtacctgcaggaccagctgagccccctgaccagacagagagagtaccaggagaaggagatccagagactgaacaaggccctggaggaggccctgagcatccagaccccccccagcagcccccccaccgccttcggcagccccgagggcgccggcgccctgctgagaaagcaggagctggtgacccagaacgagctgctgaagcagcaggtgaagatcttcgaggaggacttccagagagagagaagcgacagagagagaatgaacgaggagaaggaggagctgaagaagcaggtggagaagctgcaggcccaggtgaccctgagcaacgcccagctgaaggccttcaaggacgaggagaaggccagagaggccctgagacagcagaagagaaaggccaagcccgagtacacctggagactgccctgcggcggcgtgagaaaccccaaccagagcagccaggtgatggacccccccaccgccagacccaccgagcccgagagccccaagaacgacagagagggcccccagtag

SEQ ID NO: 102598 - DNA, 1908 bp, synthetic construct
  misc_feature 1..1908: note = Description of Artificial Sequence: Synthetic coding sequence
  source 1..1908: mol_type = other DNA
atggagggcagaggcccctacagaatctacgaccccggcggcagcgtgcccagcggcgaggccagcgccgccttcgagagactggtgaaggagaacagcagactgaaggagaagatgcagggcatcaagatgctgggcgagctgctggaggagagccagatggaggccaccagactgagacagaaggccgaggagctggtgaaggacaacgagctgctgcccccccccagccccagcctgggcagcttcgaccccctggccgagctgaccggcaaggacagcaacgtgaccgccagccccaccgcccccgcctgccccagcgacaagcccgcccccgtgcagaagccccccagcagcggcaccagcagcgagttcgaggtggtgacccccgaggagcagaacagccccgagagcagcagccacgccaacgccatggccctgggccccctgcccagagaggacggcaacctgatgctgcacctgcagagactggagaccaccctgagcgtgtgcgccgaggagcccgaccacggccagctgttcacccacctgggcagaatggccctggagttcaacagactggccagcaaggtgcacaagaacgagcagagaaccagcatcctgcagaccctgtgcgagcagctgagaaaggagaacgaggccctgaaggccaagctggacaagggcctggagcagagagaccaggccgccgagagactgagagaggagaacctggagctgaagaagctgctgatgagcaacggcaacaaggagggcgccagcggcagacccggcagccccaagatggagggcaccggcaagaaggccgtggccggccagcagcaggccagcgtgaccgccggcaaggtgcccgaggtggtggccctgggcgccgccgagaagaaggtgaagatgctggagcagcagagaagcgagctgctggaggtgaacaagcagtgggaccagcacttcagaagcatgaagcagcagtacgagcagaagatcaccgagctgagacagaagctggccgacctgcagaagcaggtgaccgacctggaggccgagagagagcagaagcagagagacttcgacagaaagctgctgctggccaagagcaagatcgagatggaggagaccgacaaggagcagctgaccgccgaggccaaggagctgagacagaaggtgaagtacctgcaggaccagctgagccccctgaccagacagagagagtaccaggagaaggagatccagagactgaacaaggccctggaggaggccctgagcatccagaccccccccagcagcccccccaccgccttcggcagccccgagggcgccggcgccctgctgagaaagcaggagctggtgacccagaacgagctgctgaagcagcaggtgaagatcttcgaggaggacttccagagagagagaagcgacagagagagaatgaacgaggagaaggaggagctgaagaagcaggtggagaagctgcaggcccaggtgaccctgagcaacgcccagctgaaggccttcaaggacgaggagaaggccagagaggccctgagacagcagaagagaaaggccaaggccagcggcgagagataccacgtggagccccaccccgagcacctgtgcggcgcctacccctacgcctacccccccatgcccgccatggtgccccaccacggcttcgaggactggagccagatcagatacccccccccccccatggccatggagcaccccccccccctgcccaacagcagactgttccacctgcccgagtacacctggagactgccctgcggcggcgtgagaaaccccaaccagagcagccaggtgatggacccccccaccgccagacccaccgagcccgagcccgccgacctgagactgcccagaaactag

SEQ ID NO: 102599 - DNA, 1479 bp, synthetic construct
  misc_feature 1..1479: note = Description of Artificial Sequence: Synthetic coding sequence
  source 1..1479: mol_type = other DNA
atggaggccaccagactgagacagaaggccgaggagctggtgaaggacaacgagctgctgcccccccccagccccagcctgggcagcttcgaccccctggccgagctgaccggcaaggacagcaacgtgaccgccagccccaccgcccccgcctgccccagcgacaagcccgcccccgtgcagaagccccccagcagcggcaccagcagcgagttcgaggtggtgacccccgaggagcagaacagccccgagagcagcagccacgccaacgccatggccctgggccccctgcccagagaggacggcaacctgatgctgcacctgcagagactggagaccaccctgagcgtgtgcgccgaggagcccgaccacggccagctgttcacccacctgggcagaatggccctggagttcaacagactggccagcaaggtgcacaagaacgagcagagaaccagcatcctgcagaccctgtgcgagcagctgagaaaggagaacgaggccctgaaggccaagctggacaagggcctggagcagagagaccaggccgccgagagactgagagaggagaacctggagctgaagaagctgctgatgagcaacggcaacaaggagggcgccagcggcagacccggcagccccaagatggagggcaccggcaagaaggccgtggccggccagcagcaggccagcgtgaccgccggcaaggtgcccgaggtggtggccctgggcgccgccgagaagaaggtgaagatgctggagcagcagagaagcgagctgctggaggtgaacaagcagtgggaccagcacttcagaagcatgaagcagcagtacgagcagaagatcaccgagctgagacagaagctggccgacctgcagaagcaggtgaccgacctggaggccgagagagagcagaagcagagagacttcgacagaaagctgctgctggccaagagcaagatcgagatggaggagaccgacaaggagcagctgaccgccgaggccaaggagctgagacagaaggtgaagtacctgcaggaccagctgagccccctgaccagacagagagagtaccaggagaaggagatccagagactgaacaaggccctggaggaggccctgagcatccagaccccccccagcagcccccccaccgccttcggcagccccgagggcgccggcgccctgctgagaaagcaggagctggtgacccagaacgagctgctgaagcagcaggtgaagatcttcgaggaggacttccagagagagagaagcgacagagagagaatgaacgaggagaaggaggagctgaagaagcaggtggagaagctgcaggcccaggtgaccctgagcaacgcccagctgaaggccttcaaggacgaggagaaggccagagaggccctgagacagcagaagagaaaggccaagggcacccacagaggctgccccagacacctgcccgagagaaaggtgaagtag

SEQ ID NO: 102600 - DNA, 435 bp, synthetic construct
  misc_feature 1..435: note = Description of Artificial Sequence: Synthetic coding sequence
  source 1..435: mol_type = other DNA
atggagggcagaggcccctacagaatctacgaccccggcggcagcgtgcccagcggcgaggccagcgccgccttcgagagactggtgaaggagaacagcagactgaaggagaagatgcagggcatcaagatgctgggcgagctgctggaggagagccagatggaggccaccagactgagacagaaggccgaggagctggtgaaggacaacgagctgctgcccccccccagccccagcctgggcagcttcgaccccctggccgagctgaccggcaaggacagcaacgtgaccgccagccccaccgcccccgcctgccccagcgacaagcccgcccccgtgcagaagccccccagcagcggcaccagcagcgagttcgaggtggtgacccccgaggagcagaacagccccgagagcagcagccacgccaacgcctag

SEQ ID NO: 102601 - DNA, 1752 bp, synthetic construct
  misc_feature 1..1752: note = Description of Artificial Sequence: Synthetic coding sequence
  source 1..1752: mol_type = other DNA
atggaggccaccagactgagacagaaggccgaggagctggtgaaggacaacgagctgctgcccccccccagccccagcctgggcagcttcgaccccctggccgagctgaccggcaaggacagcaacgtgaccgccagccccaccgcccccgcctgccccagcgacaagcccgcccccgtgcagaagccccccagcagcggcaccagcagcgagttcgaggtggtgacccccgaggagcagaacagccccgagagcagcagccacgccaacgccatggccctgggccccctgcccagagaggacggcaacctgatgctgcacctgcagagactggagaccaccctgagcgtgtgcgccgaggagcccgaccacggccagctgttcacccacctgggcagaatggccctggagttcaacagactggccagcaaggtgcacaagaacgagcagagaaccagcatcctgcagaccctgtgcgagcagctgagaaaggagaacgaggccctgaaggccaagctggacaagggcctggagcagagagaccaggccgccgagagactgagagaggagaacctggagctgaagaagctgctgatgagcaacggcaacaaggagggcgccagcggcagacccggcagccccaagatggagggcaccggcaagaaggccgtggccggccagcagcaggccagcgtgaccgccggcaaggtgcccgaggtggtggccctgggcgccgccgagaagaaggtgaagatgctggagcagcagagaagcgagctgctggaggtgaacaagcagtgggaccagcacttcagaagcatgaagcagcagtacgagcagaagatcaccgagctgagacagaagctggccgacctgcagaagcaggtgaccgacctggaggccgagagagagcagaagcagagagacttcgacagaaagctgctgctggccaagagcaagatcgagatggaggagaccgacaaggagcagctgaccgccgaggccaaggagctgagacagaaggtgaagtacctgcaggaccagctgagccccctgaccagacagagagagtaccaggagaaggagatccagagactgaacaaggccctggaggaggccctgagcatccagaccccccccagcagcccccccaccgccttcggcagccccgagggcgccggcgccctgctgagaaagcaggagctggtgacccagaacgagctgctgaagcagcaggtgaagatcttcgaggaggacttccagagagagagaagcgacagagagagaatgaacgaggagaaggaggagctgaagaagcaggtggagaagctgcaggcccaggtgaccctgagcaacgcccagctgaaggccttcaaggacgaggagaaggccagagaggccctgagacagcagaagagaaaggccaaggccagcggcgagagataccacgtggagccccaccccgagcacctgtgcggcgcctacccctacgcctacccccccatgcccgccatggtgccccaccacggcttcgaggactggagccagatcagatacccccccccccccatggccatggagcaccccccccccctgcccaacagcagactgttccacctgcccgagtacacctggagactgccctgcggcggcgtgagaaaccccaaccagagcagccaggtgatggacccccccaccgccagacccaccgagcccgagagccccaagaacgacagagagggcccccagtag

SEQ ID NO: 102602 - DNA, 402 bp, synthetic construct
  misc_feature 1..402: note = Description of Artificial Sequence: Synthetic coding sequence
  source 1..402: mol_type = other DNA
atggagggcagaggcccctacagaatctacgaccccggcggcagcgtgcccagcggcgaggccagcgccgccttcgagagactggtgaaggagaacagcagactgaaggagaagatgcagggcatcaagatgctgggcgagctgctggaggagagccagatggaggccaccagactgagacagaaggccgaggagctggtgaaggacaacgagctgctgcccccccccagccccagcctgggcagcttcgaccccctggccgagctgaccggcaaggacagcaacgtgaccgccagccccaccgcccccgcctgccccagcgacaagcccgcccccgtgcagaagccccccagcagcggcaccagcagcgagttcgaggtggtgacccccgaggagcagtag

SEQ ID NO: 102603 - DNA, 1911 bp, synthetic construct; identical to SEQ ID NO: 102595
  misc_feature 1..1911: note = Description of Artificial Sequence: Synthetic coding sequence
  source 1..1911: mol_type = other DNA

SEQ ID NO: 102604 - DNA, 774 bp, synthetic construct
  misc_feature 1..774: note = Description of Artificial Sequence: Synthetic coding sequence
  source 1..774: mol_type = other DNA
atggaggccaccagactgagacagaaggccgaggagctggtgaaggacaacgagctgctgcccccccccagccccagcctgggcagcttcgaccccctggccgagctgaccggcaaggacagcaacgtgaccgccagccccaccgcccccgcctgccccagcgacaagcccgcccccgtgcagaagccccccagcagcggcaccagcagcgagttcgaggtggtgacccccgaggagcagaacagccccgagagcagcagccacgccaacgccatggccctgggccccctgcccagagaggacggcaacctgatgctgcacctgcagagactggagaccaccctgagcgtgtgcgccgaggagcccgaccacggccagctgttcacccacctgggcagaatggccctggagttcaacagactggccagcaaggtgcacaagaacgagcagagaaccagcatcctgcagaccctgtgcgagcagctgagaaaggagaacgaggccctgaaggccaagctggacaagggcctggagcagagagaccaggccgccgagagactgagagaggagaacctggagctgaagaagctgctgatgagcaacggcaacaaggagggcgccagcggcagacccggcagccccaagatggagggcaccggcaagaaggccgtggccggccagcagcaggccagcgtgaccgccggcaaggtgcccgaggtggtggccctgggcgccgccgagaagaaggtgaagatgctggagcagcagagatag

SEQ ID NO: 102605 - DNA, 1911 bp, synthetic construct; identical to SEQ ID NO: 102595
  misc_feature 1..1911: note = Description of Artificial Sequence: Synthetic coding sequence
  source 1..1911: mol_type = other DNA

SEQ ID NO: 102606 - DNA, 1719 bp, synthetic construct
  misc_feature 1..1719: note = Description of Artificial Sequence: Synthetic coding sequence
  source 1..1719: mol_type = other DNA
atggagggcagaggcccctacagaatctacgaccccggcggcagcgtgcccagcggcgaggccagcgccgccttcgagagactggtgaaggagaacagcagactgaaggagaagatgcagggcatcaagatgctgggcgagctgctggaggagagccagatggaggccaccagactgagacagaaggccgaggagctggtgaaggacaacgagctgctgcccccccccagccccagcctgggcagcttcgaccccctggccgagctgaccggcaaggacagcaacgtgaccgccagccccaccgcccccgcctgccccagcgacaagcccgcccccgtgcagaagccccccagcagcggcaccagcagcgagttcgaggtggtgacccccgaggagcagaacagccccgagagcagcagccacgccaacgccatggccctgggccccctgcccagagaggacggcaacctgatgctgcacctgcagagactggagaccaccctgagcgtgtgcgccgaggagcccgaccacggccagctgttcacccacctgggcagaatggccctggagttcaacagactggccagcaaggtgcacaagaacgagcagagaaccagcatcctgcagaccctgtgcgagcagctgagaaaggagaacgaggccctgaaggccaagctggacaagggcctggagcagagagaccaggccgccgagagactgagagaggagaacctggagctgaagaagctgctgatgagcaacggcaacaaggagggcgccagcggcagacccggcagccccaagatggagggcaccggcaagaaggccgtggccggccagcagcaggccagcgtgaccgccggcaaggtgcccgaggtggtggccctgggcgccgccgagaagaaggtgaagatgctggagcagcagagaagcgagctgctggaggtgaacaagcagtgggaccagcacttcagaagcatgaagcagcagtacgagcagaagatcaccgagctgagacagaagctggccgacctgcagaagcaggtgaccgacctggaggccgagagagagcagaagcagagagacttcgacagaaagctgctgctggccaagagcaagatcgagatggaggagaccgacaaggagcagctgaccgccgaggccaaggagctgagacagaaggtgaagtacctgcaggaccagctgagccccctgaccagacagagagagtaccaggagaaggagatccagagactgaacaaggccctggaggaggccctgagcatccagaccccccccagcagcccccccaccgccttcggcagccccgagggcgccggcgccctgctgagaaagcaggagctggtgacccagaacgagctgctgaagcagcaggtgaagatcttcgaggaggacttccagagagagagaagcgacagagagagaatgaacgaggagaaggaggagctgaagaagcaggtggagaagctgcaggcccaggtgaccctgagcaacgcccagctgaaggccttcaaggacgaggagaaggccagagaggccctgagacagcagaagagaaaggccaagcccgagtacacctggagactgccctgcggcggcgtgagaaaccccaaccagagcagccaggtgatggacccccccaccgccagacccaccgagcccgagagccccaagaacgacagagagggcccccagtag

SEQ ID NO: 102607 - DNA, 1908 bp, synthetic construct; identical to SEQ ID NO: 102598
  misc_feature 1..1908: note = Description of Artificial Sequence: Synthetic coding sequence
  source 1..1908: mol_type = other DNA

SEQ ID NO: 102608 - DNA, 1671 bp, synthetic construct
  misc_feature 1..1671: note = Description of Artificial Sequence: Synthetic coding sequence
  source 1..1671: mol_type = other DNA
atggagggcagaggcccctacagaatctacgaccccggcggcagcgtgcccagcggcgaggccagcgccgccttcgagagactggtgaaggagaacagcagactgaaggagaagatgcagggcatcaagatgctgggcgagctgctggaggagagccagatggaggccaccagactgagacagaaggccgaggagctggtgaaggacaacgagctgctgcccccccccagccccagcctgggcagcttcgaccccctggccgagctgaccggcaaggacagcaacgtgaccgccagccccaccgcccccgcctgccccagcgacaagcccgcccccgtgcagaagccccccagcagcggcaccagcagcgagttcgaggtggtgacccccgaggagcagaacagccccgagagcagcagccacgccaacgccatggccctgggccccctgcccagagaggacggcaacctgatgctgcacctgcagagactggagaccaccctgagcgtgtgcgccgaggagcccgaccacggccagctgttcacccacctgggcagaatggccctggagttcaacagactggccagcaaggtgcacaagaacgagcagagaaccagcatcctgcagaccctgtgcgagcagctgagaaaggagaacgaggccctgaaggccaagctggacaagggcctggagcagagagaccaggccgccgagagactgagagaggagaacctggagctgaagaagctgctgatgagcaacggcaacaaggagggcgccagcggcagacccggcagccccaagatggagggcaccggcaagaaggccgtggccggccagcagcaggccagcgtgaccgccggcaaggtgcccgaggtggtggccctgggcgccgccgagaagaaggtgaagatgctggagcagcagagaagcgagctgctggaggtgaacaagcagtgggaccagcacttcagaagcatgaagcagcagtacgagcagaagatcaccgagctgagacagaagctggccgacctgcagaagcaggtgaccgacctggaggccgagagagagcagaagcagagagacttcgacagaaagctgctgctggccaagagcaagatcgagatggaggagaccgacaaggagcagctgaccgccgaggccaaggagctgagacagaaggtgaagtacctgcaggaccagctgagccccctgaccagacagagagagtaccaggagaaggagatccagagactgaacaaggccctggaggaggccctgagcatccagaccccccccagcagcccccccaccgccttcggcagccccgagggcgccggcgccctgctgagaaagcaggagctggtgacccagaacgagctgctgaagcagcaggtgaagatcttcgaggaggacttccagagagagagaagcgacagagagagaatgaacgaggagaaggaggagctgaagaagcaggtggagaagctgcaggcccaggtgaccctgagcaacgcccagctgaaggccttcaaggacgaggagaaggccagagaggccctgagacagcagaagagaaaggccaagagcctgcagaagatgaccgtgagaggcctgagcgagaccagactgtgccacctggccccccccagcagctgcagagccagctag

SEQ ID NO: 102609 - DNA, 1797 bp, synthetic construct
  misc_feature 1..1797: note = Description of Artificial Sequence: Synthetic coding sequence
  source 1..1797: mol_type = other DNA
atgcagggcatcaagatgctgggcgagctgctggaggagagccagatggaggccaccagactgagacagaaggccgaggagctggtgaaggacaacgagctgctgcccccccccagccccagcctgggcagcttcgaccccctggccgagctgaccggcaaggacagcaacgtgaccgccagccccaccgcccccgcctgccccagcgacaagcccgcccccgtgcagaagccccccagcagcggcaccagcagcgagttcgaggtggtgacccccgaggagcagaacagccccgagagcagcagccacgccaacgccatggccctgggccccctgcccagagaggacggcaacctgatgctgcacctgcagagactggagaccaccctgagcgtgtgcgccgaggagcccgaccacggccagctgttcacccacctgggcagaatggccctggagttcaacagactggccagcaaggtgcacaagaacgagcagagaaccagcatcctgcagaccctgtgcgagcagctgagaaaggagaacgaggccctgaaggccaagctggacaagggcctggagcagagagaccaggccgccgagagactgagagaggagaacctggagctgaagaagctgctgatgagcaacggcaacaaggagggcgccagcggcagacccggcagccccaagatggagggcaccggcaagaaggccgtggccggccagcagcaggccagcgtgaccgccggcaaggtgcccgaggtggtggccctgggcgccgccgagaagaaggtgaagatgctggagcagcagagaagcgagctgctggaggtgaacaagcagtgggaccagcacttcagaagcatgaagcagcagtacgagcagaagatcaccgagctgagacagaagctggccgacctgcagaagcaggtgaccgacctggaggccgagagagagcagaagcagagagacttcgacagaaagctgctgctggccaagagcaagatcgagatggaggagaccgacaaggagcagctgaccgccgaggccaaggagctgagacagaaggtgaagtacctgcaggaccagctgagccccctgaccagacagagagagtaccaggagaaggagatccagagactgaacaaggccctggaggaggccctgagcatccagaccccccccagcagcccccccaccgccttcggcagccccgagggcgccggcgccctgctgagaaagcaggagctggtgacccagaacgagctgctgaagcagcaggtgaagatcttcgaggaggacttccagagagagagaagcgacagagagagaatgaacgaggagaaggaggagctgaagaagcaggtggagaagctgcaggcccaggtgaccctgagcaacgcccagctgaaggccttcaaggacgaggagaaggccagagaggccctgagacagcagaagagaaaggccaaggccagcggcgagagataccacgtggagccccaccccgagcacctgtgcggcgcctacccctacgcctacccccccatgcccgccatggtgccccaccacggcttcgaggactggagccagatcagatacccccccccccccatggccatggagcaccccccccccctgcccaacagcagactgttccacctgcccgagtacacctggagactgccctgcggcggcgtgagaaaccccaaccagagcagccaggtgatggacccccccaccgccagacccaccgagcccgagagccccaagaacgacagagagggcccccagtag

SEQ ID NO: 102610 - DNA, 1542 bp, synthetic construct
  misc_feature 1..1542: note = Description of Artificial Sequence: Synthetic coding sequence
  source 1..1542: mol_type = other DNA
atgctgggcgagctgctggaggagagccagatggaggccaccagactgagacagaaggccgaggagctggtgaaggacaacgagctgctgcccccccccagccccagcctgggcagcttcgaccccctggccgagctgaccggcaaggacagcaacgtgaccgccagccccaccgcccccgcctgccccagcgacaagcccgcccccgtgcagaagccccccagcagcggcaccagcagcgagttcgaggtggtgacccccgaggagcagaacagccccgagagcagcagccacgccaacgccatggccctgggccccctgcccagagaggacggcaacctgatgctgcacctgcagagactggagaccaccctgagcgtgtgcgccgaggagcccgaccacggccagctgttcacccacctgggcagaatggccctggagttcaacagactggccagcaaggtgcacaagaacgagcagagaaccagcatcctgcagaccctgtgcgagcagctgagaaaggagaacgaggccctgaaggccaagctggacaagggcctggagcagagagaccaggccgccgagagactgagagaggagaacctggagctgaagaagctgctgatgagcaacggcaacaaggagggcgccagcggcagacccggcagccccaagatggagggcaccggcaagaaggccgtggccggccagcagcaggccagcgtgaccgccggcaaggtgcccgaggtggtggccctgggcgccgccgagaagaaggtgaagatgctggagcagcagagaagcgagctgctggaggtgaacaagcagtgggaccagcacttcagaagcatgaagcagcagtacgagcagaagatcaccgagctgagacagaagctggccgacctgcagaagcaggtgaccgacctggaggccgagagagagcagaagcagagagacttcgacagaaagctgctgctggccaagagcaagatcgagatggaggagaccgacaaggagcagctgaccgccgaggccaaggagctgagacagaaggtgaagtacctgcaggaccagctgagccccctgaccagacagagagagtaccaggagaaggagatccagagactgaacaaggccctggaggaggccctgagcatccagaccccccccagcagcccccccaccgccttcggcagccccgagggcgccggcgccctgctgagaaagcaggagctggtgacccagaacgagctgctgaagcagcaggtgaagatcttcgaggaggacttccagagagagagaagcgacagagagagaatgaacgaggagaaggaggagctgaagaagcaggtggagaagctgcaggcccaggtgaccctgagcaacgcccagctgaaggccttcaaggacgaggagaaggccagagaggccctgagacagcagaagagaaaggccaagagcctgcagaagatgaccgtgagaggcctgagcgagaccagactgtgccacctggccccccccagcagctgcagagccagctag

SEQ ID NO: 102611 - DNA, 1509 bp, synthetic construct
  misc_feature 1..1509: note = Description of Artificial Sequence: Synthetic coding sequence
  source 1..1509: mol_type = other DNA
atgctgggcgagctgctggaggagagccagatggaggccaccagactgagacagaaggccgaggagctggtgaaggacaacgagctgctgcccccccccagccccagcctgggcagcttcgaccccctggccgagctgaccggcaaggacagcaacgtgaccgccagccccaccgcccccgcctgccccagcgacaagcccgcccccgtgcagaagccccccagcagcggcaccagcagcgagttcgaggtggtgacccccgaggagcagaacagccccgagagcagcagccacgccaacgccatggccctgggccccctgcccagagaggacggcaacctgatgctgcacctgcagagactggagaccaccctgagcgtgtgcgccgaggagcccgaccacggccagctgttcacccacctgggcagaatggccctggagttcaacagactggccagcaaggtgcacaagaacgagcagagaaccagcatcctgcagaccctgtgcgagcagctgagaaaggagaacgaggccctgaaggccaagctggacaagggcctggagcagagagaccaggccgccgagagactgagagaggagaacctggagctgaagaagctgctgatgagcaacggcaacaaggagggcgccagcggcagacccggcagccccaagatggagggcaccggcaagaaggccgtggccggccagcagcaggccagcgtgaccgccggcaaggtgcccgaggtggtggccctgggcgccgccgagaagaaggtgaagatgctggagcagcagagaagcgagctgctggaggtgaacaagcagtgggaccagcacttcagaagcatgaagcagcagtacgagcagaagatcaccgagctgagacagaagctggccgacctgcagaagcaggtgaccgacctggaggccgagagagagcagaagcagagagacttcgacagaaagctgctgctggccaagagcaagatcgagatggaggagaccgacaaggagcagctgaccgccgaggccaaggagctgagacagaaggtgaagtacctgcaggaccagctgagccccctgaccagacagagagagtaccaggagaaggagatccagagactgaacaaggccctggaggaggccctgagcatccagaccccccccagcagcccccccaccgccttcggcagccccgagggcgccggcgccctgctgagaaagcaggagctggtgacccagaacgagctgctgaagcagcaggtgaagatcttcgaggaggacttccagagagagagaagcgacagagagagaatgaacgaggagaaggaggagctgaagaagcaggtggagaagctgcaggcccaggtgaccctgagcaacgcccagctgaaggccttcaaggacgaggagaaggccagagaggccctgagacagcagaagagaaaggccaagggcacccacagaggctgccccagacacctgcccgagagaaaggtgaagtag

SEQ ID NO: 102612 - DNA, 1290 bp, synthetic construct
  misc_feature 1..1290: note = Description of Artificial Sequence: Synthetic coding sequence
  source 1..1290: mol_type = other DNA
atgagcagagaccccggcagcggcggctgggaggaggcccccagagccgccgccgccctgtgcaccctgtaccacgaggccggccagagactgagaagactgcaggaccagctggccgccagagacgccctgatcgccagactgagagccagactggccgccctggagggcgacgccgcccccagcctggtggacgccctgctggagcaggtggccagattcagagagcagctgagaagacaggagggcggcgccgccgaggcccagatgagacaggagatcgagagactgaccgagagactggaggagaaggagagagagatgcagcagctgctgagccagccccagcacgagagagagaaggaggtggtgctgctgagaagaagcatggccgagggcgagagagccagagccgccagcgacgtgctgtgcagaagcctggccaacgagacccaccagctgagaagaaccctgaccgccaccgcccacatgtgccagcacctggccaagtgcctggacgagagacagcacgcccagagaaacgtgggcgagagaagccccgaccagagcgagcacaccgacggccacaccagcgtgcagagcgtgatcgagaagctgcaggaggagaacagactgctgaagcagaaggtgacccacgtggaggacctgaacgccaagtggcagagatacaacgccagcagagacgagtacgtgagaggcctgcacgcccagctgagaggcctgcagatcccccacgagcccgagctgatgagaaaggagatcagcagactgaacagacagctggaggagaagatcaacgactgcgccgaggtgaagcaggagctggccgccagcagaaccgccagagacgccgccctggagagagtgcagatgctggagcagcagatcctggcctacaaggacgacttcatgagcgagagagccgacagagagagagcccagagcagaatccaggagctggaggagaaggtggccagcctgctgcaccaggtgagctggagacaggacagcagagagcccgacgccggcagaatccacgccggcagcaagaccgccaagtacctggccgccgacgccctggagctgatggtgcccggcggctggagacccggcaccggcagccagcagcccgagccccccgccgagggcggccaccccggcgccgcccagagaggccagggcgacctgcagtgcccccactgcctgcagtgcttcagcgacgagcagggcgaggagctgctgagacacgtggccgagtgctgccagtag

SEQ ID NO: 102613 - DNA, 969 bp, synthetic construct
  misc_feature 1..969: note = Description of Artificial Sequence: Synthetic coding sequence
  source 1..969: mol_type = other DNA
atgcagcagctgctgagccagccccagcacgagagagagaaggaggtggtgctgctgagaagaagcatggccgagggcgagagagccagagccgccagcgacgtgctgtgcagaagcctggccaacgagacccaccagctgagaagaaccctgaccgccaccgcccacatgtgccagcacctggccaagtgcctggacgagagacagcacgcccagagaaacgtgggcgagagaagccccgaccagagcgagcacaccgacggccacaccagcgtgcagagcgtgatcgagaagctgcaggaggagaacagactgctgaagcagaaggtgacccacgtggaggacctgaacgccaagtggcagagatacaacgccagcagagacgagtacgtgagaggcctgcacgcccagctgagaggcctgcagatcccccacgagcccgagctgatgagaaaggagatcagcagactgaacagacagctggaggagaagatcaacgactgcgccgaggtgaagcaggagctggccgccagcagaaccgccagagacgccgccctggagagagtgcagatgctggagcagcagatcctggcctacaaggacgacttcatgagcgagagagccgacagagagagagcccagagcagaatccaggagctggaggagaaggtggccagcctgctgcaccaggtgagctggagacaggacagcagagagcccgacgccggcagaatccacgccggcagcaagaccgccaagtacctggccgccgacgccctggagctgatggtgcccggcggctggagacccggcaccggcagccagcagcccgagccccccgccgagggcggccaccccggcgccgcccagagaggccagggcgacctgcagtgcccccactgcctgcagtgcttcagcgacgagcagggcgaggagctgctgagacacgtggccgagtgctgccagtag

SEQ ID NO: 102614 - DNA, 837 bp, synthetic construct
  misc_feature 1..837: note = Description of Artificial Sequence: Synthetic coding sequence
  source 1..837: mol_type = other DNA
atggccgaggccagaagccagcccagcgccggcccccagctgaacgccctgcccgaccacagccccctgctgcagcccggcctggccgccctgagaagaagagccagagaggccggcgtgcccctggcccccctgcccctgaccgacagcttcctgctgagattcctgagagccagagacttcgacctggacctggcctggagactgctgaagaactactacaagtggagagccgagtgccccgagatcagcgccgacctgcaccccagaagcatcatcggcctgctgaaggccggctaccacggcgtgctgagaagcagagaccccaccggcagcaaggtgctgatctacagaatcgcccactgggaccccaaggtgttcaccgcctacgacgtgttcagagtgagcctgatcaccagcgagctgatcgtgcaggaggtggagacccagagaaacggcatcaaggccatcttcgacctggagggctggcagttcagccacgccttccagatcacccccagcgtggccaagaagatcgccgccgtgctgaccgacagcttccccctgaaggtgagaggcatccacctgatcaacgagcccgtgatcttccacgccgtgttcagcatgatcaagcccttcctgaccgagaagatcaaggagagaatccacatgcacggcaacaactacaagcagagcctgctgcagcacttccccgacatcctgcccctggagtacggcggcgaggagttcagcatggaggacatctgccaggagtggaccaacttcatcatgaagagcgaggactacctgagcagcatcagcgagagcatccagtag

SEQ ID NO: 102615 - DNA, 2361 bp, synthetic construct
  misc_feature 1..2361: note = Description of Artificial Sequence: Synthetic coding sequence
  source 1..2361: mol_type = other DNA
atgaccagcatcttccacttcgccatcatcttcatgctgatcctgcagatcagaatccagctgagcgaggagagcgagttcctggtggacagaagcaagaacggcctgatccacgtgcccaaggacctgagccagaagaccaccatcctgaacatcagccagaactacatcagcgagctgtggaccagcgacatcctgagcctgagcaagctgagaatcctgatcatcagccacaacagaatccagtacctggacatcagcgtgttcaagttcaaccaggagctggagtacctggacctgagccacaacaagctggtgaagatcagctgccaccccaccgtgaacctgaagcacctggacctgagcttcaacgccttcgacgccctgcccatctgcaaggagttcggcaacatgagccagctgaagttcctgggcctgagcaccacccacctggagaagagcagcgtgctgcccatcgcccacctgaacatcagcaaggtgctgctggtgctgggcgagacctacggcgagaaggaggaccccgagggcctgcaggacttcaacaccgagagcctgcacatcgtgttccccaccaacaaggagttccacttcatcctggacgtgagcgtgaagaccgtggccaacctggagctgagcaacatcaagtgcgtgctggaggacaacaagtgcagctacttcctgagcatcctggccaagctgcagaccaaccccaagctgagcaacctgaccctgaacaacatcgagaccacctggaacagcttcatcagaatcctgcagctggtgtggcacaccaccgtgtggtacttcagcatcagcaacgtgaagctgcagggccagctggacttcagagacttcgactacagcggcaccagcctgaaggccctgagcatccaccaggtggtgagcgacgtgttcggcttcccccagagctacatctacgagatcttcagcaacatgaacatcaagaacttcaccgtgagcggcaccagaatggtgcacatgctgtgccccagcaagatcagccccttcctgcacctggacttcagcaacaacctgctgaccgacaccgtgttcgagaactgcggccacctgaccgagctggagaccctgatcctgcagatgaaccagctgaaggagctgagcaagatcgccgagatgaccacccagatgaagagcctgcagcagctggacatcagccagaacagcgtgagctacgacgagaagaagggcgactgcagctggaccaagagcctgctgagcctgaacatgagcagcaacatcctgaccgacaccatcttcagatgcctgccccccagaatcaaggtgctggacctgcacagcaacaagatcaagagcatccccaagcaggtggtgaagctggaggccctgcaggagctgaacgtggccttcaacagcctgaccgacctgcccggctgcggcagcttcagcagcctgagcgtgctgatcatcgaccacaacagcgtgagccaccccagcgccgacttcttccagagctgccagaagatgagaagcatcaaggccggcgacaaccccttccagtgcacctgcgagctgggcgagttcgtgaagaacatcgaccaggtgagcagcgaggtgctggagggctggcccgacagctacaagtgcgactaccccgagagctacagaggcaccctgctgaaggacttccacatgagcgagctgagctgcaacatcaccctgctgatcgtgaccatcgtggccaccatgctggtgctggccgtgaccgtgaccagcctgtgcagctacctggacctgccctggtacctgagaatggtgtgccagtggacccagaccagaagaagagccagaaacatccccctggaggagctgcagagaaacctgcagttccacgccttcatcagctacagcggccacgacagcttctgggtgaagaacgagctgctgcccaacctggagaaggagggcatgcagatctgcctgcacgagagaaacttcgtgcccggcaagagcatcgtggagaacatcatcacctgcatcgagaagagctacaagagcatcttcgtgctgagccccaacttcgtgcagagcgagtggtgccactacgagctgtacttcgcccaccacaacctgttccacgagggcagcaacagcctgatcctgatcctgctggagcccatcccccagtacagcatccccagcagctaccacaagctgaagagcctgatggccagaagaacctacctggagtggcccaaggagaagagcaagagaggcctgttctgggccaacctgagagccgccatcaacatcaagctgaccgagcaggccaagaagtag

SEQ ID NO: 102616 - DNA, 2361 bp, synthetic construct; identical to SEQ ID NO: 102615
  misc_feature 1..2361: note = Description of Artificial Sequence: Synthetic coding sequence
  source 1..2361: mol_type = other DNA

SEQ ID NO: 102617 - DNA, 486 bp, synthetic construct
  misc_feature 1..486: note = Description of Artificial Sequence: Synthetic coding sequence
  source 1..486: mol_type = other DNA
atgaccagcatcttccacttcgccatcatcttcatgctgatcctgcagatcagaatccagctgagcgaggagagcgagttcctggtggacagaagcaagaacggcctgatccacgtgcccaaggacctgagccagaagaccaccatcctgaacatcagccagaactacatcagcgagctgtggaccagcgacatcctgagcctgagcaagctgagaatcctgatcatcagccacaacagaatccagtacctggacatcagcgtgttcaagttcaaccaggagctggagtacctggacctgagccacaacaagctggtgaagatcagctgccaccccaccgtgaacctgaagcacctggacctgagcttcaacgccttcgacgccctgcccatctgcaaggagttcggcaacatgagccagctgaagttcctgggcctgagcaccacccacctggagaagagcagcgtgctgcccatcgcccactag

SEQ ID NO: 102618 - DNA, 147 bp, synthetic construct
  misc_feature 1..147: note = Description of Artificial Sequence: Synthetic coding sequence
  source 1..147: mol_type = other DNA
atgaccagcatcttccacttcgccatcatcttcatgctgatcctgcagatcagaatccagctgagcgaggagagcgagttcctggtggacagaagcaagaacggcctgatccacgtgcccaaggacctgagccagaagaccacctag

SEQ ID NO: 102619 - DNA, 72 bp, synthetic construct
  misc_feature 1..72: note = Description of Artificial Sequence: Synthetic coding sequence
  source 1..72: mol_type = other DNA
atgaccagcatcttccacttcgccatcatcttcatgctgatcctgcagatcagaatccagctgagcgagtag

SEQ ID NO: 102620 - DNA, 273 bp, synthetic construct
  misc_feature 1..273: note = Description of Artificial Sequence: Synthetic coding sequence
  source 1..273: mol_type = other DNA
atgaccagcatcttccacttcgccatcatcttcatgctgatcctgcagatcagaatccagctgagcgaggagagcgagttcctggtggacagaagcaagaacggcctgatccacgtgcccaaggacctgagccagaagaccaccatcctgaacatcagccagaactacatcagcgagctgtggaccagcgacatcctgagcctgagcaagctgagaatcctgatcatcagccacaacagaatccagtacctggacatcagcgtgttcaagtag

SEQ ID NO: 102621 - DNA, 2355 bp, synthetic construct
  misc_feature 1..2355: note = Description of Artificial Sequence: Synthetic coding sequence
  source 1..2355: mol_type = other DNA
atgccccacaccctgtggatggtgtgggtgctgggcgtgatcatcagcctgagcaaggaggagagcagcaaccaggccagcctgagctgcgacagaaacggcatctgcaagggcagcagcggcagcctgaacagcatccccagcggcctgaccgaggccgtgaagagcctggacctgagcaacaacagaatcacctacatcagcaacagcgacctgcagagatgcgtgaacctgcaggccctggtgctgaccagcaacggcatcaacaccatcgaggaggacagcttcagcagcctgggcagcctggagcacctggacctgagctacaactacctgagcaacctgagcagcagctggttcaagcccctgagcagcctgaccttcctgaacctgctgggcaacccctacaagaccctgggcgagaccagcctgttcagccacctgaccaagctgcagatcctgagagtgggcaacatggacaccttcaccaagatccagagaaaggacttcgccggcctgaccttcctggaggagctggagatcgacgccagcgacctgcagagctacgagcccaagagcctgaagagcatccagaacgtgagccacctgatcctgcacatgaagcagcacatcctgctgctggagatcttcgtggacgtgaccagcagcgtggagtgcctggagctgagagacaccgacctggacaccttccacttcagcgagctgagcaccggcgagaccaacagcctgatcaagaagttcaccttcagaaacgtgaagatcaccgacgagagcctgttccaggtgatgaagctgctgaaccagatcagcggcctgctggagctggagttcgacgactgcaccctgaacggcgtgggcaacttcagagccagcgacaacgacagagtgatcgaccccggcaaggtggagaccctgaccatcagaagactgcacatccccagattctacctgttctacgacctgagcaccctgtacagcctgaccgagagagtgaagagaatcaccgtggagaacagcaaggtgttcctggtgccctgcctgctgagccagcacctgaagagcctggagtacctggacctgagcgagaacctgatggtggaggagtacctgaagaacagcgcctgcgaggacgcctggcccagcctgcagaccctgatcctgagacagaaccacctggccagcctggagaagaccggcgagaccctgctgaccctgaagaacctgaccaacatcgacatcagcaagaacagcttccacagcatgcccgagacctgccagtggcccgagaagatgaagtacctgaacctgagcagcaccagaatccacagcgtgaccggctgcatccccaagaccctggagatcctggacgtgagcaacaacaacctgaacctgttcagcctgaacctgccccagctgaaggagctgtacatcagcagaaacaagctgatgaccctgcccgacgccagcctgctgcccatgctgctggtgctgaagatcagcagaaacgccatcaccaccttcagcaaggagcagctggacagcttccacaccctgaagaccctggaggccggcggcaacaacttcatctgcagctgcgagttcctgagcttcacccaggagcagcaggccctggccaaggtgctgatcgactggcccgccaactacctgtgcgacagccccagccacgtgagaggccagcaggtgcaggacgtgagactgagcgtgagcgagtgccacagaaccgccctggtgagcggcatgtgctgcgccctgttcctgctgatcctgctgaccggcgtgctgtgccacagattccacggcctgtggtacatgaagatgatgtgggcctggctgcaggccaagagaaagcccagaaaggcccccagcagaaacatctgctacgacgccttcgtgagctacagcgagagagacgcctactgggtggagaacctgatggtgcaggagctggagaacttcaacccccccttcaagctgtgcctgcacaagagagacttcatccccggcaagtggatcatcgacaacatcatcgacagcatcgagaagagccacaagaccgtgttcgtgctgagcgagaacttcgtgaagagcgagtggtgcaagtacgagctggacttcagccacttcagactgttcgacgagaacaacgacgccgccatcctgatcctgctggagcccatcgagaagaaggccatcccccagagattctgcaagctgagaaagatcatgaacaccaagacctacctggagtggcccatggacgaggcccagagagagggcttctgggtgaacctgagagccgccatcaagagctag

SEQ ID NO: 102622 - DNA, 2715 bp, synthetic construct
  misc_feature 1..2715: note = Description of Artificial Sequence: Synthetic coding sequence
  source 1..2715: mol_type = other DNA
atgagacagaccctgccctgcatctacttctggggcggcctgctgcccttcggcatgctgtgcgccagcagcaccaccaagtgcaccgtgagccacgaggtggccgactgcagccacctgaagctgacccaggtgcccgacgacctgcccaccaacatcaccgtgctgaacctgacccacaaccagctgagaagactgcccgccgccaacttcaccagatacagccagctgaccagcctggacgtgggcttcaacaccatcagcaagctggagcccgagctgtgccagaagctgcccatgctgaaggtgctgaacctgcagcacaacgagctgagccagctgagcgacaagaccttcgccttctgcaccaacctgaccgagctgcacctgatgagcaacagcatccagaagatcaagaacaaccccttcgtgaagcagaagaacctgatcaccctggacctgagccacaacggcctgagcagcaccaagctgggcacccaggtgcagctggagaacctgcaggagctgctgctgagcaacaacaagatccaggccctgaagagcgaggagctggacatcttcgccaacagcagcctgaagaagctggagctgagcagcaaccagatcaaggagttcagccccggctgcttccacgccatcggcagactgttcggcctgttcctgaacaacgtgcagctgggccccagcctgaccgagaagctgtgcctggagctggccaacaccagcatcagaaacctgagcctgagcaacagccagctgagcaccaccagcaacaccaccttcctgggcctgaagtggaccaacctgaccatgctggacctgagctacaacaacctgaacgtggtgggcaacgacagcttcgcctggctgccccagctggagtacttcttcctggagtacaacaacatccagcacctgttcagccacagcctgcacggcctgttcaacgtgagatacctgaacctgaagagaagcttcaccaagcagagcatcagcctggccagcctgcccaagatcgacgacttcagcttccagtggctgaagtgcctggagcacctgaacatggaggacaacgacatccccggcatcaagagcaacatgttcaccggcctgatcaacctgaagtacctgagcctgagcaacagcttcaccagcctgagaaccctgaccaacgagaccttcgtgagcctggcccacagccccctgcacatcctgaacctgaccaagaacaagatcagcaagatcgagagcgacgccttcagctggctgggccacctggaggtgctggacctgggcctgaacgagatcggccaggagctgaccggccaggagtggagaggcctggagaacatcttcgagatctacctgagctacaacaagtacctgcagctgaccagaaacagcttcgccctggtgcccagcctgcagagactgatgctgagaagagtggccctgaagaacgtggacagcagccccagccccttccagcccctgagaaacctgaccatcctggacctgagcaacaacaacatcgccaacatcaacgacgacatgctggagggcctggagaagctggagatcctggacctgcagcacaacaacctggccagactgtggaagcacgccaaccccggcggccccatctacttcctgaagggcctgagccacctgcacatcctgaacctggagagcaacggcttcgacgagatccccgtggaggtgttcaaggacctgttcgagctgaagatcatcgacctgggcctgaacaacctgaacaccctgcccgccagcgtgttcaacaaccaggtgagcctgaagagcctgaacctgcagaagaacctgatcaccagcgtggagaagaaggtgttcggccccgccttcagaaacctgaccgagctggacatgagattcaaccccttcgactgcacctgcgagagcatcgcctggttcgtgaactggatcaacgagacccacaccaacatccccgagctgagcagccactacctgtgcaacacccccccccactaccacggcttccccgtgagactgttcgacaccagcagctgcaaggacagcgcccccttcgagctgttcttcatgatcaacaccagcatcctgctgatcttcatcttcatcgtgctgctgatccacttcgagggctggagaatcagcttctactggaacgtgagcgtgcacagagtgctgggcttcaaggagatcgacagacagaccgagcagttcgagtacgccgcctacatcatccacgcctacaaggacaaggactgggtgtgggagcacttcagcagcatggagaaggaggaccagagcctgaagttctgcctggaggagagagacttcgaggccggcgtgttcgagctggaggccatcgtgaacagcatcaagagaagcagaaagatcatcttcgtgatcacccaccacctgctgaaggaccccctgtgcaagagattcaaggtgcaccacgccgtgcagcaggccatcgagcagaacctggacagcatcatcctggtgttcctggaggagatccccgactacaagctgaaccacgccctgtgcctgagaagaggcatgttcaagagccactgcatcctgaactggcccgtgcagaaggagagaatcggcgccttcagacacaagctgcaggtggccctgggcagcaagaacagcgtgcactag

SEQ ID NO: 102623 - DNA, 1884 bp, synthetic construct
  misc_feature 1..1884: note = Description of Artificial Sequence: Synthetic coding sequence
  source 1..1884: mol_type = other DNA
atgctggacctgagctacaacaacctgaacgtggtgggcaacgacagcttcgcctggctgccccagctggagtacttcttcctggagtacaacaacatccagcacctgttcagccacagcctgcacggcctgttcaacgtgagatacctgaacctgaagagaagcttcaccaagcagagcatcagcctggccagcctgcccaagatcgacgacttcagcttccagtggctgaagtgcctggagcacctgaacatggaggacaacgacatccccggcatcaagagcaacatgttcaccggcctgatcaacctgaagtacctgagcctgagcaacagcttcaccagcctgagaaccctgaccaacgagaccttcgtgagcctggcccacagccccctgcacatcctgaacctgaccaagaacaagatcagcaagatcgagagcgacgccttcagctggctgggccacctggaggtgctggacctgggcctgaacgagatcggccaggagctgaccggccaggagtggagaggcctggagaacatcttcgagatctacctgagctacaacaagtacctgcagctgaccagaaacagcttcgccctggtgcccagcctgcagagactgatgctgagaagagtggccctgaagaacgtggacagcagccccagccccttccagcccctgagaaacctgaccatcctggacctgagcaacaacaacatcgccaacatcaacgacgacatgctggagggcctggagaagctggagatcctggacctgcagcacaacaacctggccagactgtggaagcacgccaaccccggcggccccatctacttcctgaagggcctgagccacctgcacatcctgaacctggagagcaacggcttcgacgagatccccgtggaggtgttcaaggacctgttcgagctgaagatcatcgacctgggcctgaacaacctgaacaccctgcccgccagcgtgttcaacaaccaggtgagcctgaagagcctgaacctgcagaagaacctgatcaccagcgtggagaagaaggtgttcggccccgccttcagaaacctgaccgagctggacatgagattcaaccccttcgactgcacctgcgagagcatcgcctggttcgtgaactggatcaacgagacccacaccaacatccccgagctgagcagccactacctgtgcaacacccccccccactaccacggcttccccgtgagactgttcgacaccagcagctgcaaggacagcgcccccttcgagctgttcttcatgatcaacaccagcatcctgctgatcttcatcttcatcgtgctgctgatccacttcgagggctggagaatcagcttctactggaacgtgagcgtgcacagagtgctgggcttcaaggagatcgacagacagaccgagcagttcgagtacgccgcctacatcatccacgcctacaaggacaaggactgggtgtgggagcacttcagcagcatggagaaggaggaccagagcctgaagttctgcctggaggagagagacttcgaggccggcgtgttcgagctggaggccatcgtgaacagcatcaagagaagcagaaagatcatcttcgtgatcacccaccacctgctgaaggaccccctgtgcaagagattcaaggtgcaccacgccgtgcagcaggccatcgagcagaacctggacagcatcatcctggtgttcctggaggagatccccgactacaagctgaaccacgccctgtgcctgagaagaggcatgttcaagagccactgcatcctgaactggcccgtgcagaaggagagaatcggcgccttcagacacaagctgcaggtggccctgggcagcaagaacagcgtgcactag

SEQ ID NO: 102624 - DNA, 2613 bp, synthetic construct
  misc_feature 1..2613: note = Description of Artificial Sequence: Synthetic coding sequence
  source 1..2613: mol_type = other DNA
atgagacagaccctgccctgcatctacttctggggcggcctgctgcccttcggcatgctgtgcgccagcagcaccaccaagtgcaccgtgagccacgaggtggccgactgcagccacctgaagctgacccaggtgcccgacgacctgcccaccaacatcaccgtgctgaacctgacccacaaccagctgagaagactgcccgccgccaacttcaccagatacagccagctgaccagcctggacgtgggcttcaacaccatcagcaagctggagcccgagctgtgccagaagctgcccatgctgaaggtgctgaacctgcagcacaacgagctgagccagctgagcgacaagaccttcgccttctgcaccaacctgaccgagctgcacctgatgagcaacagcatccagaagatcaagaacaaccccttcgtgaagcagaagaacctgatcaccctggacctgagccacaacggcctgagcagcaccaagctgggcacccaggtgcagctggagaacctgcaggagctgctgctgagcaacaacaagatccaggccctgaagagcgaggagctggacatcttcgccaacagcagcctgaagaagctggagctgagcagcaaccagatcaaggagttcagccccggctgcttccacgccatcggcagactgttcggcctgttcctgaacaacgtgcagctgggccccagcctgaccgagaagctgtgcctggagctggccaacaccagcatcagaaacctgagcctgagcaacagccagctgagcaccaccagcaacaccaccttcctgggcctgaagtggaccaacctgaccatgctggacctgagctacaacaacctgaacgtggtgggcaacgacagcttcgcctggctgccccagctggagtacttcttcctggagtacaacaacatccagcacctgttcagccacagcctgcacggcctgttcaacgtgagatacctgaacctgaagagaagcttcaccaagcagagcatcagcctggccagcctgcccaagatcgacgacttcagcttccagtggctgaagtgcctggagcacctgaacatggaggacaacgacatccccggcatcaagagcaacatgttcaccggcctgatcaacctgaagtacctgagcctgagcaacagcttcaccagcctgagaaccctgaccaacgagaccttcgtgagcctggcccacagccccctgcacatcctgaacctgaccaagaacaagatcagcaagatcgagagcgacgccttcagctggctgggccacctggaggtgctggacctgggcctgaacgagatcggccaggagctgaccggccaggagtggagaggcctggagaacatcttcgagatctacctgagctacaacaagtacctgcagctgaccagaaacagcttcgccctggtgcccagcctgcagagactgatgctgagaagagtggccctgaagaacgtggacagcagccccagccccttccagcccctgagaaacctgaccatcctggacctgagcaacaacaacatcgccaacatcaacgacgacatgctggagggcctggagaagctggagatcctggacctgcagcacaacaacctggccagactgtggaagcacgccaaccccggcggccccatctacttcctgaagggcctgagccacctgcacatcctgaacctggagagcaacggcttcgacgagatccccgtggaggtgttcaaggacctgttcgagctgaagatcatcgacctgggcctgaacaacctgaacaccctgcccgccagcgtgttcaacaaccaggtgagcctgaagagcctgaacctgcagaagaacctgatcaccagcgtggagaagaaggtgttcggccccgccttcagaaacctgaccgagctggacatgagattcaaccccttcgactgcacctgcgagagcatcgcctggttcgtgaactggatcaacgagacccacaccaacatccccgagctgagcagccactacctgtgcaacacccccccccactaccacggcttccccgtgagactgttcgacaccagcagctgcaaggacagcgcccccttcgagctgttcttcatgatcaacaccagcatcctgctgatcttcatcttcatcgtgctgctgatccacttcgagggctggagaatcagcttctactggaacgtgagcgtgcacagagtgctgggcttcaaggagatcgacagacagaccgagcagttcgagtacgccgcctacatcatccacgcctacaaggacaaggactgggtgtgggagcacttcagcagcatggagaaggaggaccagagcctgaagttctgcctggaggagagagacttcgaggccggcgtgttcgagctggaggccatcgtgaacagcatcaagagaagcagaaagatcatcttcgtgatcacccaccacctgctgaaggaccccctgtgcaagagattcaaggtgcaccacgccgtgcagcaggccatcgagcagaacctggacagcatcatcctggtgttcctggaggagatccccgactacaagctgaaccacgccctgtgcctgagaagagccaagtag

SEQ ID NO: 102625 - DNA, 2391 bp, synthetic construct
  misc_feature 1..2391: note = Description of Artificial Sequence: Synthetic coding sequence
  source 1..2391: mol_type = other DNA
atgaccaaggacaaggagcccatcgtgaagagcttccacttcgtgtgcctgatgatcatcatcgtgggcaccagaatccagttcagcgacggcaacgagttcgccgtggacaagagcaagagaggcctgatccacgtgcccaaggacctgcccctgaagaccaaggtgctggacatgagccagaactacatcgccgagctgcaggtgagcgacatgagcttcctgagcgagctgaccgtgctgagactgagccacaacagaatccagctgctggacctgagcgtgttcaagttcaaccaggacctggagtacctggacctgagccacaaccagctgcagaagatcagctgccaccccatcgtgagcttcagacacctggacctgagcttcaacgacttcaaggccctgcccatctgcaaggagttcggcaacctgagccagctgaacttcctgggcctgagcgccatgaagctgcagaagctggacctgctgcccatcgcccacctgcacctgagctacatcctgctggacctgagaaactactacatcaaggagaacgagaccgagagcctgcagatcctgaacgccaagaccctgcacctggtgttccaccccaccagcctgttcgccatccaggtgaacatcagcgtgaacaccctgggctgcctgcagctgaccaacatcaagctgaacgacgacaactgccaggtgttcatcaagttcctgagcgagctgaccagaggcagcaccctgctgaacttcaccctgaaccacatcgagaccacctggaagtgcctggtgagagtgttccagttcctgtggcccaagcccgtggagtacctgaacatctacaacctgaccatcatcgagagcatcagagaggaggacttcacctacagcaagaccaccctgaaggccctgaccatcgagcacatcaccaaccaggtgttcctgttcagccagaccgccctgtacaccgtgttcagcgagatgaacatcatgatgctgaccatcagcgacacccccttcatccacatgctgtgcccccacgcccccagcaccttcaagttcctgaacttcacccagaacgtgttcaccgacagcatcttcgagaagtgcagcaccctggtgaagctggagaccctgatcctgcagaagaacggcctgaaggacctgttcaaggtgggcctgatgaccaaggacatgcccagcctggagatcctggacgtgagctggaacagcctggagagcggcagacacaaggagaactgcacctgggtggagagcatcgtggtgctgaacctgagcagcaacatgctgaccgacagcgtgttcagatgcctgccccccagaatcaaggtgctggacctgcacagcaacaagatcaagagcgtgcccaagcaggtggtgaagctggaggccctgcaggagctgaacgtggccttcaacagcctgaccgacctgcccggctgcggcagcttcagcagcctgagcgtgctgatcatcgaccacaacagcgtgagccaccccagcgccgacttcttccagagctgccagaagatgagaagcatcaaggccggcgacaaccccttccagtgcacctgcgagctgagagagttcgtgaagaacatcgaccaggtgagcagcgaggtgctggagggctggcccgacagctacaagtgcgactaccccgagagctacagaggcagccccctgaaggacttccacatgagcgagctgagctgcaacatcaccctgctgatcgtgaccatcggcgccaccatgctggtgctggccgtgaccgtgaccagcctgtgcatctacctggacctgccctggtacctgagaatggtgtgccagtggacccagaccagaagaagagccagaaacatccccctggaggagctgcagagaaacctgcagttccacgccttcatcagctacagcgagcacgacagcgcctgggtgaagagcgagctggtgccctacctggagaaggaggacatccagatctgcctgcacgagagaaacttcgtgcccggcaagagcatcgtggagaacatcatcaactgcatcgagaagagctacaagagcatcttcgtgctgagccccaacttcgtgcagagcgagtggtgccactacgagctgtacttcgcccaccacaacctgttccacgagggcagcaacaacctgatcctgatcctgctggagcccatcccccagaacagcatccccaacaagtaccacaagctgaaggccctgatgacccagagaacctacctgcagtggcccaaggagaagagcaagagaggcctgttctgggccaacatcagagccgccttcaacatgaagctgaccctggtgaccgagaacaacgacgtgaagagctag

SEQ ID NO: 102626 - DNA, 2391 bp, synthetic construct; identical to SEQ ID NO: 102625
  misc_feature 1..2391: note = Description of Artificial Sequence: Synthetic coding sequence
  source 1..2391: mol_type = other DNA

SEQ ID NO: 102627 - DNA, 453 bp, synthetic construct
  misc_feature 1..453: note = Description of Artificial Sequence: Synthetic coding sequence
  source 1..453: mol_type = other DNA
atgaccaaggacaaggagcccatcgtgaagagcttccacttcgtgtgcctgatgatcatcatcgtgggcaccagaatccagttcagcgacggcaacgagttcgccgtggacaagagcaagagaggcctgatccacgtgcccaaggacctgcccctgaagaccaaggtgctggacatgagccagaactacatcgccgagctgcaggtgagcgacatgagcttcctgagcgagctgaccgtgctgagactgagccacaacagaatccagctgctggacctgagcgtgttcaagttcaaccaggacctggagtacctggacctgagccacaaccagctgcagaagatcagctgccaccccatcgtgagcttcagacacctggacctgagcttcaacgacttcaaggccctgcccatctgcaaggagttcggcaacctgagccagctgaacttctag

SEQ ID NO: 102628 - DNA, 1443 bp, synthetic construct
  misc_feature 1..1443: note = Description of Artificial Sequence: Synthetic coding sequence
  source 1..1443: mol_type = other DNA
atgaccaaggacaaggagcccatcgtgaagagcttccacttcgtgtgcctgatgatcatcatcgtgggcaccagaatccagttcagcgacggcaacgagttcgccgtggacaagagcaagagaggcctgatccacgtgcccaaggacctgcccctgaagaccaaggtgctggacatgagccagaactacatcgccgagctgcaggtgagcgacatgagcttcctgagcgagctgaccgtgctgagactgagccacaacagaatccagctgctggacctgagcgtgttcaagttcaaccaggacctggagtacctggacctgagccacaaccagctgcagaagatcagctgccaccccatcgtgagcttcagacacctggacctgagcttcaacgacttcaaggccctgcccatctgcaaggagttcggcaacctgagccagctgaacttcctgggcctgagcgccatgaagctgcagaagctggacctgctgcccatcgcccacctgcacctgagctacatcctgctggacctgagaaactactacatcaaggagaacgagaccgagagcctgcagatcctgaacgccaagaccctgcacctggtgttccaccccaccagcctgttcgccatccaggtgaacatcagcgtgaacaccctgggctgcctgcagctgaccaacatcaagctgaacgacgacaactgccaggtgttcatcaagttcctgagcgagctgaccagaggcagcaccctgctgaacttcaccctgaaccacatcgagaccacctggaagtgcctggtgagagtgttccagttcctgtggcccaagcccgtggagtacctgaacatctacaacctgaccatcatcgagagcatcagagaggaggacttcacctacagcaagaccaccctgaaggccctgaccatcgagcacatcaccaaccaggtgttcctgttcagccagaccgccctgtacaccgtgttcagcgagatgaacatcatgatgctgaccatcagcgacacccccttcatccacatgctgtgcccccacgcccccagcaccttcaagttcctgaacttcacccagaacgtgttcaccgacagcatcttcgagaagtgcagcaccctggtgaagctggagaccctgatcttcgtgctgagccccaacttcgtgcagagcgagtggtgccactacgagctgtacttcgcccaccacaacctgttccacgagggcagcaacaacctgatcctgatcctgctggagcccatcccccagaacagcatccccaacaagtaccacaagctgaaggccctgatgacccagagaacctacctgcagtggcccaaggagaagagcaagagaggcctgttctgggccaacatcagagccgccttcaacatgaagctgaccctggtgaccgagaacaacgacgtgaagagctag

SEQ ID NO: 102629 - DNA, 276 bp, synthetic construct
  misc_feature 1..276: note = Description of Artificial Sequence: Synthetic coding sequence
  source 1..276: mol_type = other DNA
atgaccaaggacaaggagcccatcgtgaagagcttccacttcgtgtgcctgatgatcatcatcgtgggcaccagaatccagttcagcgacggcaacgagttcgccgtggacaagagcaagagaggcctgatccacgtgcccaaggacctgcccctgaagaccaaggtgctggacatgagccagaactacatcgccgagctgcaggtgagcgacatgagcttcctgagcgagctgaccgtgctgagactgagccacaacagaatccagctgctgtag

SEQ ID NO: 102630 - DNA, 3150 bp, synthetic construct
  misc_feature 1..3150: note = Description of Artificial Sequence: Synthetic coding sequence
  source 1..3150: mol_type = other DNA
atggtgttccccatgtggaccctgaagagacagatcctgatcctgttcaacatcatcctgatcagcaagctgctgggcgccagatggttccccaagaccctgccctgcgacgtgaccctggacgtgcccaagaaccacgtgatcgtggactgcaccgacaagcacctgaccgagatccccggcggcatccccaccaacaccaccaacctgaccctgaccatcaaccacatccccgacatcagccccgccagcttccacagactggaccacctggtggagatcgacttcagatgcaactgcgtgcccatccccctgggcagcaagaacaacatgtgcatcaagagactgcagatcaagcccagaagcttcagcggcctgacctacctgaagagcctgtacctggacggcaaccagctgctggagatcccccagggcctgccccccagcctgcagctgctgagcctggaggccaacaacatcttcagcatcagaaaggagaacctgaccgagctggccaacatcgagatcctgtacctgggccagaactgctactacagaaacccctgctacgtgagctacagcatcgagaaggacgccttcctgaacctgaccaagctgaaggtgctgagcctgaaggacaacaacgtgaccgccgtgcccaccgtgctgcccagcaccctgaccgagctgtacctgtacaacaacatgatcgccaagatccaggaggacgacttcaacaacctgaaccagctgcagatcctggacctgagcggcaactgccccagatgctacaacgcccccttcccctgcgccccctgcaagaacaacagccccctgcagatccccgtgaacgccttcgacgccctgaccgagctgaaggtgctgagactgcacagcaacagcctgcagcacgtgccccccagatggttcaagaacatcaacaagctgcaggagctggacctgagccagaacttcctggccaaggagatcggcgacgccaagttcctgcacttcctgcccagcctgatccagctggacctgagcttcaacttcgagctgcaggtgtacagagccagcatgaacctgagccaggccttcagcagcctgaagagcctgaagatcctgagaatcagaggctacgtgttcaaggagctgaagagcttcaacctgagccccctgcacaacctgcagaacctggaggtgctggacctgggcaccaacttcatcaagatcgccaacctgagcatgttcaagcagttcaagagactgaaggtgatcgacctgagcgtgaacaagatcagccccagcggcgacagcagcgaggtgggcttctgcagcaacgccagaaccagcgtggagagctacgagccccaggtgctggagcagctgcactacttcagatacgacaagtacgccagaagctgcagattcaagaacaaggaggccagcttcatgagcgtgaacgagagctgctacaagtacggccagaccctggacctgagcaagaacagcatcttcttcgtgaagagcagcgacttccagcacctgagcttcctgaagtgcctgaacctgagcggcaacctgatcagccagaccctgaacggcagcgagttccagcccctggccgagctgagatacctggacttcagcaacaacagactggacctgctgcacagcaccgccttcgaggagctgcacaagctggaggtgctggacatcagcagcaacagccactacttccagagcgagggcatcacccacatgctgaacttcaccaagaacctgaaggtgctgcagaagctgatgatgaacgacaacgacatcagcagcagcaccagcagaaccatggagagcgagagcctgagaaccctggagttcagaggcaaccacctggacgtgctgtggagagagggcgacaacagatacctgcagctgttcaagaacctgctgaagctggaggagctggacatcagcaagaacagcctgagcttcctgcccagcggcgtgttcgacggcatgccccccaacctgaagaacctgagcctggccaagaacggcctgaagagcttcagctggaagaagctgcagtgcctgaagaacctggagaccctggacctgagccacaaccagctgaccaccgtgcccgagagactgagcaactgcagcagaagcctgaagaacctgatcctgaagaacaaccagatcagaagcctgaccaagtacttcctgcaggacgccttccagctgagatacctggacctgagcagcaacaagatccagatgatccagaagaccagcttccccgagaacgtgctgaacaacctgaagatgctgctgctgcaccacaacagattcctgtgcacctgcgacgccgtgtggttcgtgtggtgggtgaaccacaccgaggtgaccatcccctacctggccaccgacgtgacctgcgtgggccccggcgcccacaagggccagagcgtgatcagcctggacctgtacacctgcgagctggacctgaccaacctgatcctgttcagcctgagcatcagcgtgagcctgttcctgatggtgatgatgaccgccagccacctgtacttctgggacgtgtggtacatctaccacttctgcaaggccaagatcaagggctaccagagactgatcagccccgactgctgctacgacgccttcatcgtgtacgacaccaaggaccccgccgtgaccgagtgggtgctggccgagctggtggccaagctggaggaccccagagagaagcacttcaacctgtgcctggaggagagagactggctgcccggccagcccgtgctggagaacctgagccagagcatccagctgagcaagaagaccgtgttcgtgatgaccgacaagtacgccaagaccgagaacttcaagatcgccttctacctgagccaccagagactgatggacgagaaggtggacgtgatcatcctgatcttcctggagaagcccttccagaagagcaagttcctgcagctgagaaagagactgtgcggcagcagcgtgctggagtggcccaccaacccccaggcccacccctacttctggcagtgcctgaagaacgccctggccaccgacaaccacgtggcctacagccaggtgttcaaggagaccgtgtag

SEQ ID NO: 102631 - DNA, 1074 bp, synthetic construct
  misc_feature 1..1074: note = Description of Artificial Sequence: Synthetic coding sequence
  source 1..1074: mol_type = other DNA
atgagaagacagctgagaagcagaagagcccccagcttcccctacagctacagatacagactggacgaccccgacgaggccaaccagaactacctggccgacgaggaggaggaggccgaggaggaggccagagtgaccgtggtgcccaagagcgaggaggaggaggaggaggaggagaaggaggaggaggaggaggaggagaaggaggaggaggagggccagggccagcccaccggcaacgcctggtggcagaagctgcagatcatgagcgagtacctgtgggaccccgagagaagaatgttcctggccagaaccggccagagctggagcctgatcctgctgatctacttcttcttctacgccagcctggccgccgtgatcaccctgtgcatgtacaccctgttcctgaccatcagcccctacatccccaccttcaccgagagagtgaagccccccggcgtgatgatcagacccttcgcccacagcctgaacttcaacttcaacgtgagcgagcccgacacctggcagcactacgtgatcagcctgaacggcttcctgcagggctacaacgacagcctgcaggaggagatgaacgtggactgcccccccggccagtacttcatccaggacggcaacgaggacgaggacaagaaggcctgccagttcaagagaagcttcctgaagaactgcagcggcctggaggaccccaccttcggctacagcaccggccagccctgcatcctgctgaagatgaacagaatcgtgggcttcagacccgagctgggcgaccccgtgaaggtgagctgcaaggtgcagagaggcgacgagaacgacatcagaagcatcagctactaccccgagagcgccagcttcgacctgagatactacccctactacggcaagctgacccacgtgaactacaccagccccctggtggccatgcacttcaccgacgtggtgaagaaccaggccgtgcccgtgcagtgccagctgaagggcaagggcgtgatcaacgacgtgatcaacgacagattcgtgggcagagtgatcttcaccctgaacatcgagacctag

SEQ ID NO: 102632 - DNA, 3180 bp, synthetic construct
  misc_feature 1..3180: note = Description of Artificial Sequence: Synthetic coding sequence
  source 1..3180: mol_type = other DNA
atgaaggagagcagcctgcagaacagcagctgcagcctgggcaaggagaccaagaaggagaacatgttcctgcagagcagcatgctgacctgcatcttcctgctgatcagcggcagctgcgagctgtgcgccgaggagaacttcagcagaagctacccctgcgacgagaagaagcagaacgacagcgtgatcgccgagtgcagcaacagaagactgcaggaggtgccccagaccgtgggcaagtacgtgaccgagctggacctgagcgacaacttcatcacccacatcaccaacgagagcttccagggcctgcagaacctgaccaagatcaacctgaaccacaaccccaacgtgcagcaccagaacggcaaccccggcatccagagcaacggcctgaacatcaccgacggcgccttcctgaacctgaagaacctgagagagctgctgctggaggacaaccagctgccccagatccccagcggcctgcccgagagcctgaccgagctgagcctgatccagaacaacatctacaacatcaccaaggagggcatcagcagactgatcaacctgaagaacctgtacctggcctggaactgctacttcaacaaggtgtgcgagaagaccaacatcgaggacggcgtgttcgagaccctgaccaacctggagctgctgagcctgagcttcaacagcctgagccacgtgccccccaagctgcccagcagcctgagaaagctgttcctgagcaacacccagatcaagtacatcagcgaggaggacttcaagggcctgatcaacctgaccctgctggacctgagcggcaactgccccagatgcttcaacgcccccttcccctgcgtgccctgcgacggcggcgccagcatcaacatcgacagattcgccttccagaacctgacccagctgagatacctgaacctgagcagcaccagcctgagaaagatcaacgccgcctggttcaagaacatgccccacctgaaggtgctggacctggagttcaactacctggtgggcgagatcgccagcggcgccttcctgaccatgctgcccagactggagatcctggacctgagcttcaactacatcaagggcagctacccccagcacatcaacatcagcagaaacttcagcaagctgctgagcctgagagccctgcacctgagaggctacgtgttccaggagctgagagaggacgacttccagcccctgatgcagctgcccaacctgagcaccatcaacctgggcatcaacttcatcaagcagatcgacttcaagctgttccagaacttcagcaacctggagatcatctacctgagcgagaacagaatcagccccctggtgaaggacaccagacagagctacgccaacagcagcagcttccagagacacatcagaaagagaagaagcaccgacttcgagttcgacccccacagcaacttctaccacttcaccagacccctgatcaagccccagtgcgccgcctacggcaaggccctggacctgagcctgaacagcatcttcttcatcggccccaaccagttcgagaacctgcccgacatcgcctgcctgaacctgagcgccaacagcaacgcccaggtgctgagcggcaccgagttcagcgccatcccccacgtgaagtacctggacctgaccaacaacagactggacttcgacaacgccagcgccctgaccgagctgagcgacctggaggtgctggacctgagctacaacagccactacttcagaatcgccggcgtgacccaccacctggagttcatccagaacttcaccaacctgaaggtgctgaacctgagccacaacaacatctacaccctgaccgacaagtacaacctggagagcaagagcctggtggagctggtgttcagcggcaacagactggacatcctgtggaacgacgacgacaacagatacatcagcatcttcaagggcctgaagaacctgaccagactggacctgagcctgaacagactgaagcacatccccaacgaggccttcctgaacctgcccgccagcctgaccgagctgcacatcaacgacaacatgctgaagttcttcaactggaccctgctgcagcagttccccagactggagctgctggacctgagaggcaacaagctgctgttcctgaccgacagcctgagcgacttcaccagcagcctgagaaccctgctgctgagccacaacagaatcagccacctgcccagcggcttcctgagcgaggtgagcagcctgaagcacctggacctgagcagcaacctgctgaagaccatcaacaagagcgccctggagaccaagaccaccaccaagctgagcatgctggagctgcacggcaaccccttcgagtgcacctgcgacatcggcgacttcagaagatggatggacgagcacctgaacgtgaagatccccagactggtggacgtgatctgcgccagccccggcgaccagagaggcaagagcatcgtgagcctggagctgaccacctgcgtgagcgacgtgaccgccgtgatcctgttcttcttcaccttcttcatcaccaccatggtgatgctggccgccctggcccaccacctgttctactgggacgtgtggttcatctacaacgtgtgcctggccaaggtgaagggctacagaagcctgagcaccagccagaccttctacgacgcctacatcagctacgacaccaaggacgccagcgtgaccgactgggtgatcaacgagctgagataccacctggaggagagcagagacaagaacgtgctgctgtgcctggaggagagagactgggaccccggcctggccatcatcgacaacctgatgcagagcatcaaccagagcaagaagaccgtgttcgtgctgaccaagaagtacgccaagagctggaacttcaagaccgccttctacctggccctgcagagactgatggacgagaacatggacgtgatcatcttcatcctgctggagcccgtgctgcagcacagccagtacctgagactgagacagagaatctgcaagagcagcatcctgcagtggcccgacaaccccaaggccgagggcctgttctggcagaccctgagaaacgtggtgctgaccgagaacgacagcagatacaacaacatgtacgtggacagcatcaagcagtactag

SEQ ID NO: 102633 - DNA, 3099 bp, synthetic construct
  misc_feature 1..3099: note = Description of Artificial Sequence: Synthetic coding sequence
  source 1..3099: mol_type = other DNA
atgggcttctgcagaagcgccctgcaccccctgagcctgctggtgcaggccatcatgctggccatgaccctggccctgggcaccctgcccgccttcctgccctgcgagctgcagccccacggcctggtgaactgcaactggctgttcctgaagagcgtgccccacttcagcatggccgcccccagaggcaacgtgaccagcctgagcctgagcagcaacagaatccaccacctgcacgacagcgacttcgcccacctgcccagcctgagacacctgaacctgaagtggaactgcccccccgtgggcctgagccccatgcacttcccctgccacatgaccatcgagcccagcaccttcctggccgtgcccaccctggaggagctgaacctgagctacaacaacatcatgaccgtgcccgccctgcccaagagcctgatcagcctgagcctgagccacaccaacatcctgatgctggacagcgccagcctggccggcctgcacgccctgagattcctgttcatggacggcaactgctactacaagaacccctgcagacaggccctggaggtggcccccggcgccctgctgggcctgggcaacctgacccacctgagcctgaagtacaacaacctgaccgtggtgcccagaaacctgcccagcagcctggagtacctgctgctgagctacaacagaatcgtgaagctggcccccgaggacctggccaacctgaccgccctgagagtgctggacgtgggcggcaactgcagaagatgcgaccacgcccccaacccctgcatggagtgccccagacacttcccccagctgcaccccgacaccttcagccacctgagcagactggagggcctggtgctgaaggacagcagcctgagctggctgaacgccagctggttcagaggcctgggcaacctgagagtgctggacctgagcgagaacttcctgtacaagtgcatcaccaagaccaaggccttccagggcctgacccagctgagaaagctgaacctgagcttcaactaccagaagagagtgagcttcgcccacctgagcctggcccccagcttcggcagcctggtggccctgaaggagctggacatgcacggcatcttcttcagaagcctggacgagaccaccctgagacccctggccagactgcccatgctgcagaccctgagactgcagatgaacttcatcaaccaggcccagctgggcatcttcagagccttccccggcctgagatacgtggacctgagcgacaacagaatcagcggcgccagcgagctgaccgccaccatgggcgaggccgacggcggcgagaaggtgtggctgcagcccggcgacctggcccccgcccccgtggacacccccagcagcgaggacttcagacccaactgcagcaccctgaacttcaccctggacctgagcagaaacaacctggtgaccgtgcagcccgagatgttcgcccagctgagccacctgcagtgcctgagactgagccacaactgcatcagccaggccgtgaacggcagccagttcctgcccctgaccggcctgcaggtgctggacctgagccacaacaagctggacctgtaccacgagcacagcttcaccgagctgcccagactggaggccctggacctgagctacaacagccagcccttcggcatgcagggcgtgggccacaacttcagcttcgtggcccacctgagaaccctgagacacctgagcctggcccacaacaacatccacagccaggtgagccagcagctgtgcagcaccagcctgagagccctggacttcagcggcaacgccctgggccacatgtgggccgagggcgacctgtacctgcacttcttccagggcctgagcggcctgatctggctggacctgagccagaacagactgcacaccctgctgccccagaccctgagaaacctgcccaagagcctgcaggtgctgagactgagagacaactacctggccttcttcaagtggtggagcctgcacttcctgcccaagctggaggtgctggacctggccggcaaccagctgaaggccctgaccaacggcagcctgcccgccggcaccagactgagaagactggacgtgagctgcaacagcatcagcttcgtggcccccggcttcttcagcaaggccaaggagctgagagagctgaacctgagcgccaacgccctgaagaccgtggaccacagctggttcggccccctggccagcgccctgcagatcctggacgtgagcgccaaccccctgcactgcgcctgcggcgccgccttcatggacttcctgctggaggtgcaggccgccgtgcccggcctgcccagcagagtgaagtgcggcagccccggccagctgcagggcctgagcatcttcgcccaggacctgagactgtgcctggacgaggccctgagctgggactgcttcgccctgagcctgctggccgtggccctgggcctgggcgtgcccatgctgcaccacctgtgcggctgggacctgtggtactgcttccacctgtgcctggcctggctgccctggagaggcagacagagcggcagagacgaggacgccctgccctacgacgccttcgtggtgttcgacaagacccagagcgccgtggccgactgggtgtacaacgagctgagaggccagctggaggagtgcagaggcagatgggccctgagactgtgcctggaggagagagactggctgcccggcaagaccctgttcgagaacctgtgggccagcgtgtacggcagcagaaagaccctgttcgtgctggcccacaccgacagagtgagcggcctgctgagagccagcttcctgctggcccagcagagactgctggaggacagaaaggacgtggtggtgctggtgatcctgagccccgacggcagaagaagcagatacgtgagactgagacagagactgtgcagacagagcgtgctgctgtggccccaccagcccagcggccagagaagcttctgggcccagctgggcatggccctgaccagagacaaccaccacttctacaacagaaacttctgccagggccccaccgccgagtag

SEQ ID NO: 102634 - DNA, 2139 bp, synthetic construct
  misc_feature 1..2139: note = Description of Artificial Sequence: Synthetic coding sequence
  source 1..2139: mol_type = other DNA
atggcctgcaccggccccagcctgcccagcgccttcgacatcctgggcgccgccggccaggacaagctgctgtacctgaagcacaagctgaagacccccagacccggctgccagggccaggacctgctgcacgccatggtgctgctgaagctgggccaggagaccgaggccagaatcagcctggaggccctgaaggccgacgccgtggccagactggtggccagacagtgggccggcgtggacagcaccgaggaccccgaggagccccccgacgtgagctgggccgtggccagactgtaccacctgctggccgaggagaagctgtgccccgccagcctgagagacgtggcctaccaggaggccgtgagaaccctgagcagcagagacgaccacagactgggcgagctgcaggacgaggccagaaacagatgcggctgggacatcgccggcgaccccggcagcatcagaaccctgcagagcaacctgggctgcctgccccccagcagcgccctgcccagcggcaccagaagcctgcccagacccatcgacggcgtgagcgactggagccagggctgcagcctgagaagcaccggcagccccgccagcctggccagcaacctggagatcagccagagccccaccatgcccttcctgagcctgcacagaagcccccacggccccagcaagctgtgcgacgacccccaggccagcctggtgcccgagcccgtgcccggcggctgccaggagcccgaggagatgagctggccccccagcggcgagatcgccagcccccccgagctgcccagcagccccccccccggcctgcccgaggtggcccccgacgccaccagcaccggcctgcccgacacccccgccgcccccgagaccagcaccaactaccccgtggagtgcaccgagggcagcgccggcccccagagcctgcccctgcccatcctggagcccgtgaagaacccctgcagcgtgaaggaccagacccccctgcagctgagcgtggaggacaccaccagccccaacaccaagccctgcccccccacccccaccacccccgagaccagcccccccccccccccccccccccccagcagcaccccctgcagcgcccacctgacccccagcagcctgttccccagcagcctggagagcagcagcgagcagaagttctacaacttcgtgatcctgcacgccagagccgacgagcacatcgccctgagagtgagagagaagctggaggccctgggcgtgcccgacggcgccaccttctgcgaggacttccaggtgcccggcagaggcgagctgagctgcctgcaggacgccatcgaccacagcgccttcatcatcctgctgctgaccagcaacttcgactgcagactgagcctgcaccaggtgaaccaggccatgatgagcaacctgaccagacagggcagccccgactgcgtgatccccttcctgcccctggagagcagccccgcccagctgagcagcgacaccgccagcctgctgagcggcctggtgagactggacgagcacagccagatcttcgccagaaaggtggccaacaccttcaagccccacagactgcaggccagaaaggccatgtggagaaaggagcaggacaccagagccctgagagagcagagccagcacctggacggcgagagaatgcaggccgccgccctgaacgccgcctacagcgcctacctgcagagctacctgagctaccaggcccagatggagcagctgcaggtggccttcggcagccacatgagcttcggcaccggcgccccctacggcgccagaatgcccttcggcggccaggtgcccctgggcgcccccccccccttccccacctggcccggctgcccccagcccccccccctgcacgcctggcaggccggcaccccccccccccccagcccccagcccgccgccttcccccagagcctgcccttcccccagagccccgccttccccaccgccagccccgcccccccccagagccccggcctgcagcccctgatcatccaccacgcccagatggtgcagctgggcctgaacaaccacatgtggaaccagagaggcagccaggcccccgaggacaagacccaggaggccgagtag

SEQ ID NO: 102635 - DNA, 3042 bp, synthetic construct
  misc_feature 1..3042: note = Description of Artificial Sequence: Synthetic coding sequence
  source 1..3042: mol_type = other DNA
atgggcctgggcaccctgagccccagaatgctggtgtggctggtggccagcggcatcgtgttctacggcgagctgtgggtgtgcgccggcctggactacgactacaccttcgacggcaacgaggaggacaagaccgagaccatcgactacaaggacccctgcaaggccgccgtgttctggggcgacatcgccctggacgacgaggacctgaacatcttccagatcgacagaaccatcgacctgacccagaaccccttcggcaacctgggccacaccaccggcggcctgggcgaccacgccatgagcaagaagagaggcgccctgtaccagctgatcgacagaatcagaagaatcggcttcggcctggagcagaacaacaccgtgaagggcaaggtgcccctgcagttcagcggccagaacgagaagaacagagtgcccagagccgccaccagcagaaccgagagaatctggcccggcggcgtgatcccctacgtgatcggcggcaacttcaccggcagccagagagccatgttcaagcaggccatgagacactgggagaagcacacctgcgtgaccttcatcgagagaagcgacgaggagagctacatcgtgttcacctacagaccctgcggctgctgcagctacgtgggcagaagaggcaacggcccccaggccatcagcatcggcaagaactgcgacaagttcggcatcgtggtgcacgagctgggccacgtgatcggcttctggcacgagcacaccagacccgacagagacaaccacgtgaccatcatcagagagaacatccagcccggccaggagtacaacttcctgaagatggagcccggcgaggtgaacagcctgggcgagagatacgacttcgacagcatcatgcactacgccagaaacaccttcagcagaggcatgttcctggacaccatcctgcccagcagagacgacaacggcatcagacccgccatcggccagagaaccagactgagcaagggcgacatcgcccaggccagaaagctgtacagatgccccgcctgcggcgagaccctgcaggagagcaacggcaacctgagcagccccggcttccccaacggctaccccagctacacccactgcatctggagagtgagcgtgacccccggcgagaagatcgtgctgaacttcaccaccatggacctgtacaagagcagcctgtgctggtacgactacatcgaggtgagagacggctactggagaaagagccccctgctgggcagattctgcggcgacaagctgcccgaggtgctgaccagcaccgacagcagaatgtggatcgagttcagaagcagcagcaactgggtgggcaagggcttcgccgccgtgtacgaggccatctgcggcggcgagatcagaaagaacgagggccagatccagagccccaactaccccgacgactacagacccatgaaggagtgcgtgtggaagatcaccgtgagcgagagctaccacgtgggcctgaccttccagagcttcgagatcgagagacacgacaactgcgcctacgactacctggaggtgagagacggcaccagcgagaacagccccctgatcggcagattctgcggctacgacaagcccgaggacatcagaagcaccagcaacaccctgtggatgaagttcgtgagcgacggcaccgtgaacaaggccggcttcgccgccaacttcttcaaggaggaggacgagtgcgccaagcccgacagaggcggctgcgagcagagatgcctgaacaccctgggcagctaccagtgcgcctgcgagcccggctacgagctgggccccgacagaagaagctgcgaggccgcctgcggcggcctgctgaccaagctgaacggcaccatcaccacccccggctggcccaaggagtacccccccaacaagaactgcgtgtggcaggtggtggcccccacccagtacagaatcagcgtgaagttcgagttcttcgagctggagggcaacgaggtgtgcaagtacgactacgtggagatctggagcggcctgagcagcgagagcaagctgcacggcaagttctgcggcgccgaggtgcccgaggtgatcaccagccagttcaacaacatgagaatcgagttcaagagcgacaacaccgtgagcaagaagggcttcaaggcccacttcttcagcgacaaggacgagtgcagcaaggacaacggcggctgccagcacgagtgcgtgaacaccatgggcagctacatgtgccagtgcagaaacggcttcgtgctgcacgacaacaagcacgactgcaaggaggccgagtgcgagcagaagatccacagccccagcggcctgatcaccagccccaactggcccgacaagtaccccagcagaaaggagtgcacctgggagatcagcgccacccccggccacagaatcaagctggccttcagcgagttcgagatcgagcagcaccaggagtgcgcctacgaccacctggaggtgttcgacggcgagaccgagaagagccccatcctgggcagactgtgcggcaacaagatccccgaccccctggtggccaccggcaacaagatgttcgtgagattcgtgagcgacgccagcgtgcagagaaagggcttccaggccacccacagcaccgagtgcggcggcagactgaaggccgagagcaagcccagagacctgtacagccacgcccagttcggcgacaacaactaccccggccaggtggactgcgagtggctgctggtgagcgagagaggcagcagactggagctgagcttccagaccttcgaggtggaggaggaggccgactgcggctacgactacgtggagctgttcgacggcctggacagcaccgccgtgggcctgggcagattctgcggcagcggcccccccgaggagatctacagcatcggcgacagcgtgctgatccacttccacaccgacgacaccatcaacaagaagggcttccacatcagatacaagagcatcagataccccgacaccacccacaccaagaagtag

SEQ ID NO: 102636 - DNA, 1179 bp, synthetic construct
  misc_feature 1..1179: note = Description of Artificial Sequence: Synthetic coding sequence
  source 1..1179: mol_type = other DNA
atgggcctgggcaccctgagccccagaatgctggtgtggctggtggccagcggcatcgtgttctacggcgagctgtgggtgtgcgccggcctggactacgactacaccttcgacggcaacgaggaggacaagaccgagaccatcgactacaaggacccctgcaaggccgccgtgttctggggcgacatcgccctggacgacgaggacctgaacatcttccagatcgacagaaccatcgacctgacccagaaccccttcggcaacctgggccacaccaccggcggcctgggcgaccacgccatgagcaagaagagaggcgccctgtaccagctgatcgacagaatcagaagaatcggcttcggcctggagcagaacaacaccgtgaagggcaaggtgcccctgcagttcagcggccagaacgagaagaacagagtgcccagagccgccaccagcagaaccgagagaatctggcccggcggcgtgatcccctacgtgatcggcggcaacttcaccggcagccagagagccatgttcaagcaggccatgagacactgggagaagcacacctgcgtgaccttcatcgagagaagcgacgaggagagctacatcgtgttcacctacagaccctgcggctgctgcagctacgtgggcagaagaggcaacggcccccaggccatcagcatcggcaagaactgcgacaagttcggcatcgtggtgcacgagctgggccacgtgatcggcttctggcacgagcacaccagacccgacagagacaaccacgtgaccatcatcagagagaacatccagcccggccaggagtacaacttcctgaagatggagcccggcgaggtgaacagcctgggcgagagatacgacttcgacagcatcatgcactacgccagaaacaccttcagcagaggcatgttcctggacaccatcctgcccagcagagacgacaacggcatcagacccgccatcggccagagaaccagactgagcaagggcgacatcgcccaggccagaaagctgtacagatgccccgcctgcggcgagaccctgcaggagagcaacggcaacctgagcagccccggcttccccaacggctaccccagctacacccactgcatctggagagtgagcgtgacccccggcgagaaggtggtgttcagcctgtgctag

SEQ ID NO: 102637 - DNA, 3048 bp, synthetic construct
  misc_feature 1..3048: note = Description of Artificial Sequence: Synthetic coding sequence
  source 1..3048: mol_type = other DNA
atgcccagagccaccgccctgggcgccctggtgagcctgctgctgctgctgcccctgcccagaggcgccggcggcctgggcgagagacccgacgccaccgccgactacagcgagctggacggcgaggagggcaccgagcagcagctggagcactaccacgacccctgcaaggccgccgtgttctggggcgacatcgccctggacgaggacgacctgaagctgttccacatcgacaaggccagagactggaccaagcagaccgtgggcgccaccggccacagcaccggcggcctggaggagcaggccagcgagagcagccccgacaccaccgccatggacaccggcaccaaggaggccggcaaggacggcagagagaacaccaccctgctgcacagccccggcaccctgcacgccgccgccaagaccttcagccccagagtgagaagagccaccaccagcagaaccgagagaatctggcccggcggcgtgatcccctacgtgatcggcggcaacttcaccggcagccagagagccatcttcaagcaggccatgagacactgggagaagcacacctgcgtgaccttcatcgagagaaccgacgaggagagcttcatcgtgttcagctacagaacctgcggctgctgcagctacgtgggcagaagaggcggcggcccccaggccatcagcatcggcaagaactgcgacaagttcggcatcgtggcccacgagctgggccacgtggtgggcttctggcacgagcacaccagacccgacagagaccagcacgtgaccatcatcagagagaacatccagcccggccaggagtacaacttcctgaagatggaggccggcgaggtgagcagcctgggcgagacctacgacttcgacagcatcatgcactacgccagaaacaccttcagcagaggcgtgttcctggacaccatcctgcccagacaggacgacaacggcgtgagacccaccatcggccagagagtgagactgagccagggcgacatcgcccaggccagaaagctgtacaagtgccccgcctgcggcgagaccctgcaggacaccaccggcaacttcagcgcccccggcttccccaacggctaccccagctacagccactgcgtgtggagaatcagcgtgacccccggcgagaagatcgtgctgaacttcaccagcatggacctgttcaagagcagactgtgctggtacgactacgtggaggtgagagacggctactggagaaaggcccccctgctgggcagattctgcggcgacaagatccccgagcccctggtgagcaccgacagcagactgtgggtggagttcagaagcagcagcaacatcctgggcaagggcttcttcgccgcctacgaggccacctgcggcggcgacatgaacaaggacgccggccagatccagagccccaactaccccgacgactacagacccagcaaggagtgcgtgtggagaatcaccgtgagcgagggcttccacgtgggcctgaccttccaggccttcgagatcgagagacacgacagctgcgcctacgactacctggaggtgagagacggccccaccgaggagagcgccctgatcggccacttctgcggctacgagaagcccgaggacgtgaagagcagcagcaacagactgtggatgaagttcgtgagcgacggcagcatcaacaaggccggcttcgccgccaacttcttcaaggaggtggacgagtgcagctggcccgaccacggcggctgcgagcacagatgcgtgaacaccctgggcagctacaagtgcgcctgcgaccccggctacgagctggccgccgacaagaagatgtgcgaggtggcctgcggcggcttcatcaccaagctgaacggcaccatcaccagccccggctggcccaaggagtaccccaccaacaagaactgcgtgtggcaggtggtggcccccgcccagtacagaatcagcctgcagttcgaggtgttcgagctggagggcaacgacgtgtgcaagtacgacttcgtggaggtgagaagcggcctgagccccgacgccaagctgcacggcagattctgcggcagcgagacccccgaggtgatcaccagccagagcaacaacatgagagtggagttcaagagcgacaacaccgtgagcaagagaggcttcagagcccacttcttcagcgacaaggacgagtgcgccaaggacaacggcggctgccagcacgagtgcgtgaacaccttcggcagctacctgtgcagatgcagaaacggctactggctgcacgagaacggccacgactgcaaggaggccggctgcgcccacaagatcagcagcgtggagggcaccctggccagccccaactggcccgacaagtaccccagcagaagagagtgcacctggaacatcagcagcaccgccggccacagagtgaagctgaccttcaacgagttcgagatcgagcagcaccaggagtgcgcctacgaccacctggagatgtacgacggccccgacagcctggcccccatcctgggcagattctgcggcagcaagaagcccgaccccaccgtggccagcggcagcagcatgttcctgagattctacagcgacgccagcgtgcagagaaagggcttccaggccgtgcacagcaccgagtgcggcggcagactgaaggccgaggtgcagaccaaggagctgtacagccacgcccagttcggcgacaacaactaccccagcgaggccagatgcgactgggtgatcgtggccgaggacggctacggcgtggagctgaccttcagaaccttcgaggtggaggaggaggccgactgcggctacgactacatggaggcctacgacggctacgacagcagcgcccccagactgggcagattctgcggcagcggccccctggaggagatctacagcgccggcgacagcctgatgatcagattcagaaccgacgacaccatcaacaagaagggcttccacgccagatacaccagcaccaagttccaggacgccctgcacatgaagaagtag

SEQ ID NO: 102638 - DNA, 2298 bp, synthetic construct
  misc_feature 1..2298: note = Description of Artificial Sequence: Synthetic coding sequence
  source 1..2298: mol_type = other DNA
atgagcggcgaccacctgcacaacgacagccagatcgaggccgacttcagactgaacgacagccacaagcacaaggacaagcacaaggacagagagcacagacacaaggagcacaagaaggagaaggacagagagaagagcaagcacagcaacagcgagcacaaggacagcgagaagaagcacaaggagaaggagaagaccaagcacaaggacggcagcagcgagaagcacaaggacaagcacaaggacagagacaaggagaagagaaaggaggagaaggtgagagccagcggcgacgccaagatcaagaaggagaaggagaacggcttcagcagccccccccagatcaaggacgagcccgaggacgacggctacttcgtgccccccaaggaggacatcaagcccctgaagagacccagagacgaggacgacgccgactacaagcccaagaagatcaagaccgaggacaccaagaaggagaagaagagaaagctggaggaggaggaggacggcaagctgaagaagcccaagaacaaggacaaggacaagaaggtgcccgagcccgacaacaagaagaagaagcccaagaaggaggaggagcagaagtggaagtggtgggaggaggagagataccccgagggcatcaagtggaagttcctggagcacaagggccccgtgttcgcccccccctacgagcccctgcccgagaacgtgaagttctactacgacggcaaggtgatgaagctgagccccaaggccgaggaggtggccaccttcttcgccaagatgctggaccacgagtacaccaccaaggagatcttcagaaagaacttcttcaaggactggagaaaggagatgaccaacgaggagaagaacatcatcaccaacctgagcaagtgcgacttcacccagatgagccagtacttcaaggcccagaccgaggccagaaagcagatgagcaaggaggagaagctgaagatcaaggaggagaacgagaagctgctgaaggagtacggcttctgcatcatggacaaccacaaggagagaatcgccaacttcaagatcgagccccccggcctgttcagaggcagaggcaaccaccccaagatgggcatgctgaagagaagaatcatgcccgaggacatcatcatcaactgcagcaaggacgccaaggtgcccagccccccccccggccacaagtggaaggaggtgagacacgacaacaaggtgacctggctggtgagctggaccgagaacatccagggcagcatcaagtacatcatgctgaaccccagcagcagaatcaagggcgagaaggactggcagaagtacgagaccgccagaagactgaagaagtgcgtggacaagatcagaaaccagtacagagaggactggaagagcaaggagatgaaggtgagacagagagccgtggccctgtacttcatcgacaagctggccctgagagccggcaacgagaaggaggagggcgagaccgccgacaccgtgggctgctgcagcctgagagtggagcacatcaacctgcaccccgagctggacggccaggagtacgtggtggagttcgacttcctgggcaaggacagcatcagatactacaacaaggtgcccgtggagaagagagtgttcaagaacctgcagctgttcatggagaacaagcagcccgaggacgacctgttcgacagactgaacaccggcatcctgaacaagcacctgcaggacctgatggagggcctgaccgccaaggtgttcagaacctacaacgccagcatcaccctgcagcagcagctgaaggagctgaccgcccccgacgagaacatccccgccaagatcctgagctacaacagagccaacagagccgtggccatcctgtgcaaccaccagagagccccccccaagaccttcgagaagagcatgatgaacctgcagaccaagatcgacgccaagaaggagcagctggccgacgccagaagagacctgaagagcgccaaggccgacgccaaggtgatgaaggacgccaagaccaagaaggtggtggagagcaagaagaaggccgtgcagagactggaggagcagctgatgaagctggaggtgcaggccaccgacagagaggagaacaagcagatcgccctgggcaccagcaagctgaactacctggaccccagaatcaccgtggcctggtgcaagaagtggggcgtgcccatcgagaagatctacaacaagacccagagagagaagttcgcctgggccatcgacatggccgacgaggactacgagttctag

SEQ ID NO: 102639 - DNA, 1806 bp, synthetic construct
  misc_feature 1..1806: note = Description of Artificial Sequence: Synthetic coding sequence
  source 1..1806: mol_type = other DNA
atgagagtggtgagactgctgagactgagagccgccctgaccctgctgggcgaggtgcccagaagacccgccagcagaggcgtgcccggcagcagaagaacccagaagggcagcggcgccagatgggagaaggagaagcacgaggacggcgtgaagtggagacagctggagcacaagggcccctacttcgcccccccctacgagcccctgcccgacggcgtgagattcttctacgagggcagacccgtgagactgagcgtggccgccgaggaggtggccaccttctacggcagaatgctggaccacgagtacaccaccaaggaggtgttcagaaagaacttcttcaacgactggagaaaggagatggccgtggaggagagagaggtgatcaagagcctggacaagtgcgacttcaccgagatccacagatacttcgtggacaaggccgccgccagaaaggtgctgagcagagaggagaagcagaagctgaaggaggaggccgagaagctgcagcaggagttcggctactgcatcctggacggccaccaggagaagatcggcaacttcaagatcgagccccccggcctgttcagaggcagaggcgaccaccccaagatgggcatgctgaagagaagaatcacccccgaggacgtggtgatcaactgcagcagagacagcaagatccccgagccccccgccggccaccagtggaaggaggtgagaagcgacaacaccgtgacctggctggccgcctggaccgagagcgtgcagaacagcatcaagtacatcatgctgaacccctgcagcaagctgaagggcgagaccgcctggcagaagttcgagaccgccagaagactgagaggcttcgtggacgagatcagaagccagtacagagccgactggaagagcagagagatgaagaccagacagagagccgtggccctgtacttcatcgacaagctggccctgagagccggcaacgagaaggaggacggcgaggccgccgacaccgtgggctgctgcagcctgagagtggagcacgtgcagctgcaccccgaggccgacggctgccagcacgtggtggagttcgacttcctgggcaaggactgcatcagatactacaacagagtgcccgtggagaagcccgtgtacaagaacctgcagctgttcatggagaacaaggaccccagagacgacctgttcgacagactgaccaccaccagcctgaacaagcacctgcaggagctgatggacggcctgaccgccaaggtgttcagaacctacaacgccagcatcaccctgcaggagcagctgagagccctgaccagagccgaggacagcatcgccgccaagatcctgagctacaacagagccaacagagtggtggccatcctgtgcaaccaccagagagccacccccagcaccttcgagaagagcatgcagaacctgcagaccaagatccaggccaagaaggagcaggtggccgaggccagagccgagctgagaagagccagagccgagcacaaggcccagggcgacggcaagagcagaagcgtgctggagaagaagagaagactgctggagaagctgcaggagcagctggcccagctgagcgtgcaggccaccgacaaggaggagaacaagcaggtggccctgggcaccagcaagctgaactacctggaccccagaatcagcatcgcctggtgcaagagattcagagtgcccgtggagaagatctacagcaagacccagagagagagattcgcctgggccctggccatggccggcgaggacttcgagttctag

SEQ ID NO: 102640 - DNA, 1512 bp, synthetic construct
  misc_feature 1..1512: note = Description of Artificial Sequence: Synthetic coding sequence
  source 1..1512: mol_type = other DNA
atgctggaccacgagtacaccaccaaggaggtgttcagaaagaacttcttcaacgactggagaaaggagatggccgtggaggagagagaggtgatcaagagcctggacaagtgcgacttcaccgagatccacagatacttcgtggacaaggccgccgccagaaaggtgctgagcagagaggagaagcagaagctgaaggaggaggccgagaagctgcagcaggagttcggctactgcatcctggacggccaccaggagaagatcggcaacttcaagatcgagccccccggcctgttcagaggcagaggcgaccaccccaagatgggcatgctgaagagaagaatcacccccgaggacgtggtgatcaactgcagcagagacagcaagatccccgagccccccgccggccaccagtggaaggaggtgagaagcgacaacaccgtgacctggctggccgcctggaccgagagcgtgcagaacagcatcaagtacatcatgctgaacccctgcagcaagctgaagggcgagaccgcctggcagaagttcgagaccgccagaagactgagaggcttcgtggacgagatcagaagccagtacagagccgactggaagagcagagagatgaagaccagacagagagccgtggccctgtacttcatcgacaagctggccctgagagccggcaacgagaaggaggacggcgaggccgccgacaccgtgggctgctgcagcctgagagtggagcacgtgcagctgcaccccgaggccgacggctgccagcacgtggtggagttcgacttcctgggcaaggactgcatcagatactacaacagagtgcccgtggagaagcccgtgtacaagaacctgcagctgttcatggagaacaaggaccccagagacgacctgttcgacagactgaccaccaccagcctgaacaagcacctgcaggagctgatggacggcctgaccgccaaggtgttcagaacctacaacgccagcatcaccctgcaggagcagctgagagccctgaccagagccgaggacagcatcgccgccaagatcctgagctacaacagagccaacagagtggtggccatcctgtgcaaccaccagagagccacccccagcaccttcgagaagagcatgcagaacctgcagaccaagatccaggccaagaaggagcaggtggccgaggccagagccgagctgagaagagccagagccgagcacaaggcccagggcgacggcaagagcagaagcgtgctggagaagaagagaagactgctggagaagctgcaggagcagctggcccagctgagcgtgcaggccaccgacaaggaggagaacaagcaggtggccctgggcaccagcaagctgaactacctggaccccagaatcagcatcgcctggtgcaagagattcagagtgcccgtggagaagatctacagcaagacccagagagagagattcgcctgggccctggccatggccggcgaggacttcgagttctag

SEQ ID NO: 102641 - DNA, 1512 bp, synthetic construct; identical to SEQ ID NO: 102640
  misc_feature 1..1512: note = Description of Artificial Sequence: Synthetic coding sequence
  source 1..1512: mol_type = other DNA

SEQ ID NO: 102642 - DNA, 1512 bp, synthetic construct; identical to SEQ ID NO: 102640
  misc_feature 1..1512: note = Description of Artificial Sequence: Synthetic coding sequence
  source 1..1512: mol_type = other DNA

SEQ ID NO: 102643 - DNA, 4569 bp, synthetic construct
  misc_feature 1..4569: note = Description of Artificial Sequence: Synthetic coding sequence
  source 1..4569: mol_type = other DNA
atgagcagaaacgacaaggagcccttcttcgtgaagttcctgaagagcagcgacaacagcaagtgcttcttcaaggccctggagagcatcaaggagttccagagcgaggagtacctgcagatcatcaccgaggaggaggccctgaagatcaaggagaacgacagaagcctgtacatctgcgaccccttcagcggcgtggtgttcgaccacctgaagaagctgggctgcagaatcgtgggcccccaggtggtgatcttctgcatgcaccaccagagatgcgtgcccagagccgagcaccccgtgtacaacatggtgatgagcgacgtgaccatcagctgcaccagcctggagaaggagaagagagaggaggtgcacaagtacgtgcagatgatgggcggcagagtgtacagagacctgaacgtgagcgtgacccacctgatcgccggcgaggtgggcagcaagaagtacctggtggccgccaacctgaagaagcccatcctgctgcccagctggatcaagaccctgtgggagaagagccaggagaagaagatcaccagatacaccgacatcaacatggaggacttcaagtgccccatcttcctgggctgcatcatctgcgtgaccggcctgtgcggcctggacagaaaggaggtgcagcagctgaccgtgaagcacggcggccagtacatgggccagctgaagatgaacgagtgcacccacctgatcgtgcaggagcccaagggccagaagtacgagtgcgccaagagatggaacgtgcactgcgtgaccacccagtggttcttcgacagcatcgagaagggcttctgccaggacgagagcatctacaagaccgagcccagacccgaggccaagaccatgcccaacagcagcacccccaccagccagatcaacaccatcgacagcagaaccctgagcgacgtgagcaacatcagcaacatcaacgccagctgcgtgagcgagagcatctgcaacagcctgaacagcaagctggagcccaccctggagaacctggagaacctggacgtgagcgccttccaggcccccgaggacctgctggacggctgcagaatctacctgtgcggcttcagcggcagaaagctggacaagctgagaagactgatcaacagcggcggcggcgtgagattcaaccagctgaacgaggacgtgacccacgtgatcgtgggcgactacgacgacgagctgaagcagttctggaacaagagcgcccacagaccccacgtggtgggcgccaagtggctgctggagtgcttcagcaagggctacatgctgagcgaggagccctacatccacgccaactaccagcccgtggagatccccgtgagccacaagcccgagagcaaggccgccctgctgaagaagaagaacagcagcttcagcaagaaggacttcgcccccagcgagaagcacgagcaggccgacgaggacctgctgagccagtacgagaacggcagcagcaccgtggtggaggccaagaccagcgaggccagacccttcaacgacagcacccacgccgagcccctgaacgacagcacccacatcagcctgcaggaggagaaccagagcagcgtgagccactgcgtgcccgacgtgagcaccatcaccgaggagggcctgttcagccagaagagcttcctggtgctgggcttcagcaacgagaacgagagcaacatcgccaacatcatcaaggagaacgccggcaagatcatgagcctgctgagcagaaccgtggccgactacgccgtggtgcccctgctgggctgcgaggtggaggccaccgtgggcgaggtggtgaccaacacctggctggtgacctgcatcgactaccagaccctgttcgaccccaagagcaaccccctgttcacccccgtgcccgtgatgaccggcatgacccccctggaggactgcgtgatcagcttcagccagtgcgccggcgccgagaaggagagcctgaccttcctggccaacctgctgggcgccagcgtgcaggagtacttcgtgagaaagagcaacgccaagaagggcatgttcgccagcacccacctgatcctgaaggagagaggcggcagcaagtacgaggccgccaagaagtggaacctgcccgccgtgaccatcgcctggctgctggagaccgccagaaccggcaagagagccgacgagagccacttcctgatcgagaacagcaccaaggaggagagaagcctggagaccgagatcaccaacggcatcaacctgaacagcgacaccgccgagcaccccggcaccagactgcagacccacagaaagaccgtggtgacccccctggacatgaacagattccagagcaaggccttcagagccgtggtgagccagcacgccagacaggtggccgccagccccgccgtgggccagcccctgcagaaggagcccagcctgcacctggacacccccagcaagttcctgagcaaggacaagctgttcaagcccagcttcgacgtgaaggacgccctggccgccctggagacccccggcagacccagccagcagaagagaaagcccagcacccccctgagcgaggtgatcgtgaagaacctgcagctggccctggccaacagcagcagaaacgccgtggccctgagcgccagcccccagctgaaggaggcccagagcgagaaggaggaggcccccaagcccctgcacaaggtggtggtgtgcgtgagcaagaagctgagcaagaagcagagcgagctgaacggcatcgccgccagcctgggcgccgactacagatggagcttcgacgagaccgtgacccacttcatctaccagggcagacccaacgacaccaacagagagtacaagagcgtgaaggagagaggcgtgcacatcgtgagcgagcactggctgctggactgcgcccaggagtgcaagcacctgcccgagagcctgtacccccacacctacaaccccaagatgagcctggacatcagcgccgtgcaggacggcagactgtgcaacagcagactgctgagcgccgtgagcagcaccaaggacgacgagcccgaccccctgatcctggaggagaacgacgtggacaacatggccaccaacaacaaggagagcgcccccagcaacggcagcggcaagaacgacagcaagggcgtgctgacccagaccctggagatgagagagaacttccagaagcagctgcaggagatcatgagcgccaccagcatcgtgaagccccagggccagagaaccagcctgagcagaagcggctgcaacagcgccagcagcacccccgacagcaccagaagcgccagaagcggcagaagcagagtgctggaggccctgagacagagcagacagaccgtgcccgacgtgaacaccgagcccagccagaacgagcagatcatctgggacgaccccaccgccagagaggagagagccagactggccagcaacctgcagtggcccagctgccccacccagtacagcgagctgcaggtggacatccagaacctggaggacagccccttccagaagcccctgcacgacagcgagatcgccaagcaggccgtgtgcgaccccggcaacatcagagtgaccgaggcccccaagcaccccatcagcgaggagctggagacccccatcaaggacagccacctgatccccaccccccaggcccccagcatcgccttccccctggccaacccccccgtggccccccaccccagagagaagatcatcaccatcgaggagacccacgaggagctgaagaagcagtacatcttccagctgagcagcctgaacccccaggagagaatcgactactgccacctgatcgagaagctgggcggcctggtgatcgagaagcagtgcttcgaccccacctgcacccacatcgtggtgggccaccccctgagaaacgagaagtacctggccagcgtggccgccggcaagtgggtgctgcacagaagctacctggaggcctgcagaaccgccggccacttcgtgcaggaggaggactacgagtggggcagcagcagcatcctggacgtgctgaccggcatcaacgtgcagcagagaagactggccctggccgccatgagatggagaaagaagatccagcagagacaggagagcggcatcgtggagggcgccttcagcggctggaaggtgatcctgcacgtggaccagagcagagaggccggcttcaagagactgctgcagagcggcggcgccaaggtgctgcccggccacagcgtgcccctgttcaaggaggccacccacctgttcagcgacctgaacaagctgaagcccgacgacagcggcgtgaacatcgccgaggccgccgcccagaacgtgtactgcctgagaaccgagtacatcgccgactacctgatgcaggagagccccccccacgtggagaactactgcctgcccgaggccatcagcttcatccagaacaacaaggagctgggcaccggcctgagccagaagagaaaggcccccaccgagaagaacaagatcaagagacccagagtgcactag

SEQ ID NO: 102644 - DNA, 3138 bp, synthetic construct
  misc_feature 1..3138: note = Description of Artificial Sequence: Synthetic coding sequence
  source 1..3138: mol_type = other DNA
atgggcagccagccccccctgggcagccccctgagcagagaggagggcgaggcccccccccccgcccccgccagcgagggcagaagaagaagcagaagagtgagactgagaggcagctgcagacacagacccagcttcctgggctgcagagagctggccgccagcgcccccgccagacccgcccccgccagcagcgagatcatggccagcgccgccaaggagttcaagatggacaacttcagccccaaggccggcaccagcaagctgcagcagaccgtgcccgccgacgccagccccgacagcaagtgccccatctgcctggacagattcgacaacgtgagctacctggacagatgcctgcacaagttctgcttcagatgcgtgcaggagtggagcaagaacaaggccgagtgccccctgtgcaagcagcccttcgacagcatcttccacagcgtgagagccgaggacgacttcaaggagtacgtgctgagacccagctacaacggcagcttcgtgacccccgacagaagattcagatacagaaccaccctgaccagagagagaaacgccagcgtgtacagccccagcggccccgtgaacagaagaaccaccaccccccccgacagcggcgtgctgttcgagggcctgggcatcagcaccagacccagagacgtggagatcccccagttcatgagacagatcgccgtgagaagacccaccaccgccgacgagagaagcctgagaaagatccaggagcaggacatcatcaacttcagaagaaccctgtacagagccggcgccagagtgagaaacatcgaggacggcggcagatacagagacatcagcgccgagttcttcagaagaaaccccgcctgcctgcacagactggtgccctggctgaagagagagctgaccgtgctgttcggcgcccacggcagcctggtgaacatcgtgcagcacatcatcatgagcaacgtgaccagatacgacctggagagccaggccttcgtgagcgacctgagacccttcctgctgaacagaaccgagcacttcatccacgagttcatcagcttcgccagaagccccttcaacatggccgccttcgaccagcacgccaactacgactgccccgcccccagctacgaggagggcagccacagcgacagcagcgtgatcaccatcagccccgacgaggccgagacccaggagctggacatcaacgtggccaccgtgagccaggccccctgggacgacgagacccccggccccagctacagcagcagcgagcaggtgcacgtgaccatgagcagcctgctgaacaccagcgacagcagcgacgaggagctggtgaccggcggcgccaccagccagatccagggcgtgcagaccaacgacgacctgaacaacgacagcgacgacagcagcgacaactgcgtgatcgtgggcttcgtgaagcccctggccgagagaacccccgagctggtggagctgagcagcgacagcgaggacctgggcagctacgagaagatggagaccgtgaagacccaggagcaggagcagagctacagcagcggcgacagcgacgtgagcagatgcagcagcccccacagcgtgctgggcaaggacgagcagatcaacaagggccactgcgacagcagcaccagaatcaagagcaagaaggaggagaagagaagcaccagcctgagcagccccagaaacctgaacagcagcgtgagaggcgacagagtgtacagcccctacaaccacagacacagaaagagaggcagaagcagaagcagcgacagcagaagccagagcagaagcggccacgaccagaagaaccacagaaagcaccacggcaagaagagaatgaagagcaagagaagcagaagcagagagagcagcagacccagaggcagaagagacaagaagagaagcagaaccagagacagcagctggagcagaagaagccagaccctgagcctgagcagcgagagcaccagcagaagcagaagcagaagcagcgaccacggcaagagaagaagcagaagcagaaacagagacagatactacctgagaaacaactacggcagcagatacaagtgggagtacacctactacagcagaaacaaggacagagacggctacgagagcagctacagaagaagaaccctgagcagagcccactacagcagacagagcagcagccccgagttcagagtgcagagcttcagcgagagaaccaacgccagaaagaagaacaaccacagcgagagaaagtactactactacgagagacacagaagcagaagcctgagcagcaacagaagcagaaccgccagcaccggcaccgacagagtgagaaacgagaagcccggcggcaagagaaagtacaagaccagacacctggagggcaccaacgaggtggcccagcccagcagagagttcgccagcaaggccaaggacagccactaccagaagagcagcagcaagctggacggcaactacaagaacgagagcgacaccttcagcgacagcagaagcagcgacagagagaccaagcacaagagaagaaagagaaagaccagaagcctgagcgtggagatcgtgtacgagggcaaggccaccgacaccaccaagcaccacaagaagaagaagaagaagcacaagaagaagcacaagaagcaccacggcgacaacgccagcagaagccccgtggtgatcaccatcgacagcgacagcgacaaggacagcgaggtgaaggaggacaccgagtgcgacaacagcggcccccaggaccccctgcagaacgagttcctggcccccagcctggagcccttcgagaccaaggacgtggtgaccatcgaggccgagttcggcgtgctggacaaggagtgcgacatcgccaccctgagcaacaacctgaacaacgccaacaagaccgtggacaacatcccccccctggccgccagcgtggagcagaccctggacgtgagagaggagagcaccttcgtgagcgacctggagaaccagcccagcaacatcgtgagcctgcagaccgagcccagcagacagctgcccagccccagaaccagcctgatgagcgtgtgcctgggcagagactgcgacatgagctag

SEQ ID NO: 102645 - DNA, 2943 bp, synthetic construct
  misc_feature 1..2943: note = Description of Artificial Sequence: Synthetic coding sequence
  source 1..2943: mol_type = other DNA
atgatcatggccagcgccgccaaggagttcaagatggacaacttcagccccaaggccggcaccagcaagctgcagcagaccgtgcccgccgacgccagccccgacagcaagtgccccatctgcctggacagattcgacaacgtgagctacctggacagatgcctgcacaagttctgcttcagatgcgtgcaggagtggagcaagaacaaggccgagtgccccctgtgcaagcagcccttcgacagcatcttccacagcgtgagagccgaggacgacttcaaggagtacgtgctgagacccagctacaacggcagcttcgtgacccccgacagaagattcagatacagaaccaccctgaccagagagagaaacgccagcgtgtacagccccagcggccccgtgaacagaagaaccaccaccccccccgacagcggcgtgctgttcgagggcctgggcatcagcaccagacccagagacgtggagatcccccagttcatgagacagatcgccgtgagaagacccaccaccgccgacgagagaagcctgagaaagatccaggagcaggacatcatcaacttcagaagaaccctgtacagagccggcgccagagtgagaaacatcgaggacggcggcagatacagagacatcagcgccgagttcttcagaagaaaccccgcctgcctgcacagactggtgccctggctgaagagagagctgaccgtgctgttcggcgcccacggcagcctggtgaacatcgtgcagcacatcatcatgagcaacgtgaccagatacgacctggagagccaggccttcgtgagcgacctgagacccttcctgctgaacagaaccgagcacttcatccacgagttcatcagcttcgccagaagccccttcaacatggccgccttcgaccagcacgccaactacgactgccccgcccccagctacgaggagggcagccacagcgacagcagcgtgatcaccatcagccccgacgaggccgagacccaggagctggacatcaacgtggccaccgtgagccaggccccctgggacgacgagacccccggccccagctacagcagcagcgagcaggtgcacgtgaccatgagcagcctgctgaacaccagcgacagcagcgacgaggagctggtgaccggcggcgccaccagccagatccagggcgtgcagaccaacgacgacctgaacaacgacagcgacgacagcagcgacaactgcgtgatcgtgggcttcgtgaagcccctggccgagagaacccccgagctggtggagctgagcagcgacagcgaggacctgggcagctacgagaagatggagaccgtgaagacccaggagcaggagcagagctacagcagcggcgacagcgacgtgagcagatgcagcagcccccacagcgtgctgggcaaggacgagcagatcaacaagggccactgcgacagcagcaccagaatcaagagcaagaaggaggagaagagaagcaccagcctgagcagccccagaaacctgaacagcagcgtgagaggcgacagagtgtacagcccctacaaccacagacacagaaagagaggcagaagcagaagcagcgacagcagaagccagagcagaagcggccacgaccagaagaaccacagaaagcaccacggcaagaagagaatgaagagcaagagaagcagaagcagagagagcagcagacccagaggcagaagagacaagaagagaagcagaaccagagacagcagctggagcagaagaagccagaccctgagcctgagcagcgagagcaccagcagaagcagaagcagaagcagcgaccacggcaagagaagaagcagaagcagaaacagagacagatactacctgagaaacaactacggcagcagatacaagtgggagtacacctactacagcagaaacaaggacagagacggctacgagagcagctacagaagaagaaccctgagcagagcccactacagcagacagagcagcagccccgagttcagagtgcagagcttcagcgagagaaccaacgccagaaagaagaacaaccacagcgagagaaagtactactactacgagagacacagaagcagaagcctgagcagcaacagaagcagaaccgccagcaccggcaccgacagagtgagaaacgagaagcccggcggcaagagaaagtacaagaccagacacctggagggcaccaacgaggtggcccagcccagcagagagttcgccagcaaggccaaggacagccactaccagaagagcagcagcaagctggacggcaactacaagaacgagagcgacaccttcagcgacagcagaagcagcgacagagagaccaagcacaagagaagaaagagaaagaccagaagcctgagcgtggagatcgtgtacgagggcaaggccaccgacaccaccaagcaccacaagaagaagaagaagaagcacaagaagaagcacaagaagcaccacggcgacaacgccagcagaagccccgtggtgatcaccatcgacagcgacagcgacaaggacagcgaggtgaaggaggacaccgagtgcgacaacagcggcccccaggaccccctgcagaacgagttcctggcccccagcctggagcccttcgagaccaaggacgtggtgaccatcgaggccgagttcggcgtgctggacaaggagtgcgacatcgccaccctgagcaacaacctgaacaacgccaacaagaccgtggacaacatcccccccctggccgccagcgtggagcagaccctggacgtgagagaggagagcaccttcgtgagcgacctggagaaccagcccagcaacatcgtgagcctgcagaccgagcccagcagacagctgcccagccccagaaccagcctgatgagcgtgtgcctgggcagagactgcgacatgagctag

SEQ ID NO: 102646 - DNA, 999 bp, synthetic construct
  misc_feature 1..999: note = Description of Artificial Sequence: Synthetic coding sequence
  source 1..999: mol_type = other DNA
atgaagctgggcagagccgtgctgggcctgctgctgctggcccccagcgtggtgcaggccgtggagcccatcagcctgggcctggccctggccggcgtgctgaccggctacatctaccccagactgtactgcctgttcgccgagtgctgcggccagaagagaagcctgagcagagaggccctgcagaaggacctggacgacaacctgttcggccagcacctggccaagaagatcatcctgaacgccgtgttcggcttcatcaacaaccccaagcccaagaagcccctgaccctgagcctgcacggctggaccggcaccggcaagaacttcgtgagcaagatcatcgccgagaacatctacgagggcggcctgaacagcgactacgtgcacctgttcgtggccaccctgcacttcccccacgccagcaacatcaccctgtacaaggaccagctgcagctgtggatcagaggcaacgtgagcgcctgcgccagaagcatcttcatcttcgacgagatggacaagatgcacgccggcctgatcgacgccatcaagcccttcctggactactacgacctggtggacggcgtgagctaccagaaggccatgttcatcttcctgagcaacgccggcgccgagagaatcaccgacgtggccctggacttctggagaagcggcaagcagagagaggacatcaagctgaaggacatcgagcacgccctgagcgtgagcgtgttcaacaacaagaacagcggcttctggcacagcagcctgatcgacagaaacctgatcgactacttcgtgcccttcctgcccctggagtacaagcacctgaagatgtgcatcagagtggagatgcagagcagaggctacgagatcgacgaggacatcgtgagcagagtggccgaggagatgaccttcttccccaaggaggagagagtgttcagcgacaagggctgcaagaccgtgttcaccaagctggactactactacgacgactag

SEQ ID NO: 102647 - DNA, 906 bp, synthetic construct
  misc_feature 1..906: note = Description of Artificial Sequence: Synthetic coding sequence
  source 1..906: mol_type = other DNA
atgaagctgggcagagccgtgctgggcctgctgctgctggcccccagcgtggtgcaggccgtggagcccatcagcctgggcctggccctggccggcgtgctgaccggctacatctaccccagactgtactgcctgttcgccgagtgctgcggccagaagagaagcctgagcagagaggccctgcagaaggacctggacgacaacctgttcggccagcacctggccaagaagatcatcctgaacgccgtgttcggcttcatcaacaaccccaagcccaagaagcccctgaccctgagcctgttcgtggccaccctgcacttcccccacgccagcaacatcaccctgtacaaggaccagctgcagctgtggatcagaggcaacgtgagcgcctgcgccagaagcatcttcatcttcgacgagatggacaagatgcacgccggcctgatcgacgccatcaagcccttcctggactactacgacctggtggacggcgtgagctaccagaaggccatgttcatcttcctgagcaacgccggcgccgagagaatcaccgacgtggccctggacttctggagaagcggcaagcagagagaggacatcaagctgaaggacatcgagcacgccctgagcgtgagcgtgttcaacaacaagaacagcggcttctggcacagcagcctgatcgacagaaacctgatcgactacttcgtgcccttcctgcccctggagtacaagcacctgaagatgtgcatcagagtggagatgcagagcagaggctacgagatcgacgaggacatcgtgagcagagtggccgaggagatgaccttcttccccaaggaggagagagtgttcagcgacaagggctgcaagaccgtgttcaccaagctggactactactacgacgactag

SEQ ID NO: 102648 - DNA, 1011 bp, synthetic construct
  misc_feature 1..1011: note = Description of Artificial Sequence: Synthetic coding sequence
  source 1..1011: mol_type = other DNA
atgctgagagccggctggctgagaggcgccgccgccctggccctgctgctggccgccagagtggtggccgccttcgagcccatcaccgtgggcctggccatcggcgccgccagcgccatcaccggctacctgagctacaacgacatctactgcagattcgccgagtgctgcagagaggagagacccctgaacgccagcgccctgaagctggacctggaggagaagctgttcggccagcacctggccaccgaggtgatcttcaaggccctgaccggcttcagaaacaacaagaaccccaagaagcccctgaccctgagcctgcacggctgggccggcaccggcaagaacttcgtgagccagatcgtggccgagaacctgcaccccaagggcctgaagagcaacttcgtgcacctgttcgtgagcaccctgcacttcccccacgagcagaagatcaagctgtaccaggaccagctgcagaagtggatcagaggcaacgtgagcgcctgcgccaacagcgtgttcatcttcgacgagatggacaagctgcaccccggcatcatcgacgccatcaagcccttcctggactactacgagcaggtggacggcgtgagctacagaaaggccatcttcatcttcctgagcaacgccggcggcgacctgatcaccaagaccgccctggacttctggagagccggcagaaagagagaggacatccagctgaaggacctggagcccgtgctgagcgtgggcgtgttcaacaacaagcacagcggcctgtggcacagcggcctgatcgacaagaacctgatcgactacttcatccccttcctgcccctggagtacagacacgtgaagatgtgcgtgagagccgagatgagagccagaggcagcgccatcgacgaggacatcgtgaccagagtggccgaggagatgaccttcttccccagagacgagaagatctacagcgacaagggctgcaagaccgtgcagagcagactggacttccactag

SEQ ID NO: 102649 - DNA, 426 bp, synthetic construct
  misc_feature 1..426: note = Description of Artificial Sequence: Synthetic coding sequence
  source 1..426: mol_type = other DNA
tgaagagtggtggccgccttcgagcccatcaccgtgggcctggccatcggcgccgccagcgccatcaccggctacctgagctacaacgacatctactgcagattcgccgagtgctgcagagaggagagacccctgaacgccagcgccctgaagctggacctggaggagaagctgttcggccagcacctggccaccgaggtgatcttcaaggccctgaccggcttcagaaacaacaagaaccccaagaagcccctgaccctgagcctgcacggctgggccggcaccggcaagaacttcgtgagccagatcgtggccgagaacctgcaccccaagggcctgaagagcaacttcgtgcacctgttcgtgagcaccctgcacttcccccacgagcagaagatcaagctgtaccagagcagcctgacctag

SEQ ID NO: 102650 - DNA, 918 bp, synthetic construct
  misc_feature 1..918: note = Description of Artificial Sequence: Synthetic coding sequence
  source 1..918: mol_type = other DNA
atgctgagagccggctggctgagaggcgccgccgccctggccctgctgctggccgccagagtggtggccgccttcgagcccatcaccgtgggcctggccatcggcgccgccagcgccatcaccggctacctgagctacaacgacatctactgcagattcgccgagtgctgcagagaggagagacccctgaacgccagcgccctgaagctggacctggaggagaagctgttcggccagcacctggccaccgaggtgatcttcaaggccctgaccggcttcagaaacaacaagaaccccaagaagcccctgaccctgagcctgttcgtgagcaccctgcacttcccccacgagcagaagatcaagctgtaccaggaccagctgcagaagtggatcagaggcaacgtgagcgcctgcgccaacagcgtgttcatcttcgacgagatggacaagctgcaccccggcatcatcgacgccatcaagcccttcctggactactacgagcaggtggacggcgtgagctacagaaaggccatcttcatcttcctgagcaacgccggcggcgacctgatcaccaagaccgccctggacttctggagagccggcagaaagagagaggacatccagctgaaggacctggagcccgtgctgagcgtgggcgtgttcaacaacaagcacagcggcctgtggcacagcggcctgatcgacaagaacctgatcgactacttcatccccttcctgcccctggagtacagacacgtgaagatgtgcgtgagagccgagatgagagccagaggcagcgccatcgacgaggacatcgtgaccagagtggccgaggagatgaccttcttccccagagacgagaagatctacagcgacaagggctgcaagaccgtgcagagcagactggacttccactag

SEQ ID NO: 102651 - DNA, 1011 bp, synthetic construct
  misc_feature 1..1011: note = Description of Artificial Sequence: Synthetic coding sequence
  source 1..1011: mol_type = other DNA
atgctgagaggcccctggagacagctgtggctgttcttcctgctgctgctgcccggcgcccccgagcccagaggcgccagcagaccctgggagggcaccgacgagcccggcagcgcctgggcctggcccggcttccagagactgcaggagcagctgagagccgccggcgccctgagcaagagatactggaccctgttcagctgccaggtgtggcccgacgactgcgacgaggacgaggaggccgccaccggccccctgggctggagactgcccctgctgggccagagatacctggacctgctgaccacctggtactgcagcttcaaggactgctgccccagaggcgactgcagaatcagcaacaacttcaccggcctggagtgggacctgaacgtgagactgcacggccagcacctggtgcagcagctggtgctgagaaccgtgagaggctacctggagaccccccagcccgagaaggccctggccctgagcttccacggctggagcggcaccggcaagaacttcgtggccagaatgctggtggagaacctgtacagagacggcctgatgagcgactgcgtgagaatgttcatcgccaccttccacttcccccaccccaagtacgtggacctgtacaaggagcagctgatgagccagatcagagagacccagcagctgtgccaccagaccctgttcatcttcgacgaggccgagaagctgcaccccggcctgctggaggtgctgggcccccacctggagagaagagcccccgagggccacagagccgagagcccctggaccatcttcctgttcctgagcaacctgagaggcgacatcatcaacgaggtggtgctgaagctgctgaaggccggctggagcagagaggagatcaccatggagcacctggagccccacctgcaggccgagatcgtggagaccatcggcttcagcttcctgaccaccagatggccccacctggacctgcccaccagcagcgtggcccccacctag

SEQ ID NO: 102652 - DNA, 462 bp, synthetic construct
  misc_feature 1..462: note = Description of Artificial Sequence: Synthetic coding sequence
  source 1..462: mol_type = other DNA
atgctgagaggcccctggagacagctgtggctgttcttcctgctgctgctgcccggcgcccccgagcccagaggcgccagcagaccctgggagggcaccgacgagcccggcagcgcctgggcctggcccggcttccagagactgcaggagcagctgagagccgccggcgccctgagcaagagatactggaccctgttcagctgccaggtgtggcccgacgactgcgacgaggacgaggaggccgccaccggccccctgggctggagactgcccctgctgggccagagatacctggacctgctgaccacctggtactgcagcttcaaggactgctgccccagaggcgactgcagaatcagcaacaacttcaccggcaagaacttcgtggccagaatgctggtggagaacctgtacagagacggcctgatgagcgactgcgtgagaatgttcatcgccacctag

SEQ ID NO: 102653 - DNA, 1194 bp, synthetic construct
  misc_feature 1..1194: note = Description of Artificial Sequence: Synthetic coding sequence
  source 1..1194: mol_type = other DNA
atgctgagaggcccctggagacagctgtggctgttcttcctgctgctgctgcccggcgcccccgagcccagaggcgccagcagaccctgggagggcaccgacgagcccggcagcgcctgggcctggcccggcttccagagactgcaggagcagctgagagccgccggcgccctgagcaagagatactggaccctgttcagctgccaggtgtggcccgacgactgcgacgaggacgaggaggccgccaccggccccctgggctggagactgcccctgctgggccagagatacctggacctgctgaccacctggtactgcagcttcaaggactgctgccccagaggcgactgcagaatcagcaacaacttcaccggcctggagtgggacctgaacgtgagactgcacggccagcacctggtgcagcagctggtgctgagaaccgtgagaggctacctggagaccccccagcccgagaaggccctggccctgagcttccacggctggagcggcaccggcaagaacttcgtggccagaatgctggtggagaacctgtacagagacggcctgatgagcgactgcgtgagaatgttcatcgccaccttccacttcccccaccccaagtacgtggacctgtacaaggagcagctgatgagccagatcagagagacccagcagctgtgccaccagaccctgttcatcttcgacgaggccgagaagctgcaccccggcctgctggaggtgctgggcccccacctggagagaagagcccccgagggccacagagccgagagcccctggaccatcttcctgttcctgagcaacctgagaggcgacatcatcaacgaggtggtgctgaagctgctgaaggccggctggagcagagaggagatcaccatggagcacctggagccccacctgcaggccgagatcgtggagaccatcgacaacggcttcggccacagcagactggtgaaggagaacctgatcgactacttcatccccttcctgcccctggagtacagacacgtgagactgtgcgccagagacgccttcctgagccaggagctgctgtacaaggaggagaccctggacgagatcgcccagatgatggtgtacgtgcccaaggaggagcagctgttcagcagccagggctgcaagagcatcagccagagaatcaactacttcctgagctag

SEQ ID NO: 102654 - DNA, 525 bp, synthetic construct
  misc_feature 1..525: note = Description of Artificial Sequence: Synthetic coding sequence
  source 1..525: mol_type = other DNA
atgggcctgtgcgtgcccttcgccgtgaccaccagcttcctgagcctgggcctggagtgggacctgaacgtgagactgcacggccagcacctggtgcagcagctggtgctgagaaccgtgagaggctacctggagaccccccagcccgagaaggccctggccctgagcttccacggctggagcggcaccggcaagaacttcgtggccagaatgctggtggagaacctgtacagagacggcctgatgagcgactgcgtgagaatgttcatcgccaccttccacttcccccaccccaagtacgtggacctgtacaaggagcagctgatgagccagatcagagagacccagcagctgtgccaccagaccctgttcatcttcgacgaggccgagaagctgcaccccggcctgctggaggtgctgggcccccacctggagagaagagcccccgagggccacagagccgagagcccctggaccatcttcctgttcctgagcaacctgagaggcgacatcatcaacgagtag

SEQ ID NO: 102655 - DNA, 1866 bp, synthetic construct
  misc_feature 1..1866: note = Description of Artificial Sequence: Synthetic coding sequence
  source 1..1866: mol_type = other DNA
atggagttccccggcggcaacgacaactacctgaccatcaccggccccagccaccccttcctgagcggcgccgagaccttccacacccccagcctgggcgacgaggagttcgagatcccccccatcagcctggacagcgaccccagcctggccgtgagcgacgtggtgggccacttcgacgacctggccgaccccagcagcagccaggacggcagcttcagcgcccagtacggcgtgcagaccctggacatgcccgtgggcatgacccacggcctgatggagcagggcggcggcctgctgagcggcggcctgaccatggacctggaccacagcatcggcacccagtacagcgccaacccccccgtgaccatcgacgtgcccatgaccgacatgaccagcggcctgatgggccacagccagctgaccaccatcgaccagagcgagctgagcagccagctgggcctgagcctgggcggcggcaccatcctgccccccgcccagagccccgaggacagactgagcaccacccccagccccaccagcagcctgcacgaggacggcgtggaggacttcagaagacagctgcccagccagaagaccgtggtggtggaggccggcaagaagcagaaggcccccaagaagagaaagaagaaggaccccaacgagccccagaagcccgtgagcgcctacgccctgttcttcagagacacccaggccgccatcaagggccagaaccccaacgccaccttcggcgaggtgagcaagatcgtggccagcatgtgggacagcctgggcgaggagcagaagcaggtgtacaagagaaagaccgaggccgccaagaaggagtacctgaaggccctggccgcctacaaggacaaccaggagtgccaggccaccgtggagaccgtggagctggaccccgccccccccagccagacccccagccccccccccatggccaccgtggaccccgccagccccgcccccgccagcatcgagccccccgccctgagccccagcatcgtggtgaacagcaccctgagcagctacgtggccaaccaggccagcagcggcgccggcggccagcccaacatcaccaagctgatcatcaccaagcagatgctgcccagcagcatcaccatgagccagggcggcatggtgaccgtgatccccgccaccgtggtgaccagcagaggcctgcagctgggccagaccagcaccgccaccatccagcccagccagcaggcccagatcgtgaccagaagcgtgctgcaggccgccgccgccgccgccgccgccgccagcatgcagctgcccccccccagactgcagcccccccccctgcagcagatgccccagccccccacccagcagcaggtgaccatcctgcagcagcccccccccctgcaggccatgcagcagccccccccccagaaggtgagaatcaacctgcagcagcagcccccccccctgcagatcaagagcgtgcccctgcccaccctgaagatgcagaccaccctggtgccccccaccgtggagagcagccccgagagacccatgaacaacagccccgaggcccacaccgtggaggcccccagccccgagaccatctgcgagatgatcaccgacgtggtgcccgaggtggagagccccagccagatggacgtggagctggtgagcggcagccccgtggccctgagcccccagcccagatgcgtgagaagcggctgcgagaacccccccatcgtgagcaaggactgggacaacgagtactgcagcaacgagtgcgtggtgaagcactgcagagacgtgttcctggcctgggtggccagcagaaacagcaacaccgtggtgttcgtgaagtag

SEQ ID NO: 102656 - DNA, 1866 bp, synthetic construct; identical to SEQ ID NO: 102655
  misc_feature 1..1866: note = Description of Artificial Sequence: Synthetic coding sequence
  source 1..1866: mol_type = other DNA

SEQ ID NO: 102657 - DNA, 1797 bp, synthetic construct
  misc_feature 1..1797: note = Description of Artificial Sequence: Synthetic coding sequence
  source 1..1797: mol_type = other DNA
atggagaccttccacacccccagcctgggcgacgaggagttcgagatcccccccatcagcctggacagcgaccccagcctggccgtgagcgacgtggtgggccacttcgacgacctggccgaccccagcagcagccaggacggcagcttcagcgcccagtacggcgtgcagaccctggacatgcccgtgggcatgacccacggcctgatggagcagggcggcggcctgctgagcggcggcctgaccatggacctggaccacagcatcggcacccagtacagcgccaacccccccgtgaccatcgacgtgcccatgaccgacatgaccagcggcctgatgggccacagccagctgaccaccatcgaccagagcgagctgagcagccagctgggcctgagcctgggcggcggcaccatcctgccccccgcccagagccccgaggacagactgagcaccacccccagccccaccagcagcctgcacgaggacggcgtggaggacttcagaagacagctgcccagccagaagaccgtggtggtggaggccggcaagaagcagaaggcccccaagaagagaaagaagaaggaccccaacgagccccagaagcccgtgagcgcctacgccctgttcttcagagacacccaggccgccatcaagggccagaaccccaacgccaccttcggcgaggtgagcaagatcgtggccagcatgtgggacagcctgggcgaggagcagaagcaggtgtacaagagaaagaccgaggccgccaagaaggagtacctgaaggccctggccgcctacaaggacaaccaggagtgccaggccaccgtggagaccgtggagctggaccccgccccccccagccagacccccagccccccccccatggccaccgtggaccccgccagccccgcccccgccagcatcgagccccccgccctgagccccagcatcgtggtgaacagcaccctgagcagctacgtggccaaccaggccagcagcggcgccggcggccagcccaacatcaccaagctgatcatcaccaagcagatgctgcccagcagcatcaccatgagccagggcggcatggtgaccgtgatccccgccaccgtggtgaccagcagaggcctgcagctgggccagaccagcaccgccaccatccagcccagccagcaggcccagatcgtgaccagaagcgtgctgcaggccgccgccgccgccgccgccgccgccagcatgcagctgcccccccccagactgcagcccccccccctgcagcagatgccccagccccccacccagcagcaggtgaccatcctgcagcagcccccccccctgcaggccatgcagcagccccccccccagaaggtgagaatcaacctgcagcagcagcccccccccctgcagatcaagagcgtgcccctgcccaccctgaagatgcagaccaccctggtgccccccaccgtggagagcagccccgagagacccatgaacaacagccccgaggcccacaccgtggaggcccccagccccgagaccatctgcgagatgatcaccgacgtggtgcccgaggtggagagccccagccagatggacgtggagctggtgagcggcagccccgtggccctgagcccccagcccagatgcgtgagaagcggctgcgagaacccccccatcgtgagcaaggactgggacaacgagtactgcagcaacgagtgcgtggtgaagcactgcagagacgtgttcctggcctgggtggccagcagaaacagcaacaccgtggtgttcgtgaagtag

SEQ ID NO: 102658 - DNA, 1650 bp, synthetic construct
  misc_feature 1..1650: note = Description of Artificial Sequence: Synthetic coding sequence
  source 1..1650: mol_type = other DNA
atgagaaacctgaagagccacctgagcccctggatcctgatcccccactggctgagccagatgtggctggccaccctgatgacctggcagttcttcagccccgacctggaccacagcatcggcacccagtacagcgccaacccccccgtgaccatcgacgtgcccatgaccgacatgaccagcggcctgatgggccacagccagctgaccaccatcgaccagagcgagctgagcagccagctgggcctgagcctgggcggcggcaccatcctgccccccgcccagagccccgaggacagactgagcaccacccccagccccaccagcagcctgcacgaggacggcgtggaggacttcagaagacagctgcccagccagaagaccgtggtggtggaggccggcaagaagcagaaggcccccaagaagagaaagaagaaggaccccaacgagccccagaagcccgtgagcgcctacgccctgttcttcagagacacccaggccgccatcaagggccagaaccccaacgccaccttcggcgaggtgagcaagatcgtggccagcatgtgggacagcctgggcgaggagcagaagcaggtgtacaagagaaagaccgaggccgccaagaaggagtacctgaaggccctggccgcctacaaggacaaccaggagtgccaggccaccgtggagaccgtggagctggaccccgccccccccagccagacccccagccccccccccatggccaccgtggaccccgccagccccgcccccgccagcatcgagccccccgccctgagccccagcatcgtggtgaacagcaccctgagcagctacgtggccaaccaggccagcagcggcgccggcggccagcccaacatcaccaagctgatcatcaccaagcagatgctgcccagcagcatcaccatgagccagggcggcatggtgaccgtgatccccgccaccgtggtgaccagcagaggcctgcagctgggccagaccagcaccgccaccatccagcccagccagcaggcccagatcgtgaccagaagcgtgctgcaggccgccgccgccgccgccgccgccgccagcatgcagctgcccccccccagactgcagcccccccccctgcagcagatgccccagccccccacccagcagcaggtgaccatcctgcagcagcccccccccctgcaggccatgcagcagccccccccccagaaggtgagaatcaacctgcagcagcagcccccccccctgcagatcaagagcgtgcccctgcccaccctgaagatgcagaccaccctggtgccccccaccgtggagagcagccccgagagacccatgaacaacagccccgaggcccacaccgtggaggcccccagccccgagaccatctgcgagatgatcaccgacgtggtgcccgaggtggagagccccagccagatggacgtggagctggtgagcggcagccccgtggccctgagcccccagcccagatgcgtgagaagcggctgcgagaacccccccatcgtgagcaaggactgggacaacgagtactgcagcaacgagtgcgtggtgaagcactgcagagacgtgttcctggcctgggtggccagcagaaacagcaacaccgtggtgttcgtgaagtag

SEQ ID NO: 102659 - DNA, 1020 bp, synthetic construct
  misc_feature 1..1020: note = Description of Artificial Sequence: Synthetic coding sequence
  source 1..1020: mol_type = other DNA
atgatgcccttctgccacaacatcatcaacatcagctgcgtgaagaacaactggagcaacgacgtgagagccagcctgtacagcctgatggtgctgatcatcctgaccaccctggtgggcaacctgatcgtgatcgtgagcatcagccacttcaagcagctgcacacccccaccaactggctgatccacagcatggccaccgtggacttcctgctgggctgcctggtgatgccctacagcatggtgagaagcgccgagcactgctggtacttcggcgaggtgttctgcaagatccacaccagcaccgacatcatgctgagcagcgccagcatcttccacctgagcttcatcagcatcgacagatactacgccgtgtgcgaccccctgagatacaaggccaagatgaacatcctggtgatctgcgtgatgatcttcatcagctggagcgtgcccgccgtgttcgccttcggcatgatcttcctggagctgaacttcaagggcgccgaggagatctactacaagcacgtgcactgcagaggcggctgcagcgtgttcttcagcaagatcagcggcgtgctgaccttcatgaccagcttctacatccccggcagcatcatgctgtgcgtgtactacagaatctacctgatcgccaaggagcaggccagactgatcagcgacgccaaccagaagctgcagatcggcctggagatgaagaacggcatcagccagagcaaggagagaaaggccgtgaagaccctgggcatcgtgatgggcgtgttcctgatctgctggtgccccttcttcatctgcaccgtgatggaccccttcctgcactacatcatcccccccaccctgaacgacgtgctgatctggttcggctacctgaacagcaccttcaaccccatggtgtacgccttcttctacccctggttcagaaaggccctgaagatgatgctgttcggcaagatcttccagaaggacagcagcagatgcaagctgttcctggagctgagcagctag

SEQ ID NO: 102660 - DNA, 921 bp, synthetic construct
  misc_feature 1..921: note = Description of Artificial Sequence: Synthetic coding sequence
  source 1..921: mol_type = other DNA
atgtacagcttcatggccggcagcatcttcatcaccatcttcggcaacctggccatgatcatcagcatcagctacttcaagcagctgcacacccccaccaacttcctgatcctgagcatggccatcaccgacttcctgctgggcttcaccatcatgccctacagcatgatcagaagcgtggagaactgctggtacttcggcctgaccttctgcaagatctactacagcttcgacctgatgctgagcatcaccagcatcttccacctgtgcagcgtggccatcgacagattctacgccatctgctaccccctgctgtacagcaccaagatcaccatccccgtgatcaagagactgctgctgctgtgctggagcgtgcccggcgccttcgccttcggcgtggtgttcagcgaggcctacgccgacggcatcgagggctacgacatcctggtggcctgcagcagcagctgccccgtgatgttcaacaagctgtggggcaccaccctgttcatggccggcttcttcacccccggcagcatgatggtgggcatctacggcaagatcttcgccgtgagcagaaagcacgcccacgccatcaacaacctgagagagaaccagaacaaccaggtgaagaaggacaagaaggccgccaagaccctgggcatcgtgatcggcgtgttcctgctgtgctggttcccctgcttcttcaccatcctgctggaccccttcctgaacttcagcacccccgtggtgctgttcgacgccctgacctggttcggctacttcaacagcacctgcaaccccctgatctacggcttcttctacccctggttcagaagagccctgaagtacatcctgctgggcaagatcttcagcagctgcttccacaacaccatcctgtgcatgcagaaggagagcgagtag

SEQ ID NO: 102661 - DNA, 1056 bp, synthetic construct
  misc_feature 1..1056: note = Description of Artificial Sequence: Synthetic coding sequence
  source 1..1056: mol_type = other DNA
atggccgtgagcagcgagcagcacgagctgagccacttcaagagaacccagaccaagaaggagaagttcaactgcagcgagtacggcaacagaagctgccccgagaacgagagaagcctgggcgtgagagtggccatgtacagcttcatggccggcagcatcttcatcaccatcttcggcaacctggccatgatcatcagcatcagctacttcaagcagctgcacacccccaccaacttcctgatcctgagcatggccatcaccgacttcctgctgggcttcaccatcatgccctacagcatgatcagaagcgtggagaactgctggtacttcggcctgaccttctgcaagatctactacagcttcgacctgatgctgagcatcaccagcatcttccacctgtgcagcgtggccatcgacagattctacgccatctgctaccccctgctgtacagcaccaagatcaccatccccgtgatcaagagactgctgctgctgtgctggagcgtgcccggcgccttcgccttcggcgtggtgttcagcgaggcctacgccgacggcatcgagggctacgacatcctggtggcctgcagcagcagctgccccgtgatgttcaacaagctgtggggcaccaccctgttcatggccggcttcttcacccccggcagcatgatggtgggcatctacggcaagatcttcgccgtgagcagaaagcacgcccacgccatcaacaacctgagagagaaccagaacaaccaggtgaagaaggacaagaaggccgccaagaccctgggcatcgtgatcggcgtgttcctgctgtgctggttcccctgcttcttcaccatcctgctggaccccttcctgaacttcagcacccccgtggtgctgttcgacgccctgacctggttcggctacttcaacagcacctgcaaccccctgatctacggcttcttctacccctggttcagaagagccctgaagtacatcctgctgggcaagatcttcagcagctgcttccacaacaccatcctgtgcatgcagaaggagagcgagtag

SEQ ID NO: 102662 - DNA, 921 bp, synthetic construct; identical to SEQ ID NO: 102660
  misc_feature 1..921: note = Description of Artificial Sequence: Synthetic coding sequence
  source 1..921: mol_type = other DNA

SEQ ID NO: 102663 - DNA, 1038 bp, synthetic construct
  misc_feature 1..1038: note = Description of Artificial Sequence: Synthetic coding sequence
  source 1..1038: mol_type = other DNA
atgagcagcaacagcagcctgctggtggccgtgcagctgtgctacgccaacgtgaacggcagctgcgtgaagatccccttcagccccggcagcagagtgatcctgtacatcgtgttcggcttcggcgccgtgctggccgtgttcggcaacctgctggtgatgatcagcatcctgcacttcaagcagctgcacagccccaccaacttcctggtggccagcctggcctgcgccgacttcctggtgggcgtgaccgtgatgcccttcagcatggtgagaaccgtggagagctgctggtacttcggcagaagcttctgcaccttccacacctgctgcgacgtggccttctgctacagcagcctgttccacctgtgcttcatcagcatcgacagatacatcgccgtgaccgaccccctggtgtaccccaccaagttcaccgtgagcgtgagcggcatctgcatcagcgtgagctggatcctgcccctgatgtacagcggcgccgtgttctacaccggcgtgtacgacgacggcctggaggagctgagcgacgccctgaactgcatcggcggctgccagaccgtggtgaaccagaactgggtgctgaccgacttcctgagcttcttcatccccaccttcatcatgatcatcctgtacggcaacatcttcctggtggccagaagacaggccaagaagatcgagaacaccggcagcaagaccgagagcagcagcgagagctacaaggccagagtggccagaagagagagaaaggccgccaagaccctgggcgtgaccgtggtggccttcatgatcagctggctgccctacagcatcgacagcctgatcgacgccttcatgggcttcatcacccccgcctgcatctacgagatctgctgctggtgcgcctactacaacagcgccatgaaccccctgatctacgccctgttctacccctggttcagaaaggccatcaaggtgatcgtgaccggccaggtgctgaagaacagcagcgccaccatgaacctgttcagcgagcacatctag

SEQ ID NO: 102664 - DNA, 957 bp, synthetic construct
  misc_feature 1..957: note = Description of Artificial Sequence: Synthetic coding sequence
  source 1..957: mol_type = other DNA
gtgaacggcagctgcgtgaagatccccttcagccccggcagcagagtgatcctgtacatcgtgttcggcttcggcgccgtgctggccgtgttcggcaacctgctggtgatgatcagcatcctgcacttcaagcagctgcacagccccaccaacttcctggtggccagcctggcctgcgccgacttcctggtgggcgtgaccgtgatgcccttcagcatggtgagaaccgtggagagctgctggtacttcggcagaagcttctgcaccttccacacctgctgcgacgtggccttctgctacagcagcctgttccacctgtgcttcatcagcatcgacagatacatcgccgtgaccgaccccctggtgtaccccaccaagttcaccgtgagcgtgagcggcatctgcatcagcgtgagctggatcctgcccctgatgtacagcggcgccgtgttctacaccggcgtgtacgacgacggcctggaggagctgagcgacgccctgaactgcatcggcggctgccagaccgtggtgaaccagaactgggtgctgaccgacttcctgagcttcttcatccccaccttcatcatgatcatcctgtacggcaacatcttcctggtggccagaagacaggccaagaagatcgagaacaccgagagctacaaggccagagtggccagaagagagagaaaggccgccaagaccctgggcgtgaccgtggtggccttcatgatcagctggctgccctacagcatcgacagcctgatcgacgccttcatgggcttcatcacccccgcctgcatctacgagatctgctgctggtgcgcctactacaacagcgccatgaaccccctgatctacgccctgttctacccctggttcagaaaggccatcaaggtgatcgtgaccggccaggtgctgaagaacagcagcgccaccatgaacctgttcagcgagtag

SEQ ID NO: 102665 - DNA, 1410 bp, synthetic construct
  misc_feature 1..1410: note = Description of Artificial Sequence: Synthetic coding sequence
  source 1..1410: mol_type = other DNA
atgcccatcagagccctgtgcaccatctgcagcgacttcttcgaccacagcagagacgtggccgccatccactgcggccacaccttccacctgcagtgcctgatccagtggttcgagaccgcccccagcagaacctgcccccagtgcagaatccaggtgggcaagagaaccatcatcaacaagctgttcttcgacctggcccaggaggaggagaacgtgctggacgccgagttcctgaagaacgagctggacaacgtgagagcccagctgagccagaaggacaaggagaagagagacagccaggtgatcatcgacaccctgagagacaccctggaggagagaaacgccaccgtggtgagcctgcagcaggccctgggcaaggccgagatgctgtgcagcaccctgaagaagcagatgaagtacctggagcagcagcaggacgagaccaagcaggcccaggaggaggccagaagactgagaagcaagatgaagaccatggagcagatcgagctgctgctgcagagccagagacccgaggtggaggagatgatcagagacatgggcgtgggccagagcgccgtggagcagctggccgtgtactgcgtgagcctgaagaaggagtacgagaacctgaaggaggccagaaaggccagcggcgaggtggccgacaagctgagaaaggacctgttcagcagcagaagcaagctgcagaccgtgtacagcgagctggaccaggccaagctggagctgaagagcgcccagaaggacctgcagagcgccgacaaggagatcatgagcctgaagaagaagctgaccatgctgcaggagaccctgaacctgccccccgtggccagcgagaccgtggacagactggtgctggagagccccgcccccgtggaggtgaacctgaagctgagaagacccagcttcagagacgacatcgacctgaacgccaccttcgacgtggacaccccccccgccagacccagcagcagccagcacggctactacgagaagctgtgcctggagaagagccacagccccatccaggacgtgcccaagaagatctgcaagggccccagaaaggagagccagctgagcctgggcggccagagctgcgccggcgagcccgacgaggagctggtgggcgccttccccatcttcgtgagaaacgccatcctgggccagaagcagcccaagagacccagaagcgagagcagctgcagcaaggacgtggtgagaaccggcttcgacggcctgggcggcagaaccaagttcatccagcccaccgacaccgtgatgatcagacccctgcccgtgaagcccaagaccaaggtgaagcagagagtgagagtgaagaccgtgcccagcctgttccaggccaagctggacaccttcctgtggagctag

SEQ ID NO: 102666 - DNA, 4059 bp, synthetic construct
  misc_feature 1..4059: note = Description of Artificial Sequence: Synthetic coding sequence
  source 1..4059: mol_type = other DNA
atggccagcgacagccccgccagaagcctggacgagatcgacctgagcgccctgagagaccccgccggcatcttcgagctggtggagctggtgggcaacggcacctacggccaggtgtacaagggcagacacgtgaagaccggccagctggccgccatcaaggtgatggacgtgaccggcgacgaggaggaggagatcaagcaggagatcaacatgctgaagaagtacagccaccacagaaacatcgccacctactacggcgccttcatcaagaagaacccccccggcatggacgaccagctgtggctggtgatggagttctgcggcgccggcagcgtgaccgacctgatcaagaacaccaagggcaacaccctgaaggaggagtggatcgcctacatctgcagagagatcctgagaggcctgagccacctgcaccagcacaaggtgatccacagagacatcaagggccagaacgtgctgctgaccgagaacgccgaggtgaagctggtggacttcggcgtgagcgcccagctggacagaaccgtgggcagaagaaacaccttcatcggcaccccctactggatggcccccgaggtgatcgcctgcgacgagaaccccgacgccacctacgacttcaagagcgacctgtggagcctgggcatcaccgccatcgagatggccgagggcgccccccccctgtgcgacatgcaccccatgagagccctgttcctgatccccagaaaccccgcccccagactgaagagcaagaagtggagcaagaagttccagagcttcatcgagagctgcctggtgaagaaccacagccagagacccgccaccgagcagctgatgaagcaccccttcatcagagaccagcccaacgagagacaggtgagaatccagctgaaggaccacatcgacagaaccaagaagaagagaggcgagaaggacgagaccgagtacgagtacagcggcagcgaggaggaggaggaggagaacgacagcggcgagcccagcagcatcctgaacctgcccggcgagagcaccctgagaagagacttcctgagactgcagctggccaacaaggagagaagcgaggccctgagaagacagcagctggagcagcagcagagagagaacgaggagcacaagagacagctgctggccgagagacagaagagaatcgaggagcagaaggagcagagaagaagactggaggagcagcagagaagagagaaggagctgagaaagcagcaggagagagagcagagaagacactacgaggagcagatgagaagagaggaggagagaagaagagccgagcacgagcaggagtacatcagaagacagctggaggaggagcagagacagctggagatcctgcagcagcagctgctgcacgagcaggccctgctgctggagtacaagagaaagcagctggaggagcagagacaggccgagagactgcagagacagctgaagcaggagagagactacctggtgagcctgcagcaccagagacaggagcagagacccgtggagaagaagcccctgtaccactacaaggagggcatgagccccagcgagaagcccgcctgggccaaggaggtggaggagagaagcagactgaacagacagagcagccccgccatgccccacaaggtggccaacagaatcagcgaccccaacctgccccccagaagcgagagcttcagcatcagcggcgtgcagcccgccagaaccccccccatgctgagacccgtggacccccagatcccccacctggtggccgtgaagagccagggccccgccctgaccgccagccagagcgtgcacgagcagcccaccaagggcctgagcggcttccaggaggccctgaacgtgaccagccacagagtggagatgcccagacagaacagcgaccccaccagcgagaacccccccctgcccaccagaatcgagaagttcgacagaagcagctggctgagacaggaggaggacatcccccccaaggtgccccagagaaccaccagcatcagccccgccctggccagaaagaacagccccggcaacggcagcgccctgggccccagactgggcagccagcccatcagagccagcaaccccgacctgagaagaaccgagcccatcctggagagccccctgcagagaaccagcagcggcagcagcagcagcagcagcacccccagcagccagcccagcagccagggcggcagccagcccggcagccaggccggcagcagcgagagaaccagagtgagagccaacagcaagagcgagggcagccccgtgctgccccacgagcccgccaaggtgaagcccgaggagagcagagacatcaccagacccagcagacccgccgacctgaccgccctggccaaggagctgagagagctgagaatcgaggagaccaacagacccatgaagaaggtgaccgactacagcagcagcagcgaggagagcgagagcagcgaggaggaggaggaggacggcgagagcgagacccacgacggcaccgtggccgtgagcgacatccccagactgatccccaccggcgcccccggcagcaacgagcagtacaacgtgggcatggtgggcacccacggcctggagaccagccacgccgacagcttcagcggcagcatcagcagagagggcaccctgatgatcagagagaccagcggcgagaagaagagaagcggccacagcgacagcaacggcttcgccggccacatcaacctgcccgacctggtgcagcagagccacagccccgccggcacccccaccgagggcctgggcagagtgagcacccacagccaggagatggacagcggcaccgagtacggcatgggcagcagcaccaaggccagcttcacccccttcgtggaccccagagtgtaccagaccagccccaccgacgaggacgaggaggacgaggagagcagcgccgccgccctgttcaccagcgagctgctgagacaggagcaggccaagctgaacgaggccagaaagatcagcgtggtgaacgtgaaccccaccaacatcagaccccacagcgacacccccgagatcagaaagtacaagaagagattcaacagcgagatcctgtgcgccgccctgtggggcgtgaacctgctggtgggcaccgagaacggcctgatgctgctggacagaagcggccagggcaaggtgtacaacctgatcaacagaagaagattccagcagatggacgtgctggagggcctgaacgtgctggtgaccatcagcggcaagaagaacaagctgagagtgtactacctgagctggctgagaaacagaatcctgcacaacgaccccgaggtggagaagaagcagggctggatcaccgtgggcgacctggagggctgcatccactacaaggtggtgaagtacgagagaatcaagttcctggtgatcgccctgaagaacgccgtggagatctacgcctgggcccccaagccctaccacaagttcatggccttcaagagcttcgccgacctgcagcacaagcccctgctggtggacctgaccgtggaggagggccagagactgaaggtgatcttcggcagccacaccggcttccacgtgatcgacgtggacagcggcaacagctacgacatctacatccccagccacatccagggcaacatcaccccccacgccatcgtgatcctgcccaagaccgacggcatggagatgctggtgtgctacgaggacgagggcgtgtacgtgaacacctacggcagaatcaccaaggacgtggtgctgcagtggggcgagatgcccaccagcgtggcctacatccacagcaaccagatcatgggctggggcgagaaggccatcgagatcagaagcgtggagaccggccacctggacggcgtgttcatgcacaagagagcccagagactgaagttcctgtgcgagagaaacgacaaggtgttcttcgccagcgtgagaagcggcggcagcagccaggtgttcttcatgaccctgaacagaaacagcatgatgaactggtag

SEQ ID NO: 102667 - DNA, 3831 bp, synthetic construct
  misc_feature 1..3831: note = Description of Artificial Sequence: Synthetic coding sequence
  source 1..3831: mol_type = other DNA
atggccagcgacagccccgccagaagcctggacgagatcgacctgagcgccctgagagaccccgccggcatcttcgagctggtggagctggtgggcaacggcacctacggccaggtgtacaagggcagacacgtgaagaccggccagctggccgccatcaaggtgatggacgtgaccggcgacgaggaggaggagatcaagcaggagatcaacatgctgaagaagtacagccaccacagaaacatcgccacctactacggcgccttcatcaagaagaacccccccggcatggacgaccagctgtggctggtgatggagttctgcggcgccggcagcgtgaccgacctgatcaagaacaccaagggcaacaccctgaaggaggagtggatcgcctacatctgcagagagatcctgagaggcctgagccacctgcaccagcacaaggtgatccacagagacatcaagggccagaacgtgctgctgaccgagaacgccgaggtgaagctggtggacttcggcgtgagcgcccagctggacagaaccgtgggcagaagaaacaccttcatcggcaccccctactggatggcccccgaggtgatcgcctgcgacgagaaccccgacgccacctacgacttcaagagcgacctgtggagcctgggcatcaccgccatcgagatggccgagggcgccccccccctgtgcgacatgcaccccatgagagccctgttcctgatccccagaaaccccgcccccagactgaagagcaagaagtggagcaagaagttccagagcttcatcgagagctgcctggtgaagaaccacagccagagacccgccaccgagcagctgatgaagcaccccttcatcagagaccagcccaacgagagacaggtgagaatccagctgaaggaccacatcgacagaaccaagaagaagagaggcgagaaggacgagaccgagtacgagtacagcggcagcgaggaggaggaggaggagaacgacagcggcgagcccagcagcatcctgaacctgcccggcgagagcaccctgagaagagacttcctgagactgcagctggccaacaaggagagaagcgaggccctgagaagacagcagctggagcagcagcagagagagaacgaggagcacaagagacagctgctggccgagagacagaagagaatcgaggagcagaaggagcagagaagaagactggaggagcagcagagaagagagaaggagctgagaaagcagcaggagagagagcagagaagacactacgaggagcagatgagaagagaggaggagagaagaagagccgagcacgagcaggagtacaagagaaagcagctggaggagcagagacaggccgagagactgcagagacagctgaagcaggagagagactacctggtgagcctgcagcaccagagacaggagcagagacccgtggagaagaagcccctgtaccactacaaggagggcatgagccccagcgagaagcccgcctgggccaaggagatcccccacctggtggccgtgaagagccagggccccgccctgaccgccagccagagcgtgcacgagcagcccaccaagggcctgagcggcttccaggaggccctgaacgtgaccagccacagagtggagatgcccagacagaacagcgaccccaccagcgagaacccccccctgcccaccagaatcgagaagttcgacagaagcagctggctgagacaggaggaggacatcccccccaaggtgccccagagaaccaccagcatcagccccgccctggccagaaagaacagccccggcaacggcagcgccctgggccccagactgggcagccagcccatcagagccagcaaccccgacctgagaagaaccgagcccatcctggagagccccctgcagagaaccagcagcggcagcagcagcagcagcagcacccccagcagccagcccagcagccagggcggcagccagcccggcagccaggccggcagcagcgagagaaccagagtgagagccaacagcaagagcgagggcagccccgtgctgccccacgagcccgccaaggtgaagcccgaggagagcagagacatcaccagacccagcagacccgccagctacaagaaggccatcgacgaggacctgaccgccctggccaaggagctgagagagctgagaatcgaggagaccaacagacccatgaagaaggtgaccgactacagcagcagcagcgaggagagcgagagcagcgaggaggaggaggaggacggcgagagcgagacccacgacggcaccgtggccgtgagcgacatccccagactgatccccaccggcgcccccggcagcaacgagcagtacaacgtgggcatggtgggcacccacggcctggagaccagccacgccgacagcttcagcggcagcatcagcagagagggcaccctgatgatcagagagaccagcggcgagaagaagagaagcggccacagcgacagcaacggcttcgccggccacatcaacctgcccgacctggtgcagcagagccacagccccgccggcacccccaccgagggcctgggcagagtgagcacccacagccaggagatggacagcggcaccgagtacggcatgggcagcagcaccaaggccagcttcacccccttcgtggaccccagagtgtaccagaccagccccaccgacgaggacgaggaggacgaggagagcagcgccgccgccctgttcaccagcgagctgctgagacaggagcaggccaagctgaacgaggccagaaagatcagcgtggtgaacgtgaaccccaccaacatcagaccccacagcgacacccccgagatcagaaagtacaagaagagattcaacagcgagatcctgtgcgccgccctgtggggcgtgaacctgctggtgggcaccgagaacggcctgatgctgctggacagaagcggccagggcaaggtgtacaacctgatcaacagaagaagattccagcagatggacgtgctggagggcctgaacgtgctggtgaccatcagcggcaagaagaacaagctgagagtgtactacctgagctggctgagaaacagaatcctgcacaacgaccccgaggtggagaagaagcagggctggatcaccgtgggcgacctggagggctgcatccactacaaggtggtgaagtacgagagaatcaagttcctggtgatcgccctgaagaacgccgtggagatctacgcctgggcccccaagccctaccacaagttcatggccttcaagagcttcgccgacctgcagcacaagcccctgctggtggacctgaccgtggaggagggccagagactgaaggtgatcttcggcagccacaccggcttccacgtgatcgacgtggacagcggcaacagctacgacatctacatccccagccacatccagggcaacatcaccccccacgccatcgtgatcctgcccaagaccgacggcatggagatgctggtgtgctacgaggacgagggcgtgtacgtgaacacctacggcagaatcaccaaggacgtggtgctgcagtggggcgagatgcccaccagcgtggcctacatccacagcaaccagatcatgggctggggcgagaaggccatcgagatcagaagcgtggagaccggccacctggacggcgtgttcatgcacaagagagcccagagactgaagttcctgtgcgagagaaacgacaaggtgttcttcgccagcgtgagaagcggcggcagcagccaggtgttcttcatgaccctgaacagaaacagcatgatgaactggtag

SEQ ID NO: 102668 - DNA, 3996 bp, synthetic construct
  misc_feature 1..3996: note = Description of Artificial Sequence: Synthetic coding sequence
  source 1..3996: mol_type = other DNA
atggccagcgacagccccgccagaagcctggacgagatcgacctgagcgccctgagagaccccgccggcatcttcgagctggtggagctggtgggcaacggcacctacggccaggtgtacaagggcagacacgtgaagaccggccagctggccgccatcaaggtgatggacgtgaccggcgacgaggaggaggagatcaagcaggagatcaacatgctgaagaagtacagccaccacagaaacatcgccacctactacggcgccttcatcaagaagaacccccccggcatggacgaccagctgtggctggtgatggagttctgcggcgccggcagcgtgaccgacctgatcaagaacaccaagggcaacaccctgaaggaggagtggatcgcctacatctgcagagagatcctgagaggcctgagccacctgcaccagcacaaggtgatccacagagacatcaagggccagaacgtgctgctgaccgagaacgccgaggtgaagctggtggacttcggcgtgagcgcccagctggacagaaccgtgggcagaagaaacaccttcatcggcaccccctactggatggcccccgaggtgatcgcctgcgacgagaaccccgacgccacctacgacttcaagagcgacctgtggagcctgggcatcaccgccatcgagatggccgagggcgccccccccctgtgcgacatgcaccccatgagagccctgttcctgatccccagaaaccccgcccccagactgaagagcaagaagtggagcaagaagttccagagcttcatcgagagctgcctggtgaagaaccacagccagagacccgccaccgagcagctgatgaagcaccccttcatcagagaccagcccaacgagagacaggtgagaatccagctgaaggaccacatcgacagaaccaagaagaagagaggcgagaaggacgagaccgagtacgagtacagcggcagcgaggaggaggaggaggagaacgacagcggcgagcccagcagcatcctgaacctgcccggcgagagcaccctgagaagagacttcctgagactgcagctggccaacaaggagagaagcgaggccctgagaagacagcagctggagcagcagcagagagagaacgaggagcacaagagacagctgctggccgagagacagaagagaatcgaggagcagaaggagcagagaagaagactggaggagcagcagagaagagagaaggagctgagaaagcagcaggagagagagcagagaagacactacgaggagcagatgagaagagaggaggagagaagaagagccgagcacgagcaggagtacaagagaaagcagctggaggagcagagacaggccgagagactgcagagacagctgaagcaggagagagactacctggtgagcctgcagcaccagagacaggagcagagacccgtggagaagaagcccctgtaccactacaaggagggcatgagccccagcgagaagcccgcctgggccaaggaggtggaggagagaagcagactgaacagacagagcagccccgccatgccccacaaggtggccaacagaatcagcgaccccaacctgccccccagaagcgagagcttcagcatcagcggcgtgcagcccgccagaaccccccccatgctgagacccgtggacccccagatcccccacctggtggccgtgaagagccagggccccgccctgaccgccagccagagcgtgcacgagcagcccaccaagggcctgagcggcttccaggaggccctgaacgtgaccagccacagagtggagatgcccagacagaacagcgaccccaccagcgagaacccccccctgcccaccagaatcgagaagttcgacagaagcagctggctgagacaggaggaggacatcccccccaaggtgccccagagaaccaccagcatcagccccgccctggccagaaagaacagccccggcaacggcagcgccctgggccccagactgggcagccagcccatcagagccagcaaccccgacctgagaagaaccgagcccatcctggagagccccctgcagagaaccagcagcggcagcagcagcagcagcagcacccccagcagccagcccagcagccagggcggcagccagcccggcagccaggccggcagcagcgagagaaccagagtgagagccaacagcaagagcgagggcagccccgtgctgccccacgagcccgccaaggtgaagcccgaggagagcagagacatcaccagacccagcagacccgccagctacaagaaggccatcgacgaggacctgaccgccctggccaaggagctgagagagctgagaatcgaggagaccaacagacccatgaagaaggtgaccgactacagcagcagcagcgaggagagcgagagcagcgaggaggaggaggaggacggcgagagcgagacccacgacggcaccgtggccgtgagcgacatccccagactgatccccaccggcgcccccggcagcaacgagcagtacaacgtgggcatggtgggcacccacggcctggagaccagccacgccgacagcttcagcggcagcatcagcagagagggcaccctgatgatcagagagaccagcggcgagaagaagagaagcggccacagcgacagcaacggcttcgccggccacatcaacctgcccgacctggtgcagcagagccacagccccgccggcacccccaccgagggcctgggcagagtgagcacccacagccaggagatggacagcggcaccgagtacggcatgggcagcagcaccaaggccagcttcacccccttcgtggaccccagagtgtaccagaccagccccaccgacgaggacgaggaggacgaggagagcagcgccgccgccctgttcaccagcgagctgctgagacaggagcaggccaagctgaacgaggccagaaagatcagcgtggtgaacgtgaaccccaccaacatcagaccccacagcgacacccccgagatcagaaagtacaagaagagattcaacagcgagatcctgtgcgccgccctgtggggcgtgaacctgctggtgggcaccgagaacggcctgatgctgctggacagaagcggccagggcaaggtgtacaacctgatcaacagaagaagattccagcagatggacgtgctggagggcctgaacgtgctggtgaccatcagcggcaagaagaacaagctgagagtgtactacctgagctggctgagaaacagaatcctgcacaacgaccccgaggtggagaagaagcagggctggatcaccgtgggcgacctggagggctgcatccactacaaggtggtgaagtacgagagaatcaagttcctggtgatcgccctgaagaacgccgtggagatctacgcctgggcccccaagccctaccacaagttcatggccttcaagagcttcgccgacctgcagcacaagcccctgctggtggacctgaccgtggaggagggccagagactgaaggtgatcttcggcagccacaccggcttccacgtgatcgacgtggacagcggcaacagctacgacatctacatccccagccacatccagggcaacatcaccccccacgccatcgtgatcctgcccaagaccgacggcatggagatgctggtgtgctacgaggacgagggcgtgtacgtgaacacctacggcagaatcaccaaggacgtggtgctgcagtggggcgagatgcccaccagcgtggcctacatccacagcaaccagatcatgggctggggcgagaaggccatcgagatcagaagcgtggagaccggccacctggacggcgtgttcatgcacaagagagcccagagactgaagttcctgtgcgagagaaacgacaaggtgttcttcgccagcgtgagaagcggcggcagcagccaggtgttcttcatgaccctgaacagaaacagcatgatgaactggtag

SEQ ID NO: 102669 - DNA, 4017 bp, synthetic construct
  misc_feature 1..4017: note = Description of Artificial Sequence: Synthetic coding sequence
  source 1..4017: mol_type = other DNA
atggccagcgacagccccgccagaagcctggacgagatcgacctgagcgccctgagagaccccgccggcatcttcgagctggtggagctggtgggcaacggcacctacggccaggtgtacaagggcagacacgtgaagaccggccagctggccgccatcaaggtgatggacgtgaccggcgacgaggaggaggagatcaagcaggagatcaacatgctgaagaagtacagccaccacagaaacatcgccacctactacggcgccttcatcaagaagaacccccccggcatggacgaccagctgtggctggtgatggagttctgcggcgccggcagcgtgaccgacctgatcaagaacaccaagggcaacaccctgaaggaggagtggatcgcctacatctgcagagagatcctgagaggcctgagccacctgcaccagcacaaggtgatccacagagacatcaagggccagaacgtgctgctgaccgagaacgccgaggtgaagatcgtggacttcggcgtgagcgcccagctggacagaaccgtgggcagaagaaacaccttcatcggcaccccctactggatggcccccgaggtgatcgcctgcgacgagaaccccgacgccacctacgacttcaagagcgacctgtggagcctgggcatcaccgccatcgagatggccgagggcgccccccccctgtgcgacatgcaccccatgagagccctgttcctgatccccagaaaccccgcccccagactgaagagcaagaagtggagcaagaagttccagagcttcatcgagagctgcctggtgaagaaccacagccagagacccgccaccgagcagctgatgaagcaccccttcatcagagaccagcccaacgagagacaggtgagaatccagctgaaggaccacatcgacagaaccaagaagaagagaggcgagaaggacgagaccgagtacgagtacagcggcagcgaggaggaggaggaggagaacgacagcggcgagcccagcagcatcctgaacctgcccggcgagagcaccctgagaagagacttcctgagactgcagctggccaacaaggagagaagcgaggccctgagaagacagcagctggagcagcagcagagagagaacgaggagcacaagagacagctgctggccgagagacagaagagaatcgaggagcagaaggagcagagaagaagactggaggagcagcagagaagagagaaggagctgagaaagcagcaggagagagagcagagaagacactacgaggagcagatgagaagagaggaggagagaagaagagccgagcacgagcaggagtacaagagaaagcagctggaggagcagagacaggccgagagactgcagagacagctgaagcaggagagagactacctggtgagcctgcagcaccagagacaggagcagagacccgtggagaagaagcccctgtaccactacaaggagggcatgagccccagcgagaagcccgcctgggccaaggaggtggaggagagaagcagactgaacagacagagcagccccgccatgccccacaaggtggccaacagaatcagcgaccccaacctgccccccagaagcgagagcttcagcatcagcggcgtgcagcccgccagaaccccccccatgctgagacccgtggacccccagatcccccacctggtggccgtgaagagccagggccccgccctgaccgccagccagagcgtgcacgagcagcccaccaagggcctgagcggcttccaggaggccctgaacgtgaccagccacagagtggagatgcccagacagaacagcgaccccaccagcgagaacccccccctgcccaccagaatcgagaagttcgacagaagcagctggctgagacaggaggaggacatcccccccaaggtgccccagagaaccaccagcatcagccccgccctggccagaaagaacagccccggcaacggcagcgccctgggccccagactgggcagccagcccatcagagccagcaaccccgacctgagaagaaccgagcccatcctggagagccccctgcagagaaccagcagcggcagcagcagcagcagcagcacccccagcagccagcccagcagccagggcggcagccagcccggcagccaggccggcagcagcgagagaaccagagtgagagccaacagcaagagcgagggcagccccgtgctgccccacgagcccgccaaggtgaagcccgaggagagcagagacatcaccagacccagcagacccgccgtgagcgccttcctgagcaagagcttcgagctgctgatctaccaggacctgaccgccctggccaaggagctgagagagctgagaatcgaggagaccaacagacccatgaagaaggtgaccgactacagcagcagcagcgaggagagcgagagcagcgaggaggaggaggaggacggcgagagcgagacccacgacggcaccgtggccgtgagcgacatccccagactgatccccaccggcgcccccggcagcaacgagcagtacaacgtgggcatggtgggcacccacggcctggagaccagccacgccgacagcttcagcggcagcatcagcagagagggcaccctgatgatcagagagaccagcggcgagaagaagagaagcggccacagcgacagcaacggcttcgccggccacatcaacctgcccgacctggtgcagcagagccacagccccgccggcacccccaccgagggcctgggcagagtgagcacccacagccaggagatggacagcggcaccgagtacggcatgggcagcagcaccaaggccagcttcacccccttcgtggaccccagagtgtaccagaccagccccaccgacgaggacgaggaggacgaggagagcagcgccgccgccctgttcaccagcgagctgctgagacaggagcaggccaagctgaacgaggccagaaagatcagcgtggtgaacgtgaaccccaccaacatcagaccccacagcgacacccccgagatcagaaagtacaagaagagattcaacagcgagatcctgtgcgccgccctgtggggcgtgaacctgctggtgggcaccgagaacggcctgatgctgctggacagaagcggccagggcaaggtgtacaacctgatcaacagaagaagattccagcagatggacgtgctggagggcctgaacgtgctggtgaccatcagcggcaagaagaacaagctgagagtgtactacctgagctggctgagaaacagaatcctgcacaacgaccccgaggtggagaagaagcagggctggatcaccgtgggcgacctggagggctgcatccactacaaggtggtgaagtacgagagaatcaagttcctggtgatcgccctgaagaacgccgtggagatctacgcctgggcccccaagccctaccacaagttcatggccttcaagagcttcgccgacctgcagcacaagcccctgctggtggacctgaccgtggaggagggccagagactgaaggtgatcttcggcagccacaccggcttccacgtgatcgacgtggacagcggcaacagctacgacatctacatccccagccacatccagggcaacatcaccccccacgccatcgtgatcctgcccaagaccgacggcatggagatgctggtgtgctacgaggacgagggcgtgtacgtgaacacctacggcagaatcaccaaggacgtggtgctgcagtggggcgagatgcccaccagcgtggcctacatccacagcaaccagatcatgggctggggcgagaaggccatcgagatcagaagcgtggagaccggccacctggacggcgtgttcatgcacaagagagcccagagactgaagttcctgtgcgagagaaacgacaaggtgttcttcgccagcgtgagaagcggcggcagcagccaggtgttcttcatgaccctgaacagaaacagcatgatgaactggtag

SEQ ID NO: 102670 - DNA, 4083 bp, synthetic construct
  misc_feature 1..4083: note = Description of Artificial Sequence: Synthetic coding sequence
  source 1..4083: mol_type = other DNA
atggccagcgacagccccgccagaagcctggacgagatcgacctgagcgccctgagagaccccgccggcatcttcgagctggtggagctggtgggcaacggcacctacggccaggtgtacaagggcagacacgtgaagaccggccagctggccgccatcaaggtgatggacgtgaccggcgacgaggaggaggagatcaagcaggagatcaacatgctgaagaagtacagccaccacagaaacatcgccacctactacggcgccttcatcaagaagaacccccccggcatggacgaccagctgtggctggtgatggagttctgcggcgccggcagcgtgaccgacctgatcaagaacaccaagggcaacaccctgaaggaggagtggatcgcctacatctgcagagagatcctgagaggcctgagccacctgcaccagcacaaggtgatccacagagacatcaagggccagaacgtgctgctgaccgagaacgccgaggtgaagctggtggacttcggcgtgagcgcccagctggacagaaccgtgggcagaagaaacaccttcatcggcaccccctactggatggcccccgaggtgatcgcctgcgacgagaaccccgacgccacctacgacttcaagagcgacctgtggagcctgggcatcaccgccatcgagatggccgagggcgccccccccctgtgcgacatgcaccccatgagagccctgttcctgatccccagaaaccccgcccccagactgaagagcaagaagtggagcaagaagttccagagcttcatcgagagctgcctggtgaagaaccacagccagagacccgccaccgagcagctgatgaagcaccccttcatcagagaccagcccaacgagagacaggtgagaatccagctgaaggaccacatcgacagaaccaagaagaagagaggcgagaaggacgagaccgagtacgagtacagcggcagcgaggaggaggaggaggagaacgacagcggcgagcccagcagcatcctgaacctgcccggcgagagcaccctgagaagagacttcctgagactgcagctggccaacaaggagagaagcgaggccctgagaagacagcagctggagcagcagcagagagagaacgaggagcacaagagacagctgctggccgagagacagaagagaatcgaggagcagaaggagcagagaagaagactggaggagcagcagagaagagagaaggagctgagaaagcagcaggagagagagcagagaagacactacgaggagcagatgagaagagaggaggagagaagaagagccgagcacgagcaggagtacatcagaagacagctggaggaggagcagagacagctggagatcctgcagcagcagctgctgcacgagcaggccctgctgctggagtacaagagaaagcagctggaggagcagagacaggccgagagactgcagagacagctgaagcaggagagagactacctggtgagcctgcagcaccagagacaggagcagagacccgtggagaagaagcccctgtaccactacaaggagggcatgagccccagcgagaagcccgcctgggccaaggaggtggaggagagaagcagactgaacagacagagcagccccgccatgccccacaaggtggccaacagaatcagcgaccccaacctgccccccagaagcgagagcttcagcatcagcggcgtgcagcccgccagaaccccccccatgctgagacccgtggacccccagatcccccacctggtggccgtgaagagccagggccccgccctgaccgccagccagagcgtgcacgagcagcccaccaagggcctgagcggcttccaggaggccctgaacgtgaccagccacagagtggagatgcccagacagaacagcgaccccaccagcgagaacccccccctgcccaccagaatcgagaagttcgacagaagcagctggctgagacaggaggaggacatcccccccaaggtgccccagagaaccaccagcatcagccccgccctggccagaaagaacagccccggcaacggcagcgccctgggccccagactgggcagccagcccatcagagccagcaaccccgacctgagaagaaccgagcccatcctggagagccccctgcagagaaccagcagcggcagcagcagcagcagcagcacccccagcagccagcccagcagccagggcggcagccagcccggcagccaggccggcagcagcgagagaaccagagtgagagccaacagcaagagcgagggcagccccgtgctgccccacgagcccgccaaggtgaagcccgaggagagcagagacatcaccagacccagcagacccgccagctacaagaaggccatcgacgaggacctgaccgccctggccaaggagctgagagagctgagaatcgaggagaccaacagacccatgaagaaggtgaccgactacagcagcagcagcgaggagagcgagagcagcgaggaggaggaggaggacggcgagagcgagacccacgacggcaccgtggccgtgagcgacatccccagactgatccccaccggcgcccccggcagcaacgagcagtacaacgtgggcatggtgggcacccacggcctggagaccagccacgccgacagcttcagcggcagcatcagcagagagggcaccctgatgatcagagagaccagcggcgagaagaagagaagcggccacagcgacagcaacggcttcgccggccacatcaacctgcccgacctggtgcagcagagccacagccccgccggcacccccaccgagggcctgggcagagtgagcacccacagccaggagatggacagcggcaccgagtacggcatgggcagcagcaccaaggccagcttcacccccttcgtggaccccagagtgtaccagaccagccccaccgacgaggacgaggaggacgaggagagcagcgccgccgccctgttcaccagcgagctgctgagacaggagcaggccaagctgaacgaggccagaaagatcagcgtggtgaacgtgaaccccaccaacatcagaccccacagcgacacccccgagatcagaaagtacaagaagagattcaacagcgagatcctgtgcgccgccctgtggggcgtgaacctgctggtgggcaccgagaacggcctgatgctgctggacagaagcggccagggcaaggtgtacaacctgatcaacagaagaagattccagcagatggacgtgctggagggcctgaacgtgctggtgaccatcagcggcaagaagaacaagctgagagtgtactacctgagctggctgagaaacagaatcctgcacaacgaccccgaggtggagaagaagcagggctggatcaccgtgggcgacctggagggctgcatccactacaaggtggtgaagtacgagagaatcaagttcctggtgatcgccctgaagaacgccgtggagatctacgcctgggcccccaagccctaccacaagttcatggccttcaagagcttcgccgacctgcagcacaagcccctgctggtggacctgaccgtggaggagggccagagactgaaggtgatcttcggcagccacaccggcttccacgtgatcgacgtggacagcggcaacagctacgacatctacatccccagccacatccagggcaacatcaccccccacgccatcgtgatcctgcccaagaccgacggcatggagatgctggtgtgctacgaggacgagggcgtgtacgtgaacacctacggcagaatcaccaaggacgtggtgctgcagtggggcgagatgcccaccagcgtggcctacatccacagcaaccagatcatgggctggggcgagaaggccatcgagatcagaagcgtggagaccggccacctggacggcgtgttcatgcacaagagagcccagagactgaagttcctgtgcgagagaaacgacaaggtgttcttcgccagcgtgagaagcggcggcagcagccaggtgttcttcatgaccctgaacagaaacagcatgatgaactggtag

SEQ ID NO: 102671 - DNA, 3894 bp, synthetic construct
  misc_feature 1..3894: note = Description of Artificial Sequence: Synthetic coding sequence
  source 1..3894: mol_type = other DNA
atggccagcgacagccccgccagaagcctggacgagatcgacctgagcgccctgagagaccccgccggcatcttcgagctggtggagctggtgggcaacggcacctacggccaggtgtacaagggcagacacgtgaagaccggccagctggccgccatcaaggtgatggacgtgaccggcgacgaggaggaggagatcaagcaggagatcaacatgctgaagaagtacagccaccacagaaacatcgccacctactacggcgccttcatcaagaagaacccccccggcatggacgaccagctgtggctggtgatggagttctgcggcgccggcagcgtgaccgacctgatcaagaacaccaagggcaacaccctgaaggaggagtggatcgcctacatctgcagagagatcctgagaggcctgagccacctgcaccagcacaaggtgatccacagagacatcaagggccagaacgtgctgctgaccgagaacgccgaggtgaagctggtggacttcggcgtgagcgcccagctggacagaaccgtgggcagaagaaacaccttcatcggcaccccctactggatggcccccgaggtgatcgcctgcgacgagaaccccgacgccacctacgacttcaagagcgacctgtggagcctgggcatcaccgccatcgagatggccgagggcgccccccccctgtgcgacatgcaccccatgagagccctgttcctgatccccagaaaccccgcccccagactgaagagcaagaagtggagcaagaagttccagagcttcatcgagagctgcctggtgaagaaccacagccagagacccgccaccgagcagctgatgaagcaccccttcatcagagaccagcccaacgagagacaggtgagaatccagctgaaggaccacatcgacagaaccaagaagaagagaggcgagaaggacgagaccgagtacgagtacagcggcagcgaggaggaggaggaggagaacgacagcggcgagcccagcagcatcctgaacctgcccggcgagagcaccctgagaagagacttcctgagactgcagctggccaacaaggagagaagcgaggccctgagaagacagcagctggagcagcagcagagagagaacgaggagcacaagagacagctgctggccgagagacagaagagaatcgaggagcagaaggagcagagaagaagactggaggagcagcagagaagagagaaggagctgagaaagcagcaggagagagagcagagaagacactacgaggagcagatgagaagagaggaggagagaagaagagccgagcacgagcaggagtacatcagaagacagctggaggaggagcagagacagctggagatcctgcagcagcagctgctgcacgagcaggccctgctgctggagtacaagagaaagcagctggaggagcagagacaggccgagagactgcagagacagctgaagcaggagagagactacctggtgagcctgcagcaccagagacaggagcagagacccgtggagaagaagcccctgtaccactacaaggagggcatgagccccagcgagaagcccgcctgggccaaggagatcccccacctggtggccgtgaagagccagggccccgccctgaccgccagccagagcgtgcacgagcagcccaccaagggcctgagcggcttccaggaggccctgaacgtgaccagccacagagtggagatgcccagacagaacagcgaccccaccagcgagaacccccccctgcccaccagaatcgagaagttcgacagaagcagctggctgagacaggaggaggacatcccccccaaggtgccccagagaaccaccagcatcagccccgccctggccagaaagaacagccccggcaacggcagcgccctgggccccagactgggcagccagcccatcagagccagcaaccccgacctgagaagaaccgagcccatcctggagagccccctgcagagaaccagcagcggcagcagcagcagcagcagcacccccagcagccagcccagcagccagggcggcagccagcccggcagccaggccggcagcagcgagagaaccagagtgagagccaacagcaagagcgagggcagccccgtgctgccccacgagcccgccaaggtgaagcccgaggagagcagagacatcaccagacccagcagacccgccgacctgaccgccctggccaaggagctgagagagctgagaatcgaggagaccaacagacccatgaagaaggtgaccgactacagcagcagcagcgaggagagcgagagcagcgaggaggaggaggaggacggcgagagcgagacccacgacggcaccgtggccgtgagcgacatccccagactgatccccaccggcgcccccggcagcaacgagcagtacaacgtgggcatggtgggcacccacggcctggagaccagccacgccgacagcttcagcggcagcatcagcagagagggcaccctgatgatcagagagaccagcggcgagaagaagagaagcggccacagcgacagcaacggcttcgccggccacatcaacctgcccgacctggtgcagcagagccacagccccgccggcacccccaccgagggcctgggcagagtgagcacccacagccaggagatggacagcggcaccgagtacggcatgggcagcagcaccaaggccagcttcacccccttcgtggaccccagagtgtaccagaccagccccaccgacgaggacgaggaggacgaggagagcagcgccgccgccctgttcaccagcgagctgctgagacaggagcaggccaagctgaacgaggccagaaagatcagcgtggtgaacgtgaaccccaccaacatcagaccccacagcgacacccccgagatcagaaagtacaagaagagattcaacagcgagatcctgtgcgccgccctgtggggcgtgaacctgctggtgggcaccgagaacggcctgatgctgctggacagaagcggccagggcaaggtgtacaacctgatcaacagaagaagattccagcagatggacgtgctggagggcctgaacgtgctggtgaccatcagcggcaagaagaacaagctgagagtgtactacctgagctggctgagaaacagaatcctgcacaacgaccccgaggtggagaagaagcagggctggatcaccgtgggcgacctggagggctgcatccactacaaggtggtgaagtacgagagaatcaagttcctggtgatcgccctgaagaacgccgtggagatctacgcctgggcccccaagccctaccacaagttcatggccttcaagagcttcgccgacctgcagcacaagcccctgctggtggacctgaccgtggaggagggccagagactgaaggtgatcttcggcagccacaccggcttccacgtgatcgacgtggacagcggcaacagctacgacatctacatccccagccacatccagggcaacatcaccccccacgccatcgtgatcctgcccaagaccgacggcatggagatgctggtgtgctacgaggacgagggcgtgtacgtgaacacctacggcagaatcaccaaggacgtggtgctgcagtggggcgagatgcccaccagcgtggcctacatccacagcaaccagatcatgggctggggcgagaaggccatcgagatcagaagcgtggagaccggccacctggacggcgtgttcatgcacaagagagcccagagactgaagttcctgtgcgagagaaacgacaaggtgttcttcgccagcgtgagaagcggcggcagcagccaggtgttcttcatgaccctgaacagaaacagcatgatgaactggtag

SEQ ID NO: 102672 - DNA, 3972 bp, synthetic construct
  misc_feature 1..3972: note = Description of Artificial Sequence: Synthetic coding sequence
  source 1..3972: mol_type = other DNA
atggccagcgacagccccgccagaagcctggacgagatcgacctgagcgccctgagagaccccgccggcatcttcgagctggtggagctggtgggcaacggcacctacggccaggtgtacaagggcagacacgtgaagaccggccagctggccgccatcaaggtgatggacgtgaccggcgacgaggaggaggagatcaagcaggagatcaacatgctgaagaagtacagccaccacagaaacatcgccacctactacggcgccttcatcaagaagaacccccccggcatggacgaccagctgtggctggtgatggagttctgcggcgccggcagcgtgaccgacctgatcaagaacaccaagggcaacaccctgaaggaggagtggatcgcctacatctgcagagagatcctgagaggcctgagccacctgcaccagcacaaggtgatccacagagacatcaagggccagaacgtgctgctgaccgagaacgccgaggtgaagctggtggacttcggcgtgagcgcccagctggacagaaccgtgggcagaagaaacaccttcatcggcaccccctactggatggcccccgaggtgatcgcctgcgacgagaaccccgacgccacctacgacttcaagagcgacctgtggagcctgggcatcaccgccatcgagatggccgagggcgccccccccctgtgcgacatgcaccccatgagagccctgttcctgatccccagaaaccccgcccccagactgaagagcaagaagtggagcaagaagttccagagcttcatcgagagctgcctggtgaagaaccacagccagagacccgccaccgagcagctgatgaagcaccccttcatcagagaccagcccaacgagagacaggtgagaatccagctgaaggaccacatcgacagaaccaagaagaagagaggcgagaaggacgagaccgagtacgagtacagcggcagcgaggaggaggaggaggagaacgacagcggcgagcccagcagcatcctgaacctgcccggcgagagcaccctgagaagagacttcctgagactgcagctggccaacaaggagagaagcgaggccctgagaagacagcagctggagcagcagcagagagagaacgaggagcacaagagacagctgctggccgagagacagaagagaatcgaggagcagaaggagcagagaagaagactggaggagcagcagagaagagagaaggagctgagaaagcagcaggagagagagcagagaagacactacgaggagcagatgagaagagaggaggagagaagaagagccgagcacgagcaggagtacaagagaaagcagctggaggagcagagacaggccgagagactgcagagacagctgaagcaggagagagactacctggtgagcctgcagcaccagagacaggagcagagacccgtggagaagaagcccctgtaccactacaaggagggcatgagccccagcgagaagcccgcctgggccaaggaggtggaggagagaagcagactgaacagacagagcagccccgccatgccccacaaggtggccaacagaatcagcgaccccaacctgccccccagaagcgagagcttcagcatcagcggcgtgcagcccgccagaaccccccccatgctgagacccgtggacccccagatcccccacctggtggccgtgaagagccagggccccgccctgaccgccagccagagcgtgcacgagcagcccaccaagggcctgagcggcttccaggaggccctgaacgtgaccagccacagagtggagatgcccagacagaacagcgaccccaccagcgagaacccccccctgcccaccagaatcgagaagttcgacagaagcagctggctgagacaggaggaggacatcccccccaaggtgccccagagaaccaccagcatcagccccgccctggccagaaagaacagccccggcaacggcagcgccctgggccccagactgggcagccagcccatcagagccagcaaccccgacctgagaagaaccgagcccatcctggagagccccctgcagagaaccagcagcggcagcagcagcagcagcagcacccccagcagccagcccagcagccagggcggcagccagcccggcagccaggccggcagcagcgagagaaccagagtgagagccaacagcaagagcgagggcagccccgtgctgccccacgagcccgccaaggtgaagcccgaggagagcagagacatcaccagacccagcagacccgccgacctgaccgccctggccaaggagctgagagagctgagaatcgaggagaccaacagacccatgaagaaggtgaccgactacagcagcagcagcgaggagagcgagagcagcgaggaggaggaggaggacggcgagagcgagacccacgacggcaccgtggccgtgagcgacatccccagactgatccccaccggcgcccccggcagcaacgagcagtacaacgtgggcatggtgggcacccacggcctggagaccagccacgccgacagcttcagcggcagcatcagcagagagggcaccctgatgatcagagagaccagcggcgagaagaagagaagcggccacagcgacagcaacggcttcgccggccacatcaacctgcccgacctggtgcagcagagccacagccccgccggcacccccaccgagggcctgggcagagtgagcacccacagccaggagatggacagcggcaccgagtacggcatgggcagcagcaccaaggccagcttcacccccttcgtggaccccagagtgtaccagaccagccccaccgacgaggacgaggaggacgaggagagcagcgccgccgccctgttcaccagcgagctgctgagacaggagcaggccaagctgaacgaggccagaaagatcagcgtggtgaacgtgaaccccaccaacatcagaccccacagcgacacccccgagatcagaaagtacaagaagagattcaacagcgagatcctgtgcgccgccctgtggggcgtgaacctgctggtgggcaccgagaacggcctgatgctgctggacagaagcggccagggcaaggtgtacaacctgatcaacagaagaagattccagcagatggacgtgctggagggcctgaacgtgctggtgaccatcagcggcaagaagaacaagctgagagtgtactacctgagctggctgagaaacagaatcctgcacaacgaccccgaggtggagaagaagcagggctggatcaccgtgggcgacctggagggctgcatccactacaaggtggtgaagtacgagagaatcaagttcctggtgatcgccctgaagaacgccgtggagatctacgcctgggcccccaagccctaccacaagttcatggccttcaagagcttcgccgacctgcagcacaagcccctgctggtggacctgaccgtggaggagggccagagactgaaggtgatcttcggcagccacaccggcttccacgtgatcgacgtggacagcggcaacagctacgacatctacatccccagccacatccagggcaacatcaccccccacgccatcgtgatcctgcccaagaccgacggcatggagatgctggtgtgctacgaggacgagggcgtgtacgtgaacacctacggcagaatcaccaaggacgtggtgctgcagtggggcgagatgcccaccagcgtggcctacatccacagcaaccagatcatgggctggggcgagaaggccatcgagatcagaagcgtggagaccggccacctggacggcgtgttcatgcacaagagagcccagagactgaagttcctgtgcgagagaaacgacaaggtgttcttcgccagcgtgagaagcggcggcagcagccaggtgttcttcatgaccctgaacagaaacagcatgatgaactggtag

SEQ ID NO: 102673 - DNA, 3807 bp, synthetic construct
  misc_feature 1..3807: note = Description of Artificial Sequence: Synthetic coding sequence
  source 1..3807: mol_type = other DNA
atggccagcgacagccccgccagaagcctggacgagatcgacctgagcgccctgagagaccccgccggcatcttcgagctggtggagctggtgggcaacggcacctacggccaggtgtacaagggcagacacgtgaagaccggccagctggccgccatcaaggtgatggacgtgaccggcgacgaggaggaggagatcaagcaggagatcaacatgctgaagaagtacagccaccacagaaacatcgccacctactacggcgccttcatcaagaagaacccccccggcatggacgaccagctgtggctggtgatggagttctgcggcgccggcagcgtgaccgacctgatcaagaacaccaagggcaacaccctgaaggaggagtggatcgcctacatctgcagagagatcctgagaggcctgagccacctgcaccagcacaaggtgatccacagagacatcaagggccagaacgtgctgctgaccgagaacgccgaggtgaagctggtggacttcggcgtgagcgcccagctggacagaaccgtgggcagaagaaacaccttcatcggcaccccctactggatggcccccgaggtgatcgcctgcgacgagaaccccgacgccacctacgacttcaagagcgacctgtggagcctgggcatcaccgccatcgagatggccgagggcgccccccccctgtgcgacatgcaccccatgagagccctgttcctgatccccagaaaccccgcccccagactgaagagcaagaagtggagcaagaagttccagagcttcatcgagagctgcctggtgaagaaccacagccagagacccgccaccgagcagctgatgaagcaccccttcatcagagaccagcccaacgagagacaggtgagaatccagctgaaggaccacatcgacagaaccaagaagaagagaggcgagaaggacgagaccgagtacgagtacagcggcagcgaggaggaggaggaggagaacgacagcggcgagcccagcagcatcctgaacctgcccggcgagagcaccctgagaagagacttcctgagactgcagctggccaacaaggagagaagcgaggccctgagaagacagcagctggagcagcagcagagagagaacgaggagcacaagagacagctgctggccgagagacagaagagaatcgaggagcagaaggagcagagaagaagactggaggagcagcagagaagagagaaggagctgagaaagcagcaggagagagagcagagaagacactacgaggagcagatgagaagagaggaggagagaagaagagccgagcacgagcaggagtacaagagaaagcagctggaggagcagagacaggccgagagactgcagagacagctgaagcaggagagagactacctggtgagcctgcagcaccagagacaggagcagagacccgtggagaagaagcccctgtaccactacaaggagggcatgagccccagcgagaagcccgcctgggccaaggagatcccccacctggtggccgtgaagagccagggccccgccctgaccgccagccagagcgtgcacgagcagcccaccaagggcctgagcggcttccaggaggccctgaacgtgaccagccacagagtggagatgcccagacagaacagcgaccccaccagcgagaacccccccctgcccaccagaatcgagaagttcgacagaagcagctggctgagacaggaggaggacatcccccccaaggtgccccagagaaccaccagcatcagccccgccctggccagaaagaacagccccggcaacggcagcgccctgggccccagactgggcagccagcccatcagagccagcaaccccgacctgagaagaaccgagcccatcctggagagccccctgcagagaaccagcagcggcagcagcagcagcagcagcacccccagcagccagcccagcagccagggcggcagccagcccggcagccaggccggcagcagcgagagaaccagagtgagagccaacagcaagagcgagggcagccccgtgctgccccacgagcccgccaaggtgaagcccgaggagagcagagacatcaccagacccagcagacccgccgacctgaccgccctggccaaggagctgagagagctgagaatcgaggagaccaacagacccatgaagaaggtgaccgactacagcagcagcagcgaggagagcgagagcagcgaggaggaggaggaggacggcgagagcgagacccacgacggcaccgtggccgtgagcgacatccccagactgatccccaccggcgcccccggcagcaacgagcagtacaacgtgggcatggtgggcacccacggcctggagaccagccacgccgacagcttcagcggcagcatcagcagagagggcaccctgatgatcagagagaccagcggcgagaagaagagaagcggccacagcgacagcaacggcttcgccggccacatcaacctgcccgacctggtgcagcagagccacagccccgccggcacccccaccgagggcctgggcagagtgagcacccacagccaggagatggacagcggcaccgagtacggcatgggcagcagcaccaaggccagcttcacccccttcgtggaccccagagtgtaccagaccagccccaccgacgaggacgaggaggacgaggagagcagcgccgccgccctgttcaccagcgagctgctgagacaggagcaggccaagctgaacgaggccagaaagatcagcgtggtgaacgtgaaccccaccaacatcagaccccacagcgacacccccgagatcagaaagtacaagaagagattcaacagcgagatcctgtgcgccgccctgtggggcgtgaacctgctggtgggcaccgagaacggcctgatgctgctggacagaagcggccagggcaaggtgtacaacctgatcaacagaagaagattccagcagatggacgtgctggagggcctgaacgtgctggtgaccatcagcggcaagaagaacaagctgagagtgtactacctgagctggctgagaaacagaatcctgcacaacgaccccgaggtggagaagaagcagggctggatcaccgtgggcgacctggagggctgcatccactacaaggtggtgaagtacgagagaatcaagttcctggtgatcgccctgaagaacgccgtggagatctacgcctgggcccccaagccctaccacaagttcatggccttcaagagcttcgccgacctgcagcacaagcccctgctggtggacctgaccgtggaggagggccagagactgaaggtgatcttcggcagccacaccggcttccacgtgatcgacgtggacagcggcaacagctacgacatctacatccccagccacatccagggcaacatcaccccccacgccatcgtgatcctgcccaagaccgacggcatggagatgctggtgtgctacgaggacgagggcgtgtacgtgaacacctacggcagaatcaccaaggacgtggtgctgcagtggggcgagatgcccaccagcgtggcctacatccacagcaaccagatcatgggctggggcgagaaggccatcgagatcagaagcgtggagaccggccacctggacggcgtgttcatgcacaagagagcccagagactgaagttcctgtgcgagagaaacgacaaggtgttcttcgccagcgtgagaagcggcggcagcagccaggtgttcttcatgaccctgaacagaaacagcatgatgaactggtag

SEQ ID NO: 102674 - DNA, 3918 bp, synthetic construct
  misc_feature 1..3918: note = Description of Artificial Sequence: Synthetic coding sequence
  source 1..3918: mol_type = other DNA
atggccagcgacagccccgccagaagcctggacgagatcgacctgagcgccctgagagaccccgccggcatcttcgagctggtggagctggtgggcaacggcacctacggccaggtgtacaagggcagacacgtgaagaccggccagctggccgccatcaaggtgatggacgtgaccggcgacgaggaggaggagatcaagcaggagatcaacatgctgaagaagtacagccaccacagaaacatcgccacctactacggcgccttcatcaagaagaacccccccggcatggacgaccagctgtggctggtgatggagttctgcggcgccggcagcgtgaccgacctgatcaagaacaccaagggcaacaccctgaaggaggagtggatcgcctacatctgcagagagatcctgagaggcctgagccacctgcaccagcacaaggtgatccacagagacatcaagggccagaacgtgctgctgaccgagaacgccgaggtgaagctggtggacttcggcgtgagcgcccagctggacagaaccgtgggcagaagaaacaccttcatcggcaccccctactggatggcccccgaggtgatcgcctgcgacgagaaccccgacgccacctacgacttcaagagcgacctgtggagcctgggcatcaccgccatcgagatggccgagggcgccccccccctgtgcgacatgcaccccatgagagccctgttcctgatccccagaaaccccgcccccagactgaagagcaagaagtggagcaagaagttccagagcttcatcgagagctgcctggtgaagaaccacagccagagacccgccaccgagcagctgatgaagcaccccttcatcagagaccagcccaacgagagacaggtgagaatccagctgaaggaccacatcgacagaaccaagaagaagagaggcgagaaggacgagaccgagtacgagtacagcggcagcgaggaggaggaggaggagaacgacagcggcgagcccagcagcatcctgaacctgcccggcgagagcaccctgagaagagacttcctgagactgcagctggccaacaaggagagaagcgaggccctgagaagacagcagctggagcagcagcagagagagaacgaggagcacaagagacagctgctggccgagagacagaagagaatcgaggagcagaaggagcagagaagaagactggaggagcagcagagaagagagaaggagctgagaaagcagcaggagagagagcagagaagacactacgaggagcagatgagaagagaggaggagagaagaagagccgagcacgagcaggagtacatcagaagacagctggaggaggagcagagacagctggagatcctgcagcagcagctgctgcacgagcaggccctgctgctggagtacaagagaaagcagctggaggagcagagacaggccgagagactgcagagacagctgaagcaggagagagactacctggtgagcctgcagcaccagagacaggagcagagacccgtggagaagaagcccctgtaccactacaaggagggcatgagccccagcgagaagcccgcctgggccaaggagatcccccacctggtggccgtgaagagccagggccccgccctgaccgccagccagagcgtgcacgagcagcccaccaagggcctgagcggcttccaggaggccctgaacgtgaccagccacagagtggagatgcccagacagaacagcgaccccaccagcgagaacccccccctgcccaccagaatcgagaagttcgacagaagcagctggctgagacaggaggaggacatcccccccaaggtgccccagagaaccaccagcatcagccccgccctggccagaaagaacagccccggcaacggcagcgccctgggccccagactgggcagccagcccatcagagccagcaaccccgacctgagaagaaccgagcccatcctggagagccccctgcagagaaccagcagcggcagcagcagcagcagcagcacccccagcagccagcccagcagccagggcggcagccagcccggcagccaggccggcagcagcgagagaaccagagtgagagccaacagcaagagcgagggcagccccgtgctgccccacgagcccgccaaggtgaagcccgaggagagcagagacatcaccagacccagcagacccgccagctacaagaaggccatcgacgaggacctgaccgccctggccaaggagctgagagagctgagaatcgaggagaccaacagacccatgaagaaggtgaccgactacagcagcagcagcgaggagagcgagagcagcgaggaggaggaggaggacggcgagagcgagacccacgacggcaccgtggccgtgagcgacatccccagactgatccccaccggcgcccccggcagcaacgagcagtacaacgtgggcatggtgggcacccacggcctggagaccagccacgccgacagcttcagcggcagcatcagcagagagggcaccctgatgatcagagagaccagcggcgagaagaagagaagcggccacagcgacagcaacggcttcgccggccacatcaacctgcccgacctggtgcagcagagccacagccccgccggcacccccaccgagggcctgggcagagtgagcacccacagccaggagatggacagcggcaccgagtacggcatgggcagcagcaccaaggccagcttcacccccttcgtggaccccagagtgtaccagaccagccccaccgacgaggacgaggaggacgaggagagcagcgccgccgccctgttcaccagcgagctgctgagacaggagcaggccaagctgaacgaggccagaaagatcagcgtggtgaacgtgaaccccaccaacatcagaccccacagcgacacccccgagatcagaaagtacaagaagagattcaacagcgagatcctgtgcgccgccctgtggggcgtgaacctgctggtgggcaccgagaacggcctgatgctgctggacagaagcggccagggcaaggtgtacaacctgatcaacagaagaagattccagcagatggacgtgctggagggcctgaacgtgctggtgaccatcagcggcaagaagaacaagctgagagtgtactacctgagctggctgagaaacagaatcctgcacaacgaccccgaggtggagaagaagcagggctggatcaccgtgggcgacctggagggctgcatccactacaaggtggtgaagtacgagagaatcaagttcctggtgatcgccctgaagaacgccgtggagatctacgcctgggcccccaagccctaccacaagttcatggccttcaagagcttcgccgacctgcagcacaagcccctgctggtggacctgaccgtggaggagggccagagactgaaggtgatcttcggcagccacaccggcttccacgtgatcgacgtggacagcggcaacagctacgacatctacatccccagccacatccagggcaacatcaccccccacgccatcgtgatcctgcccaagaccgacggcatggagatgctggtgtgctacgaggacgagggcgtgtacgtgaacacctacggcagaatcaccaaggacgtggtgctgcagtggggcgagatgcccaccagcgtggcctacatccacagcaaccagatcatgggctggggcgagaaggccatcgagatcagaagcgtggagaccggccacctggacggcgtgttcatgcacaagagagcccagagactgaagttcctgtgcgagagaaacgacaaggtgttcttcgccagcgtgagaagcggcggcagcagccaggtgttcttcatgaccctgaacagaaacagcatgatgaactggtag

SEQ ID NO: 102675 - DNA, 3939 bp, synthetic construct
  misc_feature 1..3939: note = Description of Artificial Sequence: Synthetic coding sequence
  source 1..3939: mol_type = other DNA
atggccagcgacagccccgccagaagcctggacgagatcgacctgagcgccctgagagaccccgccggcatcttcgagctggtggagctggtgggcaacggcacctacggccaggtgtacaagggcagacacgtgaagaccggccagctggccgccatcaaggtgatggacgtgaccggcgacgaggaggaggagatcaagcaggagatcaacatgctgaagaagtacagccaccacagaaacatcgccacctactacggcgccttcatcaagaagaacccccccggcatggacgaccagctgtggctggtgatggagttctgcggcgccggcagcgtgaccgacctgatcaagaacaccaagggcaacaccctgaaggaggagtggatcgcctacatctgcagagagatcctgagaggcctgagccacctgcaccagcacaaggtgatccacagagacatcaagggccagaacgtgctgctgaccgagaacgccgaggtgaagatcgtggacttcggcgtgagcgcccagctggacagaaccgtgggcagaagaaacaccttcatcggcaccccctactggatggcccccgaggtgatcgcctgcgacgagaaccccgacgccacctacgacttcaagagcgacctgtggagcctgggcatcaccgccatcgagatggccgagggcgccccccccctgtgcgacatgcaccccatgagagccctgttcctgatccccagaaaccccgcccccagactgaagagcaagaagtggagcaagaagttccagagcttcatcgagagctgcctggtgaagaaccacagccagagacccgccaccgagcagctgatgaagcaccccttcatcagagaccagcccaacgagagacaggtgagaatccagctgaaggaccacatcgacagaaccaagaagaagagaggcgagaaggacgagaccgagtacgagtacagcggcagcgaggaggaggaggaggagaacgacagcggcgagcccagcagcatcctgaacctgcccggcgagagcaccctgagaagagacttcctgagactgcagctggccaacaaggagagaagcgaggccctgagaagacagcagctggagcagcagcagagagagaacgaggagcacaagagacagctgctggccgagagacagaagagaatcgaggagcagaaggagcagagaagaagactggaggagcagcagagaagagagaaggagctgagaaagcagcaggagagagagcagagaagacactacgaggagcagatgagaagagaggaggagagaagaagagccgagcacgagcaggagtacatcagaagacagctggaggaggagcagagacagctggagatcctgcagcagcagctgctgcacgagcaggccctgctgctggagtacaagagaaagcagctggaggagcagagacaggccgagagactgcagagacagctgaagcaggagagagactacctggtgagcctgcagcaccagagacaggagcagagacccgtggagaagaagcccctgtaccactacaaggagggcatgagccccagcgagaagcccgcctgggccaaggagatcccccacctggtggccgtgaagagccagggccccgccctgaccgccagccagagcgtgcacgagcagcccaccaagggcctgagcggcttccaggaggccctgaacgtgaccagccacagagtggagatgcccagacagaacagcgaccccaccagcgagaacccccccctgcccaccagaatcgagaagttcgacagaagcagctggctgagacaggaggaggacatcccccccaaggtgccccagagaaccaccagcatcagccccgccctggccagaaagaacagccccggcaacggcagcgccctgggccccagactgggcagccagcccatcagagccagcaaccccgacctgagaagaaccgagcccatcctggagagccccctgcagagaaccagcagcggcagcagcagcagcagcagcacccccagcagccagcccagcagccagggcggcagccagcccggcagccaggccggcagcagcgagagaaccagagtgagagccaacagcaagagcgagggcagccccgtgctgccccacgagcccgccaaggtgaagcccgaggagagcagagacatcaccagacccagcagacccgccgtgagcgccttcctgagcaagagcttcgagctgctgatctaccaggacctgaccgccctggccaaggagctgagagagctgagaatcgaggagaccaacagacccatgaagaaggtgaccgactacagcagcagcagcgaggagagcgagagcagcgaggaggaggaggaggacggcgagagcgagacccacgacggcaccgtggccgtgagcgacatccccagactgatccccaccggcgcccccggcagcaacgagcagtacaacgtgggcatggtgggcacccacggcctggagaccagccacgccgacagcttcagcggcagcatcagcagagagggcaccctgatgatcagagagaccagcggcgagaagaagagaagcggccacagcgacagcaacggcttcgccggccacatcaacctgcccgacctggtgcagcagagccacagccccgccggcacccccaccgagggcctgggcagagtgagcacccacagccaggagatggacagcggcaccgagtacggcatgggcagcagcaccaaggccagcttcacccccttcgtggaccccagagtgtaccagaccagccccaccgacgaggacgaggaggacgaggagagcagcgccgccgccctgttcaccagcgagctgctgagacaggagcaggccaagctgaacgaggccagaaagatcagcgtggtgaacgtgaaccccaccaacatcagaccccacagcgacacccccgagatcagaaagtacaagaagagattcaacagcgagatcctgtgcgccgccctgtggggcgtgaacctgctggtgggcaccgagaacggcctgatgctgctggacagaagcggccagggcaaggtgtacaacctgatcaacagaagaagattccagcagatggacgtgctggagggcctgaacgtgctggtgaccatcagcggcaagaagaacaagctgagagtgtactacctgagctggctgagaaacagaatcctgcacaacgaccccgaggtggagaagaagcagggctggatcaccgtgggcgacctggagggctgcatccactacaaggtggtgaagtacgagagaatcaagttcctggtgatcgccctgaagaacgccgtggagatctacgcctgggcccccaagccctaccacaagttcatggccttcaagagcttcgccgacctgcagcacaagcccctgctggtggacctgaccgtggaggagggccagagactgaaggtgatcttcggcagccacaccggcttccacgtgatcgacgtggacagcggcaacagctacgacatctacatccccagccacatccagggcaacatcaccccccacgccatcgtgatcctgcccaagaccgacggcatggagatgctggtgtgctacgaggacgagggcgtgtacgtgaacacctacggcagaatcaccaaggacgtggtgctgcagtggggcgagatgcccaccagcgtggcctacatccacagcaaccagatcatgggctggggcgagaaggccatcgagatcagaagcgtggagaccggccacctggacggcgtgttcatgcacaagagagcccagagactgaagttcctgtgcgagagaaacgacaaggtgttcttcgccagcgtgagaagcggcggcagcagccaggtgttcttcatgaccctgaacagaaacagcatgatgaactggtag

SEQ ID NO: 102676 - DNA, 1725 bp, synthetic construct
  misc_feature 1..1725: note = Description of Artificial Sequence: Synthetic coding sequence
  source 1..1725: mol_type = other DNA
atgcccccccagctgcaggagaccagaatgaacagaagcatccccgtggaggtggacgagagcgagccctaccccagccagctgctgaagcccatccccgagtacagccccgaggaggagagcgagccccccgcccccaacatcagaaacatggcccccaacagcctgagcgcccccaccatgctgcacaacagcagcggcgacttcagccaggcccacagcaccctgaagctggccaaccaccagagacccgtgagcagacaggtgacctgcctgagaacccaggtgctggaggacagcgaggacagcttctgcagaagacaccccggcctgggcaaggccttccccagcggctgcagcgccgtgagcgagcccgccagcgagagcgtggtgggcgccctgcccgccgagcaccagttcagcttcatggagaagagaaaccagtggctggtgagccagctgagcgccgccagccccgacaccggccacgacagcgacaagagcgaccagagcctgcccaacgccagcgccgacagcctgggcggcagccaggagatggtgcagagaccccagccccacagaaacagagccggcctggacctgcccaccatcgacaccggctacgacagccagccccaggacgtgctgggcatcagacagctggagagacccctgcccctgaccagcgtgtgctacccccaggacctgcccagacccctgagaagcagagagttcccccagttcgagccccagagataccccgcctgcgcccagatgctgccccccaacctgagcccccacgccccctggaactaccactaccactgccccggcagccccgaccaccaggtgccctacggccacgactaccccagagccgcctaccagcaggtgatccagcccgccctgcccggccagcccctgcccggcgccagcgtgagaggcctgcaccccgtgcagaaggtgatcctgaactaccccagcccctgggaccacgaggagagacccgcccagagagactgcagcttccccggcctgcccagacaccaggaccagccccaccaccagccccccaacagagccggcgcccccggcgagagcctggagtgccccgccgagctgagaccccaggtgccccagccccccagccccgccgccgtgcccagaccccccagcaacccccccgccagaggcaccctgaagaccagcaacctgcccgaggagctgagaaaggtgttcatcacctacagcatggacaccgccatggaggtggtgaagttcgtgaacttcctgctggtgaacggcttccagaccgccatcgacatcttcgaggacagaatcagaggcatcgacatcatcaagtggatggagagatacctgagagacaagaccgtgatgatcatcgtggccatcagccccaagtacaagcaggacgtggagggcgccgagagccagctggacgaggacgagcacggcctgcacaccaagtacatccacagaatgatgcagatcgagttcatcaagcagggcagcatgaacttcagattcatccccgtgctgttccccaacgccaagaaggagcacgtgcccacctggctgcagaacacccacgtgtacagctggcccaagaacaagaagaacatcctgctgagactgctgagagaggaggagtacgtggccccccccagaggccccctgcccaccctgcaggtggtgcccctgtag

SEQ ID NO: 102677 - DNA, 1695 bp, synthetic construct
  misc_feature 1..1695: note = Description of Artificial Sequence: Synthetic coding sequence
  source 1..1695: mol_type = other DNA
atgaacagaagcatccccgtggaggtggacgagagcgagccctaccccagccagctgctgaagcccatccccgagtacagccccgaggaggagagcgagccccccgcccccaacatcagaaacatggcccccaacagcctgagcgcccccaccatgctgcacaacagcagcggcgacttcagccaggcccacagcaccctgaagctggccaaccaccagagacccgtgagcagacaggtgacctgcctgagaacccaggtgctggaggacagcgaggacagcttctgcagaagacaccccggcctgggcaaggccttccccagcggctgcagcgccgtgagcgagcccgccagcgagagcgtggtgggcgccctgcccgccgagcaccagttcagcttcatggagaagagaaaccagtggctggtgagccagctgagcgccgccagccccgacaccggccacgacagcgacaagagcgaccagagcctgcccaacgccagcgccgacagcctgggcggcagccaggagatggtgcagagaccccagccccacagaaacagagccggcctggacctgcccaccatcgacaccggctacgacagccagccccaggacgtgctgggcatcagacagctggagagacccctgcccctgaccagcgtgtgctacccccaggacctgcccagacccctgagaagcagagagttcccccagttcgagccccagagataccccgcctgcgcccagatgctgccccccaacctgagcccccacgccccctggaactaccactaccactgccccggcagccccgaccaccaggtgccctacggccacgactaccccagagccgcctaccagcaggtgatccagcccgccctgcccggccagcccctgcccggcgccagcgtgagaggcctgcaccccgtgcagaaggtgatcctgaactaccccagcccctgggaccacgaggagagacccgcccagagagactgcagcttccccggcctgcccagacaccaggaccagccccaccaccagccccccaacagagccggcgcccccggcgagagcctggagtgccccgccgagctgagaccccaggtgccccagccccccagccccgccgccgtgcccagaccccccagcaacccccccgccagaggcaccctgaagaccagcaacctgcccgaggagctgagaaaggtgttcatcacctacagcatggacaccgccatggaggtggtgaagttcgtgaacttcctgctggtgaacggcttccagaccgccatcgacatcttcgaggacagaatcagaggcatcgacatcatcaagtggatggagagatacctgagagacaccgtgatgatcatcgtggccatcagccccaagtacaagcaggacgtggagggcgccgagagccagctggacgaggacgagcacggcctgcacaccaagtacatccacagaatgatgcagatcgagttcatcaagcagggcagcatgaacttcagattcatccccgtgctgttccccaacgccaagaaggagcacgtgcccacctggctgcagaacacccacgtgtacagctggcccaagaacaagaagaacatcctgctgagactgctgagagaggaggagtacgtggccccccccagaggccccctgcccaccctgcaggtggtgcccctgtag

SEQ ID NO: 102678 - DNA, 1698 bp, synthetic construct
  misc_feature 1..1698: note = Description of Artificial Sequence: Synthetic coding sequence
  source 1..1698: mol_type = other DNA
atgaacagaagcatccccgtggaggtggacgagagcgagccctaccccagccagctgctgaagcccatccccgagtacagccccgaggaggagagcgagccccccgcccccaacatcagaaacatggcccccaacagcctgagcgcccccaccatgctgcacaacagcagcggcgacttcagccaggcccacagcaccctgaagctggccaaccaccagagacccgtgagcagacaggtgacctgcctgagaacccaggtgctggaggacagcgaggacagcttctgcagaagacaccccggcctgggcaaggccttccccagcggctgcagcgccgtgagcgagcccgccagcgagagcgtggtgggcgccctgcccgccgagcaccagttcagcttcatggagaagagaaaccagtggctggtgagccagctgagcgccgccagccccgacaccggccacgacagcgacaagagcgaccagagcctgcccaacgccagcgccgacagcctgggcggcagccaggagatggtgcagagaccccagccccacagaaacagagccggcctggacctgcccaccatcgacaccggctacgacagccagccccaggacgtgctgggcatcagacagctggagagacccctgcccctgaccagcgtgtgctacccccaggacctgcccagacccctgagaagcagagagttcccccagttcgagccccagagataccccgcctgcgcccagatgctgccccccaacctgagcccccacgccccctggaactaccactaccactgccccggcagccccgaccaccaggtgccctacggccacgactaccccagagccgcctaccagcaggtgatccagcccgccctgcccggccagcccctgcccggcgccagcgtgagaggcctgcaccccgtgcagaaggtgatcctgaactaccccagcccctgggaccacgaggagagacccgcccagagagactgcagcttccccggcctgcccagacaccaggaccagccccaccaccagccccccaacagagccggcgcccccggcgagagcctggagtgccccgccgagctgagaccccaggtgccccagccccccagccccgccgccgtgcccagaccccccagcaacccccccgccagaggcaccctgaagaccagcaacctgcccgaggagctgagaaaggtgttcatcacctacagcatggacaccgccatggaggtggtgaagttcgtgaacttcctgctggtgaacggcttccagaccgccatcgacatcttcgaggacagaatcagaggcatcgacatcatcaagtggatggagagatacctgagagacaagaccgtgatgatcatcgtggccatcagccccaagtacaagcaggacgtggagggcgccgagagccagctggacgaggacgagcacggcctgcacaccaagtacatccacagaatgatgcagatcgagttcatcaagcagggcagcatgaacttcagattcatccccgtgctgttccccaacgccaagaaggagcacgtgcccacctggctgcagaacacccacgtgtacagctggcccaagaacaagaagaacatcctgctgagactgctgagagaggaggagtacgtggccccccccagaggccccctgcccaccctgcaggtggtgcccctgtag

SEQ ID NO: 102679 - DNA, 1725 bp, synthetic construct
  misc_feature 1..1725: note = Description of Artificial Sequence: Synthetic coding sequence
  source 1..1725: mol_type = other DNA
atggccccccagctggaggagaccagaatgaacagaagcatccccgtggaggtggacgagagcgagccctaccccagccagctgctgaagcccatccccgagtacagccccgaggaggagagcgagccccccgcccccaacatcagaaacatggcccccaacagcctgagcgcccccaccatgctgcacaacagcagcggcgacttcagccaggcccacagcaccctgaagctggccaaccaccagagacccgtgagcagacaggtgacctgcctgagaacccaggtgctggaggacagcgaggacagcttctgcagaagacaccccggcctgggcaaggccttccccagcggctgcagcgccgtgagcgagcccgccagcgagagcgtggtgggcgccctgcccgccgagcaccagttcagcttcatggagaagagaaaccagtggctggtgagccagctgagcgccgccagccccgacaccggccacgacagcgacaagagcgaccagagcctgcccaacgccagcgccgacagcctgggcggcagccaggagatggtgcagagaccccagccccacagaaacagagccggcctggacctgcccaccatcgacaccggctacgacagccagccccaggacgtgctgggcatcagacagctggagagacccctgcccctgaccagcgtgtgctacccccaggacctgcccagacccctgagaagcagagagttcccccagttcgagccccagagataccccgcctgcgcccagatgctgccccccaacctgagcccccacgccccctggaactaccactaccactgccccggcagccccgaccaccaggtgccctacggccacgactaccccagagccgcctaccagcaggtgatccagcccgccctgcccggccagcccctgcccggcgccagcgtgagaggcctgcaccccgtgcagaaggtgatcctgaactaccccagcccctgggaccacgaggagagacccgcccagagagactgcagcttccccggcctgcccagacaccaggaccagccccaccaccagccccccaacagagccggcgcccccggcgagagcctggagtgccccgccgagctgagaccccaggtgccccagccccccagccccgccgccgtgcccagaccccccagcaacccccccgccagaggcaccctgaagaccagcaacctgcccgaggagctgagaaaggtgttcatcacctacagcatggacaccgccatggaggtggtgaagttcgtgaacttcctgctggtgaacggcttccagaccgccatcgacatcttcgaggacagaatcagaggcatcgacatcatcaagtggatggagagatacctgagagacaagaccgtgatgatcatcgtggccatcagccccaagtacaagcaggacgtggagggcgccgagagccagctggacgaggacgagcacggcctgcacaccaagtacatccacagaatgatgcagatcgagttcatcaagcagggcagcatgaacttcagattcatccccgtgctgttccccaacgccaagaaggagcacgtgcccacctggctgcagaacacccacgtgtacagctggcccaagaacaagaagaacatcctgctgagactgctgagagaggaggagtacgtggccccccccagaggccccctgcccaccctgcaggtggtgcccctgtag

SEQ ID NO: 102680 - DNA, 462 bp, synthetic construct
  misc_feature 1..462: note = Description of Artificial Sequence: Synthetic coding sequence
  source 1..462: mol_type = other DNA
atggaggtggtgaagttcgtgaacttcctgctggtgaacggcttccagaccgccatcgacatcttcgaggacagaatcagaggcatcgacatcatcaagtggatggagagatacctgagagacaagaccgtgatgatcatcgtggccatcagccccaagtacaagcaggacgtggagggcgccgagagccagctggacgaggacgagcacggcctgcacaccaagtacatccacagaatgatgcagatcgagttcatcaagcagggcagcatgaacttcagattcatccccgtgctgttccccaacgccaagaaggagcacgtgcccacctggctgcagaacacccacgtgtacagctggcccaagaacaagaagaacatcctgctgagactgctgagagaggaggagtacgtggccccccccagaggccccctgcccaccctgcaggtggtgcccctgtag

SEQ ID NO: 102681 - DNA, 330 bp, synthetic construct
  misc_feature 1..330: note = Description of Artificial Sequence: Synthetic coding sequence
  source 1..330: mol_type = other DNA
atgatcatcgtggccatcagccccaagtacaagcaggacgtggagggcgccgagagccagctggacgaggacgagcacggcctgcacaccaagtacatccacagaatgatgcagatcgagttcatcaagcagggcagcatgaacttcagattcatccccgtgctgttccccaacgccaagaaggagcacgtgcccacctggctgcagaacacccacgtgtacagctggcccaagaacaagaagaacatcctgctgagactgctgagagaggaggagtacgtggccccccccagaggccccctgcccaccctgcaggtggtgcccctgtag

SEQ ID NO: 102682 - DNA, 1596 bp, synthetic construct
  misc_feature 1..1596: note = Description of Artificial Sequence: Synthetic coding sequence
  source 1..1596: mol_type = other DNA
atgatcagccccgaccccagacccagccccggcctggccagatgggccgagagctacgaggccaagtgcgagagaagacaggagatcagagagagcagaagatgcagacccaacgtgaccacctgcagacaggtgggcaagaccctgagaatccagcagagagagcagctgcagagagccagactgcagcagttcttcagaagaagaaacctggagctggaggagaagggcaaggcccagcacccccaggccagagagcagggccccagcagaagacccggccaggtgaccggcaccagcagcgaggtgttccccgcccagcaccccccccccagcggcatctgcagagacctgagcgaccacctgagcagccaggccggcggcctgcccccccaggacacccccatcaagaagccccccaagcaccacagaggcacccagaccaaggccgagggccccaccatcaagaacgacgccagccagcagaccaactacggcgtggccgtgctggacaaggagatcatccagctgagcgactacctgaaggaggccctgcagagagagctggtgctgaagcagaagatggtgatcctgcaggacctgctgagcaccctgatccaggccagcgacagcagctggaagggccagctgaacgaggacaagctgaagggcaagctgagaagcctggagaaccagctgtacacctgcacccagaagtacagcccctggggcatgaagaaggtgctgctggagatggaggaccagaagaacagctacgagcagaaggccaaggagagcctgcagaaggtgctggaggagaagatgaacgccgagcagcagctgcagagcacccagagaagcctggccctggccgagcagaagtgcgaggagtggagaagccagtacgaggccctgaaggaggactggagaaccctgggcacccagcacagagagctggagagccagctgcacgtgctgcagagcaagctgcagggcgccgacagcagagacctgcagatgaaccaggccctgagattcctggagaacgagcaccagcagctgcaggccaagatcgagtgcctgcagggcgacagagacctgtgcagcctggacacccaggacctgcaggaccagctgaagagaagcgaggccgagaagctgaccctggtgaccagagtgcagcagctgcagggcctgctgcagaaccagagcctgcagctgcaggagcaggagaagctgctgaccaagaaggaccaggccctgcccgtgtggagccccaagagcttccccaacgaggtggagcccgagggcaccggcaaggagaaggactgggacctgagagaccagctgcagaagaagaccctgcagctgcaggccaaggagaaggagtgcagagagctgcacagcgagctggacaacctgagcgacgagtacctgagctgcctgagaaagctgcagcactgcagagaggagctgaaccagagccagcagctgccccccagaagacagtgcggcagatggctgcccgtgctgatggtggtgatcgccgccgccctggccgtgttcctggccaacaaggacaacctgatgatctag

SEQ ID NO: 102683 - DNA, 549 bp, synthetic construct
  misc_feature 1..549: note = Description of Artificial Sequence: Synthetic coding sequence
  source 1..549: mol_type = other DNA
atgaagaaggtgctgctggagatggaggaccagaagaacagctacgagcagaaggccaaggagagcctgcagaaggtgctggaggagaagatgaacgccgagcagcagctgcagagcacccagagaagcctggccctggccgagcagaagtgcgaggagtggagaagccagtacgaggccctgaaggaggactggagaaccctgggcacccagcacagagagctggagagccagctgcacgtgctgcagagcaagctgcagggcgccgacagcagagacctgcagatgaaccaggccctgagattcctggagaacgagcaccagcagctgcaggccaagatcgagtgcctgcagggcgacagagacctgtgcagcctggacacccaggacctgcaggaccagctgaagagaagcgaggccgagaagctgaccctggtgaccagagtgcagcagctgcagggcctgctgcagaaccagagcctgcagctgcaggagcaggagaagctgctgaccaagaagggccagcagatctactaccacaagttctag

SEQ ID NO: 102684 - DNA, 1656 bp, synthetic construct
  misc_feature 1..1656: note = Description of Artificial Sequence: Synthetic coding sequence
  source 1..1656: mol_type = other DNA
atgatcagccccgaccccagacccagccccggcctggccagatgggccgagagctacgaggccaagtgcgagagaagacaggagatcagagagagcagaagatgcagacccaacgtgaccacctgcagacaggtgggcaagaccctgagaatccagcagagagagcagctgcagagagccagactgcagcagttcttcagaagaagaaacctggagctggaggagaagggcaaggcccagcacccccaggccagagagcagggccccagcagaagacccggccaggtgaccgtgctgaaggagcccctgagctgcgccagaagaatcagcagccccagagagcaggtgaccggcaccagcagcgaggtgttccccgcccagcaccccccccccagcggcatctgcagagacctgagcgaccacctgagcagccaggccggcggcctgcccccccaggacacccccatcaagaagccccccaagcaccacagaggcacccagaccaaggccgagggccccaccatcaagaacgacgccagccagcagaccaactacggcgtggccgtgctggacaaggagatcatccagctgagcgactacctgaaggaggccctgcagagagagctggtgctgaagcagaagatggtgatcctgcaggacctgctgagcaccctgatccaggccagcgacagcagctggaagggccagctgaacgaggacaagctgaagggcaagctgagaagcctggagaaccagctgtacacctgcacccagaagtacagcccctggggcatgaagaaggtgctgctggagatggaggaccagaagaacagctacgagcagaaggccaaggagagcctgcagaaggtgctggaggagaagatgaacgccgagcagcagctgcagagcacccagagaagcctggccctggccgagcagaagtgcgaggagtggagaagccagtacgaggccctgaaggaggactggagaaccctgggcacccagcacagagagctggagagccagctgcacgtgctgcagagcaagctgcagggcgccgacagcagagacctgcagatgaaccaggccctgagattcctggagaacgagcaccagcagctgcaggccaagatcgagtgcctgcagggcgacagagacctgtgcagcctggacacccaggacctgcaggaccagctgaagagaagcgaggccgagaagctgaccctggtgaccagagtgcagcagctgcagggcctgctgcagaaccagagcctgcagctgcaggagcaggagaagctgctgaccaagaaggaccaggccctgcccgtgtggagccccaagagcttccccaacgaggtggagcccgagggcaccggcaaggagaaggactgggacctgagagaccagctgcagaagaagaccctgcagctgcaggccaaggagaaggagtgcagagagctgcacagcgagctggacaacctgagcgacgagtacctgagctgcctgagaaagctgcagcactgcagagaggagctgaaccagagccagcagctgccccccagaagacagtgcggcagatggctgcccgtgctgatggtggtgatcgccgccgccctggccgtgttcctggccaacaaggacaacctgatgatctag

SEQ ID NO: 102685 - DNA, 1656 bp, synthetic construct; identical to SEQ ID NO: 102684
  misc_feature 1..1656: note = Description of Artificial Sequence: Synthetic coding sequence
  source 1..1656: mol_type = other DNA

SEQ ID NO: 102686 - DNA, 1596 bp, synthetic construct; identical to SEQ ID NO: 102682
  misc_feature 1..1596: note = Description of Artificial Sequence: Synthetic coding sequence
  source 1..1596: mol_type = other DNA

SEQ ID NO: 102687 - DNA, 1215 bp, synthetic construct
  misc_feature 1..1215: note = Description of Artificial Sequence: Synthetic coding sequence
  source 1..1215: mol_type = other DNA
atgatcagccccgaccccagacccagccccggcctggccagatgggccgagagctacgaggccaagtgcgagagaagacaggagatcagagagagcagaagatgcagacccaacgtgaccacctgcagacaggtgggcaagaccctgagaatccagcagagagagcagctgcagagagccagactgcagcagttcttcagaagaagaaacctggagctggaggagaagggcaaggcccagcacccccaggccagagagcagggccccagcagaagacccggccaggtgaccggcaccagcagcgaggtgttccccgcccagcaccccccccccagcggcatctgcagagacctgagcgaccacctgagcagccaggccggcggcctgcccccccaggacacccccatcaagaagccccccaagcaccacagaggcacccagaccaaggccgagggccccaccatcaagaacgacgccagccagcagaccaactacggcgtggccgtgctggacaaggagatcatccagctgagcgactacctgaaggaggccctgcagagagagctggtgctgaagcagaagatggtgatcctgcaggacctgctgagcaccctgatccaggccagcgacagcagctggaagggccagctgaacgaggacaagctgaagggcaagctgagaagcctggagaaccagctgtacacctgcacccagaagtacagcccctggggcatgaagaaggtgctgctggagatggaggaccagaagaacagctacgagcagaaggccaaggagagcctgcagaaggtgctggaggagaagatgaacgccgagcagcagctgcagagcacccagagaagcctggccctggccgagcagaagtgcgaggagtggagaagccagtacgaggccctgaaggaggactggagaaccctgggcacccagcacagagagctggagagccagctgcacgtgctgcagagcaagctgcagggcgccgacagcagagacctgcagatgaaccaggccctgagattcctggagaacgagcaccagcagctgcaggccaagatcgagtgcctgcagggcgacagagacctgtgcagcctggacacccaggacctgcaggaccagctgaagagaagcgaggccgagaagctgaccctggtgaccagagtgcagcagctgcaggaggccgccggctggaccacctag

SEQ ID NO: 102688 - DNA, 963 bp, synthetic construct
  misc_feature 1..963: note = Description of Artificial Sequence: Synthetic coding sequence
  source 1..963: mol_type = other DNA
atgatcagccccgaccccagacccagccccggcctggccagatgggccgagagctacgaggccaagtgcgagagaagacaggagatcagagagagcagaagatgcagacccaacgtgaccacctgcagacaggtgggcaagaccctgagaatccagcagagagagctggaggagaagggcaaggcccagcacccccaggccagagagcagggccccagcagaagacccggccaggtgaccgtgctgaaggagcccctgagctgcgccagaagaatcagcagccccagagagcaggtgaccggcaccagcagcgaggtgttccccgcccagcaccccccccccagcggcatctgcagagacctgagcgaccacctgagcagccaggccggcggcctgcccccccaggacacccccatcaagaagccccccaagcaccacagaggcacccagaccaaggccgagggccccaccatcaagaacgacgccagccagcagaccaactacggcgtggccgtgctggacaaggagatcatccagctgagcgactacctgaaggaggccctgcagagagagctggtgctgaagcagaagatggtgatcctgcaggacctgctgagcaccctgatccaggccagcgacagcagctggaagggccagctgaacgaggacaagctgaagggcaagctgagaagcctggagaaccagctgtacacctgcacccagaagtacagcccctggggcatgaagaaggtgctgctggagatggaggaccagaagaacagctacgagcagaaggccaaggagagcctgcagaaggtgctggaggagaagatgaacgccgagcagcagctgcagagcacccaggtgtggggctgccacatcgacatgggcctgggcacccccggcagcctgggcaacaagggcagccagctgcacaacagcctggagcccagccccctgtag

SEQ ID NO: 102689 - DNA, 81 bp, synthetic construct
  misc_feature 1..81: note = Description of Artificial Sequence: Synthetic coding sequence
  source 1..81: mol_type = other DNA
atgatcagccccgaccccagacccagccccggcctggccagatgggccgagagctacgaggccaagtgcgagagaagatag

SEQ ID NO: 102690 - DNA, 1671 bp, synthetic construct
  misc_feature 1..1671: note = Description of Artificial Sequence: Synthetic coding sequence
  source 1..1671: mol_type = other DNA
atgcagaagttcatcgaggccgactactacgagctggactggtactacgaggagtgcagcgacgtgctgtgcgccgagagagtgggccagatgaccaagacctacaacgacatcgacgccgtgaccagactgctggaggagaaggagagagacctggagctggccgccagaatcggccagagcctgctgaagaagaacaagaccctgaccgagagaaacgagctgctggaggagcaggtggagcacatcagagaggaggtgagccagctgagacacgagctgagcatgaaggacgagctgctgcagttctacaccagcgccgccgaggagagcgagcccgagagcgtgtgcagcacccccctgaagagaaacgagagcagcagcagcgtgcagaactacttccacctggacagcctgcagaagaagctgaaggacctggaggaggagaacgtggtgctgagaagcgaggccagccagctgaagaccgagaccatcacctacgaggagaaggagcagcagctggtgaacgactgcgtgaaggagctgagagacgccaacgtgcagatcgccagcatcagcgaggagctggccaagaagaccgaggacgccgccagacagcaggaggagatcacccacctgctgagccagatcgtggacctgcagaagaaggccaaggcctgcgccgtggagaacgaggagctggtgcagcacctgggcgccgccaaggacgcccagagacagctgaccgccgagctgagagagctggaggacaagtacgccgagtgcatggagatgctgcacgaggcccaggaggagctgaagaacctgagaaacaagaccatgcccaacaccaccagcagaagataccacagcctgggcctgttccccatggacagcctggccgccgagatcgagggcaccatgagaaaggagctgcagctggaggaggccgagagccccgacatcacccaccagaagagagtgttcgagaccgtgagaaacatcaaccaggtggtgaagcagagaagcctgacccccagccccatgaacatccccggcagcaaccagagcagcgccatgaacagcctgctgagcagctgcgtgagcacccccagaagcagcttctacggcagcgacatcggcaacgtggtgctggacaacaagaccaacagcatcatcctggagaccgaggccgccgacctgggcaacgacgagagaagcaagaagcccggcacccccggcacccccggcagccacgacctggagaccgccctgagaagactgagcctgagaagagagaactacctgagcgagagaagattcttcgaggaggagcaggagagaaagctgcaggagctggccgagaagggcgagctgagaagcggcagcctgacccccaccgagagcatcatgagcctgggcacccacagcagattcagcgagttcaccggcttcagcggcatgagcttcagcagcagaagctacctgcccgagaagctgcagatcgtgaagcccctggagggcgaccacgccggccccagacccctgagcgtgctgctgggcgacagcctgtggagcctgatccacctgagaaaggccggccacctgtgccacgcctacagcttcttcttcagagacagccaccccagatgctggttcgagttcctgtag

SEQ ID NO: 102691 - DNA, 438 bp, synthetic construct
  misc_feature 1..438: note = Description of Artificial Sequence: Synthetic coding sequence
  source 1..438: mol_type = other DNA
atgaccgtgcacaacctgtacctgttcgacagaaacggcgtgtgcctgcactacagcgagtggcacagaaagaagcaggccggcatccccaaggaggaggagtacaagctgatgtacggcatgctgttcagcatcagaagcttcgtgagcaagatgagccccctggacatgaaggacggcttcctggccttccagaccagcagatacaagctgcactactacgagacccccaccggcatcaaggtggtgatgaacaccgacctgggcgtgggccccatcagagacgtgctgcaccacatctacagcgccctgtacgtggagctggtggtgaagaaccccctgtgccccctgggccagaccgtgcagagcgagctgttcagaagcagactggacagctacgtgagaagcctgcccttcttcagcgccagagccggctag

SEQ ID NO: 102692 - DNA, 438 bp, synthetic construct; identical to SEQ ID NO: 102691
  misc_feature 1..438: note = Description of Artificial Sequence: Synthetic coding sequence
  source 1..438: mol_type = other DNA

SEQ ID NO: 102693 - DNA, 3402 bp, synthetic construct
  misc_feature 1..3402: note = Description of Artificial Sequence: Synthetic coding sequence
  source 1..3402: mol_type = other DNA
atgagccccacccagtgggacttccccgtggagctgtgctgcagacccatggccttcgtgaccctgaccggcctggacgtggtgtacaacgccgtgcacagagccgtgtgggacgccttctgcgccaacagaagagccgacagagtgcccatcagcttcaaggtgctgcccggcgaccacgagtaccccaagtgcagacccaagagaaccagctacgagtggtacatccccaagggcatcctgaagaccggctggatgaacaagcacctgaacctggtgcccgccctggtggtggtgttctacgagctggactgggacgagccccagtggaaggagaagcagagcgagtgcgccaccagagtggagatcgtgagacagagcctgcagggcagaaacaccaaggtggccgtggtgctgatccagaagaagacccccctgccccccggcgaggacgtgatcgccagcgagagagccgccgccctgtgcaacgcctgcgagctgagcggcaagagcctgttcgtgctgccccacaccgaccacctggtgggctacatcatcagactggagaacgccttctacgagcacgcccagacctactactacaccgagatcagaagagtgaagagccacaaggagttcctgaacaagaccacccaccagctgctgttcgtgagacaccagttcaagatcgccttcttcagcgagctgaagcaggacacccagaacgccctgaagaactacagaaccgcctacaacctggtgcacgagctgagagcccacgagaccaacatcctggagatcaagaccatggccggcttcatcaactacaagatctgcagactgtgcttccagcacaacacccccctggacgccatcgcccagttcagaaagcacatcgacctgtgcaagaagaagatcggcagcgccgagctgagcttcgagcacgacgcctggatgagcaagcagttccaggccttcggcgacctgttcgacgaggccatcaagctgggcctgaccgccatccagacccagaaccccggcttctactaccagcaggccgcctactacgcccaggagagaaagcagctggccaagaccctgtgcaaccacgaggccagcgtgatgtaccccaaccccgaccccctggagacccagaccggcgtgctggacttctacggccagagaagctggagacagggcatcctgagcttcgacctgagcgaccccgagaaggagaaggtgggcatcctggccatccagctgaaggagagaaacgtggtgcacagcgagatcatcatcaccctgctgagcaacgccgtggcccagttcaagaagtacaagtgccccagaatgaagagccacctgatggtgcagatgggcgaggagtactactacgccaaggactacaccaaggccctgaagctgctggactacgtgatgtgcgactacagaagcgagggctggtggaccctgctgaccagcgtgctgaccaccgccctgaagtgcagctacctgatggcccagctgaaggactacatcacctacagcctggagctgctgggcagagccagcaccctgaaggacgaccagaagagcagaatcgagaagaacctgatcaacgtgctgatgaacgagagccccgaccccgagcccgactgcgacatcctggccgtgaagaccgcccagaagctgtgggccgacagaatcagcctggccggcagcaacatcttcaccatcggcgtgcaggacttcgtgcccttcgtgcagtgcaaggccaagttccacgcccccagcttccacgtggacgtgcccgtgcagttcgacatctacctgaaggccgactgcccccaccccatcagattcagcaagctgtgcgtgagcttcaacaaccaggagtacaaccagttctgcgtgatcgaggaggccagcaaggccaacgaggtgctggagaacctgacccagggcaagatgtgcctggtgcccggcaagaccagaaagctgctgttcaagttcgtggccaagaccgaggacgtgggcaagaagatcgagatcaccagcgtggacctggccctgggcaacgagaccggcagatgcgtggtgctgaactggcagggcggcggcggcgacgccgccagcagccaggaggccctgcaggccgccagaagcttcaagagaagacccaagctgcccgacaacgaggtgcactgggacagcatcatcatccaggccagcaccatgatcatcagcagagtgcccaacatcagcgtgcacctgctgcacgagccccccgccctgaccaacgagatgtactgcctggtggtgaccgtgcagagccacgagaagacccagatcagagacgtgaagctgaccgccggcctgaagcccggccaggacgccaacctgacccagaagacccacgtgaccctgcacggcaccgagctgtgcgacgagagctaccccgccctgctgaccgacatccccgtgggcgacctgcaccccggcgagcagctggagaagatgctgtacgtgagatgcggcaccgtgggcagcagaatgttcctggtgtacgtgagctacctgatcaacaccaccgtggaggagaaggagatcgtgtgcaagtgccacaaggacgagaccgtgaccatcgagaccgtgttccccttcgacgtggccgtgaagttcgtgagcaccaagttcgagcacctggagagagtgtacgccgacatccccttcctgctgatgaccgacctgctgagcgccagcccctgggccctgaccatcgtgagcagcgagctgcagctggcccccagcatgaccaccgtggaccagctggagagccaggtggacaacgtgatcctgcagaccggcgagagcgccagcgagtgcttctgcctgcagtgccccagcctgggcaacatcgagggcggcgtggccaccggccactacatcatcagctggaagagaaccagcgccatggagaacatccccatcatcaccaccgtgatcaccctgccccacgtgatcgtggagaacatccccctgcacgtgaacgccgacctgcccagcttcggcagagtgagagagagcctgcccgtgaagtaccacctgcagaacaagaccgacctggtgcaggacgtggagatcagcgtggagcccagcgacgccttcatgttcagcggcctgaagcagatcagactgagaatcctgcccggcaccgagcaggagatgctgtacaacttctaccccctgatggccggctaccagcagctgcccagcctgaacatcaacctgctgagattccccaacttcaccaaccagctgctgagaagattcatccccaccagcatcttcgtgaagccccagggcagactgatggacgacaccagcatcgccgccgcctag

SEQ ID NO: 102694 - DNA, 3261 bp, synthetic construct
  misc_feature 1..3261: note = Description of Artificial Sequence: Synthetic coding sequence
  source 1..3261: mol_type = other DNA
atgagccccacccagtgggacttccccgtggagctgtgctgcagacccatggccttcgtgaccctgaccggcctggacgtggtgtacaacgccgtgcacagagccgtgtgggacgccttctgcgccaacagaagagccgacagagtgcccatcagcttcaaggtgctgcccggcgaccacgagtaccccaagtgcagacccaagagaaccagctacgagtggtacatccccaagggcatcctgaagaccggctggatgaacaagcacctgaacctggtgcccgccctggtggtggtgttctacgagctggactgggacgagccccagtggaaggagaagcagagcgagtgcgccaccagagtggagatcgtgagacagagcctgcagggcagaaacaccaaggtggccgtggtgctgatccagaagaagacccccctgccccccggcgaggacgtgatcgccagcgagagagccgccgccctgtgcaacgcctgcgagctgagcggcaagagcctgttcgtgctgccccacaccgaccacctggtgggctacatcatcagactggagaacgccttctacgagcacgcccagacctactactacaccgagatcagaagagtgaagagccacaaggagttcctgaacaagaccacccaccagctgctgttcgtgagacaccagttcaagatcgccttcttcagcgagctgaagcaggacacccagaacgccctgaagaactacagaaccgcctacaacctggtgcacgagctgagagcccacgagaccaacatcctggagatcaagaccatggccggcttcatcaactacaagatctgcagactgtgcttccagcacaacacccccctggacgccatcgcccagttcagaaagcacatcgacctgtgcaagaagaagatcggcagcgccgagctgagcttcgagcacgacgcctggatgagcaagcagttccaggccttcggcgacctgttcgacgaggccatcaagctgggcctgaccgccatccagacccagaaccccggcttctactaccagcaggccgcctactacgcccaggagagaaagcagctggccaagaccctgtgcaaccacgaggccagcgtgatgtaccccaaccccgaccccctggagacccagaccggcgtgctggacttctacggccagagaagctggagacagggcatcctgagcttcgacctgagcgaccccgagaaggagaaggtgggcatcctggccatccagctgaaggagagaaacgtggtgcacagcgagatcatcatcaccctgctgagcaacgccgtggcccagttcaagaagtacaagtgccccagaatgaagagccacctgatggtgcagatgggcgaggagtactactacgccaaggactacaccaaggccctgaagctgctggactacgtgatgtgcgactacagaagcgagggctggtggaccctgctgaccagcgtgctgaccaccgccctgaagtgcagctacctgatggcccagctgaaggactacatcacctacagcctggagctgctgggcagagccagcaccctgaaggacgaccagaagagcagaatcgagaagaacctgatcaacgtgctgatgaacgagagccccgaccccgagcccgactgcgacatcctggccgtgaagaccgcccagaagctgtgggccgacagaatcagcctggccggcagcaacatcttcaccatcggcgtgcaggacttcgtgcccttcgtgcagtgcaaggccaagttccacgcccccagcttccacgtggacgtgcccgtgcagttcgacatctacctgaaggccgactgcccccaccccatcagattcagcaagctgtgcgtgagcttcaacaaccaggagtacaaccagttctgcgtgatcgaggaggccagcaaggccaacgaggtgctggagaacctgacccagggcaagatgtgcctggtgcccggcaagaccagaaagctgctgttcaagttcgtggccaagaccgaggacgtgggcaagaagatcgagatcaccagcgtggacctggccctgggcaacgagaccggcagatgcgtggtgctgaactggcagggcggcggcggcgacgccgccagcagccaggaggccctgcaggccgccagaagcttcaagagaagacccaagctgcccgacaacgaggtgcactgggacagcatcatcatccaggccagcaccatgatcatcagcagagtgcccaacatcagcgtgcacctgctgcacgagccccccgccctgaccaacgagatgtactgcctggtggtgaccgtgcagagccacgagaagacccagatcagagacgtgaagctgaccgccggcctgaagcccggccaggacgccaacctgacccagaagacccacgtgaccctgcacggcaccgagctgtgcgacgagagctaccccgccctgctgaccgacatccccgtgggcgacctgcaccccggcgagcagctggagaagatgctgtacgtgagatgcggcaccgtgggcagcagaatgttcctggtgtacgtgagctacctgatcaacaccaccgtggaggagaaggagatcgtgtgcaagtgccacaaggacgagaccgtgaccatcgagaccgtgttccccttcgacgtggccgtgaagttcgtgagcaccaagttcgagcacctggagagagtgtacgccgacatccccttcctgctgatgaccgacctgctgagcgccagcccctgggccctgaccatcgtgagcagcgagctgcagctggcccccagcatgaccaccgtggaccagctggagagccaggtggacaacgtgatcctgcagaccggcgagagcgccagcgagtgcttctgcctgcagtgccccagcctgggcaacatcgagggcggcgtggccaccggccactacatcatcagctggaagagaaccagcgccatggagaacatccccatcatcaccaccgtgatcaccctgccccacgtgatcgtggagaacatccccctgcacgtgaacgccgacctgcccagcttcggcagagtgagagagagcctgcccgtgaagtaccacctgcagaacaagaccgacctggtgcaggacgtggagatcagcgtggagcccagcgacgccttcatgttcagcggcctgaagcagatcagactgcccgcccaggccttctacacctaccagtacttctgccaggccaccggcagcacccacggctag

SEQ ID NO: 102695 - DNA, 3057 bp, synthetic construct
  misc_feature 1..3057: note = Description of Artificial Sequence: Synthetic coding sequence
  source 1..3057: mol_type = other DNA
atgagccccacccagtgggacttccccgtggagctgtgctgcagacccatggccttcgtgaccctgaccggcctggacgtggtgtacaacgccgtgcacagagccgtgtgggacgccttctgcgccaacagaagagccgacagagtgcccatcagcttcaaggtgctgcccggcgaccacgagtaccccaagtgcagacccaagagaaccagctacgagtggtacatccccaagggcatcctgaagaccggctggatgaacaagcacctgaacctggtgcccgccctggtggtggtgttctacgagctggactgggacgagccccagtggaaggagaagcagagcgagtgcgccaccagagtggagatcgtgagacagagcctgcagggcagaaacaccaaggtggccgtggtgctgatccagaagaagacccccctgccccccggcgaggacgtgatcgccagcgagagagccgccgccctgtgcaacgcctgcgagctgagcggcaagagcctgttcgtgctgccccacaccgaccacctggtgggctacatcatcagactggagaacgccttctacgagcacgcccagacctactactacaccgagatcagaagagtgaagagccacaaggagttcctgaacaagaccacccaccagctgctgttcgtgagacaccagttcaagatcgccttcttcagcgagctgaagcaggacacccagaacgccctgaagaactacagaaccgcctacaacctggtgcacgagctgagagcccacgagaccaacatcctggagatcaagaccatggccggcttcatcaactacaagatctgcagactgtgcttccagcacaacacccccctggacgccatcgcccagttcagaaagcacatcgacctgtgcaagaagaagatcggcagcgccgagctgagcttcgagcacgacgcctggatgagcaagcagttccaggccttcggcgacctgttcgacgaggccatcaagctgggcctgaccgccatccagacccagaaccccggcttctactaccagcaggccgcctactacgcccaggagagaaagcagctggccaagaccctgtgcaaccacgaggccagcgtgatgtaccccaaccccgaccccctggagacccagaccggcgtgctggacttctacggccagagaagctggagacagggcatcctgagcttcgacctgagcgaccccgagaaggagaaggtgggcatcctggccatccagctgaaggagagaaacgtggtgcacagcgagatcatcatcaccctgctgagcaacgccgtggcccagttcaagaagtacaagtgccccagaatgaagagccacctgatggtgcagatgggcgaggagtactactacgccaaggactacaccaaggccctgaagctgctggactacgtgatgtgcgactacagaagcgagggctggtggaccctgctgaccagcgtgctgaccaccgccctgaagtgcagctacctgatggcccagctgaaggactacatcacctacagcctggagctgctgggcagagccagcaccctgaaggacgaccagaagagcagaatcgagaagaacctgatcaacgtgctgatgaacgagagccccgaccccgagcccgactgcgacatcctggccgtgaagaccgcccagaagctgtgggccgacagaatcagcctggccggcagcaacatcttcaccatcggcgtgcaggacttcgtgcccttcgtgcagtgcaaggccaagttccacgcccccagcttccacgtggacgtgcccgtgcagttcgacatctacctgaaggccgactgcccccaccccatcagattcagcaagctgtgcgtgagcttcaacaaccaggagtacaaccagttctgcgtgatcgaggaggccagcaaggccaacgaggtgctggagaacctgacccagggcaagatgtgcctggtgcccggcaagaccagaaagctgctgttcaagttcgtggccaagaccgaggacgtgggcaagaagatcgagatcaccagcgtggacctggccctgggcaacgagaccggcagatgcgtggtgctgaactggcagggcggcggcggcgacgccgccagcagccaggaggccctgcaggccgccagaagcttcaagagaagacccaagctgcccgacaacgaggtgcactgggacagcatcatcatccaggccagcaccatgatcatcagcagagtgcccaacatcagcgtgcacctgctgcacgagccccccgccctgaccaacgagatgtactgcctggtggtgaccgtgcagagccacgagaagacccagatcagagacgtgaagctgaccgccggcctgaagcccggccaggacgccaacctgacccagaagacccacgtgaccctgcacggcaccgagctgtgcgacgagagctaccccgccctgctgaccgacatccccgtgggcgacctgcaccccggcgagcagctggagaagatgctgtacgtgagatgcggcaccgtgggcagcagaatgttcctggtgtacgtgagctacctgatcaacaccaccgtggaggagaaggagatcgtgtgcaagtgccacaaggacgagaccgtgaccatcgagaccgtgttccccttcgacgtggccgtgaagttcgtgagcaccaagttcgagcacctggagagagtgtacgccgacatccccttcctgctgatgaccgacctgctgagcgccagcccctgggccctgaccatcgtgagcagcgagctgcagctggcccccagcatgaccaccgtggaccagctggagagccaggtggacaacgtgatcctgcagaccggcgagagcgccagcgccctgtactacctgctggagaaggacctgagcaacggcgagtacccccaccaccacaactgccaccacagcgccgccagagactgcggcgagtaccccagcccctgcgagtgcagaagcgccgtgatctgggcctgccagagagtggtgacctgccaggtgagccccaccgagtag

SEQ ID NO: 102696 - DNA, 2091 bp, synthetic construct
  misc_feature 1..2091: note = Description of Artificial Sequence: Synthetic coding sequence
  source 1..2091: mol_type = other DNA
atggaggacgccggcggcggcgaggagcagggcctgctgttccaggaggagaccatcgacctgggcggcgacgagttcggcagcgaggagaacgagaccgccagcgagggcagcagccccctggccgacaagctgaacgagcacatgatggagagcgtgctgatcagcgacagccccaacagcgagggcgacgccggcgacctgggcagagtgagagacgaggccgagcccggcggcgagggcgaccccggccccgagcccgccggcacccccagccccagcggcgaggccgacggcgactgcgcccccgaggacgccgcccccagcagcggcggcgcccccagacaggacgccgccagagaggtgcccggcagcgaggccgccagacccgagcaggagccccccgtggccgagcccgtgcccgtgtgcaccatcttcagccagagagccccccccgccagcggcgacggcttcgagccccagatggtgaagagccccagcttcggcggcgccagcgaggccagcgccagaacccccccccaggtggtgcagcccagccccagcctgagcaccttcttcggcgacaccgccgccagccacagcctggccagcgacttcttcgacagcttcaccaccagcgccttcatcagcgtgagcaaccccggcgccggcagccccgcccccgccagccccccccccctggccgtgcccggcaccgagggcagacccgagcccgtggccatgagaggcccccaggccgccgccccccccgccagccccgagcccttcgcccacatccaggccgtgttcgccggcagcgacgaccccttcgccaccgccctgagcatgagcgagatggacagaagaaacgacgcctggctgcccggcgaggccaccagaggcgtgctgagagccgtggccacccagcagagaggcgccgtgttcgtggacaaggagaacctgaccatgcccggcctgagattcgacaacatccagggcgacgccgtgaaggacctgatgctgagattcctgggcgagaaggccgccgccaagagacaggtgctgaacgccgacagcgtggagcagagcttcgtgggcctgaagcagctgatcagctgcagaaactggagagccgccgtggacctgtgcggcagactgctgaccgcccacggccagggctacggcaagagcggcctgctgaccagccacaccaccgacagcctgcagctgtggttcgtgagactggccctgctggtgaagctgggcctgttccagaacgccgagatggagttcgagcccttcggcaacctggaccagcccgacctgtactacgagtactacccccacgtgtaccccggcagaagaggcagcatggtgcccttcagcatgagaatcctgcacgccgagctgcagcagtacctgggcaacccccaggagagcctggacagactgcacaaggtgaagaccgtgtgcagcaagatcctggccaacctggagcagggcctggccgaggacggcggcatgagcagcgtgacccaggagggcagacagggctgcagctacctggtggccagcatcagactgtggagaagcagactgggcagagtgatgtacagcatggccaactgcctgctgctgatgaaggactacgtgctggccgtggaggcctaccacagcgtgatcaagtactaccccgagcaggagccccagctgctgagcggcatcggcagaatcagcctgcagatcggcgacatcaagaccgccgagaagtacttccaggacgtggagaaggtgacccagaagctggacggcctgcagggcaagatcatggtgctgatgaacagcgccttcctgcacctgggccagaacaacttcgccgaggcccacagattcttcaccgagatcctgagaatggaccccagaaacgccgtgcagatgctgagcgccagccaccccaccggcaaggagcccagccccaaggacgccgaggagcaccccgagggccacagagacagcgccgagcccggccccgccagacccatggtgccccagagagccccccccggccccgccctgtgcgcccagccctag

SEQ ID NO: 102697 - DNA, 2208 bp, synthetic construct
  misc_feature 1..2208: note = Description of Artificial Sequence: Synthetic coding sequence
  source 1..2208: mol_type = other DNA
atggaggacgccggcggcggcgaggagacccccgcccccgaggccccccaccccccccagctggccccccccgaggagcagggcctgctgttccaggaggagaccatcgacctgggcggcgacgagttcggcagcgaggagaacgagaccgccagcgagggcagcagccccctggccgacaagctgaacgagcacatgatggagagcgtgctgatcagcgacagccccaacagcgagggcgacgccggcgacctgggcagagtgagagacgaggccgagcccggcggcgagggcgaccccggccccgagcccgccggcacccccagccccagcggcgaggccgacggcgactgcgcccccgaggacgccgcccccagcagcggcggcgcccccagacaggacgccgccagagaggtgcccggcagcgaggccgccagacccgagcaggagccccccgtggccgagcccgtgcccgtgtgcaccatcttcagccagagagccccccccgccagcggcgacggcttcgagccccagatggtgaagagccccagcttcggcggcgccagcgaggccagcgccagaacccccccccaggtggtgcagcccagccccagcctgagcaccttcttcggcgacaccgccgccagccacagcctggccagcgacttcttcgacagcttcaccaccagcgccttcatcagcgtgagcaaccccggcgccggcagccccgcccccgccagccccccccccctggccgtgcccggcaccgagggcagacccgagcccgtggccatgagaggcccccaggccgccgccccccccgccagccccgagcccttcgcccacatccaggccgtgttcgccggcagcgacgaccccttcgccaccgccctgagcatgagcgagatggacagaagaaacgacgcctggctgcccggcgaggccaccagaggcgtgctgagagccgtggccacccagcagagaggcgccgtgttcgtggacaaggagaacctgaccatgcccggcctgagattcgacaacatccagggcgacgccgtgaaggacctgatgctgagattcctgggcgagaaggccgccgccaagagacaggtgctgaacgccgacagcgtggagcagagcttcgtgggcctgaagcagctgatcagctgcagaaactggagagccgccgtggacctgtgcggcagactgctgaccgcccacggccagggctacggcaagagcggcctgctgaccagccacaccaccgacagcctgcagctgtggttcgtgagactggccctgctggtgaagctgggcctgttccagaacgccgagatggagttcgagcccttcggcaacctggaccagcccgacctgtactacgagtactacccccacgtgtaccccggcagaagaggcagcatggtgcccttcagcatgagaatcctgcacgccgagctgcagcagtacctgggcaacccccaggagagcctggacagactgcacaaggtgaagaccgtgtgcagcaagatcctggccaacctggagcagggcctggccgaggacggcggcatgagcagcgtgacccaggagggcagacaggccagcatcagactgtggagaagcagactgggcagagtgatgtacagcatggccaactgcctgctgctgatgaaggactacgtgctggccgtggaggcctaccacagcgtgatcaagtactaccccgagcaggagccccagctgctgagcggcatcggcagaatcagcctgcagatcggcgacatcaagaccgccgagaagtacttccaggacgtggagaaggtgacccagaagctggacggcctgcagggcaagatcatggtgctgatgaacagcgccttcctgcacctgggccagaacaacttcgccgaggcccacagattcttcaccgagatcctgagaatggaccccagaaacgccgtggccaacaacaacgccgccgtgtgcctgctgtacctgggcaagctgaaggacagcctgagacagctggaggccatggtgcagcaggaccccagacactacctgcacgagagcgtgctgttcaacctgaccaccatgtacgagctggagagcagcagaagcatgcagaagaagcaggccctgctggaggccgtggccggcaaggagggcgacagcttcaacacccagtgcctgaagctggcctag

SEQ ID NO: 102698 - DNA, 2208 bp, synthetic construct; identical to SEQ ID NO: 102697
  misc_feature 1..2208: note = Description of Artificial Sequence: Synthetic coding sequence
  source 1..2208: mol_type = other DNA

SEQ ID NO: 102699 - DNA, 423 bp, synthetic construct
  misc_feature 1..423: note = Description of Artificial Sequence: Synthetic coding sequence
  source 1..423: mol_type = other DNA
atgagcggcagcttctacttcgtgatcgtgggccaccacgacaaccccgtgttcgagatggagttcctgcccgccggcaaggccgagagcaaggacgaccacagacacctgaaccagttcatcgcccacgccgccctggacctggtggacgagaacatgtggctgagcaacaacatgtacctgaagaccgtggacaagttcaacgagtggttcgtgagcgccttcgtgaccgccggccacatgagattcatcatgctgcacgacatcagacaggaggacggcatcaagaacttcttcaccgacgtgtacgacctgtacatcaagttcagcatgaaccccttctacgagcccaacagccccatcagaagcagcgccttcgacagaaaggtgcagttcctgggcaagaagcacctgctgagctag

SEQ ID NO: 102700 - DNA, 423 bp, synthetic construct; identical to SEQ ID NO: 102699
  misc_feature 1..423: note = Description of Artificial Sequence: Synthetic coding sequence
  source 1..423: mol_type = other DNA

SEQ ID NO: 102701 - DNA, 423 bp, synthetic construct; identical to SEQ ID NO: 102699
  misc_feature 1..423: note = Description of Artificial Sequence: Synthetic coding sequence
  source 1..423: mol_type = other DNA

SEQ ID NO: 102702 - DNA, 423 bp, synthetic construct; identical to SEQ ID NO: 102699
  misc_feature 1..423: note = Description of Artificial Sequence: Synthetic coding sequence
  source 1..423: mol_type = other DNA

SEQ ID NO: 102703 - DNA, 444 bp, synthetic construct
  misc_feature 1..444: note = Description of Artificial Sequence: Synthetic coding sequence
  source 1..444: mol_type = other DNA
atgagcggcagcttctacttcgtgatcgtgggccaccacgacaaccccgtgttcgagatggagttcctgcccgccggcaaggccgagagcaaggacgaccacagacacctgaaccagttcatcgcccacgccgccctggacctggtggacgagaacatgtggctgagcaacaacatgtacctgaagaccgtggacaagttcaacgagtggttcgtgagcgccttcgtgaccgccggccacatcctgaccttcctggtgaagatgagattcatcatgctgcacgacatcagacaggaggacggcatcaagaacttcttcaccgacgtgtacgacctgtacatcaagttcagcatgaaccccttctacgagcccaacagccccatcagaagcagcgccttcgacagaaaggtgcagttcctgggcaagaagcacctgctgagctag

SEQ ID NO: 102704 - DNA, 525 bp, synthetic construct
  misc_feature 1..525: note = Description of Artificial Sequence: Synthetic coding sequence
  source 1..525: mol_type = other DNA
atgagcagctggaagcaggacagaagcggcctgagaagcaccgagctgaacgtgctggagtaccagcccctgtgcgccgtgagaagccacatcctgaagaccatgagcggcagcttctacttcgtgatcgtgggccaccacgacaaccccgtgttcgagatggagttcctgcccgccggcaaggccgagagcaaggacgaccacagacacctgaaccagttcatcgcccacgccgccctggacctggtggacgagaacatgtggctgagcaacaacatgtacctgaagaccgtggacaagttcaacgagtggttcgtgagcgccttcgtgaccgccggccacatgagattcatcatgctgcacgacatcagacaggaggacggcatcaagaacttcttcaccgacgtgtacgacctgtacatcaagttcagcatgaaccccttctacgagcccaacagccccatcagaagcagcgccttcgacagaaaggtgcagttcctgggcaagaagcacctgctgagctag

SEQ ID NO: 102705 - DNA, 225 bp, synthetic construct
  misc_feature 1..225: note = Description of Artificial Sequence: Synthetic coding sequence
  source 1..225: mol_type = other DNA
atgagcggcagcttctacttcgtgatcgtgggccaccacgacaaccccgtgttcgagatggagttcctgcccgccggcaaggccgagagcaaggacgaccacagacacctgaaccagttcatcgcccacgccgccctggacctggtggacgagaacatgtggctgagcaacaacatgtacctgaagaccgtggacaagttcaacgagtggttcgtgagcgcctag

SEQ ID NO: 102706 - DNA, 423 bp, synthetic construct
  misc_feature 1..423: note = Description of Artificial Sequence: Synthetic coding sequence
  source 1..423: mol_type = other DNA
atggccgtgtgcatcgccgtgatcgccaaggagaactaccccctgtacatcagaagcacccccaccgagaacgagctgaagttccactacatggtgcacaccagcctggacgtggtggacgagaagatcagcgccatgggcaaggccctggtggaccagagagagctgtacctgggcctgctgtaccccaccgaggactacaaggtgtacggctacgtgaccaacagcaaggtgaagttcgtgatggtggtggacagcagcaacaccgccctgagagacaacgagatcagaagcatgttcagaaagctgcacaacagctacaccgacgtgatgtgcaaccccttctacaaccccggcgacagaatccagagcagcagagccttcgacaacatggtgaccagcatgatgatccaggtgtgctag

SEQ ID NO: 102707 - DNA, 357 bp, synthetic construct
  misc_feature 1..357: note = Description of Artificial Sequence: Synthetic coding sequence
  source 1..357: mol_type = other DNA
atgagcagacaggccaacagaggcaccgagagcaagaagatgagcagcgagctgttcaccctgacctacggcgccctggtgacccagctgtgcaaggactacgagaacgacgaggacgtgaacaagcagctggacaagatgggcttcaacatcggcgtgagactgatcgaggacttcctggccagaagcaacgtgggcagatgccacgacttcagagagaccgccgacgtgatcgccaaggagagaaagatgttcctgggcaagcagaacaagaccaagagacaggccaagctgtacgacgccgtgaaggagagaggcgccgccagctgcaccgacgccagccccctgctgagctag

SEQ ID NO: 102708 - DNA, 405 bp, synthetic construct
  misc_feature 1..405: note = Description of Artificial Sequence: Synthetic coding sequence
  source 1..405: mol_type = other DNA
atgggcttcaacatcggcgtgagactgatcgaggacttcctggccagaagcaacgtgggcagatgccacgacttcagagagaccgccgacgtgatcgccaaggtggccttcaagatgtacctgggcatcacccccagcatcaccaactggagccccgccggcgacgagttcagcctgatcctggagaacaaccccctggtggacttcgtggagctgcccgacaaccacagcagcctgatctacagcaacctgctgtgcggcgtgctgagaggcgccctggagatggtgcagatggccgtggaggccaagttcgtgcaggacaccctgaagggcgacggcgtgaccgagatcagaatgagattcatcagaagaatcgaggacaacctgcccgccggcgaggagtag

SEQ ID NO: 102709 - DNA, 405 bp, synthetic construct; identical to SEQ ID NO: 102708
  misc_feature 1..405: note = Description of Artificial Sequence: Synthetic coding sequence
  source 1..405: mol_type = other DNA

SEQ ID NO: 102710 - DNA, 543 bp, synthetic construct
  misc_feature 1..543: note = Description of Artificial Sequence: Synthetic coding sequence
  source 1..543: mol_type = other DNA
atgagcagacaggccaacagaggcaccgagagcaagaagatgagcagcgagctgttcaccctgacctacggcgccctggtgacccagctgtgcaaggactacgagaacgacgaggacgtgaacaagcagctggacaagatgggcttcaacatcggcgtgagactgatcgaggacttcctggccagaagcaacgtgggcagatgccacgacttcagagagaccgccgacgtgatcgccaaggtggccttcaagatgtacctgggcatcacccccagcatcaccaactggagccccgccggcgacgagttcagcctgatcctggagaacaaccccctggtggacttcgtggagctgcccgacaaccacagcagcctgatctacagcaacctgctgtgcggcgtgctgagaggcgccctggagatggtgcagatggccgtggaggccaagttcgtgcaggacaccctgaagggcgacggcgtgaccgagatcagaatgagattcatcagaagaatcgaggacaacctgcccgccggcgaggagtag

SEQ ID NO: 102711 - DNA, 498 bp, synthetic construct
  misc_feature 1..498: note = Description of Artificial Sequence: Synthetic coding sequence
  source 1..498: mol_type = other DNA
atggccatcttcagcgtgtacgtggtgaacaaggccggcggcctgatctaccagctggacagctacgcccccagagccgaggccgagaagaccttcagctaccccctggacctgctgctgaagctgcacgacgagagagtgctggtggccttcggccagagagacggcatcagagtgggccacgccgtgctggccatcaacggcatggacgtgaacggcagatacaccgccgacggcaaggagatgctggagaccgacaccttcaagctgcactgctaccagaccctgaccggcatcaagttcgtggtgctggccgaccccagacaggccggcatcgacagcctgctgagaaagatctacgagatctacagcgacttcgccctgaagaaccccttctacagcctggagatgcccatcagatgcgagctgttcgaccagaacctgaagctggccctggaggtggccgagaaggccggcaccttcggccccggcagctag

SEQ ID NO: 102712 - DNA, 660 bp, synthetic construct
  misc_feature 1..660: note = Description of Artificial Sequence: Synthetic coding sequence
  source 1..660: mol_type = other DNA
atggccatcttcagcgtgtacgtggtgaacaaggccggcggcctgatctaccagctggacagctacgcccccagagccgaggccgagaagaccttcagctaccccctggacctgctgctgaagctgcacgacgagagagtgctggtggccttcggccagagagacggcatcagagtgggccacgccgtgctggccatcaacggcatggacgtgaacggcagatacaccgccgacggcaaggaggtgctggagtacctgggcaaccccgccaactaccccgtgagcatcagattcggcagacccagactgaccagcaacgagaagctgatgctggccagcatgttccacagcctgttcgccatcggcagccagctgagccccgagcagggcagcagcggcatcgagatgctggagaccgacaccttcaagctgcactgctaccagaccctgaccggcatcaagttcgtggtgctggccgaccccagacaggccggcatcgacagcctgctgagaaagatctacgagatctacagcgacttcgccctgaagaaccccttctacagcctggagatgcccatcagatgcgagctgttcgaccagaacctgaagctggccctggaggtggccgagaaggccggcaccttcggccccggcagctag

SEQ ID NO: 102713 - DNA, 4308 bp, synthetic construct
  misc_feature 1..4308: note = Description of Artificial Sequence: Synthetic coding sequence
  source 1..4308: mol_type = other DNA
atggcccagtgcgtgcagagcgtgcaggagctgatccccgacagcttcgtgccctgcgtggccgccctgtgcagcgacgaggccgagagactgaccagactgaaccacctgagcttcgccgagctgctgaagcccttcagcagactgaccagcgaggtgcacatgagagaccccaacaaccagctgcacgtgatcaagaacctgaagatcgccgtgagcaacatcgtgacccagcccccccagcccggcgccatcagaaagctgctgaacgacgtggtgagcggcagccagcccgccgagggcctggtggccaacgtgatcaccgccggcgactacgacctgaacatcagcgccaccaccccctggttcgagagctacagagagaccttcctgcagagcatgcccgccctggaccacgagttcctgaaccactacctggcctgcatgctggtggccagcagcagcgaggccgagcccgtggagcagttcagcaagctgagccaggagcagcacagaatccagcacaacagcgactacagctaccccaagtggttcatccccaacaccctgaagtactacgtgctgctgcacgacgtgagcgccggcgacgagcagagagccgagagcatctacgaggagatgaagcagaagtacggcacccagggctgctacctgctgaagatcaacagcagaaccagcaacagagccagcgacgagcagatccccgacccctggagccagtacctgcagaagaacagcatccagaaccaggagagctacgaggacggcccctgcaccatcaccagcaacaagaacagcgacaacaacctgctgagcctggacggcctggacaacgaggtgaaggacggcctgcccaacaacttcagagcccaccccctgcagctggagcagagcagcgaccccagcaacagcatcgacggccccgaccacctgagaagcgccagcagcctgcacgagaccaagaagggcaacaccggcatcatccacggcgcctgcctgaccctgaccgaccacgacagaatcagacagttcatccaggagttcaccttcagaggcctgctgccccacatcgagaagaccatcagacagctgaacgaccagctgatcagcagaaagggcctgagcagaagcctgttcagcgccaccaagaagtggttcagcggcagcaaggtgcccgagaagagcatcaacgacctgaagaacaccagcggcctgctgtacccccccgaggcccccgagctgcagatcagaaagatggccgacctgtgcttcctggtgcagcactacgacctggcctacagctgctaccacaccgccaagaaggacttcctgaacgaccaggccatgctgtacgccgccggcgccctggagatggccgccgtgagcgccttcctgcagcccggcgcccccagaccctaccccgcccactacatggacaccgccatccagacctacagagacatctgcaagaacatggtgctggccgagagatgcgtgctgctgagcgccgagctgctgaagagccagagcaagtacagcgaggccgccgccctgctgatcagactgaccagcgaggacagcgacctgagaagcgccctgctgctggagcaggccgcccactgcttcatcaacatgaagagccccatggtgagaaagtacgccttccacatgatcctggccggccacagattcagcaaggccggccagaagaagcacgccctgagatgctactgccaggccatgcaggtgtacaagggcaagggctggagcctggccgaggaccacatcaacttcaccatcggcagacagagctacaccctgagacagctggacaacgccgtgagcgccttcagacacatcctgatcaacgagagcaagcagagcgccgcccagcagggcgccttcctgagagagtacctgtacgtgtacaagaacgtgagccagctgagccccgacggccccctgccccagctgcccctgccctacatcaacagcagcgccaccagagtgttcttcggccacgacagaagacccgccgacggcgagaagcaggccgccacccacgtgagcctggaccaggagtacgacagcgagagcagccagcagtggagagagctggaggagcaggtggtgagcgtggtgaacaagggcgtgatccccagcaacttccaccccacccagtactgcctgaacagctacagcgacaacagcagattccccctggccgtggtggaggagcccatcaccgtggaggtggccttcagaaaccccctgaaggtgctgctgctgctgaccgacctgagcctgctgtggaagttccaccccaaggacttcagcggcaaggacaacgaggaggtgaagcagctggtgaccagcgagcccgagatgatcggcgccgaggtgatcagcgagttcctgatcaacggcgaggagagcaaggtggccagactgaagctgttcccccaccacatcggcgagctgcacatcctgggcgtggtgtacaacctgggcaccatccagggcagcatgaccgtggacggcatcggcgccctgcccggctgccacaccggcaagtacagcctgagcatgagcgtgagaggcaagcaggacctggagatccagggccccagactgaacaacaccaaggaggagaagaccagcgtgaagtacggccccgacagaagactggaccccatcatcaccgaggagatgcccctgctggaggtgttcttcatccacttccccaccggcctgctgtgcggcgagatcagaaaggcctacgtggagttcgtgaacgtgagcaagtgccccctgaccggcctgaaggtggtgagcaagagacccgagttcttcaccttcggcggcaacaccgccgtgctgacccccctgagccccagcgccagcgagaactgcagcgcctacaagaccgtggtgaccgacgccaccagcgtgtgcaccgccctgatcagcagcgccagcagcgtggacttcggcatcggcaccggcagccagcccgaggtgatccccgtgcccctgcccgacaccgtgctgctgcccggcgccagcgtgcagctgcccatgtggctgagaggccccgacgaggagggcgtgcacgagatcaacttcctgttctactacgagagcgtgaagaagcagcccaagatcagacacagaatcctgagacacaccgccatcatctgcaccagcagaagcctgaacgtgagagccaccgtgtgcagaagcaacagcctggagaacgaggagggcagaggcggcaacatgctggtgttcgtggacgtggagaacaccaacaccagcgaggccggcgtgaaggagttccacatcgtgcaggtgagcagcagcagcaagcactggaagctgcagaagagcgtgaacctgagcgagaacaaggacaccaagctggccagcagagagaagggcaagttctgcttcaaggccatcagatgcgagaaggaggaggccgccacccagagcagcgagaagtacaccttcgccgacatcatcttcggcaacgagcagatcatcagcagcgccagcccctgcgccgacttcttctacagaagcctgagcagcgagctgaagaagccccaggcccacctgcccgtgcacaccgagaagcagagcaccgaggacgccgtgagactgatccagaagtgcagcgaggtggacctgaacatcgtgatcctgtggaaggcctacgtggtggaggacagcaagcagctgatcctggagggccagcaccacgtgatcctgagaaccatcggcaaggaggccttcagctacccccagaagcaggagccccccgagatggagctgctgaagttcttcagacccgagaacatcaccgtgagcagcagacccagcgtggagcagctgagcagcctgatcaagaccagcctgcactaccccgagagcttcaaccaccccttccaccagaagagcctgtgcctggtgcccgtgaccctgctgctgagcaactgcagcaaggccgacgtggacgtgatcgtggacctgagacacaagaccaccagccccgaggccctggagatccacggcagcttcacctggctgggccagacccagtacaagctgcagctgaagagccaggagatccacagcctgcagctgaaggcctgcttcgtgcacaccggcgtgtacaacctgggcacccccagagtgttcgccaagctgagcgaccaggtgaccgtgttcgagaccagccagcagaacagcatgcccgccctgatcatcatcagcaacgtgtag

SEQ ID NO: 102714 - DNA, 3420 bp, synthetic construct
  misc_feature 1..3420: note = Description of Artificial Sequence: Synthetic coding sequence
  source 1..3420: mol_type = other DNA
atgagcgtgcccgactacatgcagtgcgccgaggaccaccagaccctgctggtggtggtgcagcccgtgggcatcgtgagcgaggagaacttcttcagaatctacaagagaatctgcagcgtgagccagatcagcgtgagagacagccagagagtgctgtacatcagatacagacaccactacccccccgagaacaacgagtggggcgacttccagacccacagaaaggtggtgggcctgatcaccatcaccgactgcttcagcgccaaggactggccccagaccttcgagaagttccacgtgcagaaggagatctacggcagcaccctgtacgacagcagactgttcgtgttcggcctgcagggcgagatcgtggagcagcccagaaccgacgtggccttctaccccaactacgaggactgccagaccgtggagaagagaatcgaggacttcatcgagagcctgttcatcgtgctggagagcaagagactggacagagccaccgacaagagcggcgacaagatccccctgctgtgcgtgcccttcgagaagaaggacttcgtgggcctggacaccgacagcagacactacaagaagagatgccagggcagaatgagaaagcacgtgggcgacctgtgcctgcaggccggcatgctgcaggacagcctggtgcactaccacatgagcgtggagctgctgagaagcgtgaacgacttcctgtggctgggcgccgccctggagggcctgtgcagcgccagcgtgatctaccactaccccggcggcaccggcggcaagagcggcgccagaagattccagggcagcaccctgcccgccgaggccgccaacagacacagacccggcgccctgaccaccaacggcatcaaccccgacaccagcaccgagatcggcagagccaagaactgcctgagccccgaggacatcatcgacaagtacaaggaggccatcagctactacagcaagtacaagaacgccggcgtgatcgagctggaggcctgcatcaaggccgtgagagtgctggccatccagaagagaagcatggaggccagcgagttcctgcagaacgccgtgtacatcaacctgagacagctgagcgaggaggagaagatccagagatacagcatcctgagcgagctgtacgagctgatcggcttccacagaaagagcgccttcttcaagagagtggccgccatgcagtgcgtggcccccagcatcgccgagcccggctggagagcctgctacaagctgctgctggagaccctgcccggctacagcctgagcctggaccccaaggacttcagcagaggcacccacagaggctgggccgccgtgcagatgagactgctgcacgagctggtgtacgccagcagaagaatgggcaaccccgccctgagcgtgagacacctgagcttcctgctgcagaccatgctggacttcctgagcgaccaggagaagaaggacgtggcccagagcctggagaactacaccagcaagtgccccggcaccatggagcccatcgccctgcccggcggcctgaccctgccccccgtgcccttcaccaagctgcccatcgtgagacacgtgaagctgctgaacctgcccgccagcctgagaccccacaagatgaagagcctgctgggccagaacgtgagcaccaagagccccttcatctacagccccatcatcgcccacaacagaggcgaggagagaaacaagaagatcgacttccagtgggtgcagggcgacgtgtgcgaggtgcagctgatggtgtacaaccccatgcccttcgagctgagagtggagaacatgggcctgctgaccagcggcgtggagttcgagagcctgcccgccgccctgagcctgcccgccgagagcggcctgtaccccgtgaccctggtgggcgtgccccagaccaccggcaccatcaccgtgaacggctaccacaccaccgtgttcggcgtgttcagcgactgcctgctggacaacctgcccggcatcaagaccagcggcagcaccgtggaggtgatccccgccctgcccagactgcagatcagcaccagcctgcccagaagcgcccacagcctgcagcccagcagcggcgacgagatcagcaccaacgtgagcgtgcagctgtacaacggcgagagccagcagctgatcatcaagctggagaacatcggcatggagcccctggagaagctggaggtgaccagcaaggtgctgaccaccaaggagaagctgtacggcgacttcctgagctggaagctggaggagaccctggcccagttccccctgcagcccggcaaggtggccaccttcaccatcaacatcaaggtgaagctggacttcagctgccaggagaacctgctgcaggacctgagcgacgacggcatcagcgtgagcggcttccccctgagcagccccttcagacaggtggtgagacccagagtggagggcaagcccgtgaacccccccgagagcaacaaggccggcgactacagccacgtgaagaccctggaggccgtgctgaacttcaagtacagcggcggccccggccacaccgagggctactacagaaacctgagcctgggcctgcacgtggaggtggagcccagcgtgttcttcaccagagtgagcaccctgcccgccaccagcaccagacagtgccacctgctgctggacgtgttcaacagcaccgagcacgagctgaccgtgagcaccagaagcagcgaggccctgatcctgcacgccggcgagtgccagagaatggccatccaggtggacaagttcaacttcgagagcttccccgagagccccggcgagaagggccagttcgccaaccccaagcagctggaggaggagagaagagaggccagaggcctggagatccacagcaagctgggcatctgctggagaatccccagcctgaagagaagcggcgaggccagcgtggagggcctgctgaaccagctggtgctggagcacctgcagctggcccccctgcagtgggacgtgctggtggacggccagccctgcgacagagaggccgtggccgcctgccaggtgggcgaccccgtgagactggaggtgagactgaccaacagaagccccagaagcgtgggccccttcgccctgaccgtggtgcccttccaggaccaccagaacggcgtgcacaactacgacctgcacgacaccgtgagcttcgtgggcagcagcaccttctacctggacgccgtgcagcccagcggccagagcgcctgcctgggcgccctgctgttcctgtacaccggcgacttcttcctgcacatcagattccacgaggacagcaccagcaaggagctgccccccagctggttctgcctgcccagcgtgcacgtgtgcgccctggaggcccaggcctag

SEQ ID NO: 102715 - DNA, 3741 bp, synthetic construct
  misc_feature 1..3741: note = Description of Artificial Sequence: Synthetic coding sequence
  source 1..3741: mol_type = other DNA
atggtgcccgccggcgaccaggacagagccccccacagaggcaagcccgcccaggccggcgccagaaccagcagagccagcagagccctgagaagctggagaagaagccaggccgccagagccaccgtgacccaccccagaggcggccacgacagaggcagccacggcggctacagagagggccacagaggctgcagaagagacccccagtgggccagcgccggccccccccccctgagcttcaccgaggaggtgaagttcgagctgagagccctgaaggactgggacttcaagatgagcgtgcccgactacatgcagtgcgccgaggaccaccagaccctgctggtggtggtgcagcccgtgggcatcgtgagcgaggagaacttcttcagaatctacaagagaatctgcagcgtgagccagatcagcgtgagagacagccagagagtgctgtacatcagatacagacaccactacccccccgagaacaacgagtggggcgacttccagacccacagaaaggtggtgggcctgatcaccatcaccgactgcttcagcgccaaggactggccccagaccttcgagaagttccacgtgcagaaggagatctacggcagcaccctgtacgacagcagactgttcgtgttcggcctgcagggcgagatcgtggagcagcccagaaccgacgtggccttctaccccaactacgaggactgccagaccgtggagaagagaatcgaggacttcatcgagagcctgttcatcgtgctggagagcaagagactggacagagccaccgacaagagcggcgacaagatccccctgctgtgcgtgcccttcgagaagaaggacttcgtgggcctggacaccgacagcagacactacaagaagagatgccagggcagaatgagaaagcacgtgggcgacctgtgcctgcaggccggcatgctgcaggacagcctggtgcactaccacatgagcgtggagctgctgagaagcgtgaacgacttcctgtggctgggcgccgccctggagggcctgtgcagcgccagcgtgatctaccactaccccggcggcaccggcggcaagagcggcgccagaagattccagggcagcaccctgcccgccgaggccgccaacagacacagacccggcgcccaggaggtgctgatcgaccccggcgccctgaccaccaacggcatcaaccccgacaccagcaccgagatcggcagagccaagaactgcctgagccccgaggacatcatcgacaagtacaaggaggccatcagctactacagcaagtacaagaacgccggcgtgatcgagctggaggcctgcatcaaggccgtgagagtgctggccatccagaagagaagcatggaggccagcgagttcctgcagaacgccgtgtacatcaacctgagacagctgagcgaggaggagaagatccagagatacagcatcctgagcgagctgtacgagctgatcggcttccacagaaagagcgccttcttcaagagagtggccgccatgcagtgcgtggcccccagcatcgccgagcccggctggagagcctgctacaagctgctgctggagaccctgcccggctacagcctgagcctggaccccaaggacttcagcagaggcacccacagaggctgggccgccgtgcagatgagactgctgcacgagctggtgtacgccagcagaagaatgggcaaccccgccctgagcgtgagacacctgagcttcctgctgcagaccatgctggacttcctgagcgaccaggagaagaaggacgtggcccagagcctggagaactacaccagcaagtgccccggcaccatggagcccatcgccctgcccggcggcctgaccctgccccccgtgcccttcaccaagctgcccatcgtgagacacgtgaagctgctgaacctgcccgccagcctgagaccccacaagatgaagagcctgctgggccagaacgtgagcaccaagagccccttcatctacagccccatcatcgcccacaacagaggcgaggagagaaacaagaagatcgacttccagtgggtgcagggcgacgtgtgcgaggtgcagctgatggtgtacaaccccatgcccttcgagctgagagtggagaacatgggcctgctgaccagcggcgtggagttcgagagcctgcccgccgccctgagcctgcccgccgagagcggcctgtaccccgtgaccctggtgggcgtgccccagaccaccggcaccatcaccgtgaacggctaccacaccaccgtgttcggcgtgttcagcgactgcctgctggacaacctgcccggcatcaagaccagcggcagcaccgtggaggtgatccccgccctgcccagactgcagatcagcaccagcctgcccagaagcgcccacagcctgcagcccagcagcggcgacgagatcagcaccaacgtgagcgtgcagctgtacaacggcgagagccagcagctgatcatcaagctggagaacatcggcatggagcccctggagaagctggaggtgaccagcaaggtgctgaccaccaaggagaagctgtacggcgacttcctgagctggaagctggaggagaccctggcccagttccccctgcagcccggcaaggtggccaccttcaccatcaacatcaaggtgaagctggacttcagctgccaggagaacctgctgcaggacctgagcgacgacggcatcagcgtgagcggcttccccctgagcagccccttcagacaggtggtgagacccagagtggagggcaagcccgtgaacccccccgagagcaacaaggccggcgactacagccacgtgaagaccctggaggccgtgctgaacttcaagtacagcggcggccccggccacaccgagggctactacagaaacctgagcctgggcctgcacgtggaggtggagcccagcgtgttcttcaccagagtgagcaccctgcccgccaccagcaccagacagtgccacctgctgctggacgtgttcaacagcaccgagcacgagctgaccgtgagcaccagaagcagcgaggccctgatcctgcacgccggcgagtgccagagaatggccatccaggtggacaagttcaacttcgagagcttccccgagagccccggcgagaagggccagttcgccaaccccaagcagctggaggaggagagaagagaggccagaggcctggagatccacagcaagctgggcatctgctggagaatccccagcctgaagagaagcggcgaggccagcgtggagggcctgctgaaccagctggtgctggagcacctgcagctggcccccctgcagtgggacgtgctggtggacggccagccctgcgacagagaggccgtggccgcctgccaggtgggcgaccccgtgagactggaggtgagactgaccaacagaagccccagaagcgtgggccccttcgccctgaccgtggtgcccttccaggaccaccagaacggcgtgcacaactacgacctgcacgacaccgtgagcttcgtgggcagcagcaccttctacctggacgccgtgcagcccagcggccagagcgcctgcctgggcgccctgctgttcctgtacaccggcgacttcttcctgcacatcagattccacgaggacagcaccagcaaggagctgccccccagctggttctgcctgcccagcgtgcacgtgtgcgccctggaggcccaggcctag

SEQ ID NO: 102716 - DNA, 3447 bp, synthetic construct
  misc_feature 1..3447: note = Description of Artificial Sequence: Synthetic coding sequence
  source 1..3447: mol_type = other DNA
atgagcgtgcccgactacatgcagtgcgccgaggaccaccagaccctgctggtggtggtgcagcccgtgggcatcgtgagcgaggagaacttcttcagaatctacaagagaatctgcagcgtgagccagatcagcgtgagagacagccagagagtgctgtacatcagatacagacaccactacccccccgagaacaacgagtggggcgacttccagacccacagaaaggtggtgggcctgatcaccatcaccgactgcttcagcgccaaggactggccccagaccttcgagaagttccacgtgcagaaggagatctacggcagcaccctgtacgacagcagactgttcgtgttcggcctgcagggcgagatcgtggagcagcccagaaccgacgtggccttctaccccaactacgaggactgccagaccgtggagaagagaatcgaggacttcatcgagagcctgttcatcgtgctggagagcaagagactggacagagccaccgacaagagcggcgacaagatccccctgctgtgcgtgcccttcgagaagaaggacttcgtgggcctggacaccgacagcagacactacaagaagagatgccagggcagaatgagaaagcacgtgggcgacctgtgcctgcaggccggcatgctgcaggacagcctggtgcactaccacatgagcgtggagctgctgagaagcgtgaacgacttcctgtggctgggcgccgccctggagggcctgtgcagcgccagcgtgatctaccactaccccggcggcaccggcggcaagagcggcgccagaagattccagggcagcaccctgcccgccgaggccgccaacagacacagacccggcgcccaggaggtgctgatcgaccccggcgccctgaccaccaacggcatcaaccccgacaccagcaccgagatcggcagagccaagaactgcctgagccccgaggacatcatcgacaagtacaaggaggccatcagctactacagcaagtacaagaacgccggcgtgatcgagctggaggcctgcatcaaggccgtgagagtgctggccatccagaagagaagcatggaggccagcgagttcctgcagaacgccgtgtacatcaacctgagacagctgagcgaggaggagaagatccagagatacagcatcctgagcgagctgtacgagctgatcggcttccacagaaagagcgccttcttcaagagagtggccgccatgcagtgcgtggcccccagcatcgccgagcccggctggagagcctgctacaagctgctgctggagaccctgcccggctacagcctgagcctggaccccaaggacttcagcagaggcacccacagaggctgggccgccgtgcagatgagactgctgcacgagctggtgtacgccagcagaagaatgggcaaccccgccctgagcgtgagacacctgagcttcctgctgcagaccatgctggacttcctgagcgaccaggagaagaaggacgtggcccagagcctggagaactacaccagcaagtgccccggcaccatggagcccatcgccctgcccggcggcctgaccctgccccccgtgcccttcaccaagctgcccatcgtgagacacgtgaagctgctgaacctgcccgccagcctgagaccccacaagatgaagagcctgctgggccagaacgtgagcaccaagagccccttcatctacagccccatcatcgcccacaacagaggcgaggagagaaacaagaagatcgacttccagtgggtgcagggcgacgtgtgcgaggtgcagctgatggtgtacaaccccatgcccttcgagctgagagtggagaacatgggcctgctgaccagcggcgtggagttcgagagcctgcccgccgccctgagcctgcccgccgagagcggcctgtaccccgtgaccctggtgggcgtgccccagaccaccggcaccatcaccgtgaacggctaccacaccaccgtgttcggcgtgttcagcgactgcctgctggacaacctgcccggcatcaagaccagcggcagcaccgtggaggtgatccccgccctgcccagactgcagatcagcaccagcctgcccagaagcgcccacagcctgcagcccagcagcggcgacgagatcagcaccaacgtgagcgtgcagctgtacaacggcgagagccagcagctgatcatcaagctggagaacatcggcatggagcccctggagaagctggaggtgaccagcaaggtgctgaccaccaaggagaagctgtacggcgacttcctgagctggaagctggaggagaccctggcccagttccccctgcagcccggcaaggtggccaccttcaccatcaacatcaaggtgaagctggacttcagctgccaggagaacctgctgcaggacctgagcgacgacggcatcagcgtgagcggcttccccctgagcagccccttcagacaggtggtgagacccagagtggagggcaagcccgtgaacccccccgagagcaacaaggccggcgactacagccacgtgaagaccctggaggccgtgctgaacttcaagtacagcggcggccccggccacaccgagggctactacagaaacctgagcctgggcctgcacgtggaggtggagcccagcgtgttcttcaccagagtgagcaccctgcccgccaccagcaccagacagtgccacctgctgctggacgtgttcaacagcaccgagcacgagctgaccgtgagcaccagaagcagcgaggccctgatcctgcacgccggcgagtgccagagaatggccatccaggtggacaagttcaacttcgagagcttccccgagagccccggcgagaagggccagttcgccaaccccaagcagctggaggaggagagaagagaggccagaggcctggagatccacagcaagctgggcatctgctggagaatccccagcctgaagagaagcggcgaggccagcgtggagggcctgctgaaccagctggtgctggagcacctgcagctggcccccctgcagtgggacgtgctggtggacggccagccctgcgacagagaggccgtggccgcctgccaggtgggcgaccccgtgagactggaggtgagactgaccaacagaagccccagaagcgtgggccccttcgccctgaccgtggtgcccttccaggaccaccagaacggcgtgcacaactacgacctgcacgacaccgtgagcttcgtgggcagcagcaccttctacctggacgccgtgcagcccagcggccagagcgcctgcctgggcgccctgctgttcctgtacaccggcgacttcttcctgcacatcagattccacgaggacagcaccagcaaggagctgccccccagctggttctgcctgcccagcgtgcacgtgtgcgccctggaggcccaggcctag

SEQ ID NO: 102717 - DNA, 2862 bp, synthetic construct
  misc_feature 1..2862: note = Description of Artificial Sequence: Synthetic coding sequence
  source 1..2862: mol_type = other DNA
atggccctggtgttccagttcggccagcccgtgagagcccagcccctgcccggcctgtgccacggcaagctgatcagaaccaacgcctgcgacgtgtgcaacagcaccgacctgcccgaggtggagatcatcagcctgctggaggagcagctgccccactacaagctgagagccgacaccatctacggctacgaccacgacgactggctgcacacccccctgatcagccccgacgccaacatcgacctgaccaccgagcagatcgaggagaccctgaagtacttcctgctgtgcgccgagagagtgggccagatgaccaagacctacaacgacatcgacgccgtgaccagactgctggaggagaaggagagagacctggagctggccgccagaatcggccagagcctgctgaagaagaacaagaccctgaccgagagaaacgagctgctggaggagcaggtggagcacatcagagaggaggtgagccagctgagacacgagctgagcatgaaggacgagctgctgcagttctacaccagcgccgccgaggagagcgagcccgagagcgtgtgcagcacccccctgaagagaaacgagagcagcagcagcgtgcagaactacttccacctggacagcctgcagaagaagctgaaggacctggaggaggagaacgtggtgctgagaagcgaggccagccagctgaagaccgagaccatcacctacgaggagaaggagcagcagctggtgaacgactgcgtgaaggagctgagagacgccaacgtgcagatcgccagcatcagcgaggagctggccaagaagaccgaggacgccgccagacagcaggaggagatcacccacctgctgagccagatcgtggacctgcagaagaaggccaaggcctgcgccgtggagaacgaggagctggtgcagcacctgggcgccgccaaggacgcccagagacagctgaccgccgagctgagagagctggaggacaagtacgccgagtgcatggagatgctgcacgaggcccaggaggagctgaagaacctgagaaacaagaccatgcccaacaccaccagcagaagataccacagcctgggcctgttccccatggacagcctggccgccgagatcgagggcaccatgagaaaggagctgcagctggaggaggccgagagccccgacatcacccaccagaagagagtgttcgagaccgtgagaaacatcaaccaggtggtgaagcagagaagcctgacccccagccccatgaacatccccggcagcaaccagagcagcgccatgaacagcctgctgagcagctgcgtgagcacccccagaagcagcttctacggcagcgacatcggcaacgtggtgctggacaacaagaccaacagcatcatcctggagaccgaggccgccgacctgggcaacgacgagagaagcaagaagcccggcacccccggcacccccggcagccacgacctggagaccgccctgagaagactgagcctgagaagagagaactacctgagcgagagaagattcttcgaggaggagcaggagagaaagctgcaggagctggccgagaagggcgagctgagaagcggcagcctgacccccaccgagagcatcatgagcctgggcacccacagcagattcagcgagttcaccggcttcagcggcatgagcttcagcagcagaagctacctgcccgagaagctgcagatcgtgaagcccctggagggcagcgccaccctgcaccactggcagcagctggcccagccccacctgggcggcatcctggaccccagacccggcgtggtgaccaagggcttcagaaccctggacgtggacctggacgaggtgtactgcctgaacgacttcgaggaggacgacaccggcgaccacatcagcctgcccagactggccaccagcacccccgtgcagcaccccgagaccagcgcccaccaccccggcaagtgcatgagccagaccaacagcaccttcaccttcaccacctgcagaatcctgcaccccagcgacgagctgaccagagtgacccccagcctgaacagcgcccccacccccgcctgcggcagcaccagccacctgaagagcacccccgtggccaccccctgcacccccagaagactgagcctggccgagagcttcaccaacaccagagagagcaccaccaccatgagcaccagcctgggcctggtgtggctgctgaaggagagaggcatcagcgccgccgtgtacgacccccagagctgggacagagccggcagaggcagcctgctgcacagctacacccccaagatggccgtgatccccagcaccccccccaacagccccatgcagacccccaccagcagcccccccagcttcgagttcaagtgcaccagccccccctacgacaacttcctggccagcaagcccgccagcagcatcctgagagaggtgagagagaagaacgtgagaagcagcgagagccagaccgacgtgagcgtgagcaacctgaacctggtggacaaggtgagaagattcggcgtggccaaggtggtgaacagcggcagagcccacgtgcccaccctgaccgaggagcagggccccctgctgtgcggcccccccggccccgcccccgccctggtgcccagaggcctggtgcccgagggcctgcccctgagatgccccaccgtgaccagcgccatcggcggcctgcagctgaacagcggcatcagaagaaacagaagcttccccaccatggtgggcagcagcatgcagatgaaggcccccgtgaccctgaccagcggcatcctgatgggcgccaagctgagcaagcagaccagcctgagatag

SEQ ID NO: 102718 - DNA, 2061 bp, synthetic construct
  misc_feature 1..2061: note = Description of Artificial Sequence: Synthetic coding sequence
  source 1..2061: mol_type = other DNA
atgagcctgagagacaagggcggcgaggaggagtgcttcgagtacgactgccaggacgaggagagaaagcccacccacagacagcacgacacccaggacctgctggaggaggtgctgtgcgccgagagagtgggccagatgaccaagacctacaacgacatcgacgccgtgaccagactgctggaggagaaggagagagacctggagctggccgccagaatcggccagagcctgctgaagaagaacaagaccctgaccgagagaaacgagctgctggaggagcaggtggagcacatcagagaggaggtgagccagctgagacacgagctgagcatgaaggacgagctgctgcagttctacaccagcgccgccgaggagagcgagcccgagagcgtgtgcagcacccccctgaagagaaacgagagcagcagcagcgtgcagaactacttccacctggacagcctgcagaagaagctgaaggacctggaggaggagaacgtggtgctgagaagcgaggccagccagctgaagaccgagaccatcacctacgaggagaaggagcagcagctggtgaacgactgcgtgaaggagctgagagacgccaacgtgcagatcgccagcatcagcgaggagctggccaagaagaccgaggacgccgccagacagcaggaggagatcacccacctgctgagccagatcgtggacctgcagaagaaggccaaggcctgcgccgtggagaacgaggagctggtgcagcacctgggcgccgccaaggacgcccagagacagctgaccgccgagctgagagagctggaggacaagtacgccgagtgcatggagatgctgcacgaggcccaggaggagctgaagaacctgagaaacaagaccatgcccaacaccaccagcagaagataccacagcctgggcctgttccccatggacagcctggccgccgagatcgagggcaccatgagaaaggagctgcagctggaggaggccgagagccccgacatcacccaccagaagagagtgttcgagaccgtgagaaacatcaaccaggtggtgaagcagagaagcctgacccccagccccatgaacatccccggcagcaaccagagcagcgccatgaacagcctgctgagcagctgcgtgagcacccccagaagcagcttctacggcagcgacatcggcaacgtggtgctggacaacaagaccaacagcatcatcctggagaccgaggccgccgacctgggcaacgacgagagaagcaagaagcccggcacccccggcacccccggcagccacgacctggagaccgccctgagaagactgagcctgagaagagagaactacctgagcgagagaagattcttcgaggaggagcaggagagaaagctgcaggagctggccgagaagggcgagctgagaagcggcagcctgacccccaccgagagcatcatgagcctgggcacccacagcagattcagcgagttcaccggcttcagcggcatgagcttcagcagcagaagctacctgcccgagaagctgcagatcgtgaagcccctggagggcagcgccaccctgcaccactggcagcagctggcccagccccacctgggcggcatcctggaccccagacccggcgtggtgaccaagggcttcagaaccctggacgtggacctggacgaggtgtactgcctgaacgacttcgaggaggacgacaccggcgaccacatcagcctgcccagactggccaccagcacccccgtgcagcaccccgagaccagcggcgagagaagccaggccagagtgaccgtgagcggcagcagaagctaccccagcagaccccaggccagccccgaggagatgcaggagccccccgccgccaccgaggaggaggaggaggaggaggaggaggagggcagcggcgagggcaccaccatcagccccgtgaacctggcccccttccccgaggccgagttctgggccatcctgaccagcgtgcccggcaccatcagaagcggcagcctgagcgtggccagcgccagactgtgcggctag

SEQ ID NO: 102719 - DNA, 2688 bp, synthetic construct
  misc_feature 1..2688: note = Description of Artificial Sequence: Synthetic coding sequence
  source 1..2688: mol_type = other DNA
atgagcctgagagacaagggcggcgaggaggagtgcttcgagtacgactgccaggacgaggagagaaagcccacccacagacagcacgacacccaggacctgctggaggaggtgctgtgcgccgagagagtgggccagatgaccaagacctacaacgacatcgacgccgtgaccagactgctggaggagaaggagagagacctggagctggccgccagaatcggccagagcctgctgaagaagaacaagaccctgaccgagagaaacgagctgctggaggagcaggtggagcacatcagagaggaggtgagccagctgagacacgagctgagcatgaaggacgagctgctgcagttctacaccagcgccgccgaggagagcgagcccgagagcgtgtgcagcacccccctgaagagaaacgagagcagcagcagcgtgcagaactacttccacctggacagcctgcagaagaagctgaaggacctggaggaggagaacgtggtgctgagaagcgaggccagccagctgaagaccgagaccatcacctacgaggagaaggagcagcagctggtgaacgactgcgtgaaggagctgagagacgccaacgtgcagatcgccagcatcagcgaggagctggccaagaagaccgaggacgccgccagacagcaggaggagatcacccacctgctgagccagatcgtggacctgcagaagaaggccaaggcctgcgccgtggagaacgaggagctggtgcagcacctgggcgccgccaaggacgcccagagacagctgaccgccgagctgagagagctggaggacaagtacgccgagtgcatggagatgctgcacgaggcccaggaggagctgaagaacctgagaaacaagaccatgcccaacaccaccagcagaagataccacagcctgggcctgttccccatggacagcctggccgccgagatcgagggcaccatgagaaaggagctgcagctggaggaggccgagagccccgacatcacccaccagaagagagtgttcgagaccgtgagaaacatcaaccaggtggtgaagcagagaagcctgacccccagccccatgaacatccccggcagcaaccagagcagcgccatgaacagcctgctgagcagctgcgtgagcacccccagaagcagcttctacggcagcgacatcggcaacgtggtgctggacaacaagaccaacagcatcatcctggagaccgaggccgccgacctgggcaacgacgagagaagcaagaagcccggcacccccggcacccccggcagccacgacctggagaccgccctgagaagactgagcctgagaagagagaactacctgagcgagagaagattcttcgaggaggagcaggagagaaagctgcaggagctggccgagaagggcgagctgagaagcggcagcctgacccccaccgagagcatcatgagcctgggcacccacagcagattcagcgagttcaccggcttcagcggcatgagcttcagcagcagaagctacctgcccgagaagctgcagatcgtgaagcccctggagggcagcgccaccctgcaccactggcagcagctggcccagccccacctgggcggcatcctggaccccagacccggcgtggtgaccaagggcttcagaaccctggacgtggacctggacgaggtgtactgcctgaacgacttcgaggaggacgacaccggcgaccacatcagcctgcccagactggccaccagcacccccgtgcagcaccccgagaccagcgcccaccaccccggcaagtgcatgagccagaccaacagcaccttcaccttcaccacctgcagaatcctgcaccccagcgacgagctgaccagagtgacccccagcctgaacagcgcccccacccccgcctgcggcagcaccagccacctgaagagcacccccgtggccaccccctgcacccccagaagactgagcctggccgagagcttcaccaacaccagagagagcaccaccaccatgagcaccagcctgggcctggtgtggctgctgaaggagagaggcatcagcgccgccgtgtacgacccccagagctgggacagagccggcagaggcagcctgctgcacagctacacccccaagatggccgtgatccccagcaccccccccaacagccccatgcagacccccaccagcagcccccccagcttcgagttcaagtgcaccagccccccctacgacaacttcctggccagcaagcccgccagcagcatcctgagagaggtgagagagaagaacgtgagaagcagcgagagccagaccgacgtgagcgtgagcaacctgaacctggtggacaaggtgagaagattcggcgtggccaaggtggtgaacagcggcagagcccacgtgcccaccctgaccgaggagcagggccccctgctgtgcggcccccccggccccgcccccgccctggtgcccagaggcctggtgcccgagggcctgcccctgagatgccccaccgtgaccagcgccatcggcggcctgcagctgaacagcggcatcagaagaaacagaagcttccccaccatggtgggcagcagcatgcagatgaaggcccccgtgaccctgaccagcggcatcctgatgggcgccaagctgagcaagcagaccagcctgagatag

SEQ ID NO: 102720 - DNA, 2361 bp, synthetic construct
  misc_feature 1..2361: note = Description of Artificial Sequence: Synthetic coding sequence
  source 1..2361: mol_type = other DNA
atggccctggtgttccagttcggccagcccgtgagagcccagcccctgcccggcctgtgccacggcaagctgatcagaaccaacgcctgcgacgtgtgcaacagcaccgacctgcccgaggtggagatcatcagcctgctggaggagcagctgccccactacaagctgagagccgacaccatctacggctacgaccacgacgactggctgcacacccccctgatcagccccgacgccaacatcgacctgaccaccgagcagatcgaggagaccctgaagtacttcctgctgtgcgccgagagagtgggccagatgaccaagacctacaacgacatcgacgccgtgaccagactgctggaggagaaggagagagacctggagctggccgccagaatcggccagagcctgctgaagaagaacaagaccctgaccgagagaaacgagctgctggaggagcaggtggagcacatcagagaggaggtgagccagctgagacacgagctgagcatgaaggacgagctgctgcagttctacaccagcgccgccgaggagagcgagcccgagagcgtgtgcagcacccccctgaagagaaacgagagcagcagcagcgtgcagaactacttccacctggacagcctgcagaagaagctgaaggacctggaggaggagaacgtggtgctgagaagcgaggccagccagctgaagaccgagaccatcacctacgaggagaaggagcagcagctggtgaacgactgcgtgaaggagctgagagacgccaacgtgcagatcgccagcatcagcgaggagctggccaagaagaccgaggacgccgccagacagcaggaggagatcacccacctgctgagccagatcgtggacctgcagaagaaggccaaggcctgcgccgtggagaacgaggagctggtgcagcacctgggcgccgccaaggacgcccagagacagctgaccgccgagctgagagagctggaggacaagtacgccgagtgcatggagatgctgcacgaggcccaggaggagctgaagaacctgagaaacaagaccatgcccaacaccaccagcagaagataccacagcctgggcctgttccccatggacagcctggccgccgagatcgagggcaccatgagaaaggagctgcagctggaggaggccgagagccccgacatcacccaccagaagagagtgttcgagaccgtgagaaacatcaaccaggtggtgaagcagagaagcctgacccccagccccatgaacatccccggcagcaaccagagcagcgccatgaacagcctgctgagcagctgcgtgagcacccccagaagcagcttctacggcagcgacatcggcaacgtggtgctggacaacaagaccaacagcatcatcctggagaccgaggccgccgacctgggcaacgacgagagaagcaagaagcccggcacccccggcacccccggcagccacgacctggagaccgccctgagaagactgagcctgagaagagagaactacctgagcgagagaagattcttcgaggaggagcaggagagaaagctgcaggagctggccgagaagggcgagctgagaagcggcagcctgacccccaccgagagcatcatgagcctgggcacccacagcagattcagcgagttcaccggcttcagcggcatgagcttcagcagcagaagctacctgcccgagaagctgcagatcgtgaagcccctggagggcagcgccaccctgcaccactggcagcagctggcccagccccacctgggcggcatcctggaccccagacccggcgtggtgaccaagggcttcagaaccctggacgtggacctggacgaggtgtactgcctgaacgacttcgaggaggacgacaccgcccaccaccccggcaagtgcatgagccagaccaacagcaccttcaccttcaccacctgcagaatcctgcaccccagcgacgagctgaccagagtgacccccagcctgaacagcgcccccacccccgcctgcggcagcaccagccacctgaagagcacccccgtggccaccccctgcacccccagaagactgagcctggccgagagcttcaccaacaccagagagagcaccaccaccatgagcaccagcctgggcctggtgtggctgctgaaggagagaggcatcagcgccgccgtgtacgacccccagagctgggacagagccggcagaggcagcctgctgcacagccacgaggacgtgacctgcgccaacctgggcgagggcggcgtgctgagcagcttcctgctgagaagcaccgagacccccaagtgcgtgctgatcccctggatcggcaaccagtag

SEQ ID NO: 102721 - DNA, 2745 bp, synthetic construct
  misc_feature 1..2745: note = Description of Artificial Sequence: Synthetic coding sequence
  source 1..2745: mol_type = other DNA
atgagccagagccagaacgccatcttcaccagccccaccggcgaggagaacctgatgaacagcaaccacagagacagcgagagcatcaccgacgtgtgcagcaacgaggacctgcccgaggtggagctggtgagcctgctggaggagcagctgccccagtacagactgaaggtggacaccctgttcctgtacgagaaccaggactggacccagagcccccaccagagacagcacgccagcgacgccctgagccccgtgctggccgaggagaccttcagatacatgatcctgggcaccgacagagtggagcagatgaccaagacctacaacgacatcgacatggtgacccacctgctggccgagagagacagagacctggagctggccgccagaatcggccaggccctgctgaagagaaaccacgtgctgagcgagcagaacgagagcctggaggagcagctgggccaggccttcgaccaggtgaaccagctgcagcacgagctgtgcaagaaggacgagctgctgagaatcgtgagcatcgccagcgaggagagcgagaccgacagcagctgcagcacccccctgagattcaacgagagcttcagcctgagccagggcctgctgcagctggagatgctgcaggagaagctgaaggagctggaggaggagaacatggccctgagaagcaaggcctgccacatcaagaccgagaccgtgacctacgaggagaaggagcagcagctggtgagcgactgcgtgaaggagctgagagagaccaacgcccagatgagcagaatgaccgaggagctgagcggcaagagcgacgagctgatcagataccaggaggagctgagcagcctgctgagccagatcgtggacctgcagcacaagctgaaggagcacgtgatcgagaaggaggagctgaagctgcacctgcaggccagcaaggacgcccagagacagctgaccatggagctgcacgagctgcaggacagaaacatggagtgcctgggcatgctgcacgagagccaggaggagatcaaggagctgagaagcagaagcggccccaccgcccacctgtacttcagccagagctacggcgccttcaccggcgagagcctggccgccgagatcgagggcaccatgagaaagaagctgagcctggacgaggagagcagcctgttcaagcagaaggcccagcagaagagagtgttcgacaccgtgagaatcgccaacgacaccagaggcagaagcatcagcttccccgccctgctgcccatccccggcagcaacagaagcagcgtgatcatgaccgccaagcccttcgagagcggcctgcagcagaccgaggacaagagcctgctgaaccagggcagcagcagcgaggaggtggccggcagcagccagaagatgggccagcccggccccagcggcgacagcgacctggccaccgccctgcacagactgagcctgagaagacagaactacctgagcgagaagcagttcttcgccgaggagtggcagagaaagatccaggtgctggccgaccagaaggagggcgtgagcggctgcgtgacccccaccgagagcctggccagcctgtgcaccacccagagcgagatcaccgacctgagcagcgccagctgcctgagaggcttcatgcccgagaagctgcagatcgtgaagcccctggagggcagccagaccctgtaccactggcagcagctggcccagcccaacctgggcaccatcctggaccccagacccggcgtgatcaccaagggcttcacccagctgcccggcgacgccatctaccacatcagcgacctggaggaggacgaggaggagggcatcaccttccaggtgcagcagcccctggaggtggaggagaagctgagcaccagcaagcccgtgaccggcatcttcctgccccccatcaccagcgccggcggccccgtgaccgtggccaccgccaaccccggcaagtgcctgagctgcaccaacagcaccttcaccttcaccacctgcagaatcctgcaccccagcgacatcacccaggtgacccccagcagcggcttccccagcctgagctgcggcagcagcggcagcagcagcagcaacaccgccgtgaacagccccgccctgagctacagactgagcatcggcgagagcatcaccaacagaagagacagcaccaccaccttcagcagcaccatgagcctggccaagctgctgcaggagagaggcatcagcgccaaggtgtaccacagccccatcagcgagaaccccctgcagcccctgcccaagagcctggccatccccagcaccccccccaacagccccagccacagcccctgccccagccccctgcccttcgagcccagagtgcacctgagcgagaacttcctggccagcagacccgccgagaccttcctgcaggagatgtacggcctgagacccagcagaaacccccccgacgtgggccagctgaagatgaacctggtggacagactgaagagactgggcatcgccagagtggtgaagaaccccggcgcccaggagaacggcagatgccaggaggccgagatcggcccccagaagcccgacagcgccgtgtacctgaacagcggcagcagcctgctgggcggcctgagaagaaaccagagcctgcccgtgatcatgggcagcttcgccgcccccgtgtgcaccagcagccccaagatgggcgtgctgaaggaggactag

SEQ ID NO: 102722 - DNA, 936 bp, synthetic construct
  misc_feature 1..936: note = Description of Artificial Sequence: Synthetic coding sequence
  source 1..936: mol_type = other DNA
atgagccagagccagaacgccatcttcaccagccccaccggcgaggagaacctgatgaacagcaaccacagagacagcgagagcatcaccgacgtgtgcagcaacgaggacctgcccgaggtggagctggtgagcctgctggaggagcagctgccccagtacagactgaaggtggacaccctgttcctgtacgagaaccaggactggacccagagcccccaccagagacagcacgccagcgacgccctgagccccgtgctggccgaggagaccttcagatacatgatcctgggcaccgacagagtggagcagatgaccaagacctacaacgacatcgacatggtgacccacctgctggccgagagagacagagacctggagctggccgccagaatcggccaggccctgctgaagagaaaccacgtgctgagcgagcagaacgagagcctggaggagcagctgggccaggccttcgaccaggtgaaccagctgcagcacgagctgtgcaagaaggacgagctgctgagaatcgtgagcatcgccagcgaggagagcgagaccgacagcagctgcagcacccccctgagattcaacgagagcttcagcctgagccagggcctgctgcagctggagatgctgcaggagaagctgaaggagctggaggaggagaacatggccctgagaagcaaggcctgccacatcaagaccgagaccgtgacctacgaggagaaggagcagcagctggtgagcgactgcgtgaaggagctgagagagaccaacgcccagatgagcagaatgaccgaggagctgagcggcaagagcgacgagctgatcagataccaggaggagctgagcagcctgctgagccagatcgtggacctgcagcacaagctgaaggaggtgggcctgttcatccacagcaccgacatctgctag

SEQ ID NO: 102723 - DNA, 93 bp, synthetic construct
  misc_feature 1..93: note = Description of Artificial Sequence: Synthetic coding sequence
  source 1..93: mol_type = other DNA
atgagccagagccagaacgccatcttcaccagccccaccggcgaggagaacctgatgaacagcaaccacagagacagcgagagcatcacctag

SEQ ID NO: 102724 - DNA, 2340 bp, synthetic construct
  misc_feature 1..2340: note = Description of Artificial Sequence: Synthetic coding sequence
  source 1..2340: mol_type = other DNA
atgatcctgggcaccgacagagtggagcagatgaccaagacctacaacgacatcgacatggtgacccacctgctggccgagagagacagagacctggagctggccgccagaatcggccaggccctgctgaagagaaaccacgtgctgagcgagcagaacgagagcctggaggagcagctgggccaggccttcgaccaggtgaaccagctgcagcacgagctgtgcaagaaggacgagctgctgagaatcgtgagcatcgccagcgaggagagcgagaccgacagcagctgcagcacccccctgagattcaacgagagcttcagcctgagccagggcctgctgcagctggagatgctgcaggagaagctgaaggagctggaggaggagaacatggccctgagaagcaaggcctgccacatcaagaccgagaccgtgacctacgaggagaaggagcagcagctggtgagcgactgcgtgaaggagctgagagagaccaacgcccagatgagcagaatgaccgaggagctgagcggcaagagcgacgagctgatcagataccaggaggagctgagcagcctgctgagccagatcgtggacctgcagcacaagctgaaggagcacgtgatcgagaaggaggagctgaagctgcacctgcaggccagcaaggacgcccagagacagctgaccatggagctgcacgagctgcaggacagaaacatggagtgcctgggcatgctgcacgagagccaggaggagatcaaggagctgagaagcagaagcggccccaccgcccacctgtacttcagccagagctacggcgccttcaccggcgagagcctggccgccgagatcgagggcaccatgagaaagaagctgagcctggacgaggagagcagcctgttcaagcagaaggcccagcagaagagagtgttcgacaccgtgagaatcgccaacgacaccagaggcagaagcatcagcttccccgccctgctgcccatccccggcagcaacagaagcagcgtgatcatgaccgccaagcccttcgagagcggcctgcagcagaccgaggacaagagcctgctgaaccagggcagcagcagcgaggaggtggccggcagcagccagaagatgggccagcccggccccagcggcgacagcgacctggccaccgccctgcacagactgagcctgagaagacagaactacctgagcgagaagcagttcttcgccgaggagtggcagagaaagatccaggtgctggccgaccagaaggagggcgtgagcggctgcgtgacccccaccgagagcctggccagcctgtgcaccacccagagcgagatcaccgacctgagcagcgccagctgcctgagaggcttcatgcccgagaagctgcagatcgtgaagcccctggagggcagccagaccctgtaccactggcagcagctggcccagcccaacctgggcaccatcctggaccccagacccggcgtgatcaccaagggcttcacccagctgcccggcgacgccatctaccacatcagcgacctggaggaggacgaggaggagggcatcaccttccaggtgcagcagcccctggaggtggaggagaagctgagcaccagcaagcccgtgaccggcatcttcctgccccccatcaccagcgccggcggccccgtgaccgtggccaccgccaaccccggcaagtgcctgagctgcaccaacagcaccttcaccttcaccacctgcagaatcctgcaccccagcgacatcacccaggtgacccccagcagcggcttccccagcctgagctgcggcagcagcggcagcagcagcagcaacaccgccgtgaacagccccgccctgagctacagactgagcatcggcgagagcatcaccaacagaagagacagcaccaccaccttcagcagcaccatgagcctggccaagctgctgcaggagagaggcatcagcgccaaggtgtaccacagccccatcagcgagaaccccctgcagcccctgcccaagagcctggccatccccagcaccccccccaacagccccagccacagcccctgccccagccccctgcccttcgagcccagagtgcacctgagcgagaacttcctggccagcagacccgccgagaccttcctgcaggagatgtacggcctgagacccagcagaaacccccccgacgtgggccagctgaagatgaacctggtggacagactgaagagactgggcatcgccagagtggtgaagaaccccgtgcccaagagaatggaggacgccagaagacagaagctggtgctgaagaaccagatcctgctgttcatctag

SEQ ID NO: 102725 - DNA, 486 bp, synthetic construct
  misc_feature 1..486: note = Description of Artificial Sequence: Synthetic coding sequence
  source 1..486: mol_type = other DNA
atggagaagcccctgaccgtgctgagagtgagcctgtaccaccccaccctgggccccagcgccttcgccaacgtgccccccagactgcagcacgacaccagccccctgctgctgggcagaggccaggacgcccacctgcagctgcagctgcccagactgagcagaagacacctgagcctggagccctacctggagaagggcagcgccctgctggccttctgcctgaaggccctgagcagaaagggctgcgtgtgggtgaacggcctgaccctgagatacctggagcaggtgcccctgagcaccgtgaacagagtgagcttcagcggcatccagatgctggtgagagtggaggagggcaccagcctggaggccttcgtgtgctacttccacgtgagccccagccccctgatctacagacccgaggccgaggagaccgacgagtgggagggcatcagccagggccagcccccccccggcagcggctag

SEQ ID NO: 102726 - DNA, 1749 bp, synthetic construct
  misc_feature 1..1749: note = Description of Artificial Sequence: Synthetic coding sequence
  source 1..1749: mol_type = other DNA
atggccgagttcctggacgaccaggagaccagactgtgcgacaactgcaagaaggagatccccgtgttcaacttcaccatccacgagatccactgccagagaaacatcggcatgtgccccacctgcaaggagcccttccccaagagcgacatggagacccacatggccgccgagcactgccaggtgacctgcaagtgcaacaagaagctggagaagagactgctgaagaagcacgaggagaccgagtgccccctgagactggccgtgtgccagcactgcgacctggagctgagcatcctgaagctgaaggagcacgaggactactgcggcgccagaaccgagctgtgcggcaactgcggcagaaacgtgctggtgaaggacctgaagacccaccccgaggtgtgcggcagagagggcgaggagaagagaaacgaggtggccatcccccccaacgcctacgacgagagctggggccaggacggcatctggatcgccagccagctgctgagacagatcgaggccctggacccccccatgagactgcccagaagacccctgagagccttcgagagcgacgtgttccacaacagaaccaccaaccagagaaacatcaccgcccaggtgagcatccagaacaacctgttcgaggagcaggagagacaggagagaaacagaggccagcagccccccaaggagggcggcgaggagagcgccaacctggacttcatgctggccctgagcctgcagaacgagggccaggccagcagcgtggccgagcaggacttctggagagccgtgtgcgaggccgaccagagccacggcggccccagaagcctgagcgacatcaagggcgccgccgacgagatcatgctgccctgcgagttctgcgaggagctgtaccccgaggagctgctgatcgaccaccagaccagctgcaaccccagcagagccctgcccagcctgaacaccggcagcagcagccccagaggcgtggaggagcccgacgtgatcttccagaacttcctgcagcaggccgccagcaaccagctggacagcctgatgggcctgagcaacagccaccccgtggaggagagcatcatcatcccctgcgagttctgcggcgtgcagctggaggaggaggtgctgttccaccaccaggaccagtgcgaccagagacccgccaccgccaccaaccacgtgaccgagggcatccccagactggacagccagccccaggagaccagccccgagctgcccagaagaagagtgagacaccagggcgacctgagcagcggctacctggacgacaccaagcaggagaccgccaacggccccaccagctgcctgccccccagcagacccatcaacaacatgaccgccacctacaaccagctgagcagaagcaccagcggccccagacccggctgccagcccagcagcccctgcgtgcccaagctgagcaacagcgacagccaggacatccagggcagaaacagagacagccagaacggcgccatcgcccccggccacgtgagcgtgatcagacccccccagaacctgtaccccgagaacatcgtgcccagcttcagccccggccccagcggcagatacggcgccagcggcagaagcgagggcggcagaaacagcagagtgacccccgccgccgccaactacagaagcagaaccgccaaggccaagcccagcaagcagcagggcgccggcgacgccgaggaggaggaggaggagtag

SEQ ID NO: 102727 - DNA, 1749 bp, synthetic construct; identical to SEQ ID NO: 102726
  misc_feature 1..1749: note = Description of Artificial Sequence: Synthetic coding sequence
  source 1..1749: mol_type = other DNA

SEQ ID NO: 102728 - DNA, 408 bp, synthetic construct
  misc_feature 1..408: note = Description of Artificial Sequence: Synthetic coding sequence
  source 1..408: mol_type = other DNA
atggccgagttcctggacgaccaggagaccagactgtgcgacaactgcaagaaggagatccccgtgttcaacttcaccatccacgagatccactgccagagaaacatcggcatgtgccccacctgcaaggagcccttccccaagagcgacatggagacccacatggccgccgagcactgccaggtgacctgcaagtgcaacaagaagctggagaagagactgctgaagaagcacgaggagaccgagtgccccctgagactggccgtgtgccagcactgcgacctggagctgagcatcctgaagctgaaggagcacgaggactactgcggcgccagaaccgagctgtgcggcaactgcggcagaaacgtgctggtgaaggacctgaagacccaccccgaggtgtgctag

SEQ ID NO: 102729 - DNA, 495 bp, synthetic construct
  misc_feature 1..495: note = Description of Artificial Sequence: Synthetic coding sequence
  source 1..495: mol_type = other DNA
atggccgagttcctggacgaccaggagaccagactgtgcgacaactgcaagaaggagatccccgtgttcaacttcaccatccacgagatccactgccagagaaacatcggcatgtgccccacctgcaaggagcccttccccaagagcgacatggagacccacatggccgccgagcactgccaggtgacctgcaagtgcaacaagaagctggagaagagactgctgaagaagcacgaggagaccgagtgccccctgagactggccgtgtgccagcactgcgacctggagctgagcatcctgaagctgaaggagcacgaggactactgcggcgccagaaccgagctgtgcggcaactgcggcagaaacgtgctggtgaaggacctgaagacccaccccgagctgaagaacaagagaggcagaaagggcatcgaggccaacagcccccccaagagagtggtgaagagagtgcagacctggaccagctgctggccctag

SEQ ID NO: 102730 - DNA, 852 bp, synthetic construct
  misc_feature 1..852: note = Description of Artificial Sequence: Synthetic coding sequence
  source 1..852: mol_type = other DNA
atggccgagttcctggacgaccaggagaccagactgtgcgacaactgcaagaaggagatccccgtgttcaacttcaccatccacgagatccactgccagagaaacatcggcatgtgccccacctgcaaggagcccttccccaagagcgacatggagacccacatggccgccgagcactgccaggtgacctgcaagtgcaacaagaagctggagaagagactgctgaagaagcacgaggagaccgagtgccccctgagactggccgtgtgccagcactgcgacctggagctgagcatcctgaagctgaaggagcacgaggactactgcggcgccagaaccgagctgtgcggcaactgcggcagaaacgtgctggtgaaggacctgaagacccaccccgaggtgtgcggcagagagggcgaggagaagagaaacgaggtggccatcccccccaacgcctacgacgagagctggggccaggacggcatctggatcgccagccagctgctgagacagatcgaggccctggacccccccatgagactgcccagaagacccctgagagccttcgagagcgacgtgttccacaacagaaccaccaaccagagaaacatcaccgcccaggtgagcatccagaacaacctgttcgaggagcaggagagacaggagagaaacagaggccagcagccccccaaggagggcggcgaggagagcgccaacctggacttcatgctggccctgagcctgcagaacgagggccaggccagcagcgtggccgagcaggacttctggagagccgtgtgcgaggccgaccagagccacggcggccccagaagcctgagcgacatcaagtag

SEQ ID NO: 102731 - DNA, 414 bp, synthetic construct
  misc_feature 1..414: note = Description of Artificial Sequence: Synthetic coding sequence
  source 1..414: mol_type = other DNA
atgggcgcccacctggtgagaagatacctgggcgacgccagcgtggagcccgaccccctgcagatgcccaccttcccccccgactacggcttccccgagagaaaggagagagagatggtggccacccagcaggagatgatggacgcccagctgagactgcagctgagagactactgcgcccaccacctgatcagactgctgaagtgcaagagagacagcttccccaacttcctggcctgcaagcaggagagacacgactgggactactgcgagcacagagactacgtgatgagaatgaaggagttcgagagagagagaagactgctgcagagaaagaagagaagagagaagaaggccgccgagctggccaagggccagggccccggcgaggtggaccccaaggtggccctgtag

SEQ ID NO: 102732 - DNA, 972 bp, synthetic construct
  misc_feature 1..972: note = Description of Artificial Sequence: Synthetic coding sequence
  source 1..972: mol_type = other DNA
atgatcctgcaggagaccaaggccgcctgcggcatccccgccatcccccactgcagcagagtggagatcctggacgccaagaccagagagaagctgtgcttcctggacaaggtggagccccacgccaccatcgccgagatcaagaacctgttcaccaagacccacccccagtggtaccccgccagacagagcctgagactggaccccaagggcaagagcctgaaggacgaggacgtgctgcagaagctgcccgtgggcaccaccgccaccctgtacttcagagacctgggcgcccagatcagctgggtgaccgtgttcctgaccgagtacgccggccccctgttcatctacctgctgttctacttcagagtgcccttcatctacggccacaagtacgacttcaccagcagcagacacaccgtggtgcacctggcctgcatctgccacagcttccactacatcaagagactgctggagaccctgttcgtgcacagattcagccacggcaccatgcccctgagaaacatcttcaagaactgcacctactactggggcttcgccgcctggatggcctactacatcaaccaccccctgtacaccccccccacctacggcgcccagcaggtgaagctggccctggccatcttcgtgatctgccagctgggcaacttcagcatccacatggccctgagagacctgagacccgccggcagcaagaccagaaagatcccctaccccaccaagaaccccttcacctggctgttcctgctggtgagctgccccaactacacctacgaggtgggcagctggatcggcttcgccatcatgacccagtgcctgcccgtggccctgttcagcctggtgggcttcacccagatgaccatctgggccaagggcaagcacagaagctacctgaaggagttcagagactacccccccctgagaatgcccatcatccccttcctgctgtag

SEQ ID NO: 102733 - DNA, 1014 bp, synthetic construct
  misc_feature 1..1014: note = Description of Artificial Sequence: Synthetic coding sequence
  source 1..1014: mol_type = other DNA
atgagcagcagccccgtgaagagacagagaatggagagcgccctggaccagctgaagcagttcaccaccgtggtggccgacaccggcgacttccacgccatcgacgagtacaagccccaggacgccaccaccaaccccagcctgatcctggccgccgcccagatgcccgcctaccaggagctggtggaggaggccatcgcctacggcagaaagctgggcggcagccaggaggaccagatcaagaacgccatcgacaagctgttcgtgctgttcggcgccgagatcctgaagaagatccccggcagagtgagcaccgaggtggacgccagactgagcttcgacaaggacgccatggtggccagagccagaagactgatcgagctgtacaaggaggccggcatcagcaaggacagaatcctgatcaagctgagcagcacctgggagggcatccaggccggcaaggagctggaggagcagcacggcatccactgcaacatgaccctgctgttcagcttcgcccaggccgtggcctgcgccgaggccggcgtgaccctgatcagccccttcgtgggcagaatcctggactggcacgtggccaacaccgacaagaagagctacgagcccctggaggaccccggcgtgaagagcgtgaccaagatctacaactactacaagaagttcagctacaagaccatcgtgatgggcgccagcttcagaaacaccggcgagatcaaggccctggccggctgcgacttcctgaccatcagccccaagctgctgggcgagctgctgcaggacaacgccaagctggtgcccgtgctgagcgccaaggccgcccaggccagcgacctggagaagatccacctggacgagaagagcttcagatggctgcacaacgaggaccagatggccgtggagaagctgagcgacggcatcagaaagttcgccgccgacgccgtgaagctggagagaatgctgaccgagagaatgttcaacgccgagaacggcaagtag

SEQ ID NO: 102734 - DNA, 957 bp, synthetic construct
  misc_feature 1..957: note = Description of Artificial Sequence: Synthetic coding sequence
  source 1..957: mol_type = other DNA
atgagcagcagccccgtgaagagacagagaatggagagcgccctggaccagctgaagcagttcaccaccgtggtggccgacaccggcgacttccacgccatcgacgagtacaagccccaggacgccaccaccaaccccagcctgatcctggccgccgcccagatgcccgcctaccaggagctggtggaggaggccatcgcctacggcagaaagctgggcggcagccaggaggaccagatcaagaacgccatcgacaagctgttcgtgctgttcggcgccgagatcctgaagaagatccccggcagagtgagcaccgaggtggacgccagactgagcttcgacaaggacgccatggtggccagagccagaagactgatcgagctgtacaaggaggccggcatcagcaaggacagaatcctgatcaagctgagcagcacctgggagggcatccaggccggcaaggagctggaggagcagcacggcatccactgcaacatgaccctgctgttcagcttcgcccaggccgtggcctgcgccgaggccggcgtgaccctgatcagccccttcgtgggcagaatcctggactggcacgtggccaacaccgacaagaagagctacgagcccctggaggaccccggcgtgaagagcgtgaccaagatctacaactactacaagaagttcagctacaagaccatcgtgatgggcgccagcttcagaaacaccggcgagatcaaggccctggccggctgcgacttcctgaccatcagccccaagctgctgggcgagctgctgcaggacaacgccaagctggtgcccgtgctgagcgccaagcccaagcccgtgacctggaagaagagcacctggatgagaagcctgagcgtgggctgcaccaccagaaccagatggctgtggagaagcagcctgaccggcagcgccagcctgcccctgatgcagtag

SEQ ID NO: 102735 - DNA, 1302 bp, synthetic construct
  misc_feature 1..1302: note = Description of Artificial Sequence: Synthetic coding sequence
  source 1..1302: mol_type = other DNA
atgagacagagccaccagctgcccctggtgggcctgctgctgttcagcttcatccccagccagctgtgcgagatctgcgaggtgagcgaggagaactacatcagactgaagcccctgctgaacaccatgatccagagcaactacaacagaggcaccagcgccgtgaacgtggtgctgagcctgaagctggtgggcatccagatccagaccctgatgcagaagatgatccagcagatcaagtacaacgtgaagagcagactgagcgacgtgagcagcggcgagctggccctgatcatcctggccctgggcgtgtgcagaaacgccgaggagaacctgatctacgactaccacctgatcgacaagctggagaacaagttccaggccgagatcgagaacatggaggcccacaacggcacccccctgaccaactactaccagctgagcctggacgtgctggccctgtgcctgttcaacggcaactacagcaccgccgaggtggtgaaccacttcacccccgagaacaagaactactacttcggcagccagttcagcgtggacaccggcgccatggccgtgctggccctgacctgcgtgaagaagagcctgatcaacggccagatcaaggccgacgagggcagcctgaagaacatcagcatctacaccaagagcctggtggagaagatcctgagcgagaagaaggagaacggcctgatcggcaacaccttcagcaccggcgaggccatgcaggccctgttcgtgagcagcgactactacaacgagaacgactggaactgccagcagaccctgaacaccgtgctgaccgagatcagccagggcgccttcagcaaccccaacgccgccgcccaggtgctgcccgccctgatgggcaagaccttcctggacatcaacaaggacagcagctgcgtgagcgccagcggcaacttcaacatcagcgccgacgagcccatcaccgtgaccccccccgacagccagagctacatcagcgtgaactacagcgtgagaatcaacgagacctacttcaccaacgtgaccgtgctgaacggcagcgtgttcctgagcgtgatggagaaggcccagaagatgaacgacaccatcttcggcttcaccatggaggagagaagctggggcccctacatcacctgcatccagggcctgtgcgccaacaacaacgacagaacctactgggagctgctgagcggcggcgagcccctgagccagggcgccggcagctacgtggtgagaaacggcgagaacctggaggtgagatggagcaagtactag

SEQ ID NO: 102736 - DNA, 1083 bp, synthetic construct
  misc_feature 1..1083: note = Description of Artificial Sequence: Synthetic coding sequence
  source 1..1083: mol_type = other DNA
atggccgccgccgccgccgccggcgccggccccgagatggtgagaggccaggtgttcgacgtgggccccagatacaccaacctgagctacatcggcgagggcgcctacggcatggtgtgcagcgcctacgacaacgtgaacaaggtgagagtggccatcaagaagatcagccccttcgagcaccagacctactgccagagaaccctgagagagatcaagatcctgctgagattcagacacgagaacatcatcggcatcaacgacatcatcagagcccccaccatcgagcagatgaaggacgtgtacatcgtgcaggacctgatggagaccgacctgtacaagctgctgaagacccagcacctgagcaacgaccacatctgctacttcctgtaccagatcctgagaggcctgaagtacatccacagcgccaacgtgctgcacagagacctgaagcccagcaacctgctgctgaacaccacctgcgacctgaagatctgcgacttcggcctggccagagtggccgaccccgaccacgaccacaccggcttcctgaccgagtacgtggccaccagatggtacagagcccccgagatcatgctgaacagcaagggctacaccaagagcatcgacatctggagcgtgggctgcatcctggccgagatgctgagcaacagacccatcttccccggcaagcactacctggaccagctgaaccacatcctgggcatcctgggcagccccagccaggaggacctgaactgcatcatcaacctgaaggccagaaactacctgctgagcctgccccacaagaacaaggtgccctggaacagactgttccccaacgccgacagcaaggccctggacctgctggacaagatgctgaccttcaacccccacaagagaatcgaggtggagcaggccctggcccacccctacctggagcagtactacgaccccagcgacgagcccatcgccgaggcccccttcaagttcgacatggagctggacgacctgcccaaggagaagctgaaggagctgatcttcgaggagaccgccagattccagcccggctacagaagctag

SEQ ID NO: 102737 - DNA, 1203 bp, synthetic construct
  misc_feature 1..1203: note = Description of Artificial Sequence: Synthetic coding sequence
  source 1..1203: mol_type = other DNA
atgagacacctgggcgccttcctgttcctgctgggcgtgctgggcgccctgaccgagatgtgcgagatccccgagatggacagccacctggtggagaagctgggccagcacctgctgccctggatggacagactgagcctggagcacctgaaccccagcatctacgtgggcctgagactgagcagcctgcaggccggcaccaaggaggacctgtacctgcacagcctgaagctgggctaccagcagtgcctgctgggcagcgccttcagcgaggacgacggcgactgccagggcaagcccagcatgggccagctggccctgtacctgctggccctgagagccaactggcacgaccacaagggccacccccacaccagctactaccagtacggcctgggcatcctggccctgtgcctgcaccagaagagagtgcacgacagcgtggtggacaagctgctgtacgccgtggagcccttccaccagggccaccacagcgtggacaccgccgccatggccggcctggccttcacctgcctgaagagaagcaacttcaaccccggcagaagacagagaatcaccatggccatcagaaccgtgagagaggagatcctgaaggcccagacccccgagggccacttcggcaacgtgtacagcacccccctggccctgcagttcctgatgaccagccccatgagaggcgccgagctgggcaccgcctgcctgaaggccagagtggccctgctggccagcctgcaggacggcgccttccagaacgccctgatgatcagccagctgctgcccgtgctgaaccacaagacctacatcgacctgatcttccccgactgcctggcccccagagtgatgctggagcccgccgccgagaccatcccccagacccaggagatcatcagcgtgaccctgcaggtgctgagcctgctgcccccctacagacagagcatcagcgtgctggccggcagcaccgtggaggacgtgctgaagaaggcccacgagctgggcggcttcacctacgagacccaggccagcctgagcggcccctacctgaccagcgtgatgggcaaggccgccggcgagagagagttctggcagctgctgagagaccccaacacccccctgctgcagggcatcgccgactacagacccaaggacggcgagaccatcgagctgagactggtgagctggtag

SEQ ID NO: 102738 - DNA, 843 bp, synthetic construct
  misc_feature 1..843: note = Description of Artificial Sequence: Synthetic coding sequence
  source 1..843: mol_type = other DNA
atggaggacgaggtggtgagattcgccaagaagatggacaagatggtgcagaagaagaacgccagcaccagaatcggcatgagcgtgaacgccatcagaaagcagagcaccgacgaggaggtgaccagcctggccaagagcctgatcaagagctggaagaagctgctggacggccccagcaccgagaaggacctggacgagaagaagaaggagcccgccatcaccagccagaacagccccgaggccagagaggagagcaccagcagcggcaacgtgagcaacagaaaggacgagaccaacgccagagacacctacgtgagcagcttccccagagcccccagcaccagcgacagcgtgagactgaagtgcagagagatgctggccgccgccctgagaaccggcgacgactacatcgccatcggcgccgacgaggaggagctgggcagccagatcgaggaggccatctaccaggagatcagaaacaccgacatgaagtacaagaacagagtgagaagcagaatcagcaacctgaaggacgccaagaaccccaacctgagaaagaacgtgctgtgcggcaacatcccccccgacctgttcgccagaatgaccgccgaggagatggccagcgacgagctgaaggagatgagaaagaacctgaccaaggaggccatcagagagcaccagatggccaagaccggcggcacccagaccgacctgttcacctgcggcaagtgcaagaagaagaactgcacctacacccaggtgcagaccagaagcgccgacgagcccatgaccaccttcgtggtgtgcaacgagtgcggcaacagatggaagttctgctag

SEQ ID NO: 102739 - DNA, 906 bp, synthetic construct
  misc_feature 1..906: note = Description of Artificial Sequence: Synthetic coding sequence
  source 1..906: mol_type = other DNA
atggaggacgaggtggtgagattcgccaagaagatggacaagatggtgcagaagaagaacgccgccggcgccctggacctgctgaaggagctgaagaacatccccatgaccctggagctgctgcagagcaccagaatcggcatgagcgtgaacgccatcagaaagcagagcaccgacgaggaggtgaccagcctggccaagagcctgatcaagagctggaagaagctgctggacggccccagcaccgagaaggacctggacgagaagaagaaggagcccgccatcaccagccagaacagccccgaggccagagaggagagcaccagcagcggcaacgtgagcaacagaaaggacgagaccaacgccagagacacctacgtgagcagcttccccagagcccccagcaccagcgacagcgtgagactgaagtgcagagagatgctggccgccgccctgagaaccggcgacgactacatcgccatcggcgccgacgaggaggagctgggcagccagatcgaggaggccatctaccaggagatcagaaacaccgacatgaagtacaagaacagagtgagaagcagaatcagcaacctgaaggacgccaagaaccccaacctgagaaagaacgtgctgtgcggcaacatcccccccgacctgttcgccagaatgaccgccgaggagatggccagcgacgagctgaaggagatgagaaagaacctgaccaaggaggccatcagagagcaccagatggccaagaccggcggcacccagaccgacctgttcacctgcggcaagtgcaagaagaagaactgcacctacacccaggtgcagaccagaagcgccgacgagcccatgaccaccttcgtggtgtgcaacgagtgcggcaacagatggaagttctgctag

SEQ ID NO: 102740 - DNA, 354 bp, synthetic construct
  misc_feature 1..354: note = Description of Artificial Sequence: Synthetic coding sequence
  source 1..354: mol_type = other DNA
atggaggacgaggtggtgagattcgccaagaagatggacaagatggtgcagaagaagaacgccgccggcgccctggacctgctgaaggagctgaagaacatccccatgaccctggagctgctgcaggagatggccagcgacgagctgaaggagatgagaaagaacctgaccaaggaggccatcagagagcaccagatggccaagaccggcggcacccagaccgacctgttcacctgcggcaagtgcaagaagaagaactgcacctacacccaggtgcagaccagaagcgccgacgagcccatgaccaccttcgtggtgtgcaacgagtgcggcaacagatggaagttctgctag

SEQ ID NO: 102741 - DNA, 480 bp, synthetic construct
  misc_feature 1..480: note = Description of Artificial Sequence: Synthetic coding sequence
  source 1..480: mol_type = other DNA
atggacaagcccagaaaggagaacgaggaggagccccagagcgcccccaagaccgacgaggagagaccccccgtggagcacagccccgagaagcagagccccgaggagcagagcagcgaggagcagagcagcgaggaggagttcttccccgaggagctgctgcccgagctgctgcccgagatgctgctgagcgaggagagacccccccaggagggcctgagcagaaaggacctgttcgagggcagaccccccatggagcagcccccctgcggcgtgggcaagcacaagctggaggagggcagcttcaaggagagactggccagaagcagaccccagttcagaggcgacatccacggcagaaacctgagcaacgaggagatgatccaggccgccgacgagctggaggagatgaagagagtgagaaacaagctgatgatcatgcactggaaggccaagagaagcagaccctaccccatctag

SEQ ID NO: 102742 - DNA, 480 bp, synthetic construct; identical to SEQ ID NO: 102741
  misc_feature 1..480: note = Description of Artificial Sequence: Synthetic coding sequence
  source 1..480: mol_type = other DNA

SEQ ID NO: 102743 - DNA, 480 bp, synthetic construct; identical to SEQ ID NO: 102741
  misc_feature 1..480: note = Description of Artificial Sequence: Synthetic coding sequence
  source 1..480: mol_type = other DNA

SEQ ID NO: 102744 - DNA, 471 bp, synthetic construct
  misc_feature 1..471: note = Description of Artificial Sequence: Synthetic coding sequence
  source 1..471: mol_type = other DNA
atggacaagcccagaaaggagaacgaggaggagccccagagacccagacccatgagaagaggcctgagatggagcaccctgcccaagagcagcccccccagaagcagcctgagaagaagcagccccagaagaagaagcagcttcctgagaagcagctgcctgagcagctgcctgagatgcagcagcagaagaagcccccaggagggcctgagcagaaaggacctgttcgagggcagaccccccatggagcagcccccctgcggcgtgggcaagcacaagctggaggagggcagcttcaaggagagactggccagaagcagaccccagttcagaggcgacatccacggcagaaacctgagcaacgaggagatgatccaggccgccgacgagctggaggagatgaagagagtgagaaacaagctgatgatcatgcactggaaggccaagagaagcagaccctaccccatctag

SEQ ID NO: 102745 - DNA, 303 bp, synthetic construct
  misc_feature 1..303: note = Description of Artificial Sequence: Synthetic coding sequence
  source 1..303: mol_type = other DNA
atgcagaagccctgcaaggagaacgagggcaagcccaagtgcagcgtgcccaagagagaggagaagagaccctacggcgagttcgagagacagcagaccgagggcaacttcagacagagactgctgcagagcctggaggagttcaaggaggacatcgactacagacacttcaaggacgaggagatgaccagagagggcgacgagatggagagatgcctggaggagatcagaggcctgagaaagaagttcagagccctgcacagcaaccacagacacagcagagacagaccctaccccatctag

SEQ ID NO: 102746 - DNA, 303 bp, synthetic construct; identical to SEQ ID NO: 102745
  misc_feature 1..303: note = Description of Artificial Sequence: Synthetic coding sequence
  source 1..303: mol_type = other DNA

SEQ ID NO: 102747 - DNA, 291 bp, synthetic construct
  misc_feature 1..291: note = Description of Artificial Sequence: Synthetic coding sequence
  source 1..291: mol_type = other DNA
atgtacgtgaagctgatcagcagcgacggccacgagttcatcgtgaagagagagcacgccctgaccagcggcaccatcaaggccatgctgagcggccccggccagttcgccgagaacgagaccaacgaggtgaacttcagagagatccccagccacgtgctgagcaaggtgtgcatgtacttcacctacaaggtgagatacaccaacagcagcaccgagatccccgagttccccatcgcccccgagatcgccctggagctgctgatggccgccaacttcctggactgctag

SEQ ID NO: 102748 - DNA, 339 bp, synthetic construct
  misc_feature 1..339: note = Description of Artificial Sequence: Synthetic coding sequence
  source 1..339: mol_type = other DNA
atggacggcgaggagaagacctacggcggctgcgagggccccgacgccatgtacgtgaagctgatcagcagcgacggccacgagttcatcgtgaagagagagcacgccctgaccagcggcaccatcaaggccatgctgagcggccccggccagttcgccgagaacgagaccaacgaggtgaacttcagagagatccccagccacgtgctgagcaaggtgtgcatgtacttcacctacaaggtgagatacaccaacagcagcaccgagatccccgagttccccatcgcccccgagatcgccctggagctgctgatggccgccaacttcctggactgctag

SEQ ID NO: 102749 - DNA, 339 bp, synthetic construct; identical to SEQ ID NO: 102748
  misc_feature 1..339: note = Description of Artificial Sequence: Synthetic coding sequence
  source 1..339: mol_type = other DNA

SEQ ID NO: 102750 - DNA, 339 bp, synthetic construct; identical to SEQ ID NO: 102748
  misc_feature 1..339: note = Description of Artificial Sequence: Synthetic coding sequence
  source 1..339: mol_type = other DNA

SEQ ID NO: 102751 - DNA, 339 bp, synthetic construct; identical to SEQ ID NO: 102748
  misc_feature 1..339: note = Description of Artificial Sequence: Synthetic coding sequence
  source 1..339: mol_type = other DNA

SEQ ID NO: 102752 - DNA, 339 bp, synthetic construct; identical to SEQ ID NO: 102748
  misc_feature 1..339: note = Description of Artificial Sequence: Synthetic coding sequence
  source 1..339: mol_type = other DNA

SEQ ID NO: 102753 - DNA, 339 bp, synthetic construct; identical to SEQ ID NO: 102748
  misc_feature 1..339: note = Description of Artificial Sequence: Synthetic coding sequence
  source 1..339: mol_type = other DNA

SEQ ID NO: 102754 - DNA, 2397 bp, synthetic construct
  misc_feature 1..2397: note = Description of Artificial Sequence: Synthetic coding sequence
  source 1..2397: mol_type = other DNA
atgcacggcggcagaagctgcggccccagaaccagaagagagcccagcagcggcgaggaggccgcccccgtgaccgccatggccgccgagagcgccctgcaggtggtggagaagctgcaggccagactggccgccaaccccgaccccaagaagctgctgaagtacctgaagaagctgagcaccctgcccatcaccgtggacatcctggccgagaccggcgtgggcaagaccgtgaacagcctgagaaagcacgagcacgtgggcagcttcgccagagacctggtggcccagtggaagaagctggtgcccgtggagagaaacgccgagcccgacgagcaggacttcgagaagagcaacagcagaaagagacccagagacgccctgcagaaggaggaggagatggagggcgactaccaggagacctggaaggccaccggcagcagaagctacagccccgaccacagacagaagaagcacagaaagctgagcgagctggagagaccccacaaggtgagccacggccacgagagaagagacgagagaaagagatgccacagaatgagccccacctacagcagcgaccccgagagcagcgactacggccacgtgcagagcccccccagctgcaccagcccccaccagatgtacgtggaccactacagaagcctggaggaggaccaggagcccatcgtgagccaccagaagcccggcaagggccacagcaacgccttccaggacagactgggcgccagccaggagagacacctgggcgagccccacggcaagggcgtggtgagccagaacaaggagcacaagagcagccacaaggacaagagacccgtggacgccaagagcgacgagaaggccagcgtggtgagcagagagaagagccacaaggccctgagcaaggaggagaacagaagaccccccagcggcgacaacgccagagagaagccccccagcagcggcgtgaagaaggagaaggacagagagggcagcagcctgaagaagaagtgcctgccccccagcgaggccgccagcgacaaccacctgaagaagcccaagcacagagaccccgagaaggccaagctggacaagagcaagcagggcctggacagcttcgacaccggcaagggcgccggcgacctgctgcccaaggtgaaggagaagggcagcaacaacctgaagacccccgagggcaaggtgaagaccaacctggacagaaagagcctgggcagcctgcccaaggtggaggagaccgacatggaggacgagttcgagcagcccaccatgagcttcgagagctacctgagctacgaccagcccagaaagaagaagaagaagatcgtgaagaccagcgccaccgccctgggcgacaagggcctgaagaagaacgacagcaagagcaccggcaagaacctggacagcgtgcagaagctgcccaaggtgaacaagaccaagagcgagaagcccgccggcgccgacctggccaagctgagaaaggtgcccgacgtgctgcccgtgctgcccgacctgcccctgcccgccatccaggccaactacagacccctgcccagcctggagctgatcagcagcttccagcccaagagaaaggccttcagcagcccccaggaggaggaggaggccggcttcaccggcagaagaatgaacagcaagatgcaggtgtacagcggcagcaagtgcgcctacctgcccaagatgatgaccctgcaccagcagtgcatcagagtgctgaagaacaacatcgacagcatcttcgaggtgggcggcgtgccctacagcgtgctggagcccgtgctggagagatgcacccccgaccagctgtacagaatcgaggagtacaaccacgtgctgatcgaggagaccgaccagctgtggaaggtgcactgccacagagacttcaaggaggagagacccgaggagtacgagagctggagagagatgtacctgagactgcaggacgccagagagcagagactgagagtgctgaccaagaacatccagttcgcccacgccaacaagcccaagggcagacaggccaagatggccttcgtgaacagcgtggccaagccccccagagacgtgagaagaagacaggagaagttcggcaccggcggcgccgccgtgcccgagaagatcaagatcaagcccgccccctaccccatgggcagcagccacgccagcgccagcagcatcagcttcaaccccagccccgaggagcccgcctacgacggccccagcaccagcagcgcccacctggcccccgtggtgagcagcaccgtgagctacgaccccagaaagcccaccgtgaagaagatcgcccccatgatggccaagaccatcaaggccttcaagaacagattcagcagaagatag

SEQ ID NO: 102755 - DNA, 3297 bp, synthetic construct
  misc_feature 1..3297: note = Description of Artificial Sequence: Synthetic coding sequence
  source 1..3297: mol_type = other DNA
atggccgagagaggcggcgacggcggcgagagcgagagattcaaccccggcgagctgagaatggcccagcagcaggccctgagattcagaggccccgcccccccccccaacgccgtgatgagaggccccccccccctgatgagaccccccccccccttcggcatgatgagaggccccccccccccccccagaccccccttcggcagaccccccttcgaccccaacatgccccccatgcccccccccggcggcatccccccccccatgggccccccccacctgcagagaccccccttcatgcccccccccatgagcagcatgccccccccccccggcatgatgttcccccccggcatgccccccgtgaccgcccccggcacccccgccctgccccccaccgaggagatctgggtggagaacaagacccccgacggcaaggtgtactactacaacgccagaaccagagagagcgcctggaccaagcccgacggcgtgaaggtgatccagcagagcgagctgacccccatgctggccgcccaggcccaggtgcaggcccaggcccaggcccaggcccaggcccaggcccaggcccaggcccaggcccaggcccaggcccaggcccaggcccaggcccaggcccaggcccaggcccaggcccaggcccaggcccaggcccaggcccaggcccaggcccaggcccaggcccaggcccaggcccaggcccaggtgcaggcccaggtgcaggcccaggtgcaggcccaggccgtgggcgccagcacccccaccaccagcagccccgcccccgccgtgagcaccagcaccagcagcagcacccccagcagcaccaccagcaccaccaccaccgccaccagcgtggcccagaccgtgagcacccccaccacccaggaccagacccccagcagcgccgtgagcgtggccacccccaccgtgagcgtgagcacccccgcccccaccgccacccccgtgcagaccgtgccccagccccacccccagaccctgccccccgccgtgccccacagcgtgccccagcccaccaccgccatccccgccttcccccccgtgatggtgccccccttcagagtgcccctgcccggcatgcccatccccctgcccggcgtggccatgatgcagatcgtgagctgcccctacgtgaagaccgtggccaccaccaagaccggcgtgctgcccggcatggccccccccatcgtgcccatgatccacccccaggtggccatcgccgccagccccgccaccctggccggcgccaccgccgtgagcgagtggaccgagtacaagaccgccgacggcaagacctactactacaacaacagaaccctggagagcacctgggagaagccccaggagctgaaggagaaggagaagctggaggagaagatcaaggagcccatcaaggagcccagcgaggagcccctgcccatggagaccgaggaggaggaccccaaggaggagcccatcaaggagatcaaggaggagcccaaggaggaggagatgaccgaggaggagaaggccgcccagaaggccaagcccgtggccaccgcccccatccccggcaccccctggtgcgtggtgtggaccggcgacgagagagtgttcttctacaaccccaccaccagactgagcatgtgggacagacccgacgacctgatcggcagagccgacgtggacaagatcatccaggagcccccccacaagaagggcatggaggagctgaagaagctgagacaccccacccccaccatgctgagcatccagaagtggcagttcagcatgagcgccatcaaggaggagcaggagctgatggaggagatcaacgaggacgagcccgtgaaggccaagaagagaaagagagacgacaacaaggacatcgacagcgagaaggaggccgccatggaggccgagatcaaggccgccagagagagagccatcgtgcccctggaggccagaatgaagcagttcaaggacatgctgctggagagaggcgtgagcgccttcagcacctgggagaaggagctgcacaagatcgtgttcgaccccagatacctgctgctgaaccccaaggagagaaagcaggtgttcgaccagtacgtgaagaccagagccgaggaggagagaagagagaagaagaacaagatcatgcaggccaaggaggacttcaagaagatgatggaggaggccaagttcaaccccagagccaccttcagcgagttcgccgccaagcacgccaaggacagcagattcaaggccatcgagaagatgaaggacagagaggccctgttcaacgagttcgtggccgccgccagaaagaaggagaaggaggacagcaagaccagaggcgagaagatcaagagcgacttcttcgagctgctgagcaaccaccacctggacagccagagcagatggagcaaggtgaaggacaaggtggagagcgaccccagatacaaggccgtggacagcagcagcatgagagaggacctgttcaagcagtacatcgagaagatcgccaagaacctggacagcgagaaggagaaggagctggagagacaggccagaatcgaggccagcctgagagagagagagagagaggtgcagaaggccagaagcgagcagaccaaggagatcgacagagagagagagcagcacaagagagaggaggccatccagaacttcaaggccctgctgagcgacatggtgagaagcagcgacgtgagctggagcgacaccagaagaaccctgagaaaggaccacagatgggagagcggcagcctgctggagagagaggagaaggagaagctgttcaacgagcacatcgaggccctgaccaagaagaagagagagcacttcagacagctgctggacgagaccagcgccatcaccctgaccagcacctggaaggaggtgaagaagatcatcaaggaggaccccagatgcatcaagttcagcagcagcgacagaaagaagcagagagagttcgaggagtacatcagagacaagtacatcaccgccaaggccgacttcagaaccctgctgaaggagaccaagttcatcacctacagaagcaagaagctgatccaggagagcgaccagcacctgaaggacgtggagaagatcctgcagaacgacaagagatacctggtgctggactgcgtgcccgaggagagaagaaagctgatcgtggcctacgtggacgacctggacagaagaggccccccccccccccccaccgccagcgagcccaccagaagaagcaccaagtag

SEQ ID NO: 102756 - DNA, 3234 bp, synthetic construct
  misc_feature 1..3234: note = Description of Artificial Sequence: Synthetic coding sequence
  source 1..3234: mol_type = other DNA
atggccgagagaggcggcgacggcggcgagagcgagagattcaaccccggcgagctgagaatggcccagcagcaggccctgagattcagaggccccgcccccccccccaacgccgtgatgagaggccccccccccctgatgagaccccccccccccttcggcatgatgagaggccccccccccccccccagaccccccttcggcagaccccccttcgaccccaacatgccccccatgcccccccccggcggcatccccccccccatgggccccccccacctgcagagaccccccttcatgcccccccccatgagcagcatgccccccccccccggcatgatgttcccccccggcatgccccccgtgaccgcccccggcacccccgccctgccccccaccgaggagatctgggtggagaacaagacccccgacggcaaggtgtactactacaacgccagaaccagagagagcgcctggaccaagcccgacggcgtgaaggtgatccagcagagcgagctgacccccatgctggccgcccaggcccaggtgcaggcccaggcccaggcccaggcccaggcccaggcccaggcccaggcccaggcccaggcccaggcccaggcccaggcccaggcccaggcccaggcccaggcccaggcccaggcccaggcccaggcccaggcccaggcccaggcccaggcccaggcccaggcccaggcccaggcccaggtgcaggcccaggtgcaggcccaggtgcaggcccaggccgtgggcgccagcacccccaccaccagcagccccgcccccgccgtgagcaccagcaccagcagcagcacccccagcagcaccaccagcaccaccaccaccgccaccagcgtggcccagaccgtgagcacccccaccacccaggaccagacccccagcagcgccgtgagcgtggccacccccaccgtgagcgtgagcacccccgcccccaccgccacccccgtgcagaccgtgccccagccccacccccagaccctgccccccgccgtgccccacagcgtgccccagcccaccaccgccatccccgccttcccccccgtgatggtgccccccttcagagtgcccctgcccggcatgcccatccccctgcccggcgtgctgcccggcatggccccccccatcgtgcccatgatccacccccaggtggccatcgccgccagccccgccaccctggccggcgccaccgccgtgagcgagtggaccgagtacaagaccgccgacggcaagacctactactacaacaacagaaccctggagagcacctgggagaagccccaggagctgaaggagaaggagaagctggaggagaagatcaaggagcccatcaaggagcccagcgaggagcccctgcccatggagaccgaggaggaggaccccaaggaggagcccatcaaggagatcaaggaggagcccaaggaggaggagatgaccgaggaggagaaggccgcccagaaggccaagcccgtggccaccgcccccatccccggcaccccctggtgcgtggtgtggaccggcgacgagagagtgttcttctacaaccccaccaccagactgagcatgtgggacagacccgacgacctgatcggcagagccgacgtggacaagatcatccaggagcccccccacaagaagggcatggaggagctgaagaagctgagacaccccacccccaccatgctgagcatccagaagtggcagttcagcatgagcgccatcaaggaggagcaggagctgatggaggagatcaacgaggacgagcccgtgaaggccaagaagagaaagagagacgacaacaaggacatcgacagcgagaaggaggccgccatggaggccgagatcaaggccgccagagagagagccatcgtgcccctggaggccagaatgaagcagttcaaggacatgctgctggagagaggcgtgagcgccttcagcacctgggagaaggagctgcacaagatcgtgttcgaccccagatacctgctgctgaaccccaaggagagaaagcaggtgttcgaccagtacgtgaagaccagagccgaggaggagagaagagagaagaagaacaagatcatgcaggccaaggaggacttcaagaagatgatggaggaggccaagttcaaccccagagccaccttcagcgagttcgccgccaagcacgccaaggacagcagattcaaggccatcgagaagatgaaggacagagaggccctgttcaacgagttcgtggccgccgccagaaagaaggagaaggaggacagcaagaccagaggcgagaagatcaagagcgacttcttcgagctgctgagcaaccaccacctggacagccagagcagatggagcaaggtgaaggacaaggtggagagcgaccccagatacaaggccgtggacagcagcagcatgagagaggacctgttcaagcagtacatcgagaagatcgccaagaacctggacagcgagaaggagaaggagctggagagacaggccagaatcgaggccagcctgagagagagagagagagaggtgcagaaggccagaagcgagcagaccaaggagatcgacagagagagagagcagcacaagagagaggaggccatccagaacttcaaggccctgctgagcgacatggtgagaagcagcgacgtgagctggagcgacaccagaagaaccctgagaaaggaccacagatgggagagcggcagcctgctggagagagaggagaaggagaagctgttcaacgagcacatcgaggccctgaccaagaagaagagagagcacttcagacagctgctggacgagaccagcgccatcaccctgaccagcacctggaaggaggtgaagaagatcatcaaggaggaccccagatgcatcaagttcagcagcagcgacagaaagaagcagagagagttcgaggagtacatcagagacaagtacatcaccgccaaggccgacttcagaaccctgctgaaggagaccaagttcatcacctacagaagcaagaagctgatccaggagagcgaccagcacctgaaggacgtggagaagatcctgcagaacgacaagagatacctggtgctggactgcgtgcccgaggagagaagaaagctgatcgtggcctacgtggacgacctggacagaagaggccccccccccccccccaccgccagcgagcccaccagaagaagcaccaagtag

SEQ ID NO: 102757 - DNA, 2049 bp, synthetic construct
  misc_feature 1..2049: note = Description of Artificial Sequence: Synthetic coding sequence
  source 1..2049: mol_type = other DNA
atgaacccccagcagcagagaatggccgccatcggcaccgacaaggagctgagcgacctgctggacttcagcgccatgttcagcccccccgtgaacagcggcaagaccagacccaccaccctgggcagcagccagttcagcggcagcggcatcgacgagagaggcggcaccaccagctggggcaccagcggccagcccagccccagctacgacagcagcagaggcttcaccgacagcccccactacagcgaccacctgaacgacagcagactgggcgcccacgagggcctgagccccacccccttcatgaacagcaacctgatgggcaagaccagcgagagaggcagcttcagcctgtacagcagagacaccggcctgcccggctgccagagcagcctgctgagacaggacctgggcctgggcagccccgcccagctgagcagcagcggcaagcccggcaccgcctactacagcttcagcgccaccagcagcagaagaagacccctgcacgacagcgccgccctggaccccctgcaggccaagaaggtgagaaaggtgccccccggcctgcccagcagcgtgtacgcccccagccccaacagcgacgacttcaacagagagagccccagctaccccagccccaagccccccaccagcatgttcgccagcaccttcttcatgcaggacggcacccacaacagcagcgacctgtggagcagcagcaacggcatgagccagcccggcttcggcggcatcctgggcaccagcaccagccacatgagccagagcagcagctacggcaacctgcacagccacgacagactgagctaccccccccacagcgtgagccccaccgacatcaacaccagcctgccccccatgagcagcttccacagaggcagcaccagcagcagcccctacgtggccgccagccacaccccccccatcaacggcagcgacagcatcctgggcaccagaggcaacgccgccggcagcagccagaccggcgacgccctgggcaaggccctggccagcatctacagccccgaccacaccagcagcagcttccccagcaaccccagcacccccgtgggcagccccagccccctgaccggcaccagccagtggcccagacccggcggccaggcccccagcagccccagctacgagaacagcctgcacagcctgcagagcagaatggaggacagactggacagactggacgacgccatccacgtgctgagaaaccacgccgtgggccccagcaccagcctgcccgccggccacagcgacatccacagcctgctgggccccagccacaacgcccccatcggcagcctgaacagcaactacggcggcagcagcctggtggccagcagcagaagcgccagcatggtgggcacccacagagaggacagcgtgagcctgaacggcaaccacagcgtgctgagcagcaccgtgaccaccagcagcaccgacctgaaccacaagacccaggagaactacagaggcggcctgcagagccagagcggcaccgtggtgaccaccgagatcaagaccgagaacaaggagaaggacgagaacctgcacgagccccccagcagcgacgacatgaagagcgacgacgagagcagccagaaggacatcaaggtgagcagcagaggcagaaccagcagcaccaacgaggacgaggacctgaaccccgagcagaagatcgagagagagaaggagagaagaatggccaacaacgccagagagagactgagagtgagagacatcaacgaggccttcaaggagctgggcagaatgtgccagctgcacctgaagagcgagaagccccagaccaagctgctgatcctgcaccaggccgtggccgtgatcctgagcctggagcagcaggtgagagagagaaacctgaaccccaaggccgcctgcctgaagagaagagaggaggagaaggtgagcgccgtgagcgccgagccccccaccaccctgcccggcacccaccccggcctgagcgagaccaccaaccccatgggccacatgtag

SEQ ID NO: 102758 - DNA, 2121 bp, synthetic construct
  misc_feature 1..2121: note = Description of Artificial Sequence: Synthetic coding sequence
  source 1..2121: mol_type = other DNA
atgaacccccagcagcagagaatggccgccatcggcaccgacaaggagctgagcgacctgctggacttcagcgccatgttcagcccccccgtgaacagcggcaagaccagacccaccaccctgggcagcagccagttcagcggcagcggcatcgacgagagaggcggcaccaccagctggggcaccagcggccagcccagccccagctacgacagcagcagaggcttcaccgacagcccccactacagcgaccacctgaacgacagcagactgggcgcccacgagggcctgagccccacccccttcatgaacagcaacctgatgggcaagaccagcgagagaggcagcttcagcctgtacagcagagacaccggcctgcccggctgccagagcagcctgctgagacaggacctgggcctgggcagccccgcccagctgagcagcagcggcaagcccggcaccgcctactacagcttcagcgccaccagcagcagaagaagacccctgcacgacagcgccgccctggaccccctgcaggccaagaaggtgagaaaggtgccccccggcctgcccagcagcgtgtacgcccccagccccaacagcgacgacttcaacagagagagccccagctaccccagccccaagccccccaccagcatgttcgccagcaccttcttcatgcaggacggcacccacaacagcagcgacctgtggagcagcagcaacggcatgagccagcccggcttcggcggcatcctgggcaccagcaccagccacatgagccagagcagcagctacggcaacctgcacagccacgacagactgagctaccccccccacagcgtgagccccaccgacatcaacaccagcctgccccccatgagcagcttccacagaggcagcaccagcagcagcccctacgtggccgccagccacaccccccccatcaacggcagcgacagcatcctgggcaccagaggcaacgccgccggcagcagccagaccggcgacgccctgggcaaggccctggccagcatctacagccccgaccacaccagcagcagcttccccagcaaccccagcacccccgtgggcagccccagccccctgaccggcaccagccagtggcccagacccggcggccaggcccccagcagccccagctacgagaacagcctgcacagcctgaagaacagagtggagcagcagctgcacgagcacctgcaggacgccatgagcttcctgaaggacgtgtgcgagcagagcagaatggaggacagactggacagactggacgacgccatccacgtgctgagaaaccacgccgtgggccccagcaccagcctgcccgccggccacagcgacatccacagcctgctgggccccagccacaacgcccccatcggcagcctgaacagcaactacggcggcagcagcctggtggccagcagcagaagcgccagcatggtgggcacccacagagaggacagcgtgagcctgaacggcaaccacagcgtgctgagcagcaccgtgaccaccagcagcaccgacctgaaccacaagacccaggagaactacagaggcggcctgcagagccagagcggcaccgtggtgaccaccgagatcaagaccgagaacaaggagaaggacgagaacctgcacgagccccccagcagcgacgacatgaagagcgacgacgagagcagccagaaggacatcaaggtgagcagcagaggcagaaccagcagcaccaacgaggacgaggacctgaaccccgagcagaagatcgagagagagaaggagagaagaatggccaacaacgccagagagagactgagagtgagagacatcaacgaggccttcaaggagctgggcagaatgtgccagctgcacctgaagagcgagaagccccagaccaagctgctgatcctgcaccaggccgtggccgtgatcctgagcctggagcagcaggtgagagagagaaacctgaaccccaaggccgcctgcctgaagagaagagaggaggagaaggtgagcgccgtgagcgccgagccccccaccaccctgcccggcacccaccccggcctgagcgagaccaccaaccccatgggccacatgtag

SEQ ID NO: 102759 - DNA, 2109 bp, synthetic construct
  misc_feature 1..2109: note = Description of Artificial Sequence: Synthetic coding sequence
  source 1..2109: mol_type = other DNA
atgaacccccagcagcagagaatggccgccatcggcaccgacaaggagctgagcgacctgctggacttcagcgccatgttcagcccccccgtgaacagcggcaagaccagacccaccaccctgggcagcagccagttcagcggcagcggcaccatccacgagatgaagcagctgaacagcaaggccagacagaagggccagagaatcaagggcttcaccgacagcccccactacagcgaccacctgaacgacagcagactgggcgcccacgagggcctgagccccacccccttcatgaacagcaacctgatgggcaagaccagcgagagaggcagcttcagcctgtacagcagagacaccggcctgcccggctgccagagcagcctgctgagacaggacctgggcctgggcagccccgcccagctgagcagcagcggcaagcccggcaccgcctactacagcttcagcgccaccagcagcagaagaagacccctgcacgacagcgccgccctggaccccctgcaggccaagaaggtgagaaaggtgccccccggcctgcccagcagcgtgtacgcccccagccccaacagcgacgacttcaacagagagagccccagctaccccagccccaagccccccaccagcatgttcgccagcaccttcttcatgcaggacggcacccacaacagcagcgacctgtggagcagcagcaacggcatgagccagcccggcttcggcggcatcctgggcaccagcaccagccacatgagccagagcagcagctacggcaacctgcacagccacgacagactgagctaccccccccacagcgtgagccccaccgacatcaacaccagcctgccccccatgagcagcttccacagaggcagcaccagcagcagcccctacgtggccgccagccacaccccccccatcaacggcagcgacagcatcctgggcaccagaggcaacgccgccggcagcagccagaccggcgacgccctgggcaaggccctggccagcatctacagccccgaccacaccagcagcagcttccccagcaaccccagcacccccgtgggcagccccagccccctgaccggcaccagccagtggcccagacccggcggccaggcccccagcagccccagctacgagaacagcctgcacagcctgaagaacagagtggagcagcagctgcacgagcacctgcaggacgccatgagcttcctgaaggacgtgtgcgagcagagcagaatggaggacagactggacagactggacgacgccatccacgtgctgagaaaccacgccgtgggccccagcaccagcctgcccgccggccacagcgacatccacagcctgctgggccccagccacaacgcccccatcggcagcctgaacagcaactacggcggcagcagcctggtggccagcagcagaagcgccagcatggtgggcacccacagagaggacagcgtgagcctgaacggcaaccacagcgtgctgagcagcaccgtgaccaccagcagcaccgacctgaaccacaagacccaggagaactacagaggcggcctgcagagccagagcggcaccgtggtgaccaccgagatcaagaccgagaacaaggagaaggacgagaacctgcacgagccccccagcagcgacgacatgaagagcgacgacgagagcagccagaaggacatcaaggtgagcagcagaggcagaaccagcagcaccaacgaggacgaggacctgaaccccgagcagaagatcgagagagagaaggagagaagaatggccaacaacgccagagagagactgagagtgagagacatcaacgaggccttcaaggagctgggcagaatgtgccagctgcacctgaagagcgagaagccccagaccaagctgctgatcctgcaccaggccgtggccgtgatcctgagcctggagcagcaggtgagagagagaaacctgaaccccaaggccgcctgcctgaagagaagagaggaggagaaggtgagcgccgtgagcgccgagccccccaccaccctgcccggcacccaccccggcctgagcgagaccaccaaccccatgggccacatgtag

SEQ ID NO: 102760 - DNA, 1341 bp, synthetic construct
  misc_feature 1..1341: note = Description of Artificial Sequence: Synthetic coding sequence
  source 1..1341: mol_type = other DNA
atgggcaagagatacatgcaccacccccagatccagatgatcagcaccgtgaacctgctggtgatccacctgctgagccaccagcccgtgtgcagcctggccctgagcctgtgcaagagctaccccccccacagcgtgagccccaccgacatcaacaccagcctgccccccatgagcagcttccacagaggcagcaccagcagcagcccctacgtggccgccagccacaccccccccatcaacggcagcgacagcatcctgggcaccagaggcaacgccgccggcagcagccagaccggcgacgccctgggcaaggccctggccagcatctacagccccgaccacaccagcagcagcttccccagcaaccccagcacccccgtgggcagccccagccccctgaccggcaccagccagtggcccagacccggcggccaggcccccagcagccccagctacgagaacagcctgcacagcctgcagagcagaatggaggacagactggacagactggacgacgccatccacgtgctgagaaaccacgccgtgggccccagcaccagcctgcccgccggccacagcgacatccacagcctgctgggccccagccacaacgcccccatcggcagcctgaacagcaactacggcggcagcagcctggtggccagcagcagaagcgccagcatggtgggcacccacagagaggacagcgtgagcctgaacggcaaccacagcgtgctgagcagcaccgtgaccaccagcagcaccgacctgaaccacaagacccaggagaactacagaggcggcctgcagagccagagcggcaccgtggtgaccaccgagatcaagaccgagaacaaggagaaggacgagaacctgcacgagccccccagcagcgacgacatgaagagcgacgacgagagcagccagaaggacatcaaggtgagcagcagaggcagaaccagcagcaccaacgaggacgaggacctgaaccccgagcagaagatcgagagagagaaggagagaagaatggccaacaacgccagagagagactgagagtgagagacatcaacgaggccttcaaggagctgggcagaatgtgccagctgcacctgaagagcgagaagccccagaccaagctgctgatcctgcaccaggccgtggccgtgatcctgagcctggagcagcaggtgagagagagaaacctgaaccccaaggccgcctgcctgaagagaagagaggaggagaaggtgagcgccgtgagcgccgagccccccaccaccctgcccggcacccaccccggcctgagcgagaccaccaaccccatgggccacatgtag

SEQ ID NO: 102761 - DNA, 2046 bp, synthetic construct
  misc_feature 1..2046: note = Description of Artificial Sequence: Synthetic coding sequence
  source 1..2046: mol_type = other DNA
atggccgccttcagcgtgctgagacccagagtgcccggcagcagcggcacctgggccgccgaccccgacgccagcaccgccgtgagccccagcctgagattcggcggcagagagcccgccagacccaccagaggcggcgccaccaagtggcccaagatgaacccccagcagcagagaatggccgccatcggcaccgacaaggagctgagcgacctgctggacttcagcgccatgttcagcccccccgtgaacagcggcaagaccagacccaccaccctgggcagcagccagttcagcggcagcggcatcgacgagagaggcggcaccaccagctggggcaccagcggccagcccagccccagctacgacagcagcagaggcttcaccgacagcccccactacagcgaccacctgaacgacagcagactgggcgcccacgagggcctgagccccacccccttcatgaacagcaacctgatgggcaagaccagcgagagaggcagcttcagcctgtacagcagagacaccggcctgcccggctgccagagcagcctgctgagacaggacctgggcctgggcagccccgcccagctgagcagcagcggcaagcccggcaccgcctactacagcttcagcgccaccagcagcagaagaagacccctgcacgacagcgccgccctggaccccctgcaggccaagaaggtgagaaaggtgccccccggcctgcccagcagcgtgtacgcccccagccccaacagcgacgacttcaacagagagagccccagctaccccagccccaagccccccaccagcatgttcgccagcaccttcttcatgcaggacggcacccacaacagcagcgacctgtggagcagcagcaacggcatgagccagcccggcttcggcggcatcctgggcaccagcaccagccacatgagccagagcagcagctacggcaacctgcacagccacgacagactgagctaccccccccacagcgtgagccccaccgacatcaacaccagcctgccccccatgagcagcttccacagaggcagcaccagcagcagcccctacgtggccgccagccacaccccccccatcaacggcagcgacagcatcctgggcaccagaggcaacgccgccggcagcagccagaccggcgacgccctgggcaaggccctggccagcatctacagccccgaccacaccagcagcagcttccccagcaaccccagcacccccgtgggcagccccagccccctgaccggcaccagccagtggcccagacccggcggccaggcccccagcagccccagctacgagaacagcctgcacagcctgcagagcagaatggaggacagactggacagactggacgacgccatccacgtgctgagaaaccacgccgtgggccccagcaccagcctgcccgccggccacagcgacatccacagcctgctgggccccagccacaacgcccccatcggcagcctgaacagcaactacggcggcagcagcctggtggccagcagcagaagcgccagcatggtgggcacccacagagaggacagcgtgagcctgaacggcaaccacagcgtgctgagcagcaccgtgaccaccagcagcaccgacctgaaccacaagacccaggagaactacagaggcggcctgcagagccagagcggcaccgtggtgaccaccgagatcaagaccgagaacaaggagaaggacgagaacctgcacgagccccccagcagcgacgacatgaagagcgacgacgagagcagccagaaggacatcaaggtgagcagcagaggcagaaccagcagcaccaacgaggacgaggacctgaaccccgagcagaagatcgagagagagaaggagagaagaatggccaacaacgccagagagagactgagagtgagagacatcaacgaggccttcaaggagctgggcagaatgtgccagctgcacctgaagagcgagaagccccagaccaagctgctgatcctgcaccaggccgtgaccaccatcggcccctag

SEQ ID NO: 102762 - DNA, 885 bp, synthetic construct
  misc_feature 1..885: note = Description of Artificial Sequence: Synthetic coding sequence
  source 1..885: mol_type = other DNA
atgagcttcctgaaggacgtgtgcgagcagagcagaatggaggacagactggacagactggacgacgccatccacgtgctgagaaaccacgccgtgggccccagcaccagcctgcccgccggccacagcgacatccacagcctgctgggccccagccacaacgcccccatcggcagcctgaacagcaactacggcggcagcagcctggtggccagcagcagaagcgccagcatggtgggcacccacagagaggacagcgtgagcctgaacggcaaccacagcgtgctgagcagcaccgtgaccaccagcagcaccgacctgaaccacaagacccaggagaactacagaggcggcctgcagagccagagcggcaccgtggtgaccaccgagatcaagaccgagaacaaggagaaggacgagaacctgcacgagccccccagcagcgacgacatgaagagcgacgacgagagcagccagaaggacatcaaggtgagcagcagaggcagaaccagcaccaacgaggacgaggacctgaaccccgagcagaagatcgagagagagaaggagagaagaatggccaacaacgccagagagagactgagagtgagagacatcaacgaggccttcaaggagctgggcagaatgtgccagctgcacctgaagagcgagaagccccagaccaagctgctgatcctgcaccaggccgtggccgtgatcctgagcctggagcagcaggtgagagagagaaacctgaaccccaaggccgcctgcctgaagagaagagaggaggagaaggtgagcgccgtgagcgccgagccccccaccaccctgcccggcacccaccccggcctgagcgagaccaccaaccccatgggccacatgtag

SEQ ID NO: 102763 - DNA, 1611 bp, synthetic construct
  misc_feature 1..1611: note = Description of Artificial Sequence: Synthetic coding sequence
  source 1..1611: mol_type = other DNA
atgtactgcgcctaccccgtgcccggcatgggcagcaacagcctgatgtactactacaacggcaagaccgtgtacgcccccagccccaacagcgacgacttcaacagagagagccccagctaccccagccccaagccccccaccagcatgttcgccagcaccttcttcatgcaggacggcacccacaacagcagcgacctgtggagcagcagcaacggcatgagccagcccggcttcggcggcatcctgggcaccagcaccagccacatgagccagagcagcagctacggcaacctgcacagccacgacagactgagctaccccccccacagcgtgagccccaccgacatcaacaccagcctgccccccatgagcagcttccacagaggcagcaccagcagcagcccctacgtggccgccagccacaccccccccatcaacggcagcgacagcatcctgggcaccagaggcaacgccgccggcagcagccagaccggcgacgccctgggcaaggccctggccagcatctacagccccgaccacaccagcagcagcttccccagcaaccccagcacccccgtgggcagccccagccccctgaccggcaccagccagtggcccagacccggcggccaggcccccagcagccccagctacgagaacagcctgcacagcctgaagaacagagtggagcagcagctgcacgagcacctgcaggacgccatgagcttcctgaaggacgtgtgcgagcagagcagaatggaggacagactggacagactggacgacgccatccacgtgctgagaaaccacgccgtgggccccagcaccagcctgcccgccggccacagcgacatccacagcctgctgggccccagccacaacgcccccatcggcagcctgaacagcaactacggcggcagcagcctggtggccagcagcagaagcgccagcatggtgggcacccacagagaggacagcgtgagcctgaacggcaaccacagcgtgctgagcagcaccgtgaccaccagcagcaccgacctgaaccacaagacccaggagaactacagaggcggcctgcagagccagagcggcaccgtggtgaccaccgagatcaagaccgagaacaaggagaaggacgagaacctgcacgagccccccagcagcgacgacatgaagagcgacgacgagagcagccagaaggacatcaaggtgagcagcagaggcagaaccagcagcaccaacgaggacgaggacctgaaccccgagcagaagatcgagagagagaaggagagaagaatggccaacaacgccagagagagactgagagtgagagacatcaacgaggccttcaaggagctgggcagaatgtgccagctgcacctgaagagcgagaagccccagaccaagctgctgatcctgcaccaggccgtggccgtgatcctgagcctggagcagcaggtgagagagagaaacctgaaccccaaggccgcctgcctgaagagaagagaggaggagaaggtgagcgccgtgagcgccgagccccccaccaccctgcccggcacccaccccggcctgagcgagaccaccaaccccatgggccacatgtag

SEQ ID NO: 102764 - DNA, 2049 bp, synthetic construct; identical to SEQ ID NO: 102757
  misc_feature 1..2049: note = Description of Artificial Sequence: Synthetic coding sequence
  source 1..2049: mol_type = other DNA

SEQ ID NO: 102765 - DNA, 1020 bp, synthetic construct
  misc_feature 1..1020: note = Description of Artificial Sequence: Synthetic coding sequence
  source 1..1020: mol_type = other DNA
atgagcagcaacagcagcaccagccagtggcccagacccggcggccaggcccccagcagccccagctacgagaacagcctgcacagcctgaagaacagagtggagcagcagctgcacgagcacctgcaggacgccatgagcttcctgaaggacgtgtgcgagcagagcagaatggaggacagactggacagactggacgacgccatccacgtgctgagaaaccacgccgtgggccccagcaccagcctgcccgccggccacagcgacatccacagcctgctgggccccagccacaacgcccccatcggcagcctgaacagcaactacggcggcagcagcctggtggccagcagcagaagcgccagcatggtgggcacccacagagaggacagcgtgagcctgaacggcaaccacagcgtgctgagcagcaccgtgaccaccagcagcaccgacctgaaccacaagacccaggagaactacagaggcggcctgcagagccagagcggcaccgtggtgaccaccgagatcaagaccgagaacaaggagaaggacgagaacctgcacgagccccccagcagcgacgacatgaagagcgacgacgagagcagccagaaggacatcaaggtgagcagcagaggcagaaccagcaccaacgaggacgaggacctgaaccccgagcagaagatcgagagagagaaggagagaagaatggccaacaacgccagagagagactgagagtgagagacatcaacgaggccttcaaggagctgggcagaatgtgccagctgcacctgaagagcgagaagccccagaccaagctgctgatcctgcaccaggccgtggccgtgatcctgagcctggagcagcaggtgagagagagaaacctgaaccccaaggccgcctgcctgaagagaagagaggaggagaaggtgagcgccgtgagcgccgagccccccaccaccctgcccggcacccaccccggcctgagcgagaccaccaaccccatgggccacatgtag

SEQ ID NO: 102766 - DNA, 1341 bp, synthetic construct; identical to SEQ ID NO: 102760
  misc_feature 1..1341: note = Description of Artificial Sequence: Synthetic coding sequence
  source 1..1341: mol_type = other DNA

SEQ ID NO: 102767 - DNA, 1539 bp, synthetic construct
  misc_feature 1..1539: note = Description of Artificial Sequence: Synthetic coding sequence
  source 1..1539: mol_type = other DNA
atgtactgcgcctaccccgtgcccggcatgggcagcaacagcctgatgtactactacaacggcaagaccgtgtacgcccccagccccaacagcgacgacttcaacagagagagccccagctaccccagccccaagccccccaccagcatgttcgccagcaccttcttcatgcaggacggcacccacaacagcagcgacctgtggagcagcagcaacggcatgagccagcccggcttcggcggcatcctgggcaccagcaccagccacatgagccagagcagcagctacggcaacctgcacagccacgacagactgagctaccccccccacagcgtgagccccaccgacatcaacaccagcctgccccccatgagcagcttccacagaggcagcaccagcagcagcccctacgtggccgccagccacaccccccccatcaacggcagcgacagcatcctgggcaccagaggcaacgccgccggcagcagccagaccggcgacgccctgggcaaggccctggccagcatctacagccccgaccacaccagcagcagcttccccagcaaccccagcacccccgtgggcagccccagccccctgaccggcaccagccagtggcccagacccggcggccaggcccccagcagccccagctacgagaacagcctgcacagcctgcagagcagaatggaggacagactggacagactggacgacgccatccacgtgctgagaaaccacgccgtgggccccagcaccagcctgcccgccggccacagcgacatccacagcctgctgggccccagccacaacgcccccatcggcagcctgaacagcaactacggcggcagcagcctggtggccagcagcagaagcgccagcatggtgggcacccacagagaggacagcgtgagcctgaacggcaaccacagcgtgctgagcagcaccgtgaccaccagcagcaccgacctgaaccacaagacccaggagaactacagaggcggcctgcagagccagagcggcaccgtggtgaccaccgagatcaagaccgagaacaaggagaaggacgagaacctgcacgagccccccagcagcgacgacatgaagagcgacgacgagagcagccagaaggacatcaaggtgagcagcagaggcagaaccagcagcaccaacgaggacgaggacctgaaccccgagcagaagatcgagagagagaaggagagaagaatggccaacaacgccagagagagactgagagtgagagacatcaacgaggccttcaaggagctgggcagaatgtgccagctgcacctgaagagcgagaagccccagaccaagctgctgatcctgcaccaggccgtggccgtgatcctgagcctggagcagcaggtgagagagagaaacctgaaccccaaggccgcctgcctgaagagaagagaggaggagaaggtgagcgccgtgagcgccgagccccccaccaccctgcccggcacccaccccggcctgagcgagaccaccaaccccatgggccacatgtag

SEQ ID NO: 102768 - DNA, 600 bp, synthetic construct
  misc_feature 1..600: note = Description of Artificial Sequence: Synthetic coding sequence
  source 1..600: mol_type = other DNA
atggccttcgccctgctgagacccgtgggcgcccacgtgctgtaccccgacgtgagactgctgagcgaggacgaggagaacagaagcgagagcgacgccagcgaccagagcttcggctgctgcgagggccccgaggccgccagaagaggccccggccccggcggcggcagaagagccggcggcggcggcggcgccggccccgtggtggtggtgagacagagacaggccgccaacgccagagagagagacagaacccagagcgtgaacaccgccttcaccgccctgagaaccctgatccccaccgagcccgtggacagaaagctgagcaagatcgagaccgtgagactggccagcagctacatcgcccacctggccaacgtgctgctgctgggcgacagcgccgacgacggccagccctgcttcagagccgccggcagcgccaagggcgccgtgcccgccgccgccgacggcggcagacagcccagaagcatctgcaccttctgcctgagcaaccagagaaagggcggcggcagaagagacctgggcggcagctgcctgaaggtgagaggcgtggcccccctgagaggccccagaagatag

SEQ ID NO: 102769 - DNA, 1038 bp, synthetic construct
  misc_feature 1..1038: note = Description of Artificial Sequence: Synthetic coding sequence
  source 1..1038: mol_type = other DNA
atgctgccctgcttccagctgctgagaatcggcggcggcagaggcggcgacctgtacaccttccacccccccgccggcgccggctgcacctacagactgggccacagagccgacctgtgcgacgtggccctgagaccccagcaggagcccggcctgatcagcggcatccacgccgagctgcacgccgagcccagaggcgacgactggagagtgagcctggaggaccacagcagccagggcaccctggtgaacaacgtgagactgcccagaggccacagactggagctgagcgacggcgacctgctgaccttcggccccgagggcccccccggcaccagccccagcgagttctacttcatgttccagcaggtgagagtgaagccccaggacttcgccgccatcaccatccccagaagcagaggcgaggccagagtgggcgccggcttcagacccatgctgcccagccagggcgccccccagagacccctgagcaccttcagccccgcccccaaggccaccctgatcctgaacagcatcggcagcctgagcaagctgagaccccagcccctgaccttcagccccagctggggcggccccaagagcctgcccgtgcccgccccccccggcgagatgggcaccacccccagcgcccccccccagagaaacagaagaaagagcgtgcacagagtgctggccgagctggacgacgagagcgagccccccgagaaccccccccccgtgctgatggagcccagaaagaagctgagagtggacaaggcccccctgacccccaccggcaacagaagaggcagacccagaaagtaccccgtgagcgcccccatggccccccccgccgtgggcggcggcgagccctgcgccgccccctgctgctgcctgccccaggaggagaccgtggcctgggtgcagtgcgacggctgcgacgtgtggttccacgtggcctgcgtgggctgcagcatccaggccgccagagaggccgacttcagatgccccggctgcagagccggcatccagacctag

SEQ ID NO: 102770 - DNA, 1038 bp, synthetic construct; identical to SEQ ID NO: 102769
  misc_feature 1..1038: note = Description of Artificial Sequence: Synthetic coding sequence
  source 1..1038: mol_type = other DNA

SEQ ID NO: 102771 - DNA, 1038 bp, synthetic construct
  misc_feature 1..1038: note = Description of Artificial Sequence: Synthetic coding sequence
  source 1..1038: mol_type = other DNA
atgctgccctgcttccagctgctgagaatcggcggcggcagaggcggcgacctgtacaccttccacccccccgccggcgccggctgcacctacagactgggccacagagccgacctgtgcgacgtggccctgagaccccagcaggagcccggcctgatcagcggcatccacgccgagctgcacgccgagcccagaggcgacgactggagagtgagcctggaggaccacagcagccagggcaccctggtgaacaacgtgagactgcccagaggccacagactggagctgagcgacggcgacctgctgaccttcggccccgagggcccccccggcaccagccccagcgagttctacttcatgttccagcaggtgagagtgaagccccaggacttcgccgccatcaccatccccagaagcagaggcgaggccagagtgggcgccggcttcagacccatgctgcccagccagggcgccccccagagacccctgagcaccttcagccccgcccccaaggccaccctgatcctgaacagcatcggcagcctgagcaagctgagaccccagcccctgaccttcagccccagctggggcggccccaagagcctgcccgtgcccgccccccccggcgaggtgggcaccacccccagcgcccccccccagagaaacagaagaaagagcgtgcacagagtgctggccgagctggacgacgagagcgagccccccgagaaccccccccccgtgctgatggagcccagaaagaagctgagagtggacaaggcccccctgacccccaccggcaacagaagaggcagacccagaaagtaccccgtgagcgcccccatggccccccccgccgtgggcggcggcgagccctgcgccgccccctgctgctgcctgccccaggaggagaccgtggcctgggtgcagtgcgacggctgcgacgtgtggttccacgtggcctgcgtgggctgcagcatccaggccgccagagaggccgacttcagatgccccggctgcagagccggcatccagacctag

SEQ ID NO: 102772 - DNA, 1038 bp, synthetic construct; identical to SEQ ID NO: 102771
  misc_feature 1..1038: note = Description of Artificial Sequence: Synthetic coding sequence
  source 1..1038: mol_type = other DNA

SEQ ID NO: 102773 - DNA, 1038 bp, synthetic construct; identical to SEQ ID NO: 102771
  misc_feature 1..1038: note = Description of Artificial Sequence: Synthetic coding sequence
  source 1..1038: mol_type = other DNA

SEQ ID NO: 102774 - DNA, 1038 bp, synthetic construct; identical to SEQ ID NO: 102771
  misc_feature 1..1038: note = Description of Artificial Sequence: Synthetic coding sequence
  source 1..1038: mol_type = other DNA

SEQ ID NO: 102775 - DNA, 1038 bp, synthetic construct; identical to SEQ ID NO: 102771
  misc_feature 1..1038: note = Description of Artificial Sequence: Synthetic coding sequence
  source 1..1038: mol_type = other DNA

SEQ ID NO: 102776 - DNA, 1038 bp, synthetic construct
  misc_feature 1..1038: note = Description of Artificial Sequence: Synthetic coding sequence
  source 1..1038: mol_type = other DNA
atgctgccctgcttccagctgctgagaatcggcggcggcagaggcggcgacctgtacaccttccacccccccgccggcgccggctgcacctacagactgggccacagagccgacctgtgcgacgtggccctgagaccccagcaggagcccggcctgatcagcggcatccacgccgagctgcacgccgagcccagaggcgacgactggagagtgagcctggaggaccacagcagccagggcaccctggtgaacaacgtgagactgcccagaggccacagactggagctgagcgacggcgacctgctgaccttcggccccgagggcagccccggcaccagccccagcgagttctacttcatgttccagcaggtgagagtgaagccccaggacttcgccgccatcaccatccccagaagcagaggcgaggccagagtgggcgccggcttcagacccatgctgcccagccagggcgccccccagagacccctgagcaccttcagccccgcccccaaggccaccctgatcctgaacagcatcggcagcctgagcaagctgagaccccagcccctgaccttcagccccagctggggcggccccaagagcctgcccgtgcccgccccccccggcgaggtgggcaccacccccagcgcccccccccagagaaacagaagaaagagcgtgcacagagtgctggccgagctggacgacgagagcgagccccccgagaaccccccccccgtgctgatggagcccagaaagaagctgagagtggacaaggcccccctgacccccaccggcaacagaagaggcagacccagaaagtaccccgtgagcgcccccatggccccccccgccgtgggcggcggcgagccctgcgccgccccctgctgctgcctgccccaggaggagaccgtggcctgggtgcagtgcgacggctgcgacgtgtggttccacgtggcctgcgtgggctgcagcatccaggccgccagagaggccgacttcagatgccccggctgcagagccggcatccagacctag

SEQ ID NO: 102777 - DNA, 1038 bp, synthetic construct; identical to SEQ ID NO: 102771
  misc_feature 1..1038: note = Description of Artificial Sequence: Synthetic coding sequence
  source 1..1038: mol_type = other DNA

SEQ ID NO: 102778 - DNA, 1038 bp, synthetic construct; identical to SEQ ID NO: 102771
  misc_feature 1..1038: note = Description of Artificial Sequence: Synthetic coding sequence
  source 1..1038: mol_type = other DNA

SEQ ID NO: 102779 - DNA, 1038 bp, synthetic construct; identical to SEQ ID NO: 102771
  misc_feature 1..1038: note = Description of Artificial Sequence: Synthetic coding sequence
  source 1..1038: mol_type = other DNA

SEQ ID NO: 102780 - DNA, 1038 bp, synthetic construct; identical to SEQ ID NO: 102771
  misc_feature 1..1038: note = Description of Artificial Sequence: Synthetic coding sequence
  source 1..1038: mol_type = other DNA

SEQ ID NO: 102781 - DNA, 1038 bp, synthetic construct; identical to SEQ ID NO: 102771
  misc_feature 1..1038: note = Description of Artificial Sequence: Synthetic coding sequence
  source 1..1038: mol_type = other DNA

SEQ ID NO: 102782 - DNA, 1038 bp, synthetic construct; identical to SEQ ID NO: 102776
  misc_feature 1..1038: note = Description of Artificial Sequence: Synthetic coding sequence
  source 1..1038: mol_type = other DNA

SEQ ID NO: 102783 - DNA, 654 bp, synthetic construct
  misc_feature 1..654: note = Description of Artificial Sequence: Synthetic coding sequence
  source 1..654: mol_type = other DNA
accctggtgaacaacgtgagactgcccagaggccacagactggagctgagcgacggcgacctgctgaccttcggccccgagggcccccccggcaccagccccagcgagttctacttcatgttccagcaggtgagagtgaagccccaggacttcgccgccatcaccatccccagaagcagaggcgaggccagagtgggcgccggcttcagacccatgctgcccagccagggcgccccccagagacccctgagcaccttcagccccgcccccaaggccaccctgatcctgaacagcatcggcagcctgagcaagctgagaccccagcccctgaccttcagccccagctggggcggccccaagagcctgcccgtgcccgccccccccggcgagatgggcaccacccccagcgcccccccccagagaaacagaagaaagagcgtgcacagagtgctggccgagctggacgacgagagcgagccccccgagaaccccccccccgtgctgatggagcccagaaagaagctgagagtggacaaggcccccctgacccccaccggcaactggcacatccagggcatgcagagcatcgtgaagggccagaaggagagaccctggcccagagagcacctgagcggctacgaggaggccagctag

SEQ ID NO: 102784 - DNA, 645 bp, synthetic construct
  misc_feature 1..645: note = Description of Artificial Sequence: Synthetic coding sequence
  source 1..645: mol_type = other DNA
atgagccagagaaaggccagaggcccccccgccatgcccggcgtgggccacagccagacccaggccaaggccagactgctgcccggcgccgacagaaagagaagcagactgagcagaaccagacaggacccctgggaggagagaagctggagcaaccagagatggagcagagccacccccggccccagaggcaccagagccggcggcctggccctgggcagaagcgaggccagccccgagaacgccgccagagagagaagcagagtgagaaccctgagacaggccttcctggccctgcaggccgccctgcccgccgtgccccccgacaccaagctgagcaagctggacgtgctggtgctggccgccagctacatcgcccacctgaccagaaccctgggccacgagctgcccggccccgcctggccccccttcctgagaggcctgagatacctgcaccccctgaagaagtggcccatgagaagcagactgtacgccggcggcctgggctacagcgacctggacagcaccaccgccagcacccccagccagagaaccagagacgccgaggtgggcagccaggtgcccggcgaggccgacgccctgctgagcaccacccccctgagccccgccctgggcgacaagtag

SEQ ID NO: 102785 - DNA, 2031 bp, synthetic construct
  misc_feature 1..2031: note = Description of Artificial Sequence: Synthetic coding sequence
  source 1..2031: mol_type = other DNA
atgagcagaagagccctgagaagactgagaggcgagcagagaggccaggagcccctgggccccggcgccctgcacttcgacctgagagacgacgacgacgccgaggaggagggccccaagagagagctgggcgtgagaagacccggcggcgccggcaaggagggcgtgagagtgaacaacagattcgagctgatcaacatcgacgacctggaggacgaccccgtggtgaacggcgagagaagcggctgcgccctgaccgacgccgtggcccccggcaacaagggcagaggccagagaggcaacaccgagagcaagaccgacggcgacgacaccgagaccgtgcccagcgagcagagccacgccagcggcaagctgagaaagaagaagaagaagcagaagaacaagaagagcagcaccggcgaggccagcgagaacggcctggaggacatcgacagaatcctggagagaatcgaggacagcaccggcctgaacagacccggccccgcccccctgagcagcagaaagcacgtgctgtacgtggagcacagacacctgaaccccgacaccgagctgaagagatacttcggcgccagagccatcctgggcgagcagagacccagacagagacagagagtgtaccccaagtgcacctggctgaccacccccaagagcacctggcccagatacagcaagcccggcctgagcatgagactgctggagagcaagaagggcctgagcttcttcgccttcgagcacagcgaggagtaccagcaggcccagcacaagttcctggtggccgtggagagcatggagcccaacaacatcgtggtgctgctgcagaccagcccctaccacgtggacagcctgctgcagctgagcgacgcctgcagattccaggaggaccaggagatggccagagacctggtggagagagccctgtacagcatggagtgcgccttccaccccctgttcagcctgaccagcggcgcctgcagactggactacagaagacccgagaacagaagcttctacctggccctgtacaagcagatgagcttcctggagaagagaggctgccccagaaccgccctggagtactgcaagctgatcctgagcctggagcccgacgaggaccccctgtgcatgctgctgctgatcgaccacctggccctgagagccagaaactacgagtacctgatcagactgttccaggagtgggaggcccacagaaacctgagccagctgcccaacttcgccttcagcgtgcccctggcctacttcctgctgagccagcagaccgacctgcccgagtgcgagcagagcagcgccagacagaaggccagcctgctgatccagcaggccctgaccatgttccccggcgtgctgctgcccctgctggagagctgcagcgtgagacccgacgccagcgtgagcagccacagattcttcggccccaacgccgagatcagccagccccccgccctgagccagctggtgaacctgtacctgggcagaagccacttcctgtggaaggagcccgccaccatgagctggctggaggagaacgtgcacgaggtgctgcaggccgtggacgccggcgaccccgccgtggaggcctgcgagaacagaagaaaggtgctgtaccagagagcccccagaaacatccacagacacgtgatcctgagcgagatcaaggaggccgtggccgccctgccccccgacgtgaccacccagagcgtgatgggcttcgaccccctgccccccagcgacaccatctacagctacgtgagacccgagagactgagccccatcagccacggcaacaccatcgccctgttcttcagaagcctgctgcccaactacaccatggagggcgagagacccgaggagggcgtggccggcggcctgaacagaaaccagggcctgaacagactgatgctggccgtgagagacatgatggccaacttccacctgaacgacctggaggccccccacgaggacgacgccgagggcgagggcgagtgggactag

SEQ ID NO: 102786 - DNA, 1422 bp, synthetic construct
  misc_feature 1..1422: note = Description of Artificial Sequence: Synthetic coding sequence
  source 1..1422: mol_type = other DNA
atgagactgctggagagcaagaagggcctgagcttcttcgccttcgagcacagcgaggagtaccagcaggcccagcacaagttcctggtggccgtggagagcatggagcccaacaacatcgtggtgctgctgcagaccagcccctaccacgtggacagcctgctgcagctgagcgacgcctgcagattccaggaggaccaggagatggccagagacctggtggagagagccctgtacagcatggagtgcgccttccaccccctgttcagcctgaccagcggcgcctgcagactggactacagaagacccgagaacagaagcttctacctggccctgtacaagcagatgagcttcctggagaagagaggctgccccagaaccgccctggagtactgcaagctgatcctgagcctggagcccgacgaggaccccctgtgcatgctgctgctgatcgaccacctggccctgagagccagaaactacgagtacctgatcagactgttccaggagtgggaggcccacagaaacctgagccagctgcccaacttcgccttcagcgtgcccctggcctacttcctgctgagccagcagaccgacctgcccgagtgcgagcagagcagcgccagacagaaggccagcctgctgatccagcaggccctgaccatgttccccggcgtgctgctgcccctgctggagagctgcagcgtgagacccgacgccagcgtgagcagccacagattcttcggccccaacgccgagatcagccagccccccgccctgagccagctggtgaacctgtacctgggcagaagccacttcctgtggaaggagcccgccaccatgagctggctggaggagaacgtgcacgaggtgctgcaggccgtggacgccggcgaccccgccgtggaggcctgcgagaacagaagaaaggtgctgtaccagagagcccccagaaacatccacagacacgtgatcctgagcgagatcaaggaggccgtggccgccctgccccccgacgtgaccacccagagcgtgatgggcttcgaccccctgccccccagcgacaccatctacagctacgtgagacccgagagaaagggcgaggaggagagaaacagcgtgatctggggcagccagctgtgcgtgtgcagacccagaagcttccccagcccccccaacgtgcaggccctggcctgcagacccctgtggcaggccaagagctaccagccctggaagcaccactgcagcctgctgcccgtgaccgtggccaagctgtaccacggcggcggcgaggccagaggcagaagcggctggggcagcgagccccagcccggccccgagcaggccgacgccggctgcgccagacacgacggccagctgcccccccagagacccggcggcgccgccagaggcagaagatag

SEQ ID NO: 102787 - DNA, 651 bp, synthetic construct
  misc_feature 1..651: note = Description of Artificial Sequence: Synthetic coding sequence
  source 1..651: mol_type = other DNA
atgagcagaagagccctgagaagactgagaggcgagcagagaggccaggagcccctgggccccggcgccctgcacttcgacctgagagacgacgacgacgccgaggaggagggccccaagagagagctgggcgtgagaagacccggcggcgccggcaaggagggcgtgagagtgaacaacagattcgagctgatcaacatcgacgacctggaggacgaccccgtggtgaacggcgagagaagcggctgcgccctgaccgacgccgtggcccccggcaacaagggcagaggccagagaggcaacaccgagagcaagaccgacggcgacgacaccgagaccgtgcccagcgagcagagccacgccagcggcaagctgagaaagaagaagaagaagcagaagaacaagaagagcagcaccggcgaggccagcgagaacggcctggaggacatcgacagaatcctggagagaatcgaggacagcaccggcctgaacagacccggccccgcccccctgagcagcagaaagcacgtgctgtacgtggagcacagacacctgaaccccgacaccgagctgaagagatacttcggcgccagagccatcctgggcgagcagagagacagagtgctgctgggctgccccgtgtggttctag

SEQ ID NO: 102788 - DNA, 624 bp, synthetic construct
  misc_feature 1..624: note = Description of Artificial Sequence: Synthetic coding sequence
  source 1..624: mol_type = other DNA
ctgaccgtgaacgccagcatgagcagattccccccccacatggtgcccccccaccacaccctgcacaccaccggcatcccccaccccgccatcgtgacccccaccgtgaagcaggagagcagccagagcgacgtgggcagcctgcacagcagcaagcaccaggacagcaagaaggaggaggagaagaagaagccccacatcaagaagcccctgaacgccttcatgctgtacatgaaggagatgagagccaaggtggtggccgagtgcaccctgaaggagagcgccgccatcaaccagatcctgggcagaagatggcacgccctgagcagagaggagcaggccaagtactacgagctggccagaaaggagagacagctgcacatgcagctgtaccccggctggagcgccagagacaactacggcaagaagaagaagagaaagagagacaagcagcccggcgagaccaacgacctgagcgcccccaagaagtgcagagccagattcggcctggaccagcagaacaactggtgcggcccctgcagaagaaagaagaagtgcgtgagatacatccagggcgagggcagctgcctgagcccccccagcagcgacggcagcctgctgtag

SEQ ID NO: 102789 - DNA, 669 bp, synthetic construct
  misc_feature 1..669: note = Description of Artificial Sequence: Synthetic coding sequence
  source 1..669: mol_type = other DNA
accaaccagaacagcagcagcgacagcgaggccgagagaagacccccccccagaagcgagagcttcagagacaagagcagagagagcctggaggaggccgccaagagacaggacggcggcctgttcaagggccccccctaccccggctaccccttcatcatgatccccgacctgaccagcccctacctgcccaacggcagcctgagccccaccgccagaaccctgcacttccagagcggcagcacccactacagcgcctacaagaccatcgagcaccagatcgccgtgcagtacctgcagatgaagtggcccctgctggacgtgcaggccggcagcctgcagagcagacaggccctgaaggacgccagaagccccagccccgcccacatcgtgagccccctgccctgctgcacccagggccacgactgccagcacttctacccccccagcgacttcaccgtgagcacccaggtgttcagagacatgaagagaagccacagcctgcagaaggtgggcgagccctggtgcatcgagagcaacaaggtgcccgtggtgcagcacccccaccacgtgcaccccctgacccccctgatcacctacagcaacgagcacttcacccccggcaacccccccccccacctgcccgccgacgtggaccccaagacctag

SEQ ID NO: 102790 - DNA, 867 bp, synthetic construct
  misc_feature 1..867: note = Description of Artificial Sequence: Synthetic coding sequence
  source 1..867: mol_type = other DNA
atgccccagctgaacggcggcggcggcgacgacctgggcgccaacgacgagctgatcagcttcaaggacgagggcgagcaggaggagaagagcagcgagaacagcagcgccgagagagacctggccgacgtgaagagcagcctggtgaacgagagcgagaccaaccagaacagcagcagcgacagcgaggccgagagaagacccccccccagaagcgagagcttcagagacaagagcagagagagcctggaggaggccgccaagagacaggacggcggcctgttcaagggccccccctaccccggctaccccttcatcatgatccccgacctgaccagcccctacctgcccaacggcagcctgagccccaccgccagaaccctgcacttccagagcggcagcacccactacagcgcctacaagaccatcgagcaccagatcgccgtgcagtacctgcagatgaagtggcccctgctggacgtgcaggccggcagcctgcagagcagacaggccctgaaggacgccagaagccccagccccgcccacatcgtgagcaacaaggtgcccgtggtgcagcacccccaccacgtgcaccccctgacccccctgatcacctacagcaacgagcacttcacccccggcaacccccccccccacctgcccgccgacgtggaccccaagaccggcatccccagacccccccacccccccgacatcagcccctactaccccctgagccccggcaccgtgggccagatcccccaccccctgggctggcagggccagcccgtgtaccccatcaccaccggcggcttcagacacccctaccccaccgccctgaccgtgaacgccagcatgagcagatag

SEQ ID NO: 102791 - DNA, 1380 bp, synthetic construct
  misc_feature 1..1380: note = Description of Artificial Sequence: Synthetic coding sequence
  source 1..1380: mol_type = other DNA
atgccccagctgaacggcggcggcggcgacgacctgggcgccaacgacgagctgatcagcttcaaggacgagggcgagcaggaggagaagagcagcgagaacagcagcgccgagagagacctggccgacgtgaagagcagcctggtgaacgagagcgagaccaaccagaacagcagcagcgacagcgaggccgagagaagacccccccccagaagcgagagcttcagagacaagagcagagagagcctggaggaggccgccaagagacaggacggcggcctgttcaagggccccccctaccccggctaccccttcatcatgatccccgacctgaccagcccctacctgcccaacggcagcctgagccccaccgccagaacctacctgcagatgaagtggcccctgctggacgtgcaggccggcagcctgcagagcagacaggccctgaaggacgccagaagccccagccccgcccacatcgtgagcaacaaggtgcccgtggtgcagcacccccaccacgtgcaccccctgacccccctgatcacctacagcaacgagcacttcacccccggcaacccccccccccacctgcccgccgacgtggaccccaagaccggcatccccagacccccccacccccccgacatcagcccctactaccccctgagccccggcaccgtgggccagatcccccaccccctgggctggctggtgccccagcagggccagcccgtgtaccccatcaccaccggcggcttcagacacccctaccccaccgccctgaccgtgaacgccagcatgagcagattccccccccacatggtgcccccccaccacaccctgcacaccaccggcatcccccaccccgccatcgtgacccccaccgtgaagcaggagagcagccagagcgacgtgggcagcctgcacagcagcaagcaccaggacagcaagaaggaggaggagaagaagaagccccacatcaagaagcccctgaacgccttcatgctgtacatgaaggagatgagagccaaggtggtggccgagtgcaccctgaaggagagcgccgccatcaaccagatcctgggcagaagatggcacgccctgagcagagaggagcaggccaagtactacgagctggccagaaaggagagacagctgcacatgcagctgtaccccggctggagcgccagagacaactacggcaagaagaagaagagaaagagagacaagcagcccggcgagaccaacgagcacagcgagtgcttcctgaacccctgcctgagcctgccccccatcaccgacctgagcgcccccaagaagtgcagagccagattcggcctggaccagcagaacaactggtgcggcccctgcagcctgtag

SEQ ID NO: 102792 - DNA, 1470 bp, synthetic construct
  misc_feature 1..1470: note = Description of Artificial Sequence: Synthetic coding sequence
  source 1..1470: mol_type = other DNA
atgccccagctgaacggcggcggcggcgacgacctgggcgccaacgacgagctgatcagcttcaaggacgagggcgagcaggaggagaagagcagcgagaacagcagcgccgagagagacctggccgacgtgaagagcagcctggtgaacgagagcgagaccaaccagaacagcagcagcgacagcgaggccgagagaagacccccccccagaagcgagagcttcagagacaagagcagagagagcctggaggaggccgccaagagacaggacggcggcctgttcaagggccccccctaccccggctaccccttcatcatgatccccgacctgaccagcccctacctgcccaacggcagcctgagccccaccgccagaacctacctgcagatgaagtggcccctgctggacgtgcaggccggcagcctgcagagcagacaggccctgaaggacgccagaagccccagccccgcccacatcgtgagccccctgccctgctgcacccagggccacgactgccagcacttctacccccccagcgacttcaccgtgagcacccaggtgttcagagacatgaagagaagccacagcctgcagaaggtgggcgagccctggtgcatcgagagcaacaaggtgcccgtggtgcagcacccccaccacgtgcaccccctgacccccctgatcacctacagcaacgagcacttcacccccggcaacccccccccccacctgcccgccgacgtggaccccaagaccggcatccccagacccccccacccccccgacatcagcccctactaccccctgagccccggcaccgtgggccagatcccccaccccctgggctggctggtgccccagcagggccagcccgtgtaccccatcaccaccggcggcttcagacacccctaccccaccgccctgaccgtgaacgccagcatgagcagattccccccccacatggtgcccccccaccacaccctgcacaccaccggcatcccccaccccgccatcgtgacccccaccgtgaagcaggagagcagccagagcgacgtgggcagcctgcacagcagcaagcaccaggacagcaagaaggaggaggagaagaagaagccccacatcaagaagcccctgaacgccttcatgctgtacatgaaggagatgagagccaaggtggtggccgagtgcaccctgaaggagagcgccgccatcaaccagatcctgggcagaagatggcacgccctgagcagagaggagcaggccaagtactacgagctggccagaaaggagagacagctgcacatgcagctgtaccccggctggagcgccagagacaactacggcaagaagaagaagagaaagagagacaagcagcccggcgagaccaacggcgagaagaagagcgccttcgccacctacaaggtgaaggccgccgccagcgcccaccccctgcagatggaggcctactag

SEQ ID NO: 102793 - DNA, 1860 bp, synthetic construct
  misc_feature 1..1860: note = Description of Artificial Sequence: Synthetic coding sequence
  source 1..1860: mol_type = other DNA
atgccccagctgaacggcggcggcggcgacgacctgggcgccaacgacgagctgatcagcttcaaggacgagggcgagcaggaggagaagagcagcgagaacagcagcgccgagagagacctggccgacgtgaagagcagcctggtgaacgagagcgagaccaaccagaacagcagcagcgacagcgaggccgagagaagacccccccccagaagcgagagcttcagagacaagagcagagagagcctggaggaggccgccaagagacaggacggcggcctgttcaagggccccccctaccccggctaccccttcatcatgatccccgacctgaccagcccctacctgcccaacggcagcctgagccccaccgccagaaccctgcacttccagagcggcagcacccactacagcgcctacaagaccatcgagcaccagatcgccgtgcagtacctgcagatgaagtggcccctgctggacgtgcaggccggcagcctgcagagcagacaggccctgaaggacgccagaagccccagccccgcccacatcgtgagcaacaaggtgcccgtggtgcagcacccccaccacgtgcaccccctgacccccctgatcacctacagcaacgagcacttcacccccggcaacccccccccccacctgcccgccgacgtggaccccaagaccggcatccccagacccccccacccccccgacatcagcccctactaccccctgagccccggcaccgtgggccagatcccccaccccctgggctggctggtgccccagcagggccagcccgtgtaccccatcaccaccggcggcttcagacacccctaccccaccgccctgaccgtgaacgccagcatgagcagattccccccccacatggtgcccccccaccacaccctgcacaccaccggcatcccccaccccgccatcgtgacccccaccgtgaagcaggagagcagccagagcgacgtgggcagcctgcacagcagcaagcaccaggacagcaagaaggaggaggagaagaagaagccccacatcaagaagcccctgaacgccttcatgctgtacatgaaggagatgagagccaaggtggtggccgagtgcaccctgaaggagagcgccgccatcaaccagatcctgggcagaagatggcacgccctgagcagagaggagcaggccaagtactacgagctggccagaaaggagagacagctgcacatgcagctgtaccccggctggagcgccagagacaactacggcaagaagaagaagagaaagagagacaagcagcccggcgagaccaacgagcacagcgagtgcttcctgaacccctgcctgagcctgccccccatcaccgacctgagcgcccccaagaagtgcagagccagattcggcctggaccagcagaacaactggtgcggcccctgcagaagaaagaagaagtgcgtgagatacatccagggcgagggcagctgcctgagcccccccagcagcgacggcagcctgctggacagccccccccccagccccaacctgctgggcagcccccccagagacgccaagagccagaccgagcagacccagcccctgagcctgagcctgaagcccgaccccctggcccacctgagcatgatgccccccccccccgccctgctgctggccgaggccacccacaaggccagcgccctgtgccccaacggcgccctggacctgccccccgccgccctgcagcccgccgcccccagcagcagcatcgcccagcccagcaccagcagcctgcacagccacagcagcctggccggcacccagccccagcccctgagcctggtgaccaagagcctggagtag

SEQ ID NO: 102794 - DNA, 363 bp, synthetic construct
  misc_feature 1..363: note = Description of Artificial Sequence: Synthetic coding sequence
  source 1..363: mol_type = other DNA
atgctgtacatgaaggagatgagagccaaggtggtggccgagtgcaccctgaaggagagcgccgccatcaaccagatcctgggcagaagatggcacgccctgagcagagaggagcaggccaagtactacgagctggccagaaaggagagacagctgcacatgcagctgtaccccggctggagcgccagagacaactacggcaagaagaagaagagaaagagagacaagcagcccggcgagaccaacgacctgagcgcccccaagaagtgcagagccagattcggcctggaccagcagaacaactggtgcggcccctgcagatgcaagtacagcaaggaggtgagcggcaccgtgagagcctag

SEQ ID NO: 102795 - DNA, 531 bp, synthetic construct
  misc_feature 1..531: note = Description of Artificial Sequence: Synthetic coding sequence
  source 1..531: mol_type = other DNA
atgagcagattccccccccacatggtgcccccccaccacaccctgcacaccaccggcatcccccaccccgccatcgtgacccccaccgtgaagcaggagagcagccagagcgacgtgggcagcctgcacagcagcaagcaccaggacagcaagaaggaggaggagaagaagaagccccacatcaagaagcccctgaacgccttcatgctgtacatgaaggagatgagagccaaggtggtggccgagtgcaccctgaaggagagcgccgccatcaaccagatcctgggcagaagatggcacgccctgagcagagaggagcaggccaagtactacgagctggccagaaaggagagacagctgcacatgcagctgtaccccggctggagcgccagagacaactacggcaagaagaagaagagaaagagagacaagcagcccggcgagaccaacggcgagaagaagagcgccttcgccacctacaaggtgaaggccgccgccagcgcccaccccctgcagatggaggcctactag

SEQ ID NO: 102796 - DNA, 954 bp, synthetic construct
  misc_feature 1..954: note = Description of Artificial Sequence: Synthetic coding sequence
  source 1..954: mol_type = other DNA
atgccccagctgaacggcggcggcggcgacgacctgggcgccaacgacgagctgatcagcttcaaggacgagggcgagcaggaggagaagagcagcgagaacagcagcgccgagagagacctggccgacgtgaagagcagcctggtgaacgagagcgagaccaaccagaacagcagcagcgacagcgaggccgagagaagacccccccccagaagcgagagcttcagagacaagagcagagagagcctggaggaggccgccaagagacaggacggcggcctgttcaagggccccccctaccccggctaccccttcatcatgatccccgacctgaccagcccctacctgcccaacggcagcctgagccccaccgccagaacctacctgcagatgaagtggcccctgctggacgtgcaggccggcagcctgcagagcagacaggccctgaaggacgccagaagccccagccccgcccacatcgtgcagagccccctgccctgctgcacccagggccacgactgccagcacttctacccccccagcgacttcaccgtgagcacccaggtgttcagagacatgaagagaagccacagcctgcagaaggtgggcgagccctggtgcatcgagagcaacaaggtgcccgtggtgcagcacccccaccacgtgcaccccctgacccccctgatcacctacagcaacgagcacttcacccccggcaacccccccccccacctgcccgccgacgtggaccccaagaccggcatccccagacccccccacccccccgacatcagcccctactaccccctgagccccggcaccgtgggccagatcccccaccccctgggctggctggtgccccagcagggccagcccgtgtaccccatcaccaccggcggcttcagacacccctaccccaccgccctgaccgtgaacgccagcatgagcagatag

SEQ ID NO: 102797 - DNA, 1791 bp, synthetic construct
  misc_feature 1..1791: note = Description of Artificial Sequence: Synthetic coding sequence
  source 1..1791: mol_type = other DNA
atgccccagctgaacggcggcggcggcgacgacctgggcgccaacgacgagctgatcagcttcaaggacgagggcgagcaggaggagaagagcagcgagaacagcagcgccgagagagacctggccgacgtgaagagcagcctggtgaacgagagcgagaccaaccagaacagcagcagcgacagcgaggccgagagaagacccccccccagaagcgagagcttcagagacaagagcagagagagcctggaggaggccgccaagagacaggacggcggcctgttcaagggccccccctaccccggctaccccttcatcatgatccccgacctgaccagcccctacctgcccaacggcagcctgagccccaccgccagaacctacctgcagatgaagtggcccctgctggacgtgcaggccggcagcctgcagagcagacaggccctgaaggacgccagaagccccagccccgcccacatcgtgagcaacaaggtgcccgtggtgcagcacccccaccacgtgcaccccctgacccccctgatcacctacagcaacgagcacttcacccccggcaacccccccccccacctgcccgccgacgtggaccccaagaccggcatccccagacccccccacccccccgacatcagcccctactaccccctgagccccggcaccgtgggccagatcccccaccccctgggctggctggtgccccagcagggccagcccgtgtaccccatcaccaccggcggcttcagacacccctaccccaccgccctgaccgtgaacgccagcatgagcagattccccccccacatggtgcccccccaccacaccctgcacaccaccggcatcccccaccccgccatcgtgacccccaccgtgaagcaggagagcagccagagcgacgtgggcagcctgcacagcagcaagcaccaggacagcaagaaggaggaggagaagaagaagccccacatcaagaagcccctgaacgccttcatgctgtacatgaaggagatgagagccaaggtggtggccgagtgcaccctgaaggagagcgccgccatcaaccagatcctgggcagaagatggcacgccctgagcagagaggagcaggccaagtactacgagctggccagaaaggagagacagctgcacatgcagctgtaccccggctggagcgccagagacaactacggcaagaagaagaagagaaagagagacaagcagcccggcgagaccaacgagcacagcgagtgcttcctgaacccctgcctgagcctgccccccatcaccgacctgagcgcccccaagaagtgcagagccagattcggcctggaccagcagaacaactggtgcggcccctgcagaagaaagaagaagtgcgtgagatacatccagggcgagggcagctgcctgagcccccccagcagcgacggcagcctgctggacagccccccccccagccccaacctgctgggcagcccccccagagacgccaagagccagaccgagcagacccagcccctgagcctgagcctgaagcccgaccccctggcccacctgagcatgatgccccccccccccgccctgctgctggccgaggccacccacaaggccagcgccctgtgccccaacggcgccctggacctgccccccgccgccctgcagcccgccgcccccagcagcagcatcgcccagcccagcaccagcagcctgcacagccacagcagcctggccggcacccagccccagcccctgagcctggtgaccaagagcctggagtag

SEQ ID NO: 102798 - DNA, 1485 bp, synthetic construct
  misc_feature 1..1485: note = Description of Artificial Sequence: Synthetic coding sequence
  source 1..1485: mol_type = other DNA
atgccccagctgaacggcggcggcggcgacgacctgggcgccaacgacgagctgatcagcttcaaggacgagggcgagcaggaggagaagagcagcgagaacagcagcgccgagagagacctggccgacgtgaagagcagcctggtgaacgagagcgagaccaaccagaacagcagcagcgacagcgaggccgagagaagacccccccccagaagcgagagcttcagagacaagagcagagagagcctggaggaggccgccaagagacaggacggcggcctgttcaagggccccccctaccccggctaccccttcatcatgatccccgacctgaccagcccctacctgcccaacggcagcctgagccccaccgccagaaccctgcacttccagagcggcagcacccactacagcgcctacaagaccatcgagcaccagatcgccgtgcagtacctgcagatgaagtggcccctgctggacgtgcaggccggcagcctgcagagcagacaggccctgaaggacgccagaagccccagccccgcccacatcgtgagcaacaaggtgcccgtggtgcagcacccccaccacgtgcaccccctgacccccctgatcacctacagcaacgagcacttcacccccggcaacccccccccccacctgcccgccgacgtggaccccaagaccggcatccccagacccccccacccccccgacatcagcccctactaccccctgagccccggcaccgtgggccagatcccccaccccctgggctggctggtgccccagcagggccagcccgtgtaccccatcaccaccggcggcttcagacacccctaccccaccgccctgaccgtgaacgccagcatgagcagattccccccccacatggtgcccccccaccacaccctgcacaccaccggcatcccccaccccgccatcgtgacccccaccgtgaagcaggagagcagccagagcgacgtgggcagcctgcacagcagcaagcaccaggacagcaagaaggaggaggagaagaagaagccccacatcaagaagcccctgaacgccttcatgctgtacatgaaggagatgagagccaaggtggtggccgagtgcaccctgaaggagagcgccgccatcaaccagatcctgggcagaagatggcacgccctgagcagagaggagcaggccaagtactacgagctggccagaaaggagagacagctgcacatgcagctgtaccccggctggagcgccagagacaactacggcaagaagaagaagagaaagagagacaagcagcccggcgagaccaacgagcacagcgagtgcttcctgaacccctgcctgagcctgccccccatcaccgacctgagcgcccccaagaagtgcagagccagattcggcctggaccagcagaacaactggtgcggcccctgcagatgcaagtacagcaaggaggtgagcggcaccgtgagagcctag

SEQ ID NO: 102799 - DNA, 1809 bp, synthetic construct
  misc_feature 1..1809: note = Description of Artificial Sequence: Synthetic coding sequence
  source 1..1809: mol_type = other DNA
atgccccagctgaacggcggcggcggcgacgacctgggcgccaacgacgagctgatcagcttcaaggacgagggcgagcaggaggagaagagcagcgagaacagcagcgccgagagagacctggccgacgtgaagagcagcctggtgaacgagagcgagaccaaccagaacagcagcagcgacagcgaggccgagagaagacccccccccagaagcgagagcttcagagacaagagcagagagagcctggaggaggccgccaagagacaggacggcggcctgttcaagggccccccctaccccggctaccccttcatcatgatccccgacctgaccagcccctacctgcccaacggcagcctgagccccaccgccagaaccctgcacttccagagcggcagcacccactacagcgcctacaagaccatcgagcaccagatcgccgtgcagtacctgcagatgaagtggcccctgctggacgtgcaggccggcagcctgcagagcagacaggccctgaaggacgccagaagccccagccccgcccacatcgtgagcaacaaggtgcccgtggtgcagcacccccaccacgtgcaccccctgacccccctgatcacctacagcaacgagcacttcacccccggcaacccccccccccacctgcccgccgacgtggaccccaagaccggcatccccagacccccccacccccccgacatcagcccctactaccccctgagccccggcaccgtgggccagatcccccaccccctgggctggctggtgccccagcagggccagcccgtgtaccccatcaccaccggcggcttcagacacccctaccccaccgccctgaccgtgaacgccagcatgagcagattccccccccacatggtgcccccccaccacaccctgcacaccaccggcatcccccaccccgccatcgtgacccccaccgtgaagcaggagagcagccagagcgacgtgggcagcctgcacagcagcaagcaccaggacagcaagaaggaggaggagaagaagaagccccacatcaagaagcccctgaacgccttcatgctgtacatgaaggagatgagagccaaggtggtggccgagtgcaccctgaaggagagcgccgccatcaaccagatcctgggcagaagatggcacgccctgagcagagaggagcaggccaagtactacgagctggccagaaaggagagacagctgcacatgcagctgtaccccggctggagcgccagagacaactacggcaagaagaagaagagaaagagagacaagcagcccggcgagaccaacgacctgagcgcccccaagaagtgcagagccagattcggcctggaccagcagaacaactggtgcggcccctgcagaagaaagaagaagtgcgtgagatacatccagggcgagggcagctgcctgagcccccccagcagcgacggcagcctgctggacagccccccccccagccccaacctgctgggcagcccccccagagacgccaagagccagaccgagcagacccagcccctgagcctgagcctgaagcccgaccccctggcccacctgagcatgatgccccccccccccgccctgctgctggccgaggccacccacaaggccagcgccctgtgccccaacggcgccctggacctgccccccgccgccctgcagcccgccgcccccagcagcagcatcgcccagcccagcaccagcagcctgcacagccacagcagcctggccggcacccagccccagcccctgagcctggtgaccaagagcctggagtag

SEQ ID NO: 102800 - DNA, 1449 bp, synthetic construct
  misc_feature 1..1449: note = Description of Artificial Sequence: Synthetic coding sequence
  source 1..1449: mol_type = other DNA
atgccccagctgaacggcggcggcggcgacgacctgggcgccaacgacgagctgatcagcttcaaggacgagggcgagcaggaggagaagagcagcgagaacagcagcgccgagagagacctggccgacgtgaagagcagcctggtgaacgagagcgagaccaaccagaacagcagcagcgacagcgaggccgagagaagacccccccccagaagcgagagcttcagagacaagagcagagagagcctggaggaggccgccaagagacaggacggcggcctgttcaagggccccccctaccccggctaccccttcatcatgatccccgacctgaccagcccctacctgcccaacggcagcctgagccccaccgccagaaccctgcacttccagagcggcagcacccactacagcgcctacaagaccatcgagcaccagatcgccgtgcagtacctgcagatgaagtggcccctgctggacgtgcaggccggcagcctgcagagcagacaggccctgaaggacgccagaagccccagccccgcccacatcgtgagcaacaaggtgcccgtggtgcagcacccccaccacgtgcaccccctgacccccctgatcacctacagcaacgagcacttcacccccggcaacccccccccccacctgcccgccgacgtggaccccaagaccggcatccccagacccccccacccccccgacatcagcccctactaccccctgagccccggcaccgtgggccagatcccccaccccctgggctggctggtgccccagcagggccagcccgtgtaccccatcaccaccggcggcttcagacacccctaccccaccgccctgaccgtgaacgccagcatgagcagattccccccccacatggtgcccccccaccacaccctgcacaccaccggcatcccccaccccgccatcgtgacccccaccgtgaagcaggagagcagccagagcgacgtgggcagcctgcacagcagcaagcaccaggacagcaagaaggaggaggagaagaagaagccccacatcaagaagcccctgaacgccttcatgctgtacatgaaggagatgagagccaaggtggtggccgagtgcaccctgaaggagagcgccgccatcaaccagatcctgggcagaagatggcacgccctgagcagagaggagcaggccaagtactacgagctggccagaaaggagagacagctgcacatgcagctgtaccccggctggagcgccagagacaactacggcaagaagaagaagagaaagagagacaagcagcccggcgagaccaacgagcacagcgagtgcttcctgaacccctgcctgagcctgccccccatcaccggcgagaagaagagcgccttcgccacctacaaggtgaaggccgccgccagcgcccaccccctgcagatggaggcctactag

SEQ ID NO: 102801 - DNA, 1008 bp, synthetic construct
  misc_feature 1..1008: note = Description of Artificial Sequence: Synthetic coding sequence
  source 1..1008: mol_type = other DNA
atgagcagcttcctgagcagcagattccccccccacatggtgcccccccaccacaccctgcacaccaccggcatcccccaccccgccatcgtgacccccaccgtgaagcaggagagcagccagagcgacgtgggcagcctgcacagcagcaagcaccaggacagcaagaaggaggaggagaagaagaagccccacatcaagaagcccctgaacgccttcatgctgtacatgaaggagatgagagccaaggtggtggccgagtgcaccctgaaggagagcgccgccatcaaccagatcctgggcagaagatggcacgccctgagcagagaggagcaggccaagtactacgagctggccagaaaggagagacagctgcacatgcagctgtaccccggctggagcgccagagacaactacggcaagaagaagaagagaaagagagacaagcagcccggcgagaccaacgagcacagcgagtgcttcctgaacccctgcctgagcctgccccccatcaccgacctgagcgcccccaagaagtgcagagccagattcggcctggaccagcagaacaactggtgcggcccctgcagaagaaagaagaagtgcgtgagatacatccagggcgagggcagctgcctgagcccccccagcagcgacggcagcctgctggacagccccccccccagccccaacctgctgggcagcccccccagagacgccaagagccagaccgagcagacccagcccctgagcctgagcctgaagcccgaccccctggcccacctgagcatgatgccccccccccccgccctgctgctggccgaggccacccacaaggccagcgccctgtgccccaacggcgccctggacctgccccccgccgccctgcagcccgccgcccccagcagcagcatcgcccagcccagcaccagcagcctgcacagccacagcagcctggccggcacccagccccagcccctgagcctggtgaccaagagcctggagtag

SEQ ID NO: 102802 - DNA, 1809 bp, synthetic construct
  misc_feature 1..1809: note = Description of Artificial Sequence: Synthetic coding sequence
  source 1..1809: mol_type = other DNA
atgccccagctgaacggcggcggcggcgacgacctgggcgccaacgacgagctgatcagcttcaaggacgagggcgagcaggaggagaagagcagcgagaacagcagcgccgagagagacctggccgacgtgaagagcagcctggtgaacgagagcgagaccaaccagaacagcagcagcgacagcgaggccgagagaagacccccccccagaagcgagagcttcagagacaagagcagagagagcctggaggaggccgccaagagacaggacggcggcctgttcaagggccccccctaccccggctaccccttcatcatgatccccgacctgaccagcccctacctgcccaacggcagcctgagccccaccgccagaaccctgcacttccagagcggcagcacccactacagcgcctacaagaccatcgagcaccagatcgccgtgcagtacctgcagatgaagtggcccctgctggacgtgcaggccggcagcctgcagagcagacaggccctgaaggacgccagaagccccagccccgcccacatcgtgagcaacaaggtgcccgtggtgcagcacccccaccacgtgcaccccctgacccccctgatcacctacagcaacgagcacttcacccccggcaacccccccccccacctgcccgccgacgtggaccccaagaccggcatccccagacccccccacccccccgacatcagcccctactaccccctgagccccggcaccgtgggccagatcccccaccccctgggctggctggtgccccagcagggccagcccgtgtaccccatcaccaccggcggcttcagacacccctaccccaccgccctgaccgtgaacgccagcatgagcagattccccccccacatggtgcccccccaccacaccctgcacaccaccggcatcccccaccccgccatcgtgacccccaccgtgaagcaggagagcagccagagcgacgtgggcagcctgcacagcagcaagcaccaggacagcaagaaggaggaggagaagaagaagccccacatcaagaagcccctgaacgccttcatgctgtacatgaaggagatgagagccaaggtggtggccgagtgcaccctgaaggagagcgccgccatcaaccagatcctgggcagaagatggcacgccctgagcagagaggagcaggccaagtactacgagctggccagaaaggagagacagctgcacatgcagctgtaccccggctggagcgccagagacaactacggcaagaagaagaagagaaagagagacaagcagcccggcgagaccaacgacgccaacacccccaagaagtgcagagccctgttcggcctggacagacagaccctgtggtgcaagccctgcagaagaaagaagaagtgcgtgagatacatccagggcgagggcagctgcctgagcccccccagcagcgacggcagcctgctggacagccccccccccagccccaacctgctgggcagcccccccagagacgccaagagccagaccgagcagacccagcccctgagcctgagcctgaagcccgaccccctggcccacctgagcatgatgccccccccccccgccctgctgctggccgaggccacccacaaggccagcgccctgtgccccaacggcgccctggacctgccccccgccgccctgcagcccgccgcccccagcagcagcatcgcccagcccagcaccagcagcctgcacagccacagcagcctggccggcacccagccccagcccctgagcctggtgaccaagagcctggagtag

SEQ ID NO: 102803 - DNA, 1860 bp, synthetic construct
  misc_feature 1..1860: note = Description of Artificial Sequence: Synthetic coding sequence
  source 1..1860: mol_type = other DNA
atgccccagctgaacggcggcggcggcgacgacctgggcgccaacgacgagctgatcagcttcaaggacgagggcgagcaggaggagaagagcagcgagaacagcagcgccgagagagacctggccgacgtgaagagcagcctggtgaacgagagcgagaccaaccagaacagcagcagcgacagcgaggccgagagaagacccccccccagaagcgagagcttcagagacaagagcagagagagcctggaggaggccgccaagagacaggacggcggcctgttcaagggccccccctaccccggctaccccttcatcatgatccccgacctgaccagcccctacctgcccaacggcagcctgagccccaccgccagaaccctgcacttccagagcggcagcacccactacagcgcctacaagaccatcgagcaccagatcgccgtgcagtacctgcagatgaagtggcccctgctggacgtgcaggccggcagcctgcagagcagacaggccctgaaggacgccagaagccccagccccgcccacatcgtgagcaacaaggtgcccgtggtgcagcacccccaccacgtgcaccccctgacccccctgatcacctacagcaacgagcacttcacccccggcaacccccccccccacctgcccgccgacgtggaccccaagaccggcatccccagacccccccacccccccgacatcagcccctactaccccctgagccccggcaccgtgggccagatcccccaccccctgggctggctggtgccccagcagggccagcccgtgtaccccatcaccaccggcggcttcagacacccctaccccaccgccctgaccgtgaacgccagcatgagcagattccccccccacatggtgcccccccaccacaccctgcacaccaccggcatcccccaccccgccatcgtgacccccaccgtgaagcaggagagcagccagagcgacgtgggcagcctgcacagcagcaagcaccaggacagcaagaaggaggaggagaagaagaagccccacatcaagaagcccctgaacgccttcatgctgtacatgaaggagatgagagccaaggtggtggccgagtgcaccctgaaggagagcgccgccatcaaccagatcctgggcagaagatggcacgccctgagcagagaggagcaggccaagtactacgagctggccagaaaggagagacagctgcacatgcagctgtaccccggctggagcgccagagacaactacggcaagaagaagaagagaaagagagacaagcagcccggcgagaccaacgagcacagcgagtgcttcctgaacccctgcctgagcctgccccccatcaccgacgccaacacccccaagaagtgcagagccctgttcggcctggacagacagaccctgtggtgcaagccctgcagaagaaagaagaagtgcgtgagatacatccagggcgagggcagctgcctgagcccccccagcagcgacggcagcctgctggacagccccccccccagccccaacctgctgggcagcccccccagagacgccaagagccagaccgagcagacccagcccctgagcctgagcctgaagcccgaccccctggcccacctgagcatgatgccccccccccccgccctgctgctggccgaggccacccacaaggccagcgccctgtgccccaacggcgccctggacctgccccccgccgccctgcagcccgccgcccccagcagcagcatcgcccagcccagcaccagcagcctgcacagccacagcagcctggccggcacccagccccagcccctgagcctggtgaccaagagcctggagtag

SEQ ID NO: 102804 - DNA, 645 bp, synthetic construct
  misc_feature 1..645: note = Description of Artificial Sequence: Synthetic coding sequence
  source 1..645: mol_type = other DNA
atggccttcctgagaagcatgtggggcgtgctgagcgccctgggcagaagcggcgccgagctgtgcaccggctgcggcagcagactgagaagccccttcagcttcgtgtacctgcccagatggttcagcagcgtgctggccagctgccccaagaagcccgtgagcagctacctgagattcagcaaggagcagctgcccatcttcaaggcccagaaccccgacgccaagaccaccgagctgatcagaagaatcgcccagagatggagagagctgcccgacagcaagaagaagatctaccaggacgcctacagagccgagtggcaggtgtacaaggaggagatcagcagattcaaggagcagctgacccccagccagatcatgagcctggagaaggagatcatggacaagcacctgaagagaaaggccatgaccaagaagaaggagaagctgaagaccgtgaaggagaactggaagaacctgagcgacagcgagaaggagctgtacatccagcacgccaaggaggacgagaccagataccacaacgagatgaagagctgggaggagcagatgatcgaggtgggcagaaaggacctgctgagaagaaccatcaagaagcagagaaagtacggcgccgaggagtgctag

SEQ ID NO: 102805 - DNA, 660 bp, synthetic construct
  misc_feature 1..660: note = Description of Artificial Sequence: Synthetic coding sequence
  source 1..660: mol_type = other DNA
tgagagctgtgcaccggctgcggcagcagactgagaagccccttcagcttcgtgtacctgcccagatggttcagcagcgtgctggccagctgccccaagaagcccgtgagcagctacctgagattcagcaaggagcagctgcccatcttcaaggcccagaaccccgacgccaagaccaccgagctgatcagaagaatcgcccagagatggagagagctgcccgacagcaagaagaagatctaccaggacgcctacagagccgagtggcaggtgtacaaggaggagatcagcagattcaaggagcagctgacccccagccagatcatgagcctggagaaggagatcatggacaagcacctgaagagaaaggccatgaccaagaagaaggagctgaccctgctgggcaagcccaagagacccagaagcgcctacaacgtgtacgtggccgagagattccaggaggccaagggcgacagcccccaggagaagctgaagaccgtgaaggagaactggaagaacctgagcgacagcgagaaggaggtgagcatcaccgtggtgagcctgaagtgcctgctgagaatcagcgtgagagagtgcatcagagccagactggacagctgcgaggacaacctggtgctgctgatcatccaggtgttctag

SEQ ID NO: 102806 - DNA, 741 bp, synthetic construct
  misc_feature 1..741: note = Description of Artificial Sequence: Synthetic coding sequence
  source 1..741: mol_type = other DNA
atggccttcctgagaagcatgtggggcgtgctgagcgccctgggcagaagcggcgccgagctgtgcaccggctgcggcagcagactgagaagccccttcagcttcgtgtacctgcccagatggttcagcagcgtgctggccagctgccccaagaagcccgtgagcagctacctgagattcagcaaggagcagctgcccatcttcaaggcccagaaccccgacgccaagaccaccgagctgatcagaagaatcgcccagagatggagagagctgcccgacagcaagaagaagatctaccaggacgcctacagagccgagtggcaggtgtacaaggaggagatcagcagattcaaggagcagctgacccccagccagatcatgagcctggagaaggagatcatggacaagcacctgaagagaaaggccatgaccaagaagaaggagctgaccctgctgggcaagcccaagagacccagaagcgcctacaacgtgtacgtggccgagagattccaggaggccaagggcgacagcccccaggagaagctgaagaccgtgaaggagaactggaagaacctgagcgacagcgagaaggagctgtacatccagcacgccaaggaggacgagaccagataccacaacgagatgaagagctgggaggagcagatgatcgaggtgggcagaaaggacctgctgagaagaaccatcaagaagcagagaaagtacggcgccgaggagtgctag

SEQ ID NO: 102807 - DNA, 1302 bp, synthetic construct
  misc_feature 1..1302: note = Description of Artificial Sequence: Synthetic coding sequence
  source 1..1302: mol_type = other DNA
atgagcatcctggccaagatgggcgactggcaggacagacacgacggcaccagcaacggcaccgccagactgccccagctgggcaccgtgggccagagcccctacaccagcgccccccccctgagccacacccccaacgccgacttccagcccccctacttcccccccccctaccagcccatctacccccagagccaggacccctacagccacgtgaacgacccctacagcctgaaccccctgcacgcccagccccagccccagcaccccggctggcccggccagagacagagccaggagagcggcctgctgcacacccacagaggcctgccccaccagctgagcggcctggaccccagaagagactacagaagacacgaggacctgctgcacggcccccacgccctgagcagcggcctgggcgacctgagcatccacagcctgccccacgccatcgaggaggtgccccacgtggaggaccccggcatcaacatccccgaccagaccgtgatcaagaagggccccgtgagcctgagcaagagcaacagcaacgccgtgagcgccatccccatcaacaaggacaacctgttcggcggcgtggtgaaccccaacgaggtgttctgcagcgtgcccggcagactgagcctgctgagcagcaccagcaagtacaaggtgaccgtggccgaggtgcagagaagactgagcccccccgagtgcctgaacgccagcctgctgggcggcgtgctgagaagagccaagagcaagaacggcggcagaagcctgagagagaagctggacaagatcggcctgaacctgcccgccggcagaagaaaggccgccaacgtgaccctgctgaccagcctggtggagggcgaggccgtgcacctggccagagacttcggctacgtgtgcgagaccgagttccccgccaaggccgtggccgagttcctgaacagacagcacagcgaccccaacgagcaggtgaccagaaagaacatgctgctggccaccaagcagatctgcaaggagttcaccgacctgctggcccaggacagaagccccctgggcaacagcagacccaaccccatcctggagcccggcatccagagctgcctgacccacttcaacctgatcagccacggcttcggcagccccgccgtgtgcgccgccgtgaccgccctgcagaactacctgaccgaggccctgaaggccatggacaagatgtacctgagcaacaaccccaacagccacaccgacaacaacgccaagagcagcgacaaggaggagaagcacagaaagtag

SEQ ID NO: 102808 - DNA, 1314 bp, synthetic construct
  misc_feature 1..1314: note = Description of Artificial Sequence: Synthetic coding sequence
  source 1..1314: mol_type = other DNA
atgctgtggaagctgaccgacaacatcaagtacgaggactgcgaggacagacacgacggcaccagcaacggcaccgccagactgccccagctgggcaccgtgggccagagcccctacaccagcgccccccccctgagccacacccccaacgccgacttccagcccccctacttcccccccccctaccagcccatctacccccagagccaggacccctacagccacgtgaacgacccctacagcctgaaccccctgcacgcccagccccagccccagcaccccggctggcccggccagagacagagccaggagagcggcctgctgcacacccacagaggcctgccccaccagctgagcggcctggaccccagaagagactacagaagacacgaggacctgctgcacggcccccacgccctgagcagcggcctgggcgacctgagcatccacagcctgccccacgccatcgaggaggtgccccacgtggaggaccccggcatcaacatccccgaccagaccgtgatcaagaagggccccgtgagcctgagcaagagcaacagcaacgccgtgagcgccatccccatcaacaaggacaacctgttcggcggcgtggtgaaccccaacgaggtgttctgcagcgtgcccggcagactgagcctgctgagcagcaccagcaagtacaaggtgaccgtggccgaggtgcagagaagactgagcccccccgagtgcctgaacgccagcctgctgggcggcgtgctgagaagagccaagagcaagaacggcggcagaagcctgagagagaagctggacaagatcggcctgaacctgcccgccggcagaagaaaggccgccaacgtgaccctgctgaccagcctggtggagggcgaggccgtgcacctggccagagacttcggctacgtgtgcgagaccgagttccccgccaaggccgtggccgagttcctgaacagacagcacagcgaccccaacgagcaggtgaccagaaagaacatgctgctggccaccaagcagatctgcaaggagttcaccgacctgctggcccaggacagaagccccctgggcaacagcagacccaaccccatcctggagcccggcatccagagctgcctgacccacttcaacctgatcagccacggcttcggcagccccgccgtgtgcgccgccgtgaccgccctgcagaactacctgaccgaggccctgaaggccatggacaagatgtacctgagcaacaaccccaacagccacaccgacaacaacgccaagagcagcgacaaggaggagaagcacagaaagtag

SEQ ID NO: 102809 - DNA, 1296 bp, synthetic construct
  misc_feature 1..1296: note = Description of Artificial Sequence: Synthetic coding sequence
  source 1..1296: mol_type = other DNA
atgctggtgcacagcttcagcgccatggacagacacgacggcaccagcaacggcaccgccagactgccccagctgggcaccgtgggccagagcccctacaccagcgccccccccctgagccacacccccaacgccgacttccagcccccctacttcccccccccctaccagcccatctacccccagagccaggacccctacagccacgtgaacgacccctacagcctgaaccccctgcacgcccagccccagccccagcaccccggctggcccggccagagacagagccaggagagcggcctgctgcacacccacagaggcctgccccaccagctgagcggcctggaccccagaagagactacagaagacacgaggacctgctgcacggcccccacgccctgagcagcggcctgggcgacctgagcatccacagcctgccccacgccatcgaggaggtgccccacgtggaggaccccggcatcaacatccccgaccagaccgtgatcaagaagggccccgtgagcctgagcaagagcaacagcaacgccgtgagcgccatccccatcaacaaggacaacctgttcggcggcgtggtgaaccccaacgaggtgttctgcagcgtgcccggcagactgagcctgctgagcagcaccagcaagtacaaggtgaccgtggccgaggtgcagagaagactgagcccccccgagtgcctgaacgccagcctgctgggcggcgtgctgagaagagccaagagcaagaacggcggcagaagcctgagagagaagctggacaagatcggcctgaacctgcccgccggcagaagaaaggccgccaacgtgaccctgctgaccagcctggtggagggcgaggccgtgcacctggccagagacttcggctacgtgtgcgagaccgagttccccgccaaggccgtggccgagttcctgaacagacagcacagcgaccccaacgagcaggtgaccagaaagaacatgctgctggccaccaagcagatctgcaaggagttcaccgacctgctggcccaggacagaagccccctgggcaacagcagacccaaccccatcctggagcccggcatccagagctgcctgacccacttcaacctgatcagccacggcttcggcagccccgccgtgtgcgccgccgtgaccgccctgcagaactacctgaccgaggccctgaaggccatggacaagatgtacctgagcaacaaccccaacagccacaccgacaacaacgccaagagcagcgacaaggaggagaagcacagaaagtag

SEQ ID NO: 102810 - DNA, 1320 bp, synthetic construct
  misc_feature 1..1320: note = Description of Artificial Sequence: Synthetic coding sequence
  source 1..1320: mol_type = other DNA
atgaagatgctgtggaagctgaccgacaacatcaagtacgaggactgcgaggacagacacgacggcaccagcaacggcaccgccagactgccccagctgggcaccgtgggccagagcccctacaccagcgccccccccctgagccacacccccaacgccgacttccagcccccctacttcccccccccctaccagcccatctacccccagagccaggacccctacagccacgtgaacgacccctacagcctgaaccccctgcacgcccagccccagccccagcaccccggctggcccggccagagacagagccaggagagcggcctgctgcacacccacagaggcctgccccaccagctgagcggcctggaccccagaagagactacagaagacacgaggacctgctgcacggcccccacgccctgagcagcggcctgggcgacctgagcatccacagcctgccccacgccatcgaggaggtgccccacgtggaggaccccggcatcaacatccccgaccagaccgtgatcaagaagggccccgtgagcctgagcaagagcaacagcaacgccgtgagcgccatccccatcaacaaggacaacctgttcggcggcgtggtgaaccccaacgaggtgttctgcagcgtgcccggcagactgagcctgctgagcagcaccagcaagtacaaggtgaccgtggccgaggtgcagagaagactgagcccccccgagtgcctgaacgccagcctgctgggcggcgtgctgagaagagccaagagcaagaacggcggcagaagcctgagagagaagctggacaagatcggcctgaacctgcccgccggcagaagaaaggccgccaacgtgaccctgctgaccagcctggtggagggcgaggccgtgcacctggccagagacttcggctacgtgtgcgagaccgagttccccgccaaggccgtggccgagttcctgaacagacagcacagcgaccccaacgagcaggtgaccagaaagaacatgctgctggccaccaagcagatctgcaaggagttcaccgacctgctggcccaggacagaagccccctgggcaacagcagacccaaccccatcctggagcccggcatccagagctgcctgacccacttcaacctgatcagccacggcttcggcagccccgccgtgtgcgccgccgtgaccgccctgcagaactacctgaccgaggccctgaaggccatggacaagatgtacctgagcaacaaccccaacagccacaccgacaacaacgccaagagcagcgacaaggaggagaagcacagaaagtag

SEQ ID NO: 102811 - DNA, 987 bp, synthetic construct
  misc_feature 1..987: note = Description of Artificial Sequence: Synthetic coding sequence
  source 1..987: mol_type = other DNA
atgctgtggaagctgaccgacaacatcaagtacgaggactgcgaggacagacacgacggcaccagcaacggcaccgccagactgccccagctgggcaccgtgggccagagcccctacaccagcgccccccccctgagccacacccccaacgccgacttccagcccccctacttcccccccccctaccagcccatctacccccagagccaggacccctacagccacgtgaacgacccctacagcctgaaccccctgcacgcccagccccagccccagcaccccggctggcccggccagagacagagccaggagagcggcctgctgcacacccacagaggcctgccccaccagctgagcggcctggaccccagaagagactacagaagacacgaggacctgctgcacggcccccacgccctgagcagcggcctgggcgacctgagcatccacagcctgccccacgccatcgaggaggtgccccacgtggaggaccccggcatcaacatccccgaccagaccgtgatcaagaagggccccgtgagcctgagcaagagcaacagcaacgccgtgagcgccatccccatcaacaaggacaacctgttcggcggcgtggtgaaccccaacgaggtgttctgcagcgtgcccggcagactgagcctgctgagcagcaccagcaagtacaaggtgaccgtggccgaggtgcagagaagactgagcccccccgagtgcctgaacgccagcctgctgggcggcgtgctgagaagagccaagagcaagaacggcggcagaagcctgagagagaagctggacaagatcggcctgaacctgcccgccggcagaagaaaggccgccaacgtgaccctgctgaccagcctggtggaggacagatacgccaagagcagccccacctgctggctgagaaccgacctgccctggggcacccacggccccacccccagctggagccccgccagcagagccgcctag

SEQ ID NO: 102812 - DNA, 1314 bp, synthetic construct; identical to SEQ ID NO: 102808
  misc_feature 1..1314: note = Description of Artificial Sequence: Synthetic coding sequence
  source 1..1314: mol_type = other DNA

SEQ ID NO: 102813 - DNA, 1410 bp, synthetic construct
  misc_feature 1..1410: note = Description of Artificial Sequence: Synthetic coding sequence
  source 1..1410: mol_type = other DNA
atgcacagcccccccagagaccaggccgccatcatgctgtggaagctggtggagaacgtgaagtacgaggacatctacgagatgctggtgcacacctacagcagcatggacagacacgacggcgtgcccagccacagcagcagactgagccagctgggcagcgtgagccagggcccctacagcagcgccccccccctgagccacacccccagcagcgacttccagcccccctacttcccccccccctaccagcccctgccctaccaccagagccaggacccctacagccacgtgaacgacccctacagcctgaaccccctgcaccagccccagcagcacccctggggccagagacagagacaggaggtgggcagcgaggccggcagcctgctgccccagcccagagccgccctgccccagctgagcggcctggaccccagaagagactaccacagcgtgagaagacccgacgtgctgctgcacagcgcccaccacggcctggacgccggcatgggcgacagcctgagcctgcacggcctgggccaccccggcatggaggacgtgcagagcgtggaggacgccaacaacagcggcatgaacctgctggaccagagcgtgatcaagaaggtgcccgtgccccccaagagcgtgaccagcctgatgatgaacaaggacggcttcctgggcggcatgagcgtgaacaccggcgaggtgttctgcagcgtgcccggcagactgagcctgctgagcagcaccagcaagtacaaggtgaccgtgggcgaggtgcagagaagactgagcccccccgagtgcctgaacgccagcctgctgggcggcgtgctgagaagagccaagagcaagaacggcggcagaagcctgagagagagactggagaagatcggcctgaacctgcccgccggcagaagaaaggccgccaacgtgaccctgctgaccagcctggtggagggcgaggccgtgcacctggccagagacttcggctacatctgcgagaccgagttccccgccaaggccgtgagcgagtacctgaacagacagcacaccgaccccagcgacctgcacagcagaaagaacatgctgctggccaccaagcagctgtgcaaggagttcaccgacctgctggcccaggacagaacccccatcggcaacagcagacccagccccatcctggagcccggcatccagagctgcctgacccacttcagcctgatcacccacggcttcggcgcccccgccatctgcgccgccctgaccgccctgcagaactacctgaccgaggccctgaagggcatggacaagatgttcctgaacaacaccaccaccaacagacacaccagcggcgagggccccggcagcaagaccggcgacaaggaggagaagcacagaaagtag

SEQ ID NO: 102814 - DNA, 597 bp, synthetic construct
  misc_feature 1..597: note = Description of Artificial Sequence: Synthetic coding sequence
  source 1..597: mol_type = other DNA
atgctgtggaagctggtggagaacgtgaagtacgaggacatctacgagatgctggtgcacacctacagcagcatggacagacacgacggcgtgcccagccacagcagcagactgagccagctgggcagcgtgagccagggcccctacagcagcgccccccccctgagccacacccccagcagcgacttccagcccccctacttcccccccccctaccagcccctgccctaccaccagagccaggacccctacagccacgtgaacgacccctacagcctgaaccccctgcaccagccccagcagcacccctggggccagagacagagacaggaggtgggcagcgaggccggcagcctgctgccccagcccagagccgccctgccccagctgagcggcctggaccccagaagagactaccacagcgtgagaagacccgacgtgctgctgcacagcgcccaccacggcctggacgccggcatgggcgacagcctgagcctgcacggcctgggccaccccggcatggaggacgtgcagagcgtggaggacgccaacaacagcggcatgaacctgctggaccagagcgtgatcaagaagtag

SEQ ID NO: 102815 - DNA, 1383 bp, synthetic construct
  misc_feature 1..1383: note = Description of Artificial Sequence: Synthetic coding sequence
  source 1..1383: mol_type = other DNA
atgcacagcccccccagagaccaggccgccatcatgctgtggaagctggtggagaacgtgaagtacgaggacatctacgaggacagacacgacggcgtgcccagccacagcagcagactgagccagctgggcagcgtgagccagggcccctacagcagcgccccccccctgagccacacccccagcagcgacttccagcccccctacttcccccccccctaccagcccctgccctaccaccagagccaggacccctacagccacgtgaacgacccctacagcctgaaccccctgcaccagccccagcagcacccctggggccagagacagagacaggaggtgggcagcgaggccggcagcctgctgccccagcccagagccgccctgccccagctgagcggcctggaccccagaagagactaccacagcgtgagaagacccgacgtgctgctgcacagcgcccaccacggcctggacgccggcatgggcgacagcctgagcctgcacggcctgggccaccccggcatggaggacgtgcagagcgtggaggacgccaacaacagcggcatgaacctgctggaccagagcgtgatcaagaaggtgcccgtgccccccaagagcgtgaccagcctgatgatgaacaaggacggcttcctgggcggcatgagcgtgaacaccggcgaggtgttctgcagcgtgcccggcagactgagcctgctgagcagcaccagcaagtacaaggtgaccgtgggcgaggtgcagagaagactgagcccccccgagtgcctgaacgccagcctgctgggcggcgtgctgagaagagccaagagcaagaacggcggcagaagcctgagagagagactggagaagatcggcctgaacctgcccgccggcagaagaaaggccgccaacgtgaccctgctgaccagcctggtggagggcgaggccgtgcacctggccagagacttcggctacatctgcgagaccgagttccccgccaaggccgtgagcgagtacctgaacagacagcacaccgaccccagcgacctgcacagcagaaagaacatgctgctggccaccaagcagctgtgcaaggagttcaccgacctgctggcccaggacagaacccccatcggcaacagcagacccagccccatcctggagcccggcatccagagctgcctgacccacttcagcctgatcacccacggcttcggcgcccccgccatctgcgccgccctgaccgccctgcagaactacctgaccgaggccctgaagggcatggacaagatgttcctgaacaacaccaccaccaacagacacaccagcggcgagggccccggcagcaagaccggcgacaaggaggagaagcacagaaagtag

SEQ ID NO: 102816 - DNA, 1359 bp, synthetic construct
  misc_feature 1..1359: note = Description of Artificial Sequence: Synthetic coding sequence
  source 1..1359: mol_type = other DNA
atgagcaccaccttccccggcctggtgcacgacgccgagatcagacacgacggcagcaacagctacagactgatgcagctgggctgcctggagagcgtggccaacagcaccgtggcctacagcagcagcagccccctgacctacagcaccaccggcaccgagttcgccagcccctacttcagcaccaaccaccagtacacccccctgcaccaccagagcttccactacgagttccagcacagccaccccgccgtgacccccgacgcctacagcctgaacagcctgcaccacagccagcagtactaccagcagatccaccacggcgagcccaccgacttcatcaacctgcacaacgccagagccctgaagagcagctgcctggacgagcagagaagagagctgggctgcctggacgcctacagaagacacgacctgagcctgatgagccacggcagccagtacggcatgcaccccgaccagagactgctgcccggccccagcctgggcctggccgccgccggcgccgacgacctgcagggcagcgtggaggcccagtgcggcctggtgctgaacggccagggcggcgtgatcagaagaggcggcacctgcgtggtgaaccccaccgacctgttctgcagcgtgcccggcagactgagcctgctgagcagcaccagcaagtacaaggtgaccatcgccgaggtgaagagaagactgagcccccccgagtgcctgaacgccagcctgctgggcggcatcctgagaagagccaagagcaagaacggcggcagatgcctgagagagaagctggacagactgggcctgaacctgcccgccggcagaagaaaggccgccaacgtgaccctgctgaccagcctggtggagggcgaggccctgcacctggccagagacttcggctacacctgcgagaccgagttccccgccaaggccgtgggcgagcacctggccagacagcacatggagcagaaggagcagaccgccagaaagaagatgatcctggccaccaagcagatctgcaaggagttccaggacctgctgagccaggacagaagccccctgggcagcagcagacccacccccatcctggacctggacatccagagacacctgacccacttcagcctgatcacccacggcttcggcacccccgccatctgcgccgccctgagcaccttccagaccgtgctgagcgagatgctgaactacctggagaagcacaccacccacaagaacggcggcgccgccgacagcggccagggccacgccaacagcgagaaggcccccctgagaaagaccagcgaggccgccgtgaaggagggcaagaccgagaagaccgactag

SEQ ID NO: 102817 - DNA, 1329 bp, synthetic construct
  misc_feature 1..1329: note = Description of Artificial Sequence: Synthetic coding sequence
  source 1..1329: mol_type = other DNA
atgctggtgcacacctacagcgccatggagagacccgacggcctgggcgccgccgccggcggcgccagactgagcagcctgccccaggccgcctacggccccgccccccccctgtgccacacccccgccgccaccgccgccgccgagttccagcccccctacttcccccccccctacccccagccccccctgccctacggccaggcccccgacgccgccgccgccttcccccacctggccggcgacccctacggcggcctggcccccctggcccagccccagcccccccaggccgcctgggccgcccccagagccgccgccagagcccacgaggagccccccggcctgctggccccccccgccagagccctgggcctggaccccagaagagactacgccaccgccgtgcccagactgctgcacggcctggccgacggcgcccacggcctggccgacgcccccctgggcctgcccggcctggccgccgcccccggcctggaggacctgcaggccatggacgagcccggcatgagcctgctggaccagagcgtgatcaagaaggtgcccatccccagcaaggccagcagcctgagcgccctgagcctggccaaggacagcctggtgggcggcatcaccaaccccggcgaggtgttctgcagcgtgcccggcagactgagcctgctgagcagcaccagcaagtacaaggtgaccgtgggcgaggtgcagagaagactgagcccccccgagtgcctgaacgccagcctgctgggcggcgtgctgagaagagccaagagcaagaacggcggcagatgcctgagagagagactggagaagatcggcctgaacctgcccgccggcagaagaaaggccgccaacgtgaccctgctgaccagcctggtggagggcgaggccgtgcacctggccagagacttcggctacgtgtgcgagaccgagttccccgccaaggccgccgccgagtacctgtgcagacagcacgccgaccccggcgagctgcacagcagaaagagcatgctgctggccgccaagcagatctgcaaggagttcgccgacctgatggcccaggacagaagccccctgggcaacagcagacccgccctgatcctggagcccggcgtgcagagctgcctgacccacttcagcctgatcacccacggcttcggcggccccgccatctgcgccgccctgaccgccttccagaactacctgctggagagcctgaagggcctggacaagatgttcctgagcagcgtgggcagcggccacggcgagaccaaggccagcgagaaggacgccaagcacagaaagtag

SEQ ID NO: 102818 - DNA, 1353 bp, synthetic construct
  misc_feature 1..1353: note = Description of Artificial Sequence: Synthetic coding sequence
  source 1..1353: mol_type = other DNA
atgctgtggaagatcaccgacaacgtgaagtacgaggaggactgcgaggacagacacgacggcagcagcaacggcaaccccagagtgccccacctgagcagcgccggccagcacctgtacagccccgccccccccctgagccacaccggcgtggccgagtaccagccccccccctacttcccccccccctaccagcagctggcctacagccagagcgccgacccctacagccacctgggcgaggcctacgccgccgccatcaaccccctgcaccagcccgcccccaccggcagccagcagcaggcctggcccggcagacagagccaggagggcgccggcctgcccagccaccacggcagacccgccggcctgctgccccacctgagcggcctggaggccggcgccgtgagcgccagaagagacgcctacagaagaagcgacctgctgctgccccacgcccacgccctggacgccgccggcctggccgagaacctgggcctgcacgacatgccccaccagatggacgaggtgcagaacgtggacgaccagcacctgctgctgcacgaccagaccgtgatcagaaagggccccatcagcatgaccaagaaccccctgaacctgccctgccagaaggagctggtgggcgccgtgatgaaccccaccgaggtgttctgcagcgtgcccggcagactgagcctgctgagcagcaccagcaagtacaaggtgaccgtggccgaggtgcagagaagactgagcccccccgagtgcctgaacgccagcctgctgggcggcgtgctgagaagagccaagagcaagaacggcggcagaagcctgagagagaagctggacaagatcggcctgaacctgcccgccggcagaagaaaggccgcccacgtgaccctgctgaccagcctggtggagggcgaggccgtgcacctggccagagacttcgcctacgtgtgcgaggccgagttccccagcaagcccgtggccgagtacctgaccagaccccacctgggcggcagaaacgagatggccgccagaaagaacatgctgctggccgcccagcagctgtgcaaggagttcaccgagctgctgagccaggacagaaccccccacggcaccagcagactggcccccgtgctggagaccaacatccagaactgcctgagccacttcagcctgatcacccacggcttcggcagccaggccatctgcgccgccgtgagcgccctgcagaactacatcaaggaggccctgatcgtgatcgacaagagctacatgaaccccggcgaccagagccccgccgacagcaacaagaccctggagaagatggagaagcacagaaagtag

SEQ ID NO: 102819 - DNA, 357 bp, synthetic construct
  misc_feature 1..357: note = Description of Artificial Sequence: Synthetic coding sequence
  source 1..357: mol_type = other DNA
atgttcctgcaggacagacacgacggcagcagcaacggcaaccccagagtgccccacctgagcagcgccggccagcacctgtacagccccgccccccccctgagccacaccggcgtggccgagtaccagccccccccctacttcccccccccctaccagcagctggcctacagccagagcgccgacccctacagccacctgggcgaggcctacgccgccgccatcaaccccctgcaccagcccgcccccaccggcagccagcagcaggcctggcccggcagacagagccaggagggcgccggcctgcccagccaccacggcagacccgccggcctgctgccccacctgagcggctag

SEQ ID NO: 102820 - DNA, 846 bp, synthetic construct
  misc_feature 1..846: note = Description of Artificial Sequence: Synthetic coding sequence
  source 1..846: mol_type = other DNA
atgccccaccagatggacgaggtgcagaacgtggacgaccagcacctgctgctgcacgaccagaccgtgatcagaaagggccccatcagcatgaccaagaaccccctgaacctgccctgccagaaggagctggtgggcgccgtgatgaaccccaccgaggtgttctgcagcgtgcccggcagactgagcctgctgagcagcaccagcaagtacaaggtgaccgtggccgaggtgcagagaagactgagcccccccgagtgcctgaacgccagcctgctgggcggcgtgctgagaagagccaagagcaagaacggcggcagaagcctgagagagaagctggacaagatcggcctgaacctgcccgccggcagaagaaaggccgcccacgtgaccctgctgaccagcctggtggagggcgaggccgtgcacctggccagagacttcgcctacgtgtgcgaggccgagttccccagcaagcccgtggccgagtacctgaccagaccccacctgggcggcagaaacgagatggccgccagaaagaacatgctgctggccgcccagcagctgtgcaaggagttcaccgagctgctgagccaggacagaaccccccacggcaccagcagactggcccccgtgctggagaccaacatccagaactgcctgagccacttcagcctgatcacccacggcttcggcagccaggccatctgcgccgccgtgagcgccctgcagaactacatcaaggaggccctgatcgtgatcgacaagagctacatgaaccccggcgaccagagccccgccgacagcaacaagaccctggagaagatggagaagcacagaaagtag

SEQ ID NO: 102821 - DNA, 1041 bp, synthetic construct
  misc_feature 1..1041: note = Description of Artificial Sequence: Synthetic coding sequence
  source 1..1041: mol_type = other DNA
atggccgccagcggcaagctgagcacctgcagactgccccccctgcccaccatcagagagatcatcaagctgctgagactgcaggccgccaagcagctgagccagaacttcctgctggacctgagactgaccgacaagatcgtgagaaaggccggcaacctgaccaacgcctacgtgtacgaggtgggccccggccccggcggcatcaccagaagcatcctgaacgccgacgtggccgagctgctggtggtggagaaggacaccagattcatccccggcctgcagatgctgagcgacgccgcccccggcaagctgagaatcgtgcacggcgacgtgctgaccttcaaggtggagaaggccttcagcgagagcctgaagagaccctgggaggacgacccccccaacgtgcacatcatcggcaacctgcccttcagcgtgagcacccccctgatcatcaagtggctggagaacatcagctgcagagacggccccttcgtgtacggcagaacccagatgaccctgaccttccagaaggaggtggccgagagactggccgccaacaccggcagcaagcagagaagcagactgagcgtgatggcccagtacctgtgcaacgtgagacacatcttcaccatccccggccaggccttcgtgcccaagcccgaggtggacgtgggcgtggtgcacttcacccccctgatccagcccaagatcgagcagcccttcaagctggtggagaaggtggtgcagaacgtgttccagttcagaagaaagtactgccacagaggcctgagaatgctgttccccgaggcccagagactggagagcaccggcagactgctggagctggccgacatcgaccccaccctgagacccagacagctgagcatcagccacttcaagagcctgtgcgacgtgtacagaaagatgtgcgacgaggacccccagctgttcgcctacaacttcagagaggagctgaagagaagaaagagcaagaacgaggagaaggaggaggacgacgccgagaactacagactgtag

SEQ ID NO: 102822 - DNA, 1728 bp, synthetic construct
  misc_feature 1..1728: note = Description of Artificial Sequence: Synthetic coding sequence
  source 1..1728: mol_type = other DNA
atgagccacgccgccgagcccgccagagacggcgtggaggccagcgccgagggccccagagccgtgttcgtgctgctggaggagagaagacccgccgacagcgcccagctgctgagcctgaacagcctgctgcccgagagcggcatcgtggccgacatcgagctggagaacgtgctggaccccgacagcttctacgagctgaagagccagcccctgcccctgagaagcagcctgcccatcagcctgcaggccacccccgccacccccgccaccctgagcgccagcagcagcgccggcggcagcagaacccccgccatgagcagcagcagcagcagcagagtgctgctgagacagcagctgatgagagcccaggcccaggagcaggagagaagagagagaagagagcaggccgccgccgcccccttccccagccccgcccccgccagccccgccatcagcgtggtgggcgtgagcgccggcggccacaccctgagcagacccccccccgcccaggtgcccagagaggtgctgaaggtgcagacccacctggagaaccccaccagataccacctgcagcaggccagaagacagcaggtgaagcagtacctgagcaccaccctgggccccaagctggccagccaggccctgacccccccccccggccccgccagcgcccagcccctgcccgcccccgaggccgcccacaccaccggccccaccggcagcgcccccaacagccccatggccctgctgaccatcggcagcagcagcgagaaggagatcgacgacgtgatcgacgagatcatcagcctggagagcagctacaacgacgagatgctgagctacctgcccggcggcaccaccggcctgcagctgcccagcaccctgcccgtgagcggcaacctgctggacgtgtacagcagccagggcgtggccacccccgccatcaccgtgagcaacagctgccccgccgagctgcccaacatcaagagagagatcagcgagaccgaggccaaggccctgctgaaggagagacagaagaaggacaaccacaacctgatcgagagaagaagaagattcaacatcaacgacagaatcaaggagctgggcaccctgatccccaagagcagcgaccccgagatgagatggaacaagggcaccatcctgaaggccagcgtggactacatcagaaagctgcagaaggagcagcagagaagcaaggacctggagagcagacagagaagcctggagcaggccaacagaagcctgcagctgagaatccaggagctggagctgcaggcccagatccacggcctgcccgtgccccccacccccggcctgctgagcctggccaccaccagcgccagcgacagcctgaagcccgagcagctggacatcgaggaggagggcagacccggcgccgccaccttccacgtgggcggcggccccgcccagaacgccccccaccagcagccccccgccccccccagcgacgccctgctggacctgcacttccccagcgaccacctgggcgacctgggcgaccccttccacctgggcctggaggacatcctgatggaggaggaggagggcgtggtgggcggcctgagcggcggcgccctgagccccctgagagccgccagcgaccccctgctgagcagcgtgagccccgccgtgagcaaggccagcagcagaagaagcagcttcagcatggaggaggagagctag

SEQ ID NO: 102823 - DNA, 1509 bp, synthetic construct
  misc_feature 1..1509: note = Description of Artificial Sequence: Synthetic coding sequence
  source 1..1509: mol_type = other DNA
atggcctgggccctgaagctgcccctggccgacgaggtgatcgagagcggcctggtgcaggacttcgacgccagcctgagcggcatcggccaggagctgggcgccggcgcctacagcatgagcgacgtgctggccctgcccatcttcaagcaggaggagagcagcctgccccccgacaacgagaacaagatcctgcccttccagtacgtgctgtgcgccgccaccagccccgccgtgaagctgcacgacgagaccctgacctacctgaaccagggccagagctacgagatcagaatgctggacaacagaaagctgggcgagctgcccgagatcaacggcaagctggtgaagagcatcttcagagtggtgttccacgacagaagactgcagtacaccgagcaccagcagctggagggctggagatggaacagacccggcgacagaatcctggacatcgacatccccatgagcgtgggcatcatcgaccccagagccaaccccacccagctgaacaccgtggagttcctgtgggaccccgccaagagaaccagcgtgttcatccaggtgcactgcatcagcaccgagttcaccatgagaaagcacggcggcgagaagggcgtgcccttcagagtgcagatcgacaccttcaaggagaacgagaacggcgagtacaccgagcacctgcacagcgccagctgccagatcaaggtgttcaagcccaagggcgccgacagaaagcagaagaccgacagagagaagatggagaagagaaccccccacgagaaggagaagtaccagcccagctacgagaccaccatcctgaccgagtgcagcccctggcccgagatcacctacgtgaacaacagccccagccccggcttcaacagcagccacagcagcttcagcctgggcgagggcaacggcagccccaaccaccagcccgagccccccccccccgtgaccgacaacctgctgcccaccaccaccccccaggaggcccagcagtggctgcacagaaacagattcagcaccttcaccagactgttcaccaacttcagcggcgccgacctgctgaagctgaccagagacgacgtgatccagatctgcggccccgccgacggcatcagactgttcaacgccctgaagggcagaatggtgagacccagactgaccatctacgtgtgccaggagagcctgcagctgagagagcagcagcagcagcagcagcagcagcagcagaagcacgaggacggcgacagcaacggcaccttcttcgtgtaccacgccatctacctggaggagctgaccgccgtggagctgaccgagaagatcgcccagctgttcagcatcagcccctgccagatcagccagatctacaagcagggccccaccggcatccacgtgctgatcagcgacgagatgatccagaacttccaggaggaggcctgcttcatcctggacaccatgaaggccgagaccaacgacagctaccacatcatcctgaagtag

SEQ ID NO: 102824 - DNA, 1356 bp, synthetic construct
  misc_feature 1..1356: note = Description of Artificial Sequence: Synthetic coding sequence
  source 1..1356: mol_type = other DNA
atggcctgggccctgaagctgcccctggccgacgaggtgatcgagagcggcctggtgcaggacttcgacgccagcctgagcggcatcggccaggagctgggcgccggcgcctacagcatgagcgacgtgctggccctgcccatcttcaagcaggaggagagcagcctgccccccgacaacgagaacaagatcctgcccttccagtacgtgctgtgcgccgccaccagccccgccgtgaagctgcacgacgagaccctgacctacctgaaccagggccagagctacgagatcagaatgctggacaacagaaagctgggcgagctgcccgagatcaacggcaagctggtgaagagcatcttcagagtggtgttccacgacagaagactgcagtacaccgagcaccagcagctggagggctggagatggaacagacccggcgacagaatcctggacatcgacatccccatgagcgtgggcatcatcgaccccagagccaaccccacccagctgaacaccgtggagttcctgtgggaccccgccaagagaaccagcgtgttcatccagcccaagggcgccgacagaaagcagaagaccgacagagagaagatggagaagagaaccccccacgagaaggagaagtaccagcccagctacgagaccaccatcctgaccgagtgcagcccctggcccgagatcacctacgtgaacaacagccccagccccggcttcaacagcagccacagcagcttcagcctgggcgagggcaacggcagccccaaccaccagcccgagccccccccccccgtgaccgacaacctgctgcccaccaccaccccccaggaggcccagcagtggctgcacagaaacagattcagcaccttcaccagactgttcaccaacttcagcggcgccgacctgctgaagctgaccagagacgacgtgatccagatctgcggccccgccgacggcatcagactgttcaacgccctgaagggcagaatggtgagacccagactgaccatctacgtgtgccaggagagcctgcagctgagagagcagcagcagcagcagcagcagcagcagcagaagcacgaggacggcgacagcaacggcaccttcttcgtgtaccacgccatctacctggaggagctgaccgccgtggagctgaccgagaagatcgcccagctgttcagcatcagcccctgccagatcagccagatctacaagcagggccccaccggcatccacgtgctgatcagcgacgagatgatccagaacttccaggaggaggcctgcttcatcctggacaccatgaaggccgagaccaacgacagctaccacatcatcctgaagtag

SEQ ID NO: 102825 - DNA, 1353 bp, synthetic construct
  misc_feature 1..1353: note = Description of Artificial Sequence: Synthetic coding sequence
  source 1..1353: mol_type = other DNA
atggcctgggccctgaagctgcccctggccgacgaggtgatcgagagcggcctggtgcaggacttcgacgccagcctgagcggcatcggccaggagctgggcgccggcgcctacagcatgagcgacgtgctggccctgcccatcttcaagcaggaggagagcagcctgccccccgacaacgagaacaagatcctgcccttccagtacgtgctgtgcgccgccaccagccccgccgtgaagctgcacgacgagaccctgacctacctgaaccagggccagagctacgagatcagaatgctggacaacagaaagctgggcgagctgcccgagatcaacggcaagctggtgaagagcatcttcagagtggtgttccacgacagaagactgcagtacaccgagcaccagcagctggagggctggagatggaacagacccggcgacagaatcctggacatcgacatccccatgagcgtgggcatcatcgaccccagagccaaccccacccagctgaacaccgtggagttcctgtgggaccccgccaagagaaccagcgtgttcatccagcccaagggcgccgacagaaagcagaagaccgacagagagaagatggagaagagaaccccccacgagaaggagaagtaccagcccagctacgagaccaccatcctgaccgagtgcagcccctggcccgagatcacctacgtgaacaacagccccagccccggcttcaacagcagccacagcagcttcagcctgggcgagggcaacggcagccccaaccaccagcccgagccccccccccccgtgaccgacaacctgctgcccaccaccaccccccaggaggcccagcagtggctgcacagaaacagattcagcaccttcaccagactgttcaccaacttcagcggcgccgacctgctgaagctgaccagagacgacgtgatccagatctgcggccccgccgacggcatcagactgttcaacgccctgaagggcagaatggtgagacccagactgaccatctacgtgtgccaggagagcctgcagctgagagagcagcagcagcagcagcagcagcagcagcagaagcacgaggacggcgacagcaacggcaccttcttcgtgtaccacgccatctacctggaggagctgaccgccgtggagctgaccgagaagatcgcccagctgttcagcatcagcccctgccagatcagccagatctacaagcagggccccaccggcatccacgtgctgatcagcgacgagatgatccagaacttccaggaggaggcctgcttcatcctggacaccatgaaggagaccaacgacagctaccacatcatcctgaagtag

SEQ ID NO: 102826 - DNA, 1440 bp, synthetic construct
  misc_feature 1..1440: note = Description of Artificial Sequence: Synthetic coding sequence
  source 1..1440: mol_type = other DNA
atgctgttctggcacacccagcccgagcactacaaccagcacaacagcggcagctacctgagagacgtgctggccctgcccatcttcaagcaggaggagccccagctgagccccgagaacgaggccagactgccccccctgcagtacgtgctgtgcgccgccaccagccccgccgtgaagctgcacgaggagaccctgacctacctgaaccagggccagagctacgagatcagactgctggagaacagaaagctgggcgacttccaggacctgaacaccaagtacgtgaagagcatcatcagagtggtgttccacgacagaagactgcagtacaccgagcaccagcagctggagggctggagatggagcagacccggcgacagaatcctggacatcgacatccccctgagcgtgggcatcctggaccccagagccagccccacccagctgaacgccgtggagttcctgtgggaccccgccaagagagccagcgccttcatccaggtgcactgcatcagcaccgagttcacccccagaaagcacggcggcgagaagggcgtgcccttcagagtgcagatcgacaccttcaagcagaacgagaacggcgagtacaccgagcacctgcacagcgccagctgccagatcaaggtgttcaagcccaagggcgccgacagaaagcagaagaccgacagagagaagatggagaagagaaccgcccaggagaaggagaagtaccagcccagctacgagaccaccatcctgaccgagtgcagcccctggcccgacgtggcctaccaggtgaacagcgcccccagccccagctacaacggcagccccaacagcttcggcctgggcgagggcaacgccagccccacccaccccgtggaggccctgcccgtgggcagcgaccacctgctgcccagcgccagcatccaggacgcccagcagtggctgcacagaaacagattcagccagttctgcagactgttcgccagcttcagcggcgccgacctgctgaagatgagcagagacgacctggtgcagatctgcggccccgccgacggcatcagactgttcaacgccatcaagggcagaaacgtgagacccaagatgaccatctacgtgtgccaggagctggagcagaacagagtgcccctgcagcagaagagagacggcagcggcgacagcaacctgagcgtgtaccacgccatcttcctggaggagctgaccaccctggagctgatcgagaagatcgccaacctgtacagcatcagcccccagcacatccacagagtgtacagacagggccccaccggcatccacgtggtggtgagcaacgagatggtgcagaacttccaggacgagagctgcttcgtgctgagcaccatcaaggccgagagcaacgacggctaccacatcatcctgaagtgcggcctgtag

SEQ ID NO: 102827 - DNA, 99 bp, synthetic construct
  misc_feature 1..99: note = Description of Artificial Sequence: Synthetic coding sequence
  source 1..99: mol_type = other DNA
atggtgcagaacttccaggacgagagctgcttcgtgctgagcaccatcaaggccgagagcaacgacggctaccacatcatcctgaagtgcggcctgtag

SEQ ID NO: 102828 - DNA, 1218 bp, synthetic construct
  misc_feature 1..1218: note = Description of Artificial Sequence: Synthetic coding sequence
  source 1..1218: mol_type = other DNA
atggccaagtacgtgagcctgaccgaggccaacgaggagctgaaggtgctgatggacgagaaccagaccagcagacccgtggccgtgcacaccagcaccgtgaaccccctgggcaagcagctgctgcccaagaccttcggccagagcagcgtgaacatcgaccagcaggtggtgatcggcatgccccagagacccgccgccagcaacatccccgtggtgggcagccccaacccccccagcacccacttcgccagccagaaccagcacagctacagcagccccccctgggccggccagcacaacagaaagggcgagaagaacggcatgggcctgtgcagactgagcatgaaggtgtgggagaccgtgcagagaaagggcaccaccagctgccaggaggtggtgggcgagctggtggccaagttcagagccgccagcaaccacgccagccccaacgagagcgcctacgacgtgaagaacatcaagagaagaacctacgacgccctgaacgtgctgatggccatgaacatcatcagcagagagaagaagaagatcaagtggatcggcctgaccaccaacagcgcccagaactgccagaacctgagagtggagagacagaagagactggagagaatcaagcagaagcagagcgagctgcagcagctgatcctgcagcagatcgccttcaagaacctggtgctgagaaaccagtacgtggaggagcaggtgagccagagacccctgcccaacagcgtgatccacgtgcccttcatcatcatcagcagcagcaagaagaccgtgatcaactgcagcatcagcgacgacaagagcgagtacctgttcaagttcaacagcagcttcgagatccacgacgacaccgaggtgctgatgtggatgggcatgaccttcggcctggagagcggcagctgcagcgccgaggacctgaagatggccagaaacctggtgcccaaggccctggagccctacgtgaccgagatggcccagggcaccttcggcggcgtgttcaccaccgccggcagcagaagcaacggcacctggctgagcgccagcgacctgaccaacatcgccatcggcatgctggccaccagcagcggcggcagccagtacagcggcagcagagtggagacccccgccgtggaggaggaggaggaggaggacaacaacgacgacgacctgagcgagaacgacgaggacgactag

SEQ ID NO: 102829 - DNA, 2649 bp, synthetic construct
  misc_feature 1..2649: note = Description of Artificial Sequence: Synthetic coding sequence
  source 1..2649: mol_type = other DNA
atggagggcgagagcagcagattcgagatccacacccccgtgagcgacaagaagaagaagaagtgcagcatccacaaggagagaccccagaagcacagccacgagatcttcagagacagcagcctggtgaacgagcagagccagatcaccagaagaaagaagagaaagaaggacttccagcacctgatcagcagccccctgaagaagagcagaatctgcgacgagaccgccaacgccaccagcaccctgaagaagagaaagaagagaagatacagcgccctggaggtggacgaggaggccggcgtgaccgtggtgctggtggacaaggagaacatcaacaacacccccaagcacttcagaaaggacgtggacgtggtgtgcgtggacatgagcatcgagcagaagctgcccagaaagcccaagaccgacaagttccaggtgctggccaagagccacgcccacaagagcgaggccctgcacagcaaggtgagagagaagaagaacaagaagcaccagagaaaggccgccagctgggagagccagagagccagagacaccctgccccagagcgagagccaccaggaggagagctggctgagcgtgggccccggcggcgagatcaccgagctgcccgccagcgcccacaagaacaagagcaagaagaagaagaagaagagcagcaacagagagtacgagaccctggccatgcccgagggcagccaggccggcagagaggccggcaccgacatgcaggagagccagcccaccgtgggcctggacgacgagaccccccagctgctgggccccacccacaagaagaagagcaagaagaagaagaagaagaagagcaaccaccaggagttcgaggccctggccatgcccgagggcagccaggtgggcagcgaggtgggcgccgacatgcaggagagcagacccgccgtgggcctgcacggcgagaccgccggcatccccgcccccgcctacaagaacaagagcaagaagaagaagaagaagagcaaccaccaggagttcgaggccgtggccatgcccgagagcctggagagcgcctaccccgagggcagccaggtgggcagcgaggtgggcaccgtggagggcagcaccgccctgaagggcttcaaggagagcaacagcaccaagaagaagagcaagaagagaaagctgaccagcgtgaagagagccagagtgagcggcgacgacttcagcgtgcccagcaagaacagcgagagcaccctgttcgacagcgtggagggcgacggcgccatgatggaggagggcgtgaagagcagacccagacagaagaagacccaggcctgcctggccagcaagcacgtgcaggaggcccccagactggagcccgccaacgaggagcacaacgtggagaccgccgaggacagcgagatcagatacctgagcgccgacagcggcgacgccgacgacagcgacgccgacctgggcagcgccgtgaagcagctgcaggagttcatccccaacatcaaggacagagccaccagcaccatcaagagaatgtacagagacgacctggagagattcaaggagttcaaggcccagggcgtggccatcaagttcggcaagttcagcgtgaaggagaacaagcagctggagaagaacgtggaggacttcctggccctgaccggcatcgagagcgccgacaagctgctgtacaccgacagataccccgaggagaagagcgtgatcaccaacctgaagagaagatacagcttcagactgcacatcggcagaaacatcgccagaccctggaagctgatctactacagagccaagaagatgttcgacgtgaacaactacaagggcagatacagcgagggcgacaccgagaagctgaagatgtaccacagcctgctgggcaacgactggaagaccatcggcgagatggtggccagaagcagcctgagcgtggccctgaagttcagccagatcagcagccagagaaacagaggcgcctggagcaagagcgagaccagaaagctgatcaaggccgtggaggaggtgatcctgaagaagatgagcccccaggagctgaaggaggtggacagcaagctgcaggagaaccccgagagctgcctgagcatcgtgagagagaagctgtacaagggcatcagctgggtggaggtggaggccaaggtgcagaccagaaactggatgcagtgcaagagcaagtggaccgagatcctgaccaagagaatgaccaacggcagaagaatctactacggcatgaacgccctgagagccaaggtgagcctgatcgagagactgtacgagatcaacgtggaggacaccaacgagatcgactgggaggacctggccagcgccatcggcgacgtgccccccagctacgtgcagaccaagttcagcagactgaaggccgtgtacgtgcccttctggcagaagaagaccttccccgagatcatcgactacctgtacgagaccaccctgcccctgctgaaggagaagctggagaagatgatggagaagaagggcaccaagatccagacccccgccgcccccaagcaggtgttccccttcagagacatcttctactacgaggacgacagcgagggcggccacagaaagagaaagagaagatag

SEQ ID NO: 102830 - DNA, 2718 bp, synthetic construct
  misc_feature 1..2718: note = Description of Artificial Sequence: Synthetic coding sequence
  source 1..2718: mol_type = other DNA
atggagggcgagagcagcagattcgagatccacacccccgtgagcgacaagaagaagaagaagtgcagcatccacaaggagagaccccagaagcacagccacgagatcttcagagacagcagcctggtgaacgagcagagccagatcaccagaagaaagaagagaaagaaggacttccagcacctgatcagcagccccctgaagaagagcagaatctgcgacgagaccgccaacgccaccagcaccctgaagaagagaaagaagagaagatacagcgccctggaggtggacgaggaggccggcgtgaccgtggtgctggtggacaaggagaacatcaacaacacccccaagcacttcagaaaggacgtggacgtggtgtgcgtggacatgagcatcgagcagaagctgcccagaaagcccaagaccgacaagttccaggtgctggccaagagccacgcccacaagagcgaggccctgcacagcaaggtgagagagaagaagaacaagaagcaccagagaaaggccgccagctgggagagccagagagccagagacaccctgccccagagcgagagccaccaggaggagagctggctgagcgtgggccccggcggcgagatcaccgagctgcccgccagcgcccacaagaacaagagcaagaagaagaagaagaagagcagcaacagagagtacgagaccctggccatgcccgagggcagccaggccggcagagaggccggcaccgacatgcaggagagccagcccaccgtgggcctggacgacgagaccccccagctgctgggccccacccacaagaagaagagcaagaagaagaagaagaagaagagcaaccaccaggagttcgaggccctggccatgcccgagggcagccaggtgggcagcgaggtgggcgccgacatgcaggagagcagacccgccgtgggcctgcacggcgagaccgccggcatccccgcccccgcctacaagaacaagagcaagaagaagaagaagaagagcaaccaccaggagttcgaggccgtggccatgcccgagagcctggagagcgcctaccccgagggcagccaggtgggcagcgaggtgggcaccgtggagggcagcaccgccctgaagggcttcaaggagagcaacagcaccaagaagaagagcaagaagagaaagctgaccagcgtgaagagagccagagtgagcggcgacgacttcagcgtgcccagcaagaacagcgagagcaccctgttcgacagcgtggagggcgacggcgccatgatggaggagggcgtgaagagcagacccagacagaagaagacccaggcctgcctggccagcaagcacgtgcaggaggcccccagactggagcccgccaacgaggagcacaacgtggagaccgccgaggacagcgagatcagatacctgagcgccgacagcggcgacgccgacgacagcgacgccgacctgggcagcgccgtgaagcagctgcaggagttcatccccaacatcaaggacagagccaccagcaccatcaagagaatgtacagagacgacctggagagattcaaggagttcaaggcccagggcgtggccatcaagttcggcaagttcagcgtgaaggagaacaagcagctggagaagaacgtggaggacttcctggccctgaccggcatcgagagcgccgacaagctgctgtacaccgacagataccccgaggagaagagcgtgatcaccaacctgaagagaagatacagcttcagactgcacatcggcagaaacatcgccagaccctggaagctgatctactacagagccaagaagatgttcgacgtgaacaactacaagggcagatacagcgagggcgacaccgagaagctgaagatgtaccacagcctgctgggcaacgactggaagaccatcggcgagatggtggccagaagcagcctgagcgtggccctgaagttcagccagatcagcagccagagaaacagaggcgcctggagcaagagcgagaccagaaagctgatcaaggccgtggaggaggtgatcctgaagaagatgagcccccaggagctgaaggaggtggacagcaagctgcaggagaaccccgagagctgcctgagcatcgtgagagagaagctgtacaagggcatcagctgggtggaggtggaggccaaggtgcagaccagaaactggatgcagtgcaagagcaagtggaccgagatcctgaccaagagaatgaccaacggcagaagaatctactacggcatgaacgccctgagagccaaggtgagcctgatcgagagactgtacgagatcaacgtggaggacaccaacgagatcgactgggaggacctggccagcgccatcggcgacgtgccccccagctacgtgcagaccaagttcagcagactgaaggccgtgtacgtgcccttctggcagaagaagaccttccccgagatcatcgactacctgtacgagaccaccctgcccctgctgaaggagaagctggagaagatgatggagaagaagggcaccaagatccagacccccgccgcccccaagcaggtgttccccttcagagacatcttctactacgaggacgacagcgagggcgaggacatcgagaaggagagcgagggccaggccccctgcatggcccacgcctgcaacagcagcaccctgggcggccagggcagatggatcatctag

SEQ ID NO: 102831 - DNA, 3489 bp, synthetic construct
  misc_feature 1..3489: note = Description of Artificial Sequence: Synthetic coding sequence
  source 1..3489: mol_type = other DNA
atggaggaggtgagatgccccgagcacggcaccttctgcttcctgaagaccggcgtgagagacggccccaacaagggcaagagcttctacgtgtgcagagccgacacctgcagcttcgtgagagccaccgacatccccgtgagccactgcctgctgcacgaggacttcgtggtggagctgcagggcctgctgctgccccaggacaagaaggagtacagactgttcttcagatgcatcagaagcaaggccgagggcaagagatggtgcggcagcatcccctggcaggaccccgacagcaaggagcacagcgtgagcaacaagagccagcacgccagcgagaccttccaccacagcagcaactggctgagaaaccccttcaaggtgctggacaagaaccaggagcccgccctgtggaagcagctgatcaagggcgagggcgaggagaagaaggccgacaagaagcagagagagaagggcgaccagctgttcgaccagaagaaggagcagaagcccgagatgatggagaaggacctgagcagcggcctggtgcccaagaagaagcagagcgtggtgcaggagaagaagcaggaggagggcgccgagatccagtgcgaggccgagaccggcggcacccacaagagagacttcagcgagatcaagagccagcagtgccagggcaacgagctgaccagacccagcgccagcagccaggagaagagcagcggcaagagccaggacgtgcagagagagagcgagcccctgagagagaaggtgacccagctgctgccccagaacgtgcacagccacaacagcatcagcaagccccagaagggcggccccctgaacaaggagtacaccaactgggaggccaaggagaccaaggccaaggacggccccagcatccaggccacccagaagagcctgccccagggccacttccaggagagacccgagacccacagcgtgcccgcccccggcggccccgccgcccaggccgcccccgccgcccccggcctgagcctgggcgagggcagagaggccgccaccagcagcgacgacgaggaggaggacgacgtggtgttcgtgagcagcaagcccggcagccccctgctgttcgacagcaccctggacctggagaccaaggagaacctgcagttccccgacagaagcgtgcagagaaaggtgagccccgccagcggcgtgagcaagaaggtggagcccagcgaccccgtggccagaagagtgtacctgaccacccagctgaagcagaagaagagcaccctggccagcgtgaacatccaggccctgcccgacaagggccagaagctgatcaagcagatccaggagctggaggaggtgctgagcggcctgaccctgagccccgagcagggcaccaacgagaagagcaacagccaggtgccccagcagagccacttcaccaagaccaccaccggccccccccacctggtgcccccccagcccctgcccagaagaggcacccagcccgtgggcagcctggagctgaagagcgcctgccaggtgaccgccggcggcagcagccagtgctacagaggccacaccaaccaggaccacgtgcacgccgtgtggaagatcaccagcgaggccatcggccagctgcacagaagcctggagagctgccccggcgagaccgtggtggccgaggaccccgccggcctgaaggtgcccctgctgctgcaccagaagcaggccctggcctggctgctgtggagagagagccagaagccccagggcggcatcctggccgacgacatgggcctgggcaagaccctgaccatgatcgccctgatcctgacccagaagaaccaggagaagaaggaggagaaggagaagagcaccgccctgacctggctgagcaaggacgacagctgcgacttcaccagccacggcaccctgatcatctgccccgccagcctgatccaccactggaagaacgaggtggagaagagagtgaacagcaacaagctgagagtgtacctgtaccacggccccaacagagacagcagagccagagtgctgagcacctacgacatcgtgatcaccacctacagcctggtggccaaggagatccccaccaacaagcaggaggccgagatccccggcgccaacctgaacgtggagggcaccagcacccccctgctgagaatcgcctgggccagaatcatcctggacgaggcccacaacgtgaagaaccccagagtgcagaccagcatcgccgtgtgcaagctgcaggcctgcgccagatgggccgtgaccggcacccccatccagaacaacctgctggacatgtacagcctgctgaagttcctgagatgcagccccttcgacgagttcaacctgtggagaagccaggtggacaacggcagcaagaagggcggcgagagactgagcatcctgaccaagagcctgctgctgagaagaaccaaggaccagctggacagcaccggcagacccctggtgatcctgccccagagaaagttccagctgcaccacctgaagctgagcgaggacgaggagaccgtgtacaacgtgttcttcgccagaagcagaagcgccctgcagagctacctgaagagacacgagagcagaggcaaccagagcggcagaagccccaacaaccccttcagcagagtggccctggagttcggcagcgaggagcccagacacagcgaggccgccgacagccccagaagcagcaccgtgcacatcctgagccagctgctgagactgagacagtgctgctgccacctgagcctgctgaagagcgccctggaccccatggagctgaagggcgagggcctggtgctgagcctggaggagcagctgagcgccctgaccctgagcgagctgagagacagcgagcccagcagcaccgtgagcctgaacggcaccttcttcaagatggagctgttcgagggcatgagagagagcaccaagatcagcagcctgctggccgagctggaggccatccagagaaacagcgccagccagaagagcgtgatcgtgagccagtggaccaacatgctgaaggtggtggccctgcacctgaagaagcacggcctgacctacgccaccatcgacggcagcgtgaaccccaagcagagaatggacctggtggaggccttcaaccacagcagaggcccccaggtgatgctgatcagcctgctggccggcggcgtgggcctgaacctgaccggcggcaaccacctgttcctgctggacatgcactggaaccccagcctggaggaccaggcctgcgacagaatctacagagtgggccagcagaaggacgtggtgatccacagattcgtgtgcgagggcaccgtggaggagaagatcctgcagctgcaggagaagaagaaggacctggccaagcaggtgctgagcggcagcggcgagagcgtgaccaagctgaccctggccgacctgagagtgctgttcggcatctag

SEQ ID NO: 102832 - DNA, 432 bp, synthetic construct
  misc_feature 1..432: note = Description of Artificial Sequence: Synthetic coding sequence
  source 1..432: mol_type = other DNA
aacatgctgaaggtggtggccctgcacctgaagaagcacggcctgacctacgccaccatcgacggcagcgtgaaccccaagcagagaatggacctggtggaggccttcaaccacagcagaggcccccaggtgatgctgatcagcctgctggccggcggcgtgggcctgaacctgaccggcggcaaccacctgttcctgctggacatgcactggaaccccagcctggaggaccaggcctgcgacagaatctacagagtgggccagcagaaggacgtggtgatccacagattcgtgtgcgagggcaccgtggaggagaagatcctgcagctgcaggagaagaagaaggacctggccaagcaggtgctgagcggcagcggcgagagcgtgaccaagctgaccctggccgacctgagagtgctgttcggcatctag

SEQ ID NO: 102833 - DNA, 1263 bp, synthetic construct
  misc_feature 1..1263: note = Description of Artificial Sequence: Synthetic coding sequence
  source 1..1263: mol_type = other DNA
atggccgagctgggcaagaagtactgcgtgtactgcctggccgaggtgagccccctgagattcagatgcaccgagtgccaggacatcgagctgtgccccgagtgcttcagcgccggcgccgagatcggccaccacagaagataccacggctaccagctggtggacggcggcagattcaccctgtggggccccgaggccgagggcggctggaccagcagagaggagcagctgctgctggacgccatcgagcagttcggcttcggcaactgggaggacatggccgcccacgtgggcgccagcagaaccccccaggaggtgatggagcactacgtgagcatgtacatccacggcaacctgggcaaggcctgcatccccgacaccatccccaacagagtgaccgaccacacctgccccagcggcggccccctgagccccagcctgaccacccccctgccccccctggacatcagcgtggccgagcagcagcagctgggctacatgcccctgagagacgactacgagatcgagtacgaccaggacgccgagaccctgatcagcggcctgagcgtgaactacgacgacgacgacgtggagatcgagctgaagagagcccacgtggacatgtacgtgagaaagctgaaggagagacagagaagaaagaacatcgccagagactacaacctggtgcccgccttcctgggcaaggacaagaaggagaaggagaaggccctgaagagaaagatcaccaaggaggagaaggagctgagactgaagctgagacccctgtaccagttcatgagctgcaaggagttcgacgacctgttcgagaacatgcacaaggagaagatgctgagagccaagatcagagagctgcagagatacagaagaaacggcatcaccaagatggaggagagcgccgagtacgaggccgccagacacaagagagagaagagaaaggagaacaagaacctggccggcagcaagagaggcaaggaggacggcaaggacagcgagttcgccgccatcgagaacctgcccggcttcgagctgctgagcgacagagagaaggtgctgtgcagcagcctgaacctgagccccgccagatacgtgaccgtgaagaccatcatcatcaaggaccacctgcagaagagacagggcatccccagcaagagcagactgcccagctacctggacaaggtgctgaagaagagaatcctgaacttcctgaccgagagcggctggatcagcagagacgccagctag

SEQ ID NO: 102834 - DNA, 366 bp, synthetic construct
  misc_feature 1..366: note = Description of Artificial Sequence: Synthetic coding sequence
  source 1..366: mol_type = other DNA
atggccgcccacgtgggcgccagcagaaccccccaggaggtgatggagcactacgtgagcatgtacatccacggcaacctgggcaaggcctgcatccccgacaccatccccaacagagtgaccgaccacacctgccccagcggcggccccctgagccccagcctgaccacccccctgccccccctggacatcagcgtggccgagcagcagcagctgggctacatgcccctgagagacgactacgagatcgagtacgaccaggacgccgagaccctgatcagcggcctgagcgtgaactacgacgacgacgacgtggagatcgagctgaagagagcccacgtggacatgtacgtgagaaagctgtag

SEQ ID NO: 102835 - DNA, 390 bp, synthetic construct
  misc_feature 1..390: note = Description of Artificial Sequence: Synthetic coding sequence
  source 1..390: mol_type = other DNA
atggccgcccacgtgggcgccagcagaaccccccaggaggtgatggagcactacgtgagcatgtacatccacggcaacctgggcaaggcctgcatccccgacaccatccccaacagagtgaccgaccacacctgccccagcggcggccccctgagccccagcctgaccacccccctgccccccctggacatcagcgtggccgagcagcagcagctgggctacatgcccctgagagacgactacgagatcgagtacgaccaggacgccgagaccctgatcagcggcctgagcgtgaactacgacgacgacgacgtggagatcgagctgaagagagcccacgtggacatgtacgtgagaaagctgaaggagagacagagaagaaagaactag

SEQ ID NO: 102836 - DNA, 1038 bp, synthetic construct
  misc_feature 1..1038: note = Description of Artificial Sequence: Synthetic coding sequence
  source 1..1038: mol_type = other DNA
atggccgagctgggcaagaagtactgcgtgtactgcctggccgaggaggacatggccgcccacgtgggcgccagcagaaccccccaggaggtgatggagcactacgtgagcatgtacatccacggcaacctgggcaaggcctgcatccccgacaccatccccaacagagtgaccgaccacacctgccccagcggcggccccctgagccccagcctgaccacccccctgccccccctggacatcagcgtggccgagcagcagcagctgggctacatgcccctgagagacgactacgagatcgagtacgaccaggacgccgagaccctgatcagcggcctgagcgtgaactacgacgacgacgacgtggagatcgagctgaagagagcccacgtggacatgtacgtgagaaagctgaaggagagacagagaagaaagaacatcgccagagactacaacctggtgcccgccttcctgggcaaggacaagaaggagaaggagaaggccctgaagagaaagatcaccaaggaggagaaggagctgagactgaagctgagacccctgtaccagttcatgagctgcaaggagttcgacgacctgttcgagaacatgcacaaggagaagatgctgagagccaagatcagagagctgcagagatacagaagaaacggcatcaccaagatggaggagagcgccgagtacgaggccgccagacacaagagagagaagagaaaggagaacaagaacctggccggcagcaagagaggcaaggaggacggcaaggacagcgagttcgccgccatcgagaacctgcccggcttcgagctgctgagcgacagagagaaggtgctgtgcagcagcctgaacctgagccccgccagatacgtgaccgtgaagaccatcatcatcaaggaccacctgcagaagagacagggcatccccagcaagagcagactgcccagctacctggacaaggtgctgaagaagagaatcctgaacttcctgaccgagagcggctggatcagcagagacgccagctag

SEQ ID NO: 102837 - DNA, 987 bp, synthetic construct
  misc_feature 1..987: note = Description of Artificial Sequence: Synthetic coding sequence
  source 1..987: mol_type = other DNA
atggccgcccacgtgggcgccagcagaaccccccaggaggtgatggagcactacgtgagcatgtacatccacggcaacctgggcaaggcctgcatccccgacaccatccccaacagagtgaccgaccacacctgccccagcggcggccccctgagccccagcctgaccacccccctgccccccctggacatcagcgtggccgagcagcagcagctgggctacatgcccctgagagacgactacgagatcgagtacgaccaggacgccgagaccctgatcagcggcctgagcgtgaactacgacgacgacgacgtggagatcgagctgaagagagcccacgtggacatgtacgtgagaaagctgaaggagagacagagaagaaagaacatcgccagagactacaacctggtgcccgccttcctgggcaaggacaagaaggagaaggagaaggccctgaagagaaagatcaccaaggaggagaaggagctgagactgaagctgagacccctgtaccagttcatgagctgcaaggagttcgacgacctgttcgagaacatgcacaaggagaagatgctgagagccaagatcagagagctgcagagatacagaagaaacggcatcaccaagatggaggagagcgccgagtacgaggccgccagacacaagagagagaagagaaaggagaacaagaacctggccggcagcaagagaggcaaggaggacggcaaggacagcgagttcgccgccatcgagaacctgcccggcttcgagctgctgagcgacagagagaaggtgctgtgcagcagcctgaacctgagccccgccagatacgtgaccgtgaagaccatcatcatcaaggaccacctgcagaagagacagggcatccccagcaagagcagactgcccagctacctggacaaggtgctgaagaagagaatcctgaacttcctgaccgagagcggctggatcagcagagacgccagctag

SEQ ID NO: 102838 - DNA, 1299 bp, synthetic construct
  misc_feature 1..1299: note = Description of Artificial Sequence: Synthetic coding sequence
  source 1..1299: mol_type = other DNA
atgagcgagctgaaggactgccccctgcagttccacgacttcaagagcgtggaccacctgaaggtgtgccccagatacaccgccgtgctggccagaagcgaggacgacggcatcggcatcgaggagctggacaccctgcagctggagctggagaccctgctgagcagcgccagcagaagactgagagtgctggaggccgagacccagatcctgaccgactggcaggacaagaagggcgacagaagattcctgaagctgggcagagaccacgagctgggcgccccccccaagcacggcaagcccaagaagcagaagctggagggcaaggccggccacggccccggccccggccccggcagacccaagagcaagaacctgcagcccaagatccaggagtacgagttcaccgacgaccccatcgacgtgcccagaatccccaagaacgacgcccccaacagattctgggccagcgtggagccctactgcgccgacatcaccagcgaggaggtgagaaccctggaggagctgctgaagccccccgaggacgaggccgagcactacaagatcccccccctgggcaagcactacagccagagatgggcccaggaggacctgctggaggagcagaaggacggcgccagagccgccgccgtggccgacaagaagaagggcctgatgggccccctgaccgagctggacaccaaggacgtggacgccctgctgaagaagagcgaggcccagcacgagcagcccgaggacggctgccccttcggcgccctgacccagagactgctgcaggccctggtggaggagaacatcatcagccccatggaggacagccccatccccgacatgagcggcaaggagagcggcgccgacggcgccagcaccagccccagaaaccagaacaagcccttcagcgtgccccacaccaagagcctggagagcagaatcaaggaggagctgatcgcccagggcctgctggagagcgaggacagacccgccgaggacagcgaggacgaggtgctggccgagctgagaaagagacaggccgagctgaaggccctgagcgcccacaacagaaccaagaagcacgacctgctgagactggccaaggaggaggtgagcagacaggagctgagacagagagtgagaatggccgacaacgaggtgatggacgccttcagaaagatcatggccgccagacagaagaagagaacccccaccaagaaggagaaggaccaggcctggaagaccctgaaggagagagagagcatcctgaagctgctggacggctag

SEQ ID NO: 102839 - DNA, 1110 bp, synthetic construct
  misc_feature 1..1110: note = Description of Artificial Sequence: Synthetic coding sequence
  source 1..1110: mol_type = other DNA
atgagcgagctgaaggactgccccctgcagttccacgacttcaagagcgtggaccacctgaaggtgtgccccagatacaccgccgtgctggccagaagcgaggacgacggcatcggcatcgaggagctggacaccctgcagctggagctggagaccctgctgagcagcgccagcagaagactgagagtgctggaggccgagacccagatcctgaccgactggcaggacaagaagggcgacagaagattcctgaagctgggcagagaccacgagctgggcgccccccccaagcacggcaagcccaagaagcagaagctggagggcaaggccggccacggccccggccccggccccggcagacccaagagcaagaacctgcagcccaagatccaggagtacgagttcaccgacgaccccatcgacgtgcccagaatccccaagaacgacgcccccaacagattctgggccagcgtggagccctactgcgccgacatcaccagcgaggaggtgagaaccctggaggagctgctgaagccccccgaggacgaggccgagcactacaagatcccccccctgggcaagcactacagccagagatgggcccaggaggacctgctggaggagcagaaggacggcgccagagccgccgccgtggccgacaagaagaagggcctgatgggccccctgaccgagctggacaccaaggacgtggacgccctgctgaagaagagcgaggcccagcacgagcagcccgaggacggctgccccttcggcgccctgacccagagactgctgcaggccctggtggaggagaacatcatcagccccatggaggacagccccatccccgacatgagcggcaaggagagcggcgccgacggcgccagcaccagccccagaaaccagaacaagcccttcagcgtgccccacaccaagagcctggagagcagaatcaaggaggagctgatcgcccagggcctgctggagagcgaggacagacccgccgaggacagcgaggacgaggtgctggccgagctgagaaagagacaggccgagctgaaggccctgagcgcccacaacagaaccaagaagcacgacctgctgagatag

SEQ ID NO: 102840 - DNA, 288 bp, synthetic construct
  misc_feature 1..288: note = Description of Artificial Sequence: Synthetic coding sequence
  source 1..288: mol_type = other DNA
atgagcgagctgaaggactgccccctgcagttccacgacttcaagagcgtggaccacctgaaggtgtgccccagatacaccgccgtgctggccagaagcgaggacgacggcatcggcatcgaggagctggacaccctgcagctggagctggagaccctgctgagcagcgccagcagaagactgagagtgctggaggccgagacccagatcctgaccgactggcaggacaagaagggcgacagaagattcctgaagctgggcagagaccacgagctgggcgccccctag

SEQ ID NO: 102841 - DNA, 1299 bp, synthetic construct; identical to SEQ ID NO: 102838
  misc_feature 1..1299: note = Description of Artificial Sequence: Synthetic coding sequence
  source 1..1299: mol_type = other DNA

SEQ ID NO: 102842 - DNA, 1038 bp, synthetic construct
  misc_feature 1..1038: note = Description of Artificial Sequence: Synthetic coding sequence
  source 1..1038: mol_type = other DNA
atgcagctggagatccaggtggccctgaacttcatcatcagctacctgtacaacaagctgcccagaagaagagtgaacatcttcggcgaggagctggagagactgctgaagaagaagtacgagggccactggtaccccgagaagccctacaagggcagcggcttcagatgcatccacatcggcgagaaggtggaccccgtgatcgagcaggccagcaaggagagcggcctggacatcgacgacgtgagaggcaacctgccccaggacctgagcgtgtggatcgaccccttcgaggtgagctaccagatcggcgagaagggccccgtgaaggtgctgtacgtggacgacaacaacgagaacggctgcgagctggacaaggagatcaagaacagcttcaaccccgaggcccaggtgttcatgcccatcagcgaccccgccagcagcgtgagcagcagccccagcccccccttcggccacagcgccgccgtgagccccaccttcatgcccagaagcacccagcccctgaccttcaccaccgccaccttcgccgccaccaagttcggcagcaccaagatgaagaacagcggcagaagcaacaaggtggccagaaccagccccatcaacctgggcctgaacgtgaacgacctgctgaagcagaaggccatcagcagcagcatgcacagcctgtacggcctgggcctgggcagccagcagcagccccagcagcagcagcagcccgcccagcccccccccccccccccccccccccagcagcagcagcagcagaagaccagcgccctgagccccaacgccaaggagttcatcttccccaacatgcagggccagggcagcagcaccaacggcatgttccccggcgacagccccctgaacctgagccccctgcagtacagcaacgccttcgacgtgttcgccgcctacggcggcctgaacgagaagagcttcgtggacggcctgaacttcagcctgaacaacatgcagtacagcaaccagcagttccagcccgtgatggccaactag

SEQ ID NO: 102843 - DNA, 1038 bp, synthetic construct; identical to SEQ ID NO: 102842
  misc_feature 1..1038: note = Description of Artificial Sequence: Synthetic coding sequence
  source 1..1038: mol_type = other DNA

SEQ ID NO: 102844 - DNA, 1035 bp, synthetic construct
  misc_feature 1..1035: note = Description of Artificial Sequence: Synthetic coding sequence
  source 1..1035: mol_type = other DNA
atgcagctggagatcaaggtggccctgaacttcatcatcagctacctgtacaacaagctgcccagaagaagagccgacctgttcggcgaggagctggagagactgctgaagaagaagtacgagggccactggtaccccgagaagcccctgaagggcagcggcttcagatgcgtgcacatcggcgagatggtggaccccgtggtggagctggccgccaagagaagcggcctggccgtggaggacgtgagagccaacgtgcccgaggagctgagcgtgtggatcgaccccttcgaggtgagctaccagatcggcgagaagggcgccgtgaaggtgctgtacctggacgacagcgagggctgcggcgcccccgagctggacaaggagatcaagagcagcttcaaccccgacgcccaggtgttcgtgcccatcggcagccaggacagcagcctgagcaacagccccagccccagcttcggccagagccccagccccaccttcatccccagaagcgcccagcccatcaccttcaccaccgccagcttcgccgccaccaagttcggcagcaccaagatgaagaagggcggcggcgccgccagcggcggcggcgtggccagcagcggcgccggcggccagcagcccccccagcagcccagaatggccagaagccccaccaacagcctgctgaagcacaagagcctgagcctgagcatgcacagcctgaacttcatcaccgccaaccccgccccccagagccagctgagccccaacgccaaggagttcgtgtacaacggcggcggcagccccagcctgttcttcgacgccgccgacggccagggcagcggcacccccggccccttcggcggcagcggcgccggcacctgcaacagcagcagcttcgacatggcccaggtgttcggcggcggcgccaacagcctgttcctggagaagacccccttcgtggagggcctgagctacaacctgaacaccatgcagtaccccagccagcagttccagcccgtggtgctggccaactag

SEQ ID NO: 102845 - DNA, 306 bp, synthetic construct
  misc_feature 1..306: note = Description of Artificial Sequence: Synthetic coding sequence
  source 1..306: mol_type = other DNA
atgcagctggagatcaaggtggccctgaacttcatcatcagctacctgtacaacaagctgcccagaagaagagccgacctgttcggcgaggagctggagagactgctgaagaagaagtacgagggccactggtaccccgagaagcccctgaagggcagcggcttcagatgcgtgcacatcggcgagatggtggaccccgtggtggagctggccgccaagagaagcggcctggccgtggaggacgtgagagccaacgtgcccgaggagctgagcgtgtggatcgaccccttcgaggtgagctactag

SEQ ID NO: 102846 - DNA, 1569 bp, synthetic construct
  misc_feature 1..1569: note = Description of Artificial Sequence: Synthetic coding sequence
  source 1..1569: mol_type = other DNA
atgagcatcaccagcgacgaggtgaacttcctggtgtacagatacctgcaggagagcggcttcagccacagcgccttcaccttcggcatcgagagccacatcagccagagcaacatcaacggcaccctggtgccccccagcgccctgatcagcatcctgcagaagggcctgcagtacgtggaggccgagatcagcatcaacaaggacggcaccgtgttcgacagcagacccatcgagagcctgagcctgatcgtggccgtgatccccgacgtggtgcagatgagacagcaggccttcggcgagaagctgacccagcagcaggccagcgccgccgccaccgaggccagcgccatggccaaggccgccaccatgacccccgccgccatcagccagcagaacccccccaagaacagagaggccaccgtgaacggcgaggagaacggcgcccacgagatcaacaaccacagcaagcccatggagatcgacggcgacgtggagatcccccccaacaaggccaccgtgctgagaggccacgagagcgaggtgttcatctgcgcctggaaccccgtgagcgacctgctggccagcggcagcggcgacagcaccgccagaatctggaacctgaacgagaacagcaacggcggcagcacccagctggtgctgagacactgcatcagagagggcggccacgacgtgcccagcaacaaggacgtgaccagcctggactggaacagcgacggcaccctgctggccatgggcagctacgacggcttcgccagaatctggaccgagaacggcaacctggccagcaccctgggccagcacaagggccccatcttcgccctgaagtggaacaagaagggcaactacgtgctgagcgccggcgtggacaagaccaccatcatctgggacgcccacaccggcgaggccaagcagcagttccccttccacagcgcccccgccctggacgtggactggcagaacaacatgaccttcgccagctgcagcaccgacatgtgcatccacgtgtgcagactgggctgcgaccaccccgtgaagaccttccagggccacaccaacgaggtgaacgccatcaagtgggaccccagcggcatgctgctggccagctgcagcgacgacatgaccctgaagatctggagcatgaagcaggacgcctgcgtgcacgacctgcaggcccacagcaaggagatctacaccatcaagtggagccccaccggccccgccaccagcaaccccaacagcagcatcatgctggccagcgccagcttcgacagcaccgtgagactgtgggacgtggagcagggcgtgtgcacccacaccctgatgaagcaccaggagcccgtgtacagcgtggccttcagccccgacggcaagtacctggccagcggcagcttcgacaagtacgtgcacatctggaacacccagagcggcagcctggtgcacagctaccagggcaccggcggcatcttcgaggtgtgctggaacgccagaggcgacaaggtgggcgccagcgccagcgacggcagcgtgtgcgtgctggacctgtag

SEQ ID NO: 102847 - DNA, 1569 bp, synthetic construct; identical to SEQ ID NO: 102846
  misc_feature 1..1569: note = Description of Artificial Sequence: Synthetic coding sequence
  source 1..1569: mol_type = other DNA

SEQ ID NO: 102848 - DNA, 1569 bp, synthetic construct; identical to SEQ ID NO: 102846
  misc_feature 1..1569: note = Description of Artificial Sequence: Synthetic coding sequence
  source 1..1569: mol_type = other DNA

SEQ ID NO: 102849 - DNA, 1095 bp, synthetic construct
  misc_feature 1..1095: note = Description of Artificial Sequence: Synthetic coding sequence
  source 1..1095: mol_type = other DNA
atggagatcgacggcgacgtggagatcccccccaacaaggccaccgtgctgagaggccacgagagcgaggtgttcatctgcgcctggaaccccgtgagcgacctgctggccagcggcagcggcgacagcaccgccagaatctggaacctgaacgagaacagcaacggcggcagcacccagctggtgctgagacactgcatcagagagggcggccacgacgtgcccagcaacaaggacgtgaccagcctggactggaacagcgacggcaccctgctggccatgggcagctacgacggcttcgccagaatctggaccgagaacggcaacctggccagcaccctgggccagcacaagggccccatcttcgccctgaagtggaacaagaagggcaactacgtgctgagcgccggcgtggacaagaccaccatcatctgggacgcccacaccggcgaggccaagcagcagttccccttccacagcgcccccgccctggacgtggactggcagaacaacatgaccttcgccagctgcagcaccgacatgtgcatccacgtgtgcagactgggctgcgaccaccccgtgaagaccttccagggccacaccaacgaggtgaacgccatcaagtgggaccccagcggcatgctgctggccagctgcagcgacgacatgaccctgaagatctggagcatgaagcaggacgcctgcgtgcacgacctgcaggcccacagcaaggagatctacaccatcaagtggagccccaccggccccgccaccagcaaccccaacagcagcatcatgctggccagcgccagcttcgacagcaccgtgagactgtgggacgtggagcagggcgtgtgcacccacaccctgatgaagcaccaggagcccgtgtacagcgtggccttcagccccgacggcaagtacctggccagcggcagcttcgacaagtacgtgcacatctggaacacccagagcggcagcctggtgcacagctaccagggcaccggcggcatcttcgaggtgtgctggaacgccagaggcgacaaggtgggcgccagcgccagcgacggcagcgtgtgcgtgctggacctgtag

SEQ ID NO: 102850 - DNA, 1752 bp, synthetic construct
  misc_feature 1..1752: note = Description of Artificial Sequence: Synthetic coding sequence
  source 1..1752: mol_type = other DNA
atgcccctgagaaagatgaagatccccttcctgctgctgttcttcctgtgggaggccgagagccacgccgccagcagacccaacatcatcctggtgatggccgacgacctgggcatcggcgaccccggctgctacggcaacaagaccatcagaacccccaacatcgacagactggccagcggcggcgtgaagctgacccagcacctggccgccagccccctgtgcacccccagcagagccgccttcatgaccggcagataccccgtgagaagcggcatggccagctggagcagaaccggcgtgttcctgttcaccgccagcagcggcggcctgcccaccgacgagatcaccttcgccaagctgctgaaggaccagggctacagcaccgccctgatcggcaagtggcacctgggcatgagctgccacagcaagaccgacttctgccaccaccccctgcaccacggcttcaactacttctacggcatcagcctgaccaacctgagagactgcaagcccggcgagggcagcgtgttcaccaccggcttcaagagactggtgttcctgcccctgcagatcgtgggcgtgaccctgctgaccctggccgccctgaactgcctgggcctgctgcacgtgcccctgggcgtgttcttcagcctgctgttcctggccgccctgatcctgaccctgttcctgggcttcctgcactacttcagacccctgaactgcttcatgatgagaaactacgagatcatccagcagcccatgagctacgacaacctgacccagagactgaccgtggaggccgcccagttcatccagagaaacaccgagacccccttcctgctggtgctgagctacctgcacgtgcacaccgccctgttcagcagcaaggacttcgccggcaagagccagcacggcgtgtacggcgacgccgtggaggagatggactggagcgtgggccagatcctgaacctgctggacgagctgagactggccaacgacaccctgatctacttcaccagcgaccagggcgcccacgtggaggaggtgagcagcaagggcgagatccacggcggcagcaacggcatctacaagggcggcaaggccaacaactgggagggcggcatcagagtgcccggcatcctgagatggcccagagtgatccaggccggccagaagatcgacgagcccaccagcaacatggacatcttccccaccgtggccaagctggccggcgcccccctgcccgaggacagaatcatcgacggcagagacctgatgcccctgctggagggcaagagccagagaagcgaccacgagttcctgttccactactgcaacgcctacctgaacgccgtgagatggcacccccagaacagcaccagcatctggaaggccttcttcttcacccccaacttcaaccccgtgggcagcaacggctgcttcgccacccacgtgtgcttctgcttcggcagctacgtgacccaccacgacccccccctgctgttcgacatcagcaaggaccccagagagagaaaccccctgacccccgccagcgagcccagattctacgagatcctgaaggtgatgcaggaggccgccgacagacacacccagaccctgcccgaggtgcccgaccagttcagctggaacaacttcctgtggaagccctggctgcagctgtgctgccccagcaccggcctgagctgccagtgcgacagagagaagcaggacaagagactgagcagatag

SEQ ID NO: 102851 - DNA, 1581 bp, synthetic construct
  misc_feature 1..1581: note = Description of Artificial Sequence: Synthetic coding sequence
  source 1..1581: mol_type = other DNA
atgagcatcaccagcgacgaggtgaacttcctggtgtacagatacctgcaggagagcggcttcagccacagcgccttcaccttcggcatcgagagccacatcagccagagcaacatcaacggcaccctggtgccccccgccgccctgatcagcatcctgcagaagggcctgcagtacgtggaggccgagatcagcatcaacgaggacggcaccgtgttcgacggcagacccatcgagagcctgagcctgatcgacgccgtgatgcccgacgtggtgcagaccagacagcaggccttcagagagaagctggcccagcagcaggccagcgccgccgccgccgccgccgccgccaccgccgccgccaccgccgccaccaccaccagcgccggcgtgagccaccagaaccccagcaagaacagagaggccaccgtgaacggcgaggagaacagagcccacagcgtgaacaaccacgccaagcccatggagatcgacggcgaggtggagatccccagcagcaaggccaccgtgctgagaggccacgagagcgaggtgttcatctgcgcctggaaccccgtgagcgacctgctggccagcggcagcggcgacagcaccgccagaatctggaacctgaacgagaacagcaacggcggcagcacccagctggtgctgagacactgcatcagagagggcggccacgacgtgcccagcaacaaggacgtgaccagcctggactggaacaccaacggcaccctgctggccaccggcagctacgacggcttcgccagaatctggaccgaggacggcaacctggccagcaccctgggccagcacaagggccccatcttcgccctgaagtggaacagaaagggcaactacatcctgagcgccggcgtggacaagaccaccatcatctgggacgcccacaccggcgaggccaagcagcagttccccttccacagcgcccccgccctggacgtggactggcagaacaacaccaccttcgccagctgcagcaccgacatgtgcatccacgtgtgcagactgggctgcgacagacccgtgaagaccttccagggccacaccaacgaggtgaacgccatcaagtgggaccccagcggcatgctgctggccagctgcagcgacgacatgaccctgaagatctggagcatgaagcaggaggtgtgcatccacgacctgcaggcccacaacaaggagatctacaccatcaagtggagccccaccggccccgccaccagcaaccccaacagcaacatcatgctggccagcgccagcttcgacagcaccgtgagactgtgggacatcgagagaggcgtgtgcacccacaccctgaccaagcaccaggagcccgtgtacagcgtggccttcagccccgacggcaagtacctggccagcggcagcttcgacaagtgcgtgcacatctggaacacccagagcggcaacctggtgcacagctacagaggcaccggcggcatcttcgaggtgtgctggaacgccagaggcgacaaggtgggcgccagcgccagcgacggcagcgtgtgcgtgctggacctgagaaagtag

SEQ ID NO: 102852 - DNA, 1734 bp, synthetic construct; identical to SEQ ID NO: 94510
  misc_feature 1..1734: note = Description of Artificial Sequence: Synthetic coding sequence
  source 1..1734: mol_type = other DNA

SEQ ID NO: 102853 - DNA, 228 bp, synthetic construct
  misc_feature 1..228: note = Description of Artificial Sequence: Synthetic coding sequence
  source 1..228: mol_type = other DNA
atgagcatcaccagcgacgaggtgaacttcctggtgtacagatacctgcaggagagcggcttcagccacagcgccttcaccttcggcatcgagagccacatcagccagagcaacatcaacggcaccctggtgccccccgccgccctgatcagcatcctgcagaagggcctgcagtacgtggaggccgagatcagcatcaacgaggacggcaccgtgttcgacggctag

SEQ ID NO: 102854 - DNA, 138 bp, synthetic construct
  misc_feature 1..138: note = Description of Artificial Sequence: Synthetic coding sequence
  source 1..138: mol_type = other DNA
atgagcatcaccagcgacgaggtgaacttcctggtgtacagatacctgcaggagagcggcttcagccacagcgccttcaccttcggcatcgagagccacatcagccagagcaacatcaacggcaccctggtgccctag

SEQ ID NO: 102855 - DNA, 1581 bp, synthetic construct; identical to SEQ ID NO: 102851
  misc_feature 1..1581: note = Description of Artificial Sequence: Synthetic coding sequence
  source 1..1581: mol_type = other DNA

SEQ ID NO: 102856 - DNA, 180 bp, synthetic construct
  misc_feature 1..180: note = Description of Artificial Sequence: Synthetic coding sequence
  source 1..180: mol_type = other DNA
atgaccgagctggccggcgccagcagcagctgctgccacagacccgccggcagaggcgccatgcagagcgtgctgcaccacttccagagactgagaggcagagagggcggcagccacttcatcaacaccagcagccccagaggcgaggccaagatgagcatcaccagcgacgaggtgtag

SEQ ID NO: 102857 - DNA, 243 bp, synthetic construct
  misc_feature 1..243: note = Description of Artificial Sequence: Synthetic coding sequence
  source 1..243: mol_type = other DNA
atgaccgagctggccggcgccagcagcagctgctgccacagacccgccggcagaggcgccatgcagagcgtgctgcaccacttccagagactgagaggcagagagggcggcagccacttcatcaacaccagcagccccagaggcgaggccaagatgagcatcaccagcgacgaggtgaacttcctggtgtacagatacctgcaggagagcggcttcagccacagcgccttcaccttcggctag

SEQ ID NO: 102858 - DNA, 1581 bp, synthetic construct; identical to SEQ ID NO: 102851
  misc_feature 1..1581: note = Description of Artificial Sequence: Synthetic coding sequence
  source 1..1581: mol_type = other DNA

SEQ ID NO: 102859 - DNA, 1344 bp, synthetic construct
  misc_feature 1..1344: note = Description of Artificial Sequence: Synthetic coding sequence
  source 1..1344: mol_type = other DNA
atggagctgagccagatgagcgagctgatgggcctgagcgtgctgctgggcctgctggccctgatggccaccgccgccgtggccagaggctggctgagagccggcgaggagagaagcggcagacccgcctgccagaaggccaacggcttcccccccgacaagagcagcggcagcaagaagcagaagcagtaccagagaatcagaaaggagaagccccagcagcacaacttcacccacagactgctggccgccgccctgaagagccacagcggcaacatcagctgcatggacttcagcagcaacggcaagtacctggccacctgcgccgacgacagaaccatcagaatctggagcaccaaggacttcctgcagagagagcacagaagcatgagagccaacgtggagctggaccacgccaccctggtgagattcagccccgactgcagagccttcatcgtgtggctggccaacggcgacaccctgagagtgttcaagatgaccaagagagaggacggcggctacaccttcaccgccacccccgaggacttccccaagaagcacaaggcccccgtgatcgacatcggcatcgccaacaccggcaagttcatcatgaccgccagcagcgacaccaccgtgctgatctggagcctgaagggccaggtgctgagcaccatcaacaccaaccagatgaacaacacccacgccgccgtgagcccctgcggcagattcgtggccagctgcggcttcacccccgacgtgaaggtgtgggaggtgtgcttcggcaagaagggcgagttccaggaggtggtgagagccttcgagctgaagggccacagcgccgccgtgcacagcttcgccttcagcaacgacagcagaagaatggccagcgtgagcaaggacggcacctggaagctgtgggacaccgacgtggagtacaagaagaagcaggacccctacctgctgaagaccggcagattcgaggaggccgccggcgccgccccctgcagactggccctgagccccaacgcccaggtgctggccctggccagcggcagcagcatccacctgtacaacaccagaagaggcgagaaggaggagtgcttcgagagagtgcacggcgagtgcatcgccaacctgagcttcgacatcaccggcagattcctggccagctgcggcgacagagccgtgagactgttccacaacacccccggccacagagccatggtggaggagatgcagggccacctgaagagagccagcaacgagagcaccagacagagactgcagcagcagctgacccaggcccaggagaccctgaagagcctgggcgccctgaagaagtag

SEQ ID NO: 102860 - DNA, 1341 bp, synthetic construct
  misc_feature 1..1341: note = Description of Artificial Sequence: Synthetic coding sequence
  source 1..1341: mol_type = other DNA
atggagctgagccagatgagcgagctgatgggcctgagcgtgctgctgggcctgctggccctgatggccaccgccgccgtggccagaggctggctgagagccggcgaggagagaagcggcagacccgcctgccagaaggccaacggcttcccccccgacaagagcagcggcagcaagaagcagaagcagtaccagagaatcagaaaggagaagccccagcagcacaacttcacccacagactgctggccgccgccctgaagagccacagcggcaacatcagctgcatggacttcagcagcaacggcaagtacctggccacctgcgccgacgacagaaccatcagaatctggagcaccaaggacttcctgcagagagagcacagaagcatgagagccaacgtggagctggaccacgccaccctggtgagattcagccccgactgcagagccttcatcgtgtggctggccaacggcgacaccctgagagtgttcaagatgaccaagagagaggacggcggctacaccttcaccgccacccccgaggacttccccaagaagcacaaggcccccgtgatcgacatcggcatcgccaacaccggcaagttcatcatgaccgccagcagcgacaccaccgtgctgatctggagcctgaagggccaggtgctgagcaccatcaacaccaaccagatgaacaacacccacgccgccgtgagcccctgcggcagattcgtggccagctgcggcttcacccccgacgtgaaggtgtgggaggtgtgcttcggcaagaagggcgagttccaggaggtggtgagagccttcgagctgaagggccacagcgccgccgtgcacagcttcgccttcagcaacgacagcagaagaatggccagcgtgagcaaggacggcacctggaagctgtgggacaccgacgtggagtacaagaagaagcaggacccctacctgctgaagaccggcagattcgaggaggccgccggcgccgccccctgcagactggccctgagccccaacgcccaggtgctggccctggccagcggcagcagcatccacctgtacaacaccagaagaggcgagaaggaggagtgcttcgagagagtgcacggcgagtgcatcgccaacctgagcttcgacatcaccggcagattcctggccagctgcggcgacagagccgtgagactgttccacaacacccccggccacagagccatggtggaggagatgcagggccacctgaagagagccagcaacgagagcaccagacagagactgcagcagcagctgacccaggcccaggtgaccctgggcggccccggcgccgaggactag

SEQ ID NO: 102861 - DNA, 2427 bp, synthetic construct
  misc_feature 1..2427: note = Description of Artificial Sequence: Synthetic coding sequence
  source 1..2427: mol_type = other DNA
atggccgagaccgccgccggcgtgggcagattcaagaccaactacgccgtggagagaaagatcgagcccttctacaagggcggcaaggcccagctggaccagaccggccagcacctgttctgcgtgtgcggcaccagagtgaacatcctggaggtggccagcggcgccgtgctgagaagcctggagcaggaggaccaggaggacatcaccgccttcgacctgagccccgacaacgaggtgctggtgaccgccagcagagccctgctgctggcccagtgggcctggcaggagggcagcgtgaccagactgtggaaggccatccacaccgcccccgtggccaccatggccttcgaccccaccagcaccctgctggccaccggcggctgcgacggcgccgtgagagtgtgggacatcgtgagacactacggcacccaccacttcagaggcagccccggcgtggtgcacctggtggccttccaccccgaccccaccagactgctgctgttcagcagcgccaccgacgccgccatcagagtgtggagcctgcaggacagaagctgcctggccgtgctgaccgcccactacagcgccgtgaccagcctggccttcagcgccgacggccacaccatgctgagcagcggcagagacaagatctgcatcatctgggacctgcagagctgccaggccaccagaaccgtgcccgtgttcgagagcgtggaggccgccgtgctgctgcccgaggagcccgtgagccagctgggcgtgaagagccccggcctgtacttcctgaccgccggcgaccagggcaccctgagagtgtgggaggccgccagcggccagtgcgtgtacacccaggcccagccccccggccccggccaggagctgacccactgcaccctggcccacaccgccggcgtggtgctgaccgccaccgccgaccacaacctgctgctgtacgaggccagaagcctgagactgcagaagcagttcgccggctacagcgaggaggtgctggacgtgagattcctgggccccgaggacagccacgtggtggtggccagcaacagcccctgcctgaaggtgttcgagctgcagaccagcgcctgccagatcctgcacggccacaccgacatcgtgctggccctggacgtgttcagaaagggctggctgttcgccagctgcgccaaggaccagagcgtgagaatctggagaatgaacaaggccggccaggtgatgtgcgtggcccagggcagcggccacacccacagcgtgggcaccgtgtgctgcagcagactgaaggagagcttcctggtgaccggcagccaggactgcaccgtgaagctgtggcccctgcccaaggccctgctgagcaagaacaccgcccccgacaacggccccatcctgctgcaggcccagaccacccagagatgccacgacaaggacatcaacagcgtggccatcgcccccaacgacaagctgctggccaccggcagccaggacagaaccgccaagctgtgggccctgccccagtgccagctgctgggcgtgttcagcggccacagaagaggcctgtggtgcgtgcagttcagccccatggaccaggtgctggccaccgccagcgccgacggcaccatcaagctgtgggccctgcaggacttcagctgcctgaagaccttcgagggccacgacgccagcgtgctgaaggtggccttcgtgagcagaggcacccagctgctgagcagcggcagcgacggcctggtgaagctgtggaccatcaagaacaacgagtgcgtgagaaccctggacgcccacgaggacaaggtgtggggcctgcactgcagcagactggacgaccacgccctgaccggcgccagcgacagcagagtgatcctgtggaaggacgtgaccgaggccgagcaggccgaggagcaggccagacaggaggagcaggtggtgagacagcaggagctggacaacctgctgcacgagaagagatacctgagagccctgggcctggccatcagcctggacagaccccacaccgtgctgaccgtgatccaggccatcagaagagaccccgaggcctgcgagaagctggaggccaccatgctgagactgagaagagaccagaaggaggccctgctgagattctgcgtgacctggaacaccaacagcagacactgccacgaggcccaggccgtgctgggcgtgctgctgagaagagaggcccccgaggagctgctggcctacgagggcgtgagagccgccctggaggccctgctgccctacaccgagagacacttccagagactgagcagaaccctgcaggccgccgccttcctggacttcctgtggcacaacatgaagctgcccgtgcccgccgccgcccccaccccctgggagacccacaagggcgccctgccctag

SEQ ID NO: 102862 - DNA, 2427 bp, synthetic construct; identical to SEQ ID NO: 102861
  misc_feature 1..2427: note = Description of Artificial Sequence: Synthetic coding sequence
  source 1..2427: mol_type = other DNA

SEQ ID NO: 102863 - DNA, 729 bp, synthetic construct
  misc_feature 1..729: note = Description of Artificial Sequence: Synthetic coding sequence
  source 1..729: mol_type = other DNA
atgttcccccagagcagacaccccaccccccaccaggccgccggccagcccttcaagttcaccatccccgagagcctggacagaatcaaggaggagttccagttcctgcaggcccagtaccacagcctgaagctggagtgcgagaagctggccagcgagaagaccgagatgcagagacactacgtgatgtactacgagatgagctacggcctgaacatcgagatgcacaagcagaccgagatcgccaagagactgaacaccatctgcgcccaggtgatccccttcctgagccaggagcaccagcagcaggtggcccaggccgtggagagagccaagcaggtgaccatggccgagctgaacgccatcatcggcgtgagaggcctgcccggcctgccccccacccagcagcagctgcaggcccagcacctgagccacggccacggcccccccgtgcccctgaccccccaccccagcggcctgcagccccccggcatcccccccctgggcggcagcgccggcctgctggccctgagcagcgccctgagcggccagagccacctggccatcaaggacgacaagaagcaccacgacgccgagcaccacagaggcgagagacccggcaagagcaacagcctgctggtgcccgacagcctgagaggcaccgacaagagaagaaacggccccgagttcagcaacgacatcaagaagagaaaggtggacgacaagtag

SEQ ID NO: 102864 - DNA, 435 bp, synthetic construct
  misc_feature 1..435: note = Description of Artificial Sequence: Synthetic coding sequence
  source 1..435: mol_type = other DNA
atgcagagacactacgtgatgtactacgagatgagctacggcctgaacatcgagatgcacaagcagaccgagatcgccaagagactgaacaccatctgcgcccaggtgatccccttcctgagccaggagcaccagcagcaggtggcccaggccgtggagagagccaagcaggtgaccatggccgagctgaacgccatcatcggccagcagcagctgcaggcccagcacctgagccacggccacggcccccccgtgcccctgaccccccaccccagcggcctgcagccccccggcatcccccccctgggcggcagcgccggcctgctggccctgagcagcgccctgagcggccagagccacctggccatcaaggacgacaagaagcaccacgacgccgagcaccacagaggcgagagacccggcaagcccgactag

SEQ ID NO: 102865 - DNA, 384 bp, synthetic construct
  misc_feature 1..384: note = Description of Artificial Sequence: Synthetic coding sequence
  source 1..384: mol_type = other DNA
atgcccacccccggcaccagcgccacccccggcctgagacccggcctgggcaagccccccgccatcgaccccctggtgaaccaggccgccgccggcctgagaacccccctggccgtgcccggcccctaccccgcccccttcggcatggtgccccacgccggcatgaacggcgagctgaccagccccggcgccgcctacgccagcctgcacaacatgagcccccagatgagcgccgccgccgccgccgccgccgtggtggcctacggcagaagccccatggtgggcttcgacccccccccccacatgagagtgcccaccatcccccccaacctggccggcatccccggcggcaagcccagcctggtgcccgcccccgcccactag

SEQ ID NO: 102866 - DNA, 384 bp, synthetic construct; identical to SEQ ID NO: 102865
  misc_feature 1..384: note = Description of Artificial Sequence: Synthetic coding sequence
  source 1..384: mol_type = other DNA

SEQ ID NO: 102867 - DNA, 2313 bp, synthetic construct
  misc_feature 1..2313: note = Description of Artificial Sequence: Synthetic coding sequence
  source 1..2313: mol_type = other DNA
atgttcccccagagcagacaccccaccccccaccaggccgccggccagcccttcaagttcaccatccccgagagcctggacagaatcaaggaggagttccagttcctgcaggcccagtaccacagcctgaagctggagtgcgagaagctggccagcgagaagaccgagatgcagagacactacgtgatgtactacgagatgagctacggcctgaacatcgagatgcacaagcagaccgagatcgccaagagactgaacaccatctgcgcccaggtgatccccttcctgagccaggagcaccagcagcaggtggcccaggccgtggagagagccaagcaggtgaccatggccgagctgaacgccatcatcggccagcagcagctgcaggcccagcacctgagccacggccacggcccccccgtgcccctgaccccccaccccagcggcctgcagccccccggcatcccccccctgggcggcagcgccggcctgctggccctgagcagcgccctgagcggccagagccacctggccatcaaggacgacaagaagcaccacgacgccgagcaccacagagacagagagcccggcaccagcaacagcctgctggtgcccgacagcctgagaggcaccgacaagagaagaaacggccccgagttcagcaacgacatcaagaagagaaaggtggacgacaaggacagcagccactacgacagcgacggcgacaagagcgacgacaacctggtggtggacgtgagcaacgaggaccccagcagccccagagccagccccgcccacagccccagagagaacggcatcgacaagaacagactgctgaagaaggacgccagcagcagccccgccagcaccgccagcagcgccagcagcaccagcctgaagagcaaggagatgagcctgcacgagaaggccagcacccccgtgctgaagagcagcacccccacccccagaagcgacatgcccacccccggcaccagcgccacccccggcctgagacccggcctgggcaagccccccgccatcgaccccctggtgaaccaggccgccgccggcctgagaacccccctggccgtgcccggcccctaccccgcccccttcggcatggtgccccacgccggcatgaacggcgagctgaccagccccggcgccgcctacgccagcctgcacaacatgagcccccagatgagcgccgccgccgccgccgccgccgtggtggcctacggcagaagccccatggtgggcttcgacccccccccccacatgagagtgcccaccatcccccccaacctggccggcatccccggcggcaagcccgcctacagcttccacgtgaccgccgacggccagatgcagcccgtgcccttcccccccgacgccctgatcggccccggcatccccagacacgccagacagatcaacaccctgaaccacggcgaggtggtgtgcgccgtgaccatcagcaaccccaccagacacgtgtacaccggcggcaagggctgcgtgaaggtgtgggacatcagccaccccggcaacaagagccccgtgagccagctggactgcctgaacagagacaactacatcagaagctgcaagctgctgcccgacggctgcaccctgatcgtgggcggcgaggccagcaccctgagcatctgggacctggccgcccccacccccagaatcaaggccgagctgaccagcagcgcccccgcctgctacgccctggccatcagccccgacagcaaggtgtgcttcagctgctgcagcgacggcaacatcgccgtgtgggacctgcacaaccagaccctggtgagacagttccagggccacaccgacggcgccagctgcatcgacatcagcaacgacggcaccaagctgtggaccggcggcctggacaacaccgtgagaagctgggacctgagagagggcagacagctgcagcagcacgacttcaccagccagatcttcagcctgggctactgccccaccggcgagtggctggccgtgggcatggagagcagcaacgtggaggtgctgcacgtgaacaagcccgacaagtaccagctgcacctgcacgagagctgcgtgctgagcctgaagttcgcctactgcggcaagtggttcgtgagcaccggcaaggacaacctgctgaacgcctggagaaccccctacggcgccagcatcttccagagcaaggagagcagcagcgtgctgagctgcgacatcagcgtggacgacaagtacatcgtgaccggcagcggcgacaagaaggccaccgtgtacgaggtgatctactag

SEQ ID NO: 102868 - DNA, 729 bp, synthetic construct
  misc_feature 1..729: note = Description of Artificial Sequence: Synthetic coding sequence
  source 1..729: mol_type = other DNA
atgttcccccagagcagacaccccaccccccaccaggccgccggccagcccttcaagttcaccatccccgagagcctggacagaatcaaggaggagttccagttcctgcaggcccagtaccacagcctgaagctggagtgcgagaagctggccagcgagaagaccgagatgcagagacactacgtgatgtactacgagatgagctacggcctgaacatcgagatgcacaagcagaccgagatcgccaagagactgaacaccatctgcgcccaggtgatccccttcctgagccaggagcaccagcagcaggtggcccaggccgtggagagagccaagcaggtgaccatggccgagctgaacgccatcatcggcgtgagaggcctgcccggcctgccccccacccagcagcagctgcaggcccagcacctgagccacggccacggcccccccgtgcccctgaccccccaccccagcggcctgcagccccccggcatcccccccctgggcggcagcgccggcctgctggccctgagcagcgccctgagcggccagagccacctggccatcaaggacgacaagaagcaccacgacgccgagcaccacagagacagagagcccggcaccagcaacagcctgctggtgcccgacagcctgagaggcaccgacaagagaagaaacggccccgagttcagcaacgacatcaagaagagaaaggtggacgacaagtag

SEQ ID NO: 102869 - DNA, 2121 bp, synthetic construct
  misc_feature 1..2121: note = Description of Artificial Sequence: Synthetic coding sequence
  source 1..2121: mol_type = other DNA
atggtgcagagcagactgaccgccaccagcgccagccaggacagccccgccagcggcctgcagacccccctgcagagcggccagcccttcaagttcagcatcctggagatctgcgacagaatcaaggaggagttccagttcctgcaggcccagtaccacagcctgaagctggagtgcgagaagctggccagcgagaagaccgagatgcagagacactacgtgatgtactacgagatgagctacggcctgaacatcgagatgcacaagcaggccgagatcgtgaagagactgagcggcatctgcgcccagatcatccccttcctgacccaggagcaccagcagcaggtgctgcaggccgtggagagagccaagcaggtgaccgtgggcgagctgaacagcctgatcggccagcagcagctgcagcccctgagccaccacgccccccccgtgcccctgacccccagacccgccggcctggtgggcggcagcgccaccggcctgctggccctgagcggcgccctggccgcccaggcccagctggccgccgccgtgaaggaggacagagccggcgtggaggccgagggcagcagagtggagagagcccccagcagaagcgccagccccagcccccccgagagcctggtggaggaggagagacccagcggccccggcggcggcggcaagcagagagccgacgagaaggagcccagcggcccctacgagagcgacgaggacaagagcgactacaacctggtggtggacgaggaccagcccagcgagccccccagccccgccaccaccccctgcggcaaggtgcccatctgcatccccgccagaagagacctggtggacagccccgccagcctggccagcagcctgggcagccccctgcccagagccaaggagctgatcctgaacgacctgcccgccagcacccccgccagcaagagctgcgacagcagccccccccaggacgccagcacccccggccccagcagcgccagccacctgtgccagctggccgccaagcccgcccccagcaccgacagcgtggccctgagaagccccctgaccctgagcagccccttcaccaccagcttcagcctgggcagccacagcaccctgaacggcgacctgagcgtgcccagcagctacgtgagcctgcacctgagcccccaggtgagcagcagcgtggtgtacggcagaagccccgtgatggccttcgagagccacccccacctgagaggcagcagcgtgagcagcagcctgcccagcatccccggcggcaagcccgcctacagcttccacgtgagcgccgacggccagatgcagcccgtgcccttccccagcgacgccctggtgggcgccggcatccccagacacgccagacagctgcacaccctggcccacggcgaggtggtgtgcgccgtgaccatcagcggcagcacccagcacgtgtacaccggcggcaagggctgcgtgaaggtgtgggacgtgggccagcccggcgccaagacccccgtggcccagctggactgcctgaacagagacaactacatcagaagctgcaagctgctgcccgacggcagaagcctgatcgtgggcggcgaggccagcaccctgagcatctgggacctggccgcccccacccccagaatcaaggccgagctgaccagcagcgcccccgcctgctacgccctggccgtgagccccgacgccaaggtgtgcttcagctgctgcagcgacggcaacatcgtggtgtgggacctgcagaaccagaccatggtgagacagttccagggccacaccgacggcgccagctgcatcgacatcagcgactacggcaccagactgtggaccggcggcctggacaacaccgtgagatgctgggacctgagagagggcagacagctgcagcagcacgacttcagcagccagatcttcagcctgggccactgccccaaccaggactggctggccgtgggcatggagagcagcaacgtggagatcctgcacgtgagaaagcccgagaagtaccagctgcacctgcacgagagctgcgtgctgagcctgaagttcgccagctgcgtgcagggcgtggtgctgagccccgagctgtag

SEQ ID NO: 102870 - DNA, 2232 bp, synthetic construct
  misc_feature 1..2232: note = Description of Artificial Sequence: Synthetic coding sequence
  source 1..2232: mol_type = other DNA
atgtacccccagggcagacaccccacccccctgcagagcggccagcccttcaagttcagcatcctggagatctgcgacagaatcaaggaggagttccagttcctgcaggcccagtaccacagcctgaagctggagtgcgagaagctggccagcgagaagaccgagatgcagagacactacgtgatgtactacgagatgagctacggcctgaacatcgagatgcacaagcaggccgagatcgtgaagagactgagcggcatctgcgcccagatcatccccttcctgacccaggagcaccagcagcaggtgctgcaggccgtggagagagccaagcaggtgaccgtgggcgagctgaacagcctgatcggccagcagctgcagcccctgagccaccacgccccccccgtgcccctgacccccagacccgccggcctggtgggcggcagcgccaccggcctgctggccctgagcggcgccctggccgcccaggcccagctggccgccgccgtgaaggaggacagagccggcgtggaggccgagggcagcagagtggagagagcccccagcagaagcgccagccccagcccccccgagagcctggtggaggaggagagacccagcggccccggcggcggcggcaagcagagagccgacgagaaggagcccagcggcccctacgagagcgacgaggacaagagcgactacaacctggtggtggacgaggaccagcccagcgagccccccagccccgccaccaccccctgcggcaaggtgcccatctgcatccccgccagaagagacctggtggacagccccgccagcctggccagcagcctgggcagccccctgcccagagccaaggagctgatcctgaacgacctgcccgccagcacccccgccagcaagagctgcgacagcagccccccccaggacgccagcacccccggccccagcagcgccagccacctgtgccagctggccgccaagcccgcccccagcaccgacagcgtggccctgagaagccccctgaccctgagcagccccttcaccaccagcttcagcctgggcagccacagcaccctgaacggcgacctgagcgtgcccagcagctacgtgagcctgcacctgagcccccaggtgagcagcagcgtggtgtacggcagaagccccgtgatggccttcgagagccacccccacctgagaggcagcagcgtgagcagcagcctgcccagcatccccggcggcaagcccgcctacagcttccacgtgagcgccgacggccagatgcagcccgtgcccttccccagcgacgccctggtgggcgccggcatccccagacacgccagacagctgcacaccctggcccacggcgaggtggtgtgcgccgtgaccatcagcggcagcacccagcacgtgtacaccggcggcaagggctgcgtgaaggtgtgggacgtgggccagcccggcgccaagacccccgtggcccagctggactgcctgaacagagacaactacatcagaagctgcaagctgctgcccgacggcagaagcctgatcgtgggcggcgaggccagcaccctgagcatctgggacctggccgcccccacccccagaatcaaggccgagctgaccagcagcgcccccgcctgctacgccctggccgtgagccccgacgccaaggtgtgcttcagctgctgcagcgacggcaacatcgtggtgtgggacctgcagaaccagaccatggtgagacagttccagggccacaccgacggcgccagctgcatcgacatcagcgactacggcaccagactgtggaccggcggcctggacaacaccgtgagatgctgggacctgagagagggcagacagctgcagcagcacgacttcagcagccagatcttcagcctgggccactgccccaaccaggactggctggccgtgggcatggagagcagcaacgtggagatcctgcacgtgagaaagcccgagaagtaccagctgcacctgcacgagagctgcgtgctgagcctgaagttcgccagctgcggcagatggttcgtgagcaccggcaaggacaacctgctgaacgcctggagaaccccctacggcgccagcatcttccagagcaaggagagcagcagcgtgctgagctgcgacatcagcagaaacaacaagtacatcgtgaccggcagcggcgacaagaaggccaccgtgtacgaggtggtgtactag

SEQ ID NO: 102871 - DNA, 879 bp, synthetic construct
  misc_feature 1..879: note = Description of Artificial Sequence: Synthetic coding sequence
  source 1..879: mol_type = other DNA
ctggcccacggcgaggtggtgtgcgccgtgaccatcagcggcagcacccagcacgtgtacaccggcggcaagggctgcgtgaaggtgtgggacgtggacggcgccgtgttcgccggccagagaggcggcgcccaccagcccatcagaaacagagacaactacatcagaagctgcaagctgctgcccgacggcagaagcctgatcgtgggcggcgaggccagcaccctgagcatctgggacctggccgcccccacccccagaatcaaggccgagctgaccagcagcgcccccgcctgctacgccctggccgtgagccccgacgccaaggtgtgcttcagctgctgcagcgacggcaacatcgtggtgtgggacctgcagaaccagaccatggtgagacagttccagggccacaccgacggcgccagctgcatcgacatcagcgactacggcaccagactgtggaccggcggcctggacaacaccgtgagatgctgggacctgagagagggcagacagctgcagcagcacgacttcagcagccagatcttcagcctgggccactgccccaaccaggactggctggccgtgggcatggagagcagcaacgtggagatcctgcacgtgagaaagcccgagaagtaccagctgcacctgcacgagagctgcgtgctgagcctgaagttcgccagctgcggcagatggttcgtgagcaccggcaaggacaacctgctgaacgcctggagaaccccctacggcgccagcatcttccagagcaaggagagcagcagcgtgctgagctgcgacatcagcagaaacaacaagtacatcgtgaccggcagcggcgacaagaaggccaccgtgtacgaggtggtgtactag

SEQ ID NO: 102872 - DNA, 2121 bp, synthetic construct; identical to SEQ ID NO: 102869
  misc_feature 1..2121: note = Description of Artificial Sequence: Synthetic coding sequence
  source 1..2121: mol_type = other DNA

SEQ ID NO: 102873 - DNA, 1083 bp, synthetic construct
  misc_feature 1..1083: note = Description of Artificial Sequence: Synthetic coding sequence
  source 1..1083: mol_type = other DNA
atgtacccccagggcagacaccccacccccctgcagagcggccagcccttcaagttcagcatcctggagatctgcgacagaatcaaggaggagttccagttcctgcaggcccagtaccacagcctgaagctggagtgcgagaagctggccagcgagaagaccgagatgcagagacactacgtgatgtactacgagatgagctacggcctgaacatcgagatgcacaagcaggccgagatcgtgaagagactgagcggcatctgcgcccagatcatccccttcctgacccaggagagcgccagccccagcccccccgagagcctggtggaggaggagagacccagcggccccggcggcggcggcaagcagagagccgacgagaaggagcccagcggcccctacgagagcgacgaggacaagagcgactacaacctggtggtggacgaggaccagcccagcgagccccccagccccgccaccaccccctgcggcaaggtgcccatctgcatccccgccagaagagacctggtggacagccccgccagcctggccagcagcctgggcagccccctgcccagagccaaggagctgatcctgaacgacctgcccgccagcacccccgccagcaagagctgcgacagcagccccccccaggacgccagcacccccggccccagcagcgccagccacctgtgccagctggccgccaagcccgcccccagcaccgacagcgtggccctgagaagccccctgaccctgagcagccccttcaccaccagcttcagcctgggcagccacagcaccctgaacggcgacctgagcgtgcccagcagctacgtgagcctgcacctgagcccccaggtgagcagcagcgtggtgtacggcagaagccccgtgatggccttcgagagccacccccacctgagaggcagcagcgtgagcagcagcctgcccagcatccccggcggcaagcccgcctacagcttccacgtgagcgccgacggccagatgcagcccgtgcccttccccagcgacgccctggtgggcgccggcatccccccctggcccagcagcaccgcctag

SEQ ID NO: 102874 - DNA, 1866 bp, synthetic construct
  misc_feature 1..1866: note = Description of Artificial Sequence: Synthetic coding sequence
  source 1..1866: mol_type = other DNA
atgcagagacactacgtgatgtactacgagatgagctacggcctgaacatcgagatgcacaagcaggccgagatcgtgaagagactgagcggcatctgcgcccagatcatccccttcctgacccaggagcaccagcagcaggtgctgcaggccgtggagagagccaagcaggtgaccgtgggcgagctgaacagcctgatcggcagcgccagccccagcccccccgagagcctggtggaggaggagagacccagcggccccggcggcggcggcaagcagagagccgacgagaaggagcccagcggcccctacgagagcgacgaggacaagagcgactacaacctggtggtggacgaggaccagcccagcgagccccccagccccgccaccaccccctgcggcaaggtgcccatctgcatccccgccagaagagacctggtggacagccccgccagcctggccagcagcctgggcagccccctgcccagagccaaggagctgatcctgaacgacctgcccgccagcacccccgccagcaagagctgcgacagcagccccccccaggacgccagcacccccggccccagcagcgccagccacctgtgccagctggccgccaagcccgcccccagcaccgacagcgtggccctgagaagccccctgaccctgagcagccccttcaccaccagcttcagcctgggcagccacagcaccctgaacggcgacctgagcgtgcccagcagctacgtgagcctgcacctgagcccccaggtgagcagcagcgtggtgtacggcagaagccccgtgatggccttcgagagccacccccacctgagaggcagcagcgtgagcagcagcctgcccagcatccccggcggcaagcccgcctacagcttccacgtgagcgccgacggccagatgcagcccgtgcccttccccagcgacgccctggtgggcgccggcatccccagacacgccagacagctgcacaccctggcccacggcgaggtggtgtgcgccgtgaccatcagcggcagcacccagcacgtgtacaccggcggcaagggctgcgtgaaggtgtgggacgtgggccagcccggcgccaagacccccgtggcccagctggactgcctgaacagagacaactacatcagaagctgcaagctgctgcccgacggcagaagcctgatcgtgggcggcgaggccagcaccctgagcatctgggacctggccgcccccacccccagaatcaaggccgagctgaccagcagcgcccccgcctgctacgccctggccgtgagccccgacgccaaggtgtgcttcagctgctgcagcgacggcaacatcgtggtgtgggacctgcagaaccagaccatggtgagacagttccagggccacaccgacggcgccagctgcatcgacatcagcgactacggcaccagactgtggaccggcggcctggacaacaccgtgagatgctgggacctgagagagggcagacagctgcagcagcacgacttcagcagccagatcttcagcctgggccactgccccaaccaggactggctggccgtgggcatggagagcagcaacgtggagatcctgcacgtgagaaagcccgagaagtaccagctgcacctgcacgagagctgcgtgctgagcctgaagttcgccagctgcggcagatggttcgtgagcaccggcaaggacaacctgctgaacgcctggagaaccccctacggcgccagcatcttccagagcaaggagagcagcagcgtgctgagctgcgacatcagcagaaacaacaagtacatcgtgaccggcagcggcgacaagaaggccaccgtgtacgaggtggtgtactag

SEQ ID NO: 102875 - DNA, 1233 bp, synthetic construct
  misc_feature 1..1233: note = Description of Artificial Sequence: Synthetic coding sequence
  source 1..1233: mol_type = other DNA
atgaccttcccccccgccctgctgccccccaaccccgtgaccccccccagacccagaaccctgcccccccccggccccgccagacccgtgaccagcgccagcctgctgcccagccagcacctgcccagaaccgccagcgtgagcagcagcgtggtgtacggcagaagccccgtgatggccttcgagagccacccccacctgagaggcagcagcgtgagcagcagcctgcccagcatccccggcggcaagcccgcctacagcttccacgtgagcgccgacggccagatgcagcccgtgcccttccccagcgacgccctggtgggcgccggcatccccagacacgccagacagctgcacaccctggcccacggcgaggtggtgtgcgccgtgaccatcagcggcagcacccagcacgtgtacaccggcggcaagggctgcgtgaaggtgtgggacgtgggccagcccggcgccaagacccccgtggcccagctggactgcctgaacagagacaactacatcagaagctgcaagctgctgcccgacggcagaagcctgatcgtgggcggcgaggccagcaccctgagcatctgggacctggccgcccccacccccagaatcaaggccgagctgaccagcagcgcccccgcctgctacgccctggccgtgagccccgacgccaaggtgtgcttcagctgctgcagcgacggcaacatcgtggtgtgggacctgcagaaccagaccatggtgagacagttccagggccacaccgacggcgccagctgcatcgacatcagcgactacggcaccagactgtggaccggcggcctggacaacaccgtgagatgctgggacctgagagagggcagacagctgcagcagcacgacttcagcagccagatcttcagcctgggccactgccccaaccaggactggctggccgtgggcatggagagcagcaacgtggagatcctgcacgtgagaaagcccgagaagtaccagctgcacctgcacgagagctgcgtgctgagcctgaagttcgccagctgcggcagatggttcgtgagcaccggcaaggacaacctgctgaacgcctggagaaccccctacggcgccagcatcttccagagcaaggagagcagcagcgtgctgagctgcgacatcagcagaaacaacaagtacatcgtgaccggcagcggcgacaagaaggccaccgtgtacgaggtggtgtactag

SEQ ID NO: 102876 - DNA, 2061 bp, synthetic construct
  misc_feature 1..2061: note = Description of Artificial Sequence: Synthetic coding sequence
  source 1..2061: mol_type = other DNA
cagacccccctgcagagcggccagcccttcaagttcagcatcctggagatctgcgacagaatcaaggaggagttccagttcctgcaggcccagtaccacagcctgaagctggagtgcgagaagctggccagcgagaagaccgagatgcagagacactacgtgatgtactacgagatgagctacggcctgaacatcgagatgcacaagcaggccgagatcgtgaagagactgagcggcatctgcgcccagatcatccccttcctgacccaggagcaccagcagcaggtgctgcaggccgtggagagagccaagcaggtgaccgtgggcgagctgaacagcctgatcggccagcagcagctgcagcccctgagccaccacgccccccccgtgcccctgacccccagacccgccggcctggtgggcggcagcgccaccggcctgctggccctgagcggcgccctggccgcccaggcccagctggccgccgccgtgaaggaggacagagccggcgtggaggccgagggcagcagagtggagagagcccccagcagaagcgccagccccagcccccccgagagcctggtggaggaggagagacccagcggccccggcggcggcggcaagcagagagccgacgagaaggagcccagcggcccctacgagagcgacgaggacaagagcgactacaacctggtggtggacgaggaccagcccagcgagccccccagccccgccaccaccccctgcggcaaggtgcccatctgcatccccgccagaagagacctggtggacagccccgccagcctggccagcagcctgggcagccccctgcccagagccaaggagctgatcctgaacgacctgcccgccagcacccccgccagcaagagctgcgacagcagccccccccaggacgccagcacccccggccccagcagcgccagccacctgtgccagctggccgccaagcccgcccccagcaccgacagcgtggccctgagaagccccctgaccctgagcagccccttcaccaccagcttcagcctgggcagccacagcaccctgaacggcgacctgagcgtgcccagcagctacgtgagcctgcacctgagcccccaggtgagcagcagcgtggtgtacggcagaagccccgtgatggccttcgagagccacccccacctgagaggcagcagcgtgagcagcagcctgcccagcatccccggcggcaagcccgcctacagcttccacgtgagcgccgacggccagatgcagcccgtgcccttccccagcgacgccctggtgggcgccggcatccccagacacgccagacagctgcacaccctggcccacggcgaggtggtgtgcgccgtgaccatcagcggcagcacccagcacgtgtacaccggcggcaagggctgcgtgaaggtgtgggacgtgggccagcccggcgccaagacccccgtggcccagctggactgcctgaacagagacaactacatcagaagctgcaagctgctgcccgacggcagaagcctgatcgtgggcggcgaggccagcaccctgagcatctgggacctggccgcccccacccccagaatcaaggccgagctgaccagcagcgcccccgcctgctacgccctggccgtgagccccgacgccaaggtgtgcttcagctgctgcagcgacggcaacatcgtggtgtgggacctgcagaaccagaccatggtgagacagttccagggccacaccgacggcgccagctgcatcgacatcagcgactacggcaccagactgtggaccggcggcctggacaacaccgtgagatgctgggacctgagagagggcagacagctgcagcagcacgacttcagcagccagatcttcagcctgggccactgccccaaccaggactggctggccgtgggcatggagagcagcaacgtggagatcctgcacgtgagaaagcccgagaagtaccagctgcacctgcacgagagctgcgtgctgagcctgaagttcgccagctgcgtgcagggcgtggtgctgagccccgagctgtag

SEQ ID NO: 102877 - DNA, 1866 bp, synthetic construct; identical to SEQ ID NO: 102874
  misc_feature 1..1866: note = Description of Artificial Sequence: Synthetic coding sequence
  source 1..1866: mol_type = other DNA

SEQ ID NO: 102878 - DNA, 2283 bp, synthetic construct
  misc_feature 1..2283: note = Description of Artificial Sequence: Synthetic coding sequence
  source 1..2283: mol_type = other DNA
atgtacccccagggcagacaccccgccccccaccagcccggccagcccggcttcaagttcaccgtggccgagagctgcgacagaatcaaggacgagttccagttcctgcaggcccagtaccacagcctgaaggtggagtacgacaagctggccaacgagaagaccgagatgcagagacactacgtgatgtactacgagatgagctacggcctgaacatcgagatgcacaagcagaccgagatcgccaagagactgaacaccatcctggcccagatcatgcccttcctgagccaggagcaccagcagcaggtggcccaggccgtggagagagccaagcaggtgaccatgaccgagctgaacgccatcatcggccagcagcagctgcaggcccagcacctgagccacgccacccacggcccccccgtgcagctgcccccccaccccagcggcctgcagccccccggcatcccccccgtgaccggcagcagcagcggcctgctggccctgggcgccctgggcagccaggcccacctgaccgtgaaggacgagaagaaccaccacgagctggaccacagagagagagagagcagcgccaacaacagcgtgagccccagcgagagcctgagagccagcgagaagcacagaggcagcgccgactacagcatggaggccaagaagagaaaggccgaggagaaggacagcctgagcagatacgacagcgacggcgacaagagcgacgacctggtggtggacgtgagcaacgaggaccccgccacccccagagtgagccccgcccacagcccccccgagaacggcctggacaaggccagaagcctgaagaaggacgcccccaccagccccgccagcgtggccagcagcagcagcacccccagcagcaagaccaaggacctgggccacaacgacaagagcagcacccccggcctgaagagcaacacccccacccccagaaacgacgcccccacccccggcaccagcaccacccccggcctgagaagcatgcccgccagcgccctgagaacccccatcagcatcaccagcagctacgccgcccccttcgccatgatgagccaccacgagatgaacggcagcctgaccagccccggcgcctacgccggcctgcacaacatccccccccagatgagcgccgccgccgccgccgccgccgccgcctacggcagaagccccatggtgagcttcggcgccgtgggcttcgacccccacccccccatgagagccaccggcctgcccagcagcctggccagcatccccggcggcaagcccgcctacagcttccacgtgagcgccgacggccagatgcagcccgtgcccttcccccacgacgccctggccggccccggcatccccagacacgccagacagatcaacaccctgagccacggcgaggtggtgtgcgccgtgaccatcagcaaccccaccagacacgtgtacaccggcggcaagggctgcgtgaagatctgggacatcagccagcccggcagcaagagccccatcagccagctggactgcctgaacagagacaactacatcagaagctgcaagctgctgcccgacggcagaaccctgatcgtgggcggcgaggccagcaccctgaccatctgggacctggccagccccacccccagaatcaaggccgagctgaccagcagcgcccccgcctgctacgccctggccatcagccccgacgccaaggtgtgcttcagctgctgcagcgacggcaacatcgccgtgtgggacctgcacaaccagaccctggtgagacagttccagggccacaccgacggcgccagctgcatcgacatcagccacgacggcaccaagctgtggaccggcggcctggacaacaccgtgagaagctgggacctgagagagggcagacagctgcagcagcacgacttcaccagccagatcttcagcctgggctactgccccaccggcgagtggctggccgtgggcatggagagcagcaacgtggaggtgctgcaccacaccaagcccgacaagtaccagctgcacctgcacgagagctgcgtgctgagcctgaagttcgcctactgcggcaagtggttcgtgagcaccggcaaggacaacctgctgaacgcctggagaaccccctacggcgccagcatcttccagagcaaggagagcagcagcgtgctgagctgcgacatcagcgccgacgacaagtacatcgtgaccggcagcggcgacaagaaggccaccgtgtacgaggtgatctactag

SEQ ID NO: 102879 - DNA, 2289 bp, synthetic construct
  misc_feature 1..2289: note = Description of Artificial Sequence: Synthetic coding sequence
  source 1..2289: mol_type = other DNA
atggccccccaccagcccggccagcccggcttcaagttcaccgtggccgagagctgcgacagaatcaaggacgagttccagttcctgcaggcccagtaccacagcctgaaggtggagtacgacaagctggccaacgagaagaccgagatgcagagacactacgtgatgtactacgagatgagctacggcctgaacatcgagatgcacaagcagaccgagatcgccaagagactgaacaccatcctggcccagatcatgcccttcctgagccaggagcaccagcagcaggtggcccaggccgtggagagagccaagcaggtgaccatgaccgagctgaacgccatcatcggccagcagcagctgcaggcccagcacctgagccacgccacccacggcccccccgtgcagctgcccccccaccccagcggcctgcagccccccggcatcccccccgtgaccggcagcagcagcggcctgctggccctgggcgccctgggcagccaggcccacctgaccgtgaaggacgagaagaaccaccacgagctggaccacagagagagagagagcagcgccaacaacagcgtgagccccagcgagagcctgagagccagcgagaagcacagaggcagcgccgactacagcatggaggccaagaagagaaaggccgaggagaaggacagcctgagcagatacgacagcgacggcgacaagagcgacgacctggtggtggacgtgagcaacgaggaccccgccacccccagagtgagccccgcccacagcccccccgagaacggcctggacaaggccagaagcctgaagaaggacgcccccaccagccccgccagcgtggccagcagcagcagcacccccagcagcaagaccaaggacctgggccacaacgacaagagcagcacccccggcctgaagagcaacacccccacccccagaaacgacgcccccacccccggcaccagcaccacccccggcctgagaagcatgcccggcaagccccccggcatggaccccatcgccagcgccctgagaacccccatcagcatcaccagcagctacgccgcccccttcgccatgatgagccaccacgagatgaacggcagcctgaccagccccggcgcctacgccggcctgcacaacatccccccccagatgagcgccgccgccgccgccgccgccgccgcctacggcagaagccccatggtgagcttcggcgccgtgggcttcgacccccacccccccatgagagccaccggcctgcccagcagcctggccagcatccccggcggcaagcccgcctacagcttccacgtgagcgccgacggccagatgcagcccgtgcccttcccccacgacgccctggccggccccggcatccccagacacgccagacagatcaacaccctgagccacggcgaggtggtgtgcgccgtgaccatcagcaaccccaccagacacgtgtacaccggcggcaagggctgcgtgaagatctgggacatcagccagcccggcagcaagagccccatcagccagctggactgcctgaacagagacaactacatcagaagctgcaagctgctgcccgacggcagaaccctgatcgtgggcggcgaggccagcaccctgaccatctgggacctggccagccccacccccagaatcaaggccgagctgaccagcagcgcccccgcctgctacgccctggccatcagccccgacgccaaggtgtgcttcagctgctgcagcgacggcaacatcgccgtgtgggacctgcacaaccagaccctggtgagacagttccagggccacaccgacggcgccagctgcatcgacatcagccacgacggcaccaagctgtggaccggcggcctggacaacaccgtgagaagctgggacctgagagagggcagacagctgcagcagcacgacttcaccagccagatcttcagcctgggctactgccccaccggcgagtggctggccgtgggcatggagagcagcaacgtggaggtgctgcaccacaccaagcccgacaagtaccagctgcacctgcacgagagctgcgtgctgagcctgaagttcgcctactgcggcaagtggttcgtgagcaccggcaaggacaacctgctgaacgcctggagaaccccctacggcgccagcatcttccagagcaaggagagcagcagcgtgctgagctgcgacatcagcgccgacgacaagtacatcgtgaccggcagcggcgacaagaaggccaccgtgtacgaggtgatctactag

SEQ ID NO: 102880 - DNA, 2295 bp, synthetic construct
  misc_feature 1..2295: note = Description of Artificial Sequence: Synthetic coding sequence
  source 1..2295: mol_type = other DNA
atgtacccccagggcagacaccccgccccccaccagcccggccagcccggcttcaagttcaccgtggccgagagctgcgacagaatcaaggacgagttccagttcctgcaggcccagtaccacagcctgaaggtggagtacgacaagctggccaacgagaagaccgagatgcagagacactacgtgatgtactacgagatgagctacggcctgaacatcgagatgcacaagcagaccgagatcgccaagagactgaacaccatcctggcccagatcatgcccttcctgagccaggagcaccagcagcaggtggcccaggccgtggagagagccaagcaggtgaccatgaccgagctgaacgccatcatcggccagcagcagctgcaggcccagcacctgagccacgccacccacggcccccccgtgcagctgcccccccaccccagcggcctgcagccccccggcatcccccccgtgaccggcagcagcagcggcctgctggccctgggcgccctgggcagccaggcccacctgaccgtgaaggacgagaagaaccaccacgagctggaccacagagagagaagcagcgccagcaacaacagcgtgagccccagcgagagcctgagagccagcgagaagcacagaggcagcgccgactacagcatggaggccaagaagagaaaggccgaggagaaggacagcctgagcagatacgacagcgacggcgacaagagcgacgacctggtggtggacgtgagcaacgaggaccccgccacccccagagtgagccccgcccacagcccccccgagaacggcctggacaaggccagaagcctgaagaaggacgcccccaccagccccgccagcgtggccagcagcagcagcacccccagcagcaagaccaaggacctgggccacaacgacaagagcagcacccccggcctgaagagcaacacccccacccccagaaacgacgcccccacccccggcaccagcaccacccccggcctgagaagcatgcccggcaagccccccggcatggaccccatcgccagcgccctgagaacccccatcagcatcaccagcagctacgccgcccccttcgccatgatgagccaccacgagatgaacggcagcctgaccagccccggcgcctacgccggcctgcacaacatccccccccagatgagcgccgccgccgccgccgccgccgccgcctacggcagaagccccatggtgggcttcgacccccacccccccatgagagccaccggcctgcccagcagcctggccagcatccccggcggcaagcccgcctacagcttccacgtgagcgccgacggccagatgcagcccgtgcccttcccccacgacgccctggccggccccggcatccccagacacgccagacagatcaacaccctgagccacggcgaggtggtgtgcgccgtgaccatcagcaaccccaccagacacgtgtacaccggcggcaagggctgcgtgaagatctgggacatcagccagcccggcagcaagagccccatcagccagctggactgcctgaacagagacaactacatcagaagctgcaagctgctgcccgacggcagaaccctgatcgtgggcggcgaggccagcaccctgaccatctgggacctggccagccccacccccagaatcaaggccgagctgaccagcagcgcccccgcctgctacgccctggccatcagccccgacgccaaggtgtgcttcagctgctgcagcgacggcaacatcgccgtgtgggacctgcacaaccagaccctggtgagacagttccagggccacaccgacggcgccagctgcatcgacatcagccacgacggcaccaagctgtggaccggcggcctggacaacaccgtgagaagctgggacctgagagagggcagacagctgcagcagcacgacttcaccagccagatcttcagcctgggctactgccccaccggcgagtggctggccgtgggcatggagagcagcaacgtggaggtgctgcaccacaccaagcccgacaagtaccagctgcacctgcacgagagctgcgtgctgagcctgaagttcgcctactgcggcaagtggttcgtgagcaccggcaaggacaacctgctgaacgcctggagaaccccctacggcgccagcatcttccagagcaaggagagcagcagcgtgctgagctgcgacatcagcgccgacgacaagtacatcgtgaccggcagcggcgacaagaaggccaccgtgtacgaggtgatctactag

SEQ ID NO: 102881 - DNA, 2310 bp, synthetic construct
  misc_feature 1..2310: note = Description of Artificial Sequence: Synthetic coding sequence
  source 1..2310: mol_type = other DNA
atgtacccccagggcagacaccccgccccccaccagcccggccagcccggcttcaagttcaccgtggccgagagctgcgacagaatcaaggacgagttccagttcctgcaggcccagtaccacagcctgaaggtggagtacgacaagctggccaacgagaagaccgagatgcagagacactacgtgatgtactacgagatgagctacggcctgaacatcgagatgcacaagcagaccgagatcgccaagagactgaacaccatcctggcccagatcatgcccttcctgagccaggagcaccagcagcaggtggcccaggccgtggagagagccaagcaggtgaccatgaccgagctgaacgccatcatcggccagcagcagctgcaggcccagcacctgagccacgccacccacggcccccccgtgcagctgcccccccaccccagcggcctgcagccccccggcatcccccccgtgaccggcagcagcagcggcctgctggccctgggcgccctgggcagccaggcccacctgaccgtgaaggacgagaagaaccaccacgagctggaccacagagagagagagagcagcgccaacaacagcgtgagccccagcgagagcctgagagccagcgagaagcacagaggcagcgccgactacagcatggaggccaagaagagaaaggccgaggagaaggacagcctgagcagatacgacagcgacggcgacaagagcgacgacctggtggtggacgtgagcaacgaggaccccgccacccccagagtgagccccgcccacagcccccccgagaacggcctggacaaggccagaagcctgaagaaggacgcccccaccagccccgccagcgtggccagcagcagcagcacccccagcagcaagaccaaggacctgggccacaacgacaagagcagcacccccggcctgaagagcaacacccccacccccagaaacgacgcccccacccccggcaccagcaccacccccggcctgagaagcatgcccggcaagccccccggcatggaccccatcgccagcgccctgagaacccccatcagcatcaccagcagctacgccgcccccttcgccatgatgagccaccacgagatgaacggcagcctgaccagccccggcgcctacgccggcctgcacaacatccccccccagatgagcgccgccgccgccgccgccgccgccgcctacggcagaagccccatggtgagcttcggcgccgtgggcttcgacccccacccccccatgagagccaccggcctgcccagcagcctggccagcatccccggcggcaagcccgcctacagcttccacgtgagcgccgacggccagatgcagcccgtgcccttcccccacgacgccctggccggccccggcatccccagacacgccagacagatcaacaccctgagccacggcgaggtggtgtgcgccgtgaccatcagcaaccccaccagacacgtgtacaccggcggcaagggctgcgtgaagatctgggacatcagccagcccggcagcaagagccccatcagccagctggactgcctgaacagagacaactacatcagaagctgcaagctgctgcccgacggcagaaccctgatcgtgggcggcgaggccagcaccctgaccatctgggacctggccagccccacccccagaatcaaggccgagctgaccagcagcgcccccgcctgctacgccctggccatcagccccgacgccaaggtgtgcttcagctgctgcagcgacggcaacatcgccgtgtgggacctgcacaaccagaccctggtgagacagttccagggccacaccgacggcgccagctgcatcgacatcagccacgacggcaccaagctgtggaccggcggcctggacaacaccgtgagaagctgggacctgagagagggcagacagctgcagcagcacgacttcaccagccagatcttcagcctgggctactgccccaccggcgagtggctggccgtgggcatggagagcagcaacgtggaggtgctgcaccacaccaagcccgacaagtaccagctgcacctgcacgagagctgcgtgctgagcctgaagttcgcctactgcggcaagtggttcgtgagcaccggcaaggacaacctgctgaacgcctggagaaccccctacggcgccagcatcttccagagcaaggagagcagcagcgtgctgagctgcgacatcagcgccgacgacaagtacatcgtgaccggcagcggcgacaagaaggccaccgtgtacgaggtgatctactag

SEQ ID NO: 102882 - DNA, 2295 bp, synthetic construct
  misc_feature 1..2295: note = Description of Artificial Sequence: Synthetic coding sequence
  source 1..2295: mol_type = other DNA
atgtacccccagggcagacaccccgccccccaccagcccggccagcccggcttcaagttcaccgtggccgagagctgcgacagaatcaaggacgagttccagttcctgcaggcccagtaccacagcctgaaggtggagtacgacaagctggccaacgagaagaccgagatgcagagacactacgtgatgtactacgagatgagctacggcctgaacatcgagatgcacaagcagaccgagatcgccaagagactgaacaccatcctggcccagatcatgcccttcctgagccaggagcaccagcagcaggtggcccaggccgtggagagagccaagcaggtgaccatgaccgagctgaacgccatcatcggccagcagcagctgcaggcccagcacctgagccacgccacccacggcccccccgtgcagctgcccccccaccccagcggcctgcagccccccggcatcccccccgtgaccggcagcagcagcggcctgctggccctgggcgccctgggcagccaggcccacctgaccgtgaaggacgagaagaaccaccacgagctggaccacagagagagagagagcagcgccaacaacagcgtgagccccagcgagagcctgagagccagcgagaagcacagaggcagcgccgactacagcatggaggccaagaagagaaaggccgaggagaaggacagcctgagcagatacgacagcgacggcgacaagagcgacgacctggtggtggacgtgagcaacgaggaccccgccacccccagagtgagccccgcccacagcccccccgagaacggcctggacaaggccagaagcctgaagaaggacgcccccaccagccccgccagcgtggccagcagcagcagcacccccagcagcaagaccaaggacctgggccacaacgacaagagcagcacccccggcctgaagagcaacacccccacccccagaaacgacgcccccacccccggcaccagcaccacccccggcctgagaagcatgcccggcaagccccccggcatggaccccatcgccagcgccctgagaacccccatcagcatcaccagcagctacgccgcccccttcgccatgatgagccaccacgagatgaacggcagcctgaccagccccggcgcctacgccggcctgcacaacatccccccccagatgagcgccgccgccgccgccgccgccgccgcctacggcagaagccccatggtgggcttcgacccccacccccccatgagagccaccggcctgcccagcagcctggccagcatccccggcggcaagcccgcctacagcttccacgtgagcgccgacggccagatgcagcccgtgcccttcccccacgacgccctggccggccccggcatccccagacacgccagacagatcaacaccctgagccacggcgaggtggtgtgcgccgtgaccatcagcaaccccaccagacacgtgtacaccggcggcaagggctgcgtgaagatctgggacatcagccagcccggcagcaagagccccatcagccagctggactgcctgaacagagacaactacatcagaagctgcaagctgctgcccgacggcagaaccctgatcgtgggcggcgaggccagcaccctgaccatctgggacctggccagccccacccccagaatcaaggccgagctgaccagcagcgcccccgcctgctacgccctggccatcagccccgacgccaaggtgtgcttcagctgctgcagcgacggcaacatcgccgtgtgggacctgcacaaccagaccctggtgagacagttccagggccacaccgacggcgccagctgcatcgacatcagccacgacggcaccaagctgtggaccggcggcctggacaacaccgtgagaagctgggacctgagagagggcagacagctgcagcagcacgacttcaccagccagatcttcagcctgggctactgccccaccggcgagtggctggccgtgggcatggagagcagcaacgtggaggtgctgcaccacaccaagcccgacaagtaccagctgcacctgcacgagagctgcgtgctgagcctgaagttcgcctactgcggcaagtggttcgtgagcaccggcaaggacaacctgctgaacgcctggagaaccccctacggcgccagcatcttccagagcaaggagagcagcagcgtgctgagctgcgacatcagcgccgacgacaagtacatcgtgaccggcagcggcgacaagaaggccaccgtgtacgaggtgatctactag

SEQ ID NO: 102883 - DNA, 2319 bp, synthetic construct
  misc_feature 1..2319: note = Description of Artificial Sequence: Synthetic coding sequence
  source 1..2319: mol_type = other DNA
atgtacccccagggcagacaccccgccccccaccagcccggccagcccggcttcaagttcaccgtggccgagagctgcgacagaatcaaggacgagttccagttcctgcaggcccagtaccacagcctgaaggtggagtacgacaagctggccaacgagaagaccgagatgcagagacactacgtgatgtactacgagatgagctacggcctgaacatcgagatgcacaagcagaccgagatcgccaagagactgaacaccatcctggcccagatcatgcccttcctgagccaggagcaccagcagcaggtggcccaggccgtggagagagccaagcaggtgaccatgaccgagctgaacgccatcatcggccagcagcagctgcaggcccagcacctgagccacgccacccacggcccccccgtgcagctgcccccccaccccagcggcctgcagccccccggcatcccccccgtgaccggcagcagcagcggcctgctggccctgggcgccctgggcagccaggcccacctgaccgtgaaggacgagaagaaccaccacgagctggaccacagagagagagagagcagcgccaacaacagcgtgagccccagcgagagcctgagagccagcgagaagcacagaggcagcgccgactacagcatggaggccaagaagagaaaggccgaggagaaggacagcctgagcagatacgacagcgacggcgacaagagcgacgacctggtggtggacgtgagcaacgaggaccccgccacccccagagtgagccccgcccacagcccccccgagaacggcctggacaaggccagaagcctgaagaaggacgcccccaccagccccgccagcgtggccagcagcagcagcacccccagcagcaagaccaaggacctgggccacaacgacaagagcagcacccccggcctgaagagcaacacccccacccccagaaacgacgcccccacccccggcaccagcaccacccccggcctgagaagcatgcccggcaagccccccggcatggaccccatcggcatcatggccagcgccctgagaacccccatcagcatcaccagcagctacgccgcccccttcgccatgatgagccaccacgagatgaacggcagcctgaccagccccggcgcctacgccggcctgcacaacatccccccccagatgagcgccgccgccgccgccgccgccgccgcctacggcagaagccccatggtgagcttcggcgccgtgggcttcgacccccacccccccatgagagccaccggcctgcccagcagcctggccagcatccccggcggcaagcccgcctacagcttccacgtgagcgccgacggccagatgcagcccgtgcccttcccccacgacgccctggccggccccggcatccccagacacgccagacagatcaacaccctgagccacggcgaggtggtgtgcgccgtgaccatcagcaaccccaccagacacgtgtacaccggcggcaagggctgcgtgaagatctgggacatcagccagcccggcagcaagagccccatcagccagctggactgcctgaacagagacaactacatcagaagctgcaagctgctgcccgacggcagaaccctgatcgtgggcggcgaggccagcaccctgaccatctgggacctggccagccccacccccagaatcaaggccgagctgaccagcagcgcccccgcctgctacgccctggccatcagccccgacgccaaggtgtgcttcagctgctgcagcgacggcaacatcgccgtgtgggacctgcacaaccagaccctggtgagacagttccagggccacaccgacggcgccagctgcatcgacatcagccacgacggcaccaagctgtggaccggcggcctggacaacaccgtgagaagctgggacctgagagagggcagacagctgcagcagcacgacttcaccagccagatcttcagcctgggctactgccccaccggcgagtggctggccgtgggcatggagagcagcaacgtggaggtgctgcaccacaccaagcccgacaagtaccagctgcacctgcacgagagctgcgtgctgagcctgaagttcgcctactgcggcaagtggttcgtgagcaccggcaaggacaacctgctgaacgcctggagaaccccctacggcgccagcatcttccagagcaaggagagcagcagcgtgctgagctgcgacatcagcgccgacgacaagtacatcgtgaccggcagcggcgacaagaaggccaccgtgtacgaggtgatctactag

SEQ ID NO: 102884 - DNA, 2319 bp, synthetic construct
  misc_feature 1..2319: note = Description of Artificial Sequence: Synthetic coding sequence
  source 1..2319: mol_type = other DNA
atgcccccccccccccccctgagctgcctgagaggcctgcaggccccccaccagcccggccagcccggcttcaagttcaccgtggccgagagctgcgacagaatcaaggacgagttccagttcctgcaggcccagtaccacagcctgaaggtggagtacgacaagctggccaacgagaagaccgagatgcagagacactacgtgatgtactacgagatgagctacggcctgaacatcgagatgcacaagcagaccgagatcgccaagagactgaacaccatcctggcccagatcatgcccttcctgagccaggagcaccagcagcaggtggcccaggccgtggagagagccaagcaggtgaccatgaccgagctgaacgccatcatcggccagcagctgcaggcccagcacctgagccacgccacccacggcccccccgtgcagctgcccccccaccccagcggcctgcagccccccggcatcccccccgtgaccggcagcagcagcggcctgctggccctgggcgccctgggcagccaggcccacctgaccgtgaaggacgagaagaaccaccacgagctggaccacagagagagagagagcagcgccaacaacagcgtgagccccagcgagagcctgagagccagcgagaagcacagaggcagcgccgactacagcatggaggccaagaagagaaaggccgaggagaaggacagcctgagcagatacgacagcgacggcgacaagagcgacgacctggtggtggacgtgagcaacgaggaccccgccacccccagagtgagccccgcccacagcccccccgagaacggcctggacaaggccagaagcctgaagaaggacgcccccaccagccccgccagcgtggccagcagcagcagcacccccagcagcaagaccaaggacctgggccacaacgacaagagcagcacccccggcctgaagagcaacacccccacccccagaaacgacgcccccacccccggcaccagcaccacccccggcctgagaagcatgcccggcaagccccccggcatggaccccatcggcatcatggccagcgccctgagaacccccatcagcatcaccagcagctacgccgcccccttcgccatgatgagccaccacgagatgaacggcagcctgaccagccccggcgcctacgccggcctgcacaacatccccccccagatgagcgccgccgccgccgccgccgccgccgcctacggcagaagccccatggtgggcttcgacccccacccccccatgagagccaccggcctgcccagcagcctggccagcatccccggcggcaagcccgcctacagcttccacgtgagcgccgacggccagatgcagcccgtgcccttcccccacgacgccctggccggccccggcatccccagacacgccagacagatcaacaccctgagccacggcgaggtggtgtgcgccgtgaccatcagcaaccccaccagacacgtgtacaccggcggcaagggctgcgtgaagatctgggacatcagccagcccggcagcaagagccccatcagccagctggactgcctgaacagagacaactacatcagaagctgcaagctgctgcccgacggcagaaccctgatcgtgggcggcgaggccagcaccctgaccatctgggacctggccagccccacccccagaatcaaggccgagctgaccagcagcgcccccgcctgctacgccctggccatcagccccgacgccaaggtgtgcttcagctgctgcagcgacggcaacatcgccgtgtgggacctgcacaaccagaccctggtgagacagttccagggccacaccgacggcgccagctgcatcgacatcagccacgacggcaccaagctgtggaccggcggcctggacaacaccgtgagaagctgggacctgagagagggcagacagctgcagcagcacgacttcaccagccagatcttcagcctgggctactgccccaccggcgagtggctggccgtgggcatggagagcagcaacgtggaggtgctgcaccacaccaagcccgacaagtaccagctgcacctgcacgagagctgcgtgctgagcctgaagttcgcctactgcggcaagtggttcgtgagcaccggcaaggacaacctgctgaacgcctggagaaccccctacggcgccagcatcttccagagcaaggagagcagcagcgtgctgagctgcgacatcagcgccgacgacaagtacatcgtgaccggcagcggcgacaagaaggccaccgtgtacgaggtgatctactag

SEQ ID NO: 102885 - DNA, 2325 bp, synthetic construct
  misc_feature 1..2325: note = Description of Artificial Sequence: Synthetic coding sequence
  source 1..2325: mol_type = other DNA
atgcccccccccccccccctgagctgcctgagaggcctgcaggccccccaccagcccggccagcccggcttcaagttcaccgtggccgagagctgcgacagaatcaaggacgagttccagttcctgcaggcccagtaccacagcctgaaggtggagtacgacaagctggccaacgagaagaccgagatgcagagacactacgtgatgtactacgagatgagctacggcctgaacatcgagatgcacaagcagaccgagatcgccaagagactgaacaccatcctggcccagatcatgcccttcctgagccaggagcaccagcagcaggtggcccaggccgtggagagagccaagcaggtgaccatgaccgagctgaacgccatcatcggccagcagctgcaggcccagcacctgagccacgccacccacggcccccccgtgcagctgcccccccaccccagcggcctgcagccccccggcatcccccccgtgaccggcagcagcagcggcctgctggccctgggcgccctgggcagccaggcccacctgaccgtgaaggacgagaagaaccaccacgagctggaccacagagagagagagagcagcgccaacaacagcgtgagccccagcgagagcctgagagccagcgagaagcacagaggcagcgccgactacagcatggaggccaagaagagaaaggccgaggagaaggacagcctgagcagatacgacagcgacggcgacaagagcgacgacctggtggtggacgtgagcaacgaggaccccgccacccccagagtgagccccgcccacagcccccccgagaacggcctggacaaggccagaagcctgaagaaggacgcccccaccagccccgccagcgtggccagcagcagcagcacccccagcagcaagaccaaggacctgggccacaacgacaagagcagcacccccggcctgaagagcaacacccccacccccagaaacgacgcccccacccccggcaccagcaccacccccggcctgagaagcatgcccggcaagccccccggcatggaccccatcgccagcgccctgagaacccccatcagcatcaccagcagctacgccgcccccttcgccatgatgagccaccacgagatgaacggcagcctgaccagccccggcgcctacgccggcctgcacaacatccccccccagatgagcgccgccgccgccgccgccgccgccgcctacggcagaagccccatggtgagcttcggcgccgtgggcttcgacccccacccccccatgagagccaccggcctgcccagcagcctggccagcatccccggcggcaagcccgcctacagcttccacgtgagcgccgacggccagatgcagcccgtgcccttcccccacgacgccctggccggccccggcatccccagacacgccagacagatcaacaccctgagccacggcgaggtggtgtgcgccgtgaccatcagcaaccccaccagacacgtgtacaccggcggcaagggctgcgtgaagatctgggacatcagccagcccggcagcaagagccccatcagccagctggactgcctgaacagagacaactacatcagaagctgcaagctgctgcccgacggcagaaccctgatcgtgggcggcgaggccagcaccctgaccatctgggacctggccagccccacccccagaatcaaggccgagctgaccagcagcgcccccgcctgctacgccctggccatcagccccgacgccaaggtgtgcttcagctgctgcagcgacggcaacatcgccgtgtgggacctgcacaaccagaccctggtgagacagttccagggccacaccgacggcgccagctgcatcgacatcagccacgacggcaccaagctgtggaccggcggcctggacaacaccgtgagaagctgggacctgagagagggcagacagctgcagcagcacgacttcaccagccagatcttcagcctgggctactgccccaccggcgagtggctggccgtgggcatggagagcagcaacgtggaggtgctgcaccacaccaagcccgacaagtaccagctgcacctgcacgagagctgcgtgctgagcctgaagttcgcctactgcggcaagtggttcgtgagcaccggcaaggacaacctgctgaacgcctggagaaccccctacggcgccagcatcttccagagcaaggagagcagcagcgtgctgagctgcgacatcagcgccgacgacaagtacatcgtgaccggcagcggcgacaagaaggccaccgtgtacgaggtgatctactag

SEQ ID NO: 102886 - DNA, 1719 bp, synthetic construct
  misc_feature 1..1719: note = Description of Artificial Sequence: Synthetic coding sequence
  source 1..1719: mol_type = other DNA
atgaccagcagagaccagcccagacccaagggcccccccaagagcaccagcccctgccccggcatcagcaacagcgagagcagccccaccctgaactaccagggcatcctgaacagactgaagcagttccccagattcagcccccacttcgccgccgagctggagagcatctactacagcctgcacaagatccagcaggacgtggccgagcaccacaagcagatcggcaacgtgctgcagatcgtggagagctgcagccagctgcagggcttccagagcgaggaggtgagccccgccgagcccgccagccccggcaccccccagcaggtgaaggacaagaccctgcaggagagcagcttcgaggacatcatggccaccagaagcagcgactggctgagaagacccctgggcgaggacaaccagcccgagacccagctgttctgggacaaggagccctggttctggcacgacaccctgaccgagcagctgtggagaatcttcgccggcgtgcacgacgagaaggccaagcccagagacagacagcaggcccccggcctgggccaggagagcaaggcccccggcagctgcgaccccggcaccgacccctgccccgaggacgccagcacccccagaccccccgaggccagcagcagcccccccgagggcagccaggacagaaacaccagctggggcgtggtgcaggagccccccggcagagccagcagattcctgcagagcatcagctgggaccccgaggacttcgaggacgcctggaagagacccgacgccctgcccggccagagcaagagactggccgtgccctgcaagctggagaagatgagaatcctggcccacggcgagctggtgctggccaccgccatcagcagcttcaccagacacgtgttcacctgcggcagaagaggcatcaaggtgtggagcctgaccggccaggtggccgaggacagattccccgagagccacctgcccatccagacccccggcgccttcctgagaacctgcctgctgagcagcaacagcagaagcctgctgaccggcggctacaacctggccagcgtgagcgtgtgggacctggccgcccccagcctgcacgtgaaggagcagctgccctgcgccggcctgaactgccaggccctggacgccaacctggacgccaacctggccttcgccagcttcaccagcggcgtggtgagaatctgggacctgagagaccagagcgtggtgagagacctgaagggctaccccgacggcgtgaagagcatcgtggtgaagggctacaacatctggaccggcggccccgacgcctgcctgagatgctgggaccagagaaccatcatgaagcccctggagtaccagttcaagagccagatcatgagcctgagccacagcccccaggaggactgggtgctgctgggcatggccaacggccagcagtggctgcagagcaccagcggcagccagagacacatggtgggccagaaggacagcgtgatcctgagcgtgaagttcagccccttcggccagtggtgggccagcgtgggcatggacgacttcctgggcgtgtacagcatgcccgccggcaccaaggtgttcgaggtgcccgagatgagccccgtgacctgctgcgacgtgagcagcaacaacagactggtggtgaccggcagcggcgagcacgccagcgtgtaccagatcacctactag

SEQ ID NO: 102887 - DNA, 1251 bp, synthetic construct
  misc_feature 1..1251: note = Description of Artificial Sequence: Synthetic coding sequence
  source 1..1251: mol_type = other DNA
atggccaccagaagcagcgactggctgagaagacccctgggcgaggacaaccagcccgagacccagctgttctgggacaaggagccctggttctggcacgacaccctgaccgagcagctgtggagaatcttcgccggcgtgcacgacgagaaggccaagcccagagacagacagcaggcccccggcctgggccaggagagcaaggcccccggcagctgcgaccccggcaccgacccctgccccgaggacgccagcacccccagaccccccgaggccagcagcagcccccccgagggcagccaggacagaaacaccagctggggcgtggtgcaggagccccccggcagagccagcagattcctgcagagcatcagctgggaccccgaggacttcgaggacgcctggaagagacccgacgccctgcccggccagagcaagagactggccgtgccctgcaagctggagaagatgagaatcctggcccacggcgagctggtgctggccaccgccatcagcagcttcaccagacacgtgttcacctgcggcagaagaggcatcaaggtgtggagcctgaccggccaggtggccgaggacagattccccgagagccacctgcccatccagacccccggcgccttcctgagaacctgcctgctgagcagcaacagcagaagcctgctgaccggcggctacaacctggccagcgtgagcgtgtgggacctggccgcccccagcctgcacgtgaaggagcagctgccctgcgccggcctgaactgccaggccctggacgccaacctggacgccaacctggccttcgccagcttcaccagcggcgtggtgagaatctgggacctgagagaccagagcgtggtgagagacctgaagggctaccccgacggcgtgaagagcatcgtggtgaagggctacaacatctggaccggcggccccgacgcctgcctgagatgctgggaccagagaaccatcatgaagcccctggagtaccagttcaagagccagatcatgagcctgagccacagcccccaggaggactgggtgctgctgggcatggccaacggccagcagtggctgcagagcaccagcggcagccagagacacatggtgggccagagacagagacaccccgagagacaggtgctgcccctgtggcccgtggtgggcaagagatggaacggcagactgccctggagactgcagcacgccggcggcgacaagagcgtgagaggcgcctag

SEQ ID NO: 102888 - DNA, 1719 bp, synthetic construct
  misc_feature 1..1719: note = Description of Artificial Sequence: Synthetic coding sequence
  source 1..1719: mol_type = other DNA
atgaccagcagagaccagcccagacccaagggcccccccaagagcaccagcccctgccccggcatcagcaacagcgagagcagccccaccctgaactaccagggcatcctgaacagactgaagcagttccccagattcagcccccacttcgccgccgagctggagagcatctactacagcctgcacaagatccagcaggacgtggccgagcaccacaagcagatcggcaacgtgctgcagatcgtggagagctgcagccagctgcagggcttccagagcgaggaggtgagccccgccgagcccgccagccccggcaccccccagcaggtgaaggacaagaccctgcaggagagcagcttcgaggacatcatggccaccagaagcagcgactggctgagaagacccctgggcgaggacaaccagcccgagacccagctgttctgggacaaggagccctggttctggcacgacaccctgaccgagcagctgtggagaatcttcgccggcgtgcacgacgagaaggccaagcccagagacagacacttcagcatcttccagggccaggagagcaaggcccccggcagctgcgaccccggcaccgacccctgccccgaggacgccagcacccccagaccccccgaggccagcagcagcccccccgagggcagccaggacagaaacaccagctggggcgtggtgcaggagccccccggcagagccagcagattcctgcagagcatcagctgggaccccgaggacttcgaggacgcctggaagagacccgacgccctgcccggccagagcaagagactggccgtgccctgcaagctggagaagatgagaatcctggcccacggcgagctggtgctggccaccgccatcagcagcttcaccagacacgtgttcacctgcggcagaagaggcatcaaggtgtggagcctgaccggccaggtggccgaggacagattccccgagagccacctgcccatccagacccccggcgccttcctgagaacctgcctgctgagcagcaacagcagaagcctgctgaccggcggctacaacctggccagcgtgagcgtgtgggacctggccgcccccagcctgcacgtgaaggagcagctgccctgcgccggcctgaactgccaggccctggacgccaacctggacgccaacctggccttcgccagcttcaccagcggcgtggtgagaatctgggacctgagagaccagagcgtggtgagagacctgaagggctaccccgacggcgtgaagagcatcgtggtgaagggctacaacatctggaccggcggccccgacgcctgcctgagatgctgggaccagagaaccatcatgaagcccctggagtaccagttcaagagccagatcatgagcctgagccacagcccccaggaggactgggtgctgctgggcatggccaacggccagcagtggctgcagagcaccagcggcagccagagacacatggtgggccagaaggacagcgtgatcctgagcgtgaagttcagccccttcggccagtggtgggccagcgtgggcatggacgacttcctgggcgtgtacagcatgcccgccggcaccaaggtgttcgaggtgcccgagatgagccccgtgacctgctgcgacgtgagcagcaacaacagactggtggtgaccggcagcggcgagcacgccagcgtgtaccagatcacctactag

SEQ ID NO: 102889 - DNA, 1350 bp, synthetic construct
  misc_feature 1..1350: note = Description of Artificial Sequence: Synthetic coding sequence
  source 1..1350: mol_type = other DNA
atggccaccagaagcagcgactggctgagaagacccctgggcgaggacaaccagcccgagacccagctgttctgggacaaggagccctggttctggcacgacaccctgaccgagcagctgtggagaatcttcgccggcgtgcacgacgagaaggccaagcccagagacagacagcaggcccccggcctgggccaggagagcaaggcccccggcagctgcgaccccggcaccgacccctgccccgaggacgccagcacccccagaccccccgaggccagcagcagcccccccgagggcagccaggacagaaacaccagctggggcgtggtgcaggagccccccggcagagccagcagattcctgcagagcatcagctgggaccccgaggacttcgaggacgcctggaagagacccgacgccctgcccggccagagcaagagactggccgtgccctgcaagctggagaagatgagaatcctggcccacggcgagctggtgctggccaccgccatcagcagcttcaccagacacgtgttcacctgcggcagaagaggcatcaaggtgtggagcctgaccggccaggtggccgaggacagattccccgagagccacctgcccatccagacccccggcgccttcctgagaacctgcctgctgagcagcaacagcagaagcctgctgaccggcggctacaacctggccagcgtgagcgtgtgggacctggccgcccccagcctgcacgtgaaggagcagctgccctgcgccggcctgaactgccaggccctggacgccaacctggacgccaacctggccttcgccagcttcaccagcggcgtggtgagaatctgggacctgagagaccagagcgtggtgagagacctgaagggctaccccgacggcgtgaagagcatcgtggtgaagggctacaacatctggaccggcggccccgacgcctgcctgagatgctgggaccagagaaccatcatgaagcccctggagtaccagttcaagagccagatcatgagcctgagccacagcccccaggaggactgggtgctgctgggcatggccaacggccagcagtggctgcagagcaccagcggcagccagagacacatggtgggccagaaggacagcgtgatcctgagcgtgaagttcagccccttcggccagtggtgggccagcgtgggcatggacgacttcctgggcgtgtacagcatgcccgccggcaccaaggtgttcgaggtgcccgagatgagccccgtgacctgctgcgacgtgagcagcaacaacagactggtggtgaccggcagcggcgagcacgccagcgtgtaccagatcacctactag

SEQ ID NO: 102890 - DNA, 1716 bp, synthetic construct
  misc_feature 1..1716: note = Description of Artificial Sequence: Synthetic coding sequence
  source 1..1716: mol_type = other DNA
atgaaccagctgagaggcaagaagagctgccacaccggcctgggcagaagcgccggctggaacatccccatcggcctgctgtactgcgacctgcccgagcccagaaagcccctggagaaggccgtggccaacttcttcagcggcagctgcgccccctgcgccgacggcaccgacttcccccagctgtgccagctgtgccccggctgcggctgcagcaccctgaaccagtacttcggctacagcggcgccttcaagtgcctgaaggacggcgccggcgacgtggccttcgtgaagcacagcaccatcttcgagaacctggccaacaaggccgacagagaccagtacgagctgctgtgcctggacaacaccagaaagcccgtggacgagtacaaggactgccacctggcccaggtgcccagccacaccgtggtggccagaagcatgggcggcaaggaggacctgatctgggagctgctgaaccaggcccaggagcacttcggcaaggacaagagcaaggagttccagctgttcagcagcccccacggcaaggacctgctgttcaaggacagcgcccacggcttcctgaaggtgccccccagaatggacgccaagatgtacctgggctacgagtacgtgaccgccatcagaaacctgagagagggcacctgccccgaggcccccaccgacgagtgcaagcccgtgaagtggtgcgccctgagccaccacgagagactgaagtgcgacgagtggagcgtgaacagcgtgggcaagatcgagtgcgtgagcgccgagaccaccgaggactgcatcgccaagatcatgaacggcgaggccgacgccatgagcctggacggcggcttcgtgtacatcgccggcaagtgcggcctggtgcccgtgctggccgagaactacaacaagagcgacaactgcgaggacacccccgaggccggctacttcgccatcgccgtggtgaagaagagcgccagcgacctgacctgggacaacctgaagggcaagaagagctgccacaccgccgtgggcagaaccgccggctggaacatccccatgggcctgctgtacaacaagatcaaccactgcagattcgacgagttcttcagcgagggctgcgcccccggcagcaagaaggacagcagcctgtgcaagctgtgcatgggcagcggcctgaacctgtgcgagcccaacaacaaggagggctactacggctacaccggcgccttcagatgcctggtggagaagggcgacgtggccttcgtgaagcaccagaccgtgccccagaacaccggcggcaagaaccccgacccctgggccaagaacctgaacgagaaggactacgagctgctgtgcctggacggcaccagaaagcccgtggaggagtacgccaactgccacctggccagagcccccaaccacgccgtggtgaccagaaaggacaaggaggcctgcgtgcacaagatcctgagacagcagcagcacctgttcggcagcaacgtgaccgactgcagcggcaacttctgcctgttcagaagcgagaccaaggacctgctgttcagagacgacaccgtgtgcctggccaagctgcacgacagaaacacctacgagaagtacctgggcgaggagtacgtgaaggccgtgggcaacctgagaaagtgcagcaccagcagcctgctggaggcctgcaccttcagaagaccctag

SEQ ID NO: 102891 - DNA, 2097 bp, synthetic construct
  misc_feature 1..2097: note = Description of Artificial Sequence: Synthetic coding sequence
  source 1..2097: mol_type = other DNA
atgagactggccgtgggcgccctgctggtgtgcgccgtgctgggcctgtgcctggccgtgcccgacaagaccgtgagatggtgcgccgtgagcgagcacgaggccaccaagtgccagagcttcagagaccacatgaagagcgtgatccccagcgacggccccagcgtggcctgcgtgaagaaggccagctacctggactgcatcagagccatcgccgccaacgaggccgacgccgtgaccctggacgccggcctggtgtacgacgcctacctggcccccaacaacctgaagcccgtggtggccgagttctacggcagcaaggaggacccccagaccttctactacgccgtggccgtggtgaagaaggacagcggcttccagatgaaccagctgagaggcaagaagagctgccacaccggcctgggcagaagcgccggctggaacatccccatcggcctgctgtactgcgacctgcccgagcccagaaagcccctggagaaggccgtggccaacttcttcagcggcagctgcgccccctgcgccgacggcaccgacttcccccagctgtgccagctgtgccccggctgcggctgcagcaccctgaaccagtacttcggctacagcggcgccttcaagtgcctgaaggacggcgccggcgacgtggccttcgtgaagcacagcaccatcttcgagaacctggccaacaaggccgacagagaccagtacgagctgctgtgcctggacaacaccagaaagcccgtggacgagtacaaggactgccacctggcccaggtgcccagccacaccgtggtggccagaagcatgggcggcaaggaggacctgatctgggagctgctgaaccaggcccaggagcacttcggcaaggacaagagcaaggagttccagctgttcagcagcccccacggcaaggacctgctgttcaaggacagcgcccacggcttcctgaaggtgccccccagaatggacgccaagatgtacctgggctacgagtacgtgaccgccatcagaaacctgagagagggcacctgccccgaggcccccaccgacgagtgcaagcccgtgaagtggtgcgccctgagccaccacgagagactgaagtgcgacgagtggagcgtgaacagcgtgggcaagatcgagtgcgtgagcgccgagaccaccgaggactgcatcgccaagatcatgaacggcgaggccgacgccatgagcctggacggcggcttcgtgtacatcgccggcaagtgcggcctggtgcccgtgctggccgagaactacaacaagagcgacaactgcgaggacacccccgaggccggctacttcgccatcgccgtggtgaagaagagcgccagcgacctgacctgggacaacctgaagggcaagaagagctgccacaccgccgtgggcagaaccgccggctggaacatccccatgggcctgctgtacaacaagatcaaccactgcagattcgacgagttcttcagcgagggctgcgcccccggcagcaagaaggacagcagcctgtgcaagctgtgcatgggcagcggcctgaacctgtgcgagcccaacaacaaggagggctactacggctacaccggcgccttcagatgcctggtggagaagggcgacgtggccttcgtgaagcaccagaccgtgccccagaacaccggcggcaagaaccccgacccctgggccaagaacctgaacgagaaggactacgagctgctgtgcctggacggcaccagaaagcccgtggaggagtacgccaactgccacctggccagagcccccaaccacgccgtggtgaccagaaaggacaaggaggcctgcgtgcacaagatcctgagacagcagcagcacctgttcggcagcaacgtgaccgactgcagcggcaacttctgcctgttcagaagcgagaccaaggacctgctgttcagagacgacaccgtgtgcctggccaagctgcacgacagaaacacctacgagaagtacctgggcgaggagtacgtgaaggccgtgggcaacctgagaaagtgcagcaccagcagcctgctggaggcctgcaccttcagaagaccctag

SEQ ID NO: 102892 - DNA, 2283 bp, synthetic construct
  misc_feature 1..2283: note = Description of Artificial Sequence: Synthetic coding sequence
  source 1..2283: mol_type = other DNA
atgatggaccaggccagaagcgccttcagcaacctgttcggcggcgagcccctgagctacaccagattcagcctggccagacaggtggacggcgacaacagccacgtggagatgaagctggccgtggacgaggaggagaacgccgacaacaacaccaaggccaacgtgaccaagcccaagagatgcagcggcagcatctgctacggcaccatcgccgtgatcgtgttcttcctgatcggcttcatgatcggctacctgggctactgcaagggcgtggagcccaagaccgagtgcgagagactggccggcaccgagagccccgtgagagaggagcccggcgaggacttccccgccgccagaagactgtactgggacgacctgaagagaaagctgagcgagaagctggacagcaccgacttcaccggcaccatcaagctgctgaacgagaacagctacgtgcccagagaggccggcagccagaaggacgagaacctggccctgtacgtggagaaccagttcagagagttcaagctgagcaaggtgtggagagaccagcacttcgtgaagatccaggtgaaggacagcgcccagaacagcgtgatcatcgtggacaagaacggcagactggtgtacctggtggagaaccccggcggctacgtggcctacagcaaggccgccaccgtgaccggcaagctggtgcacgccaacttcggcaccaagaaggacttcgaggacctgtacacccccgtgaacggcagcatcgtgatcgtgagagccggcaagatcaccttcgccgagaaggtggccaacgccgagagcctgaacgccatcggcgtgctgatctacatggaccagaccaagttccccatcgtgaacgccgagctgagcttcttcggccacgcccacctgggcaccggcgacccctacacccccggcttccccagcttcaaccacacccagttcccccccagcagaagcagcggcctgcccaacatccccgtgcagaccatcagcagagccgccgccgagaagctgttcggcaacatggagggcgactgccccagcgactggaagaccgacagcacctgcagaatggtgaccagcgagagcaagaacgtgaagctgaccgtgagcaacgtgctgaaggagatcaagatcctgaacatcttcggcgtgatcaagggcttcgtggagcccgaccactacgtggtggtgggcgcccagagagacgcctggggccccggcgccgccaagagcggcgtgggcaccgccctgctgctgaagctggcccagatgttcagcgacatggtgctgaaggacggcttccagcccagcagaagcatcatcttcgccagctggagcgccggcgacttcggcagcgtgggcgccaccgagtggctggagggctacctgagcagcctgcacctgaaggccttcacctacatcaacctggacaaggccgtgctgggcaccagcaacttcaaggtgagcgccagccccctgctgtacaccctgatcgagaagaccatgcagaacgtgaagcaccccgtgaccggccagttcctgtaccaggacagcaactgggccagcaaggtggagaagctgaccctggacaacgccgccttccccttcctggcctacagcggcatccccgccgtgagcttctgcttctgcgaggacaccgactacccctacctgggcaccaccatggacacctacaaggagctgatcgagagaatccccgagctgaacaaggtggccagagccgccgccgaggtggccggccagttcgtgatcaagctgacccacgacgtggagctgaacctggactacgagagatacaacagccagctgctgagcttcgtgagagacctgaaccagtacagagccgacatcaaggagatgggcctgagcctgcagtggctgtacagcgccagaggcgacttcttcagagccaccagcagactgaccaccgacttcggcaacgccgagaagaccgacagattcgtgatgaagaagctgaacgacagagtgatgagagtggagtaccacttcctgagcccctacgtgagccccaaggagagccccttcagacacgtgttctggggcagcggcagccacaccctgcccgccctgctggagaacctgaagctgagaaagcagaacaacggcgccttcaacgagaccctgttcagaaaccagctggccctggccacctggaccatccagggcgccgccaacgccctgagcggcgacgtgtgggacatcgacaacgagttctag

SEQ ID NO: 102893 - DNA, 2283 bp, synthetic construct; identical to SEQ ID NO: 102892
  misc_feature 1..2283: note = Description of Artificial Sequence: Synthetic coding sequence
  source 1..2283: mol_type = other DNA

SEQ ID NO: 102894 - DNA, 1437 bp, synthetic construct
  misc_feature 1..1437: note = Description of Artificial Sequence: Synthetic coding sequence
  source 1..1437: mol_type = other DNA
atggaccagaccaagttccccatcgtgaacgccgagctgagcttcttcggccacgcccacctgggcaccggcgacccctacacccccggcttccccagcttcaaccacacccagttcccccccagcagaagcagcggcctgcccaacatccccgtgcagaccatcagcagagccgccgccgagaagctgttcggcaacatggagggcgactgccccagcgactggaagaccgacagcacctgcagaatggtgaccagcgagagcaagaacgtgaagctgaccgtgagcaacgtgctgaaggagatcaagatcctgaacatcttcggcgtgatcaagggcttcgtggagcccgaccactacgtggtggtgggcgcccagagagacgcctggggccccggcgccgccaagagcggcgtgggcaccgccctgctgctgaagctggcccagatgttcagcgacatggtgctgaaggacggcttccagcccagcagaagcatcatcttcgccagctggagcgccggcgacttcggcagcgtgggcgccaccgagtggctggagggctacctgagcagcctgcacctgaaggccttcacctacatcaacctggacaaggccgtgctgggcaccagcaacttcaaggtgagcgccagccccctgctgtacaccctgatcgagaagaccatgcagaacgtgaagcaccccgtgaccggccagttcctgtaccaggacagcaactgggccagcaaggtggagaagctgaccctggacaacgccgccttccccttcctggcctacagcggcatccccgccgtgagcttctgcttctgcgaggacaccgactacccctacctgggcaccaccatggacacctacaaggagctgatcgagagaatccccgagctgaacaaggtggccagagccgccgccgaggtggccggccagttcgtgatcaagctgacccacgacgtggagctgaacctggactacgagagatacaacagccagctgctgagcttcgtgagagacctgaaccagtacagagccgacatcaaggagatgggcctgagcctgcagtggctgtacagcgccagaggcgacttcttcagagccaccagcagactgaccaccgacttcggcaacgccgagaagaccgacagattcgtgatgaagaagctgaacgacagagtgatgagagtggagtaccacttcctgagcccctacgtgagccccaaggagagccccttcagacacgtgttctggggcagcggcagccacaccctgcccgccctgctggagaacctgaagctgagaaagcagaacaacggcgccttcaacgagaccctgttcagaaaccagctggccctggccacctggaccatccagggcgccgccaacgccctgagcggcgacgtgtgggacatcgacaacgagttctag

SEQ ID NO: 102895 - DNA, 42 bp, synthetic construct
  misc_feature 1..42: note = Description of Artificial Sequence: Synthetic coding sequence
  source 1..42: mol_type = other DNA
atggaccaggccagaagcgccttcagcaacctggacctgtag

SEQ ID NO: 102896 - DNA, 11493 bp, synthetic construct
  misc_feature 1..11493: note = Description of Artificial Sequence: Synthetic coding sequence
  source 1..11493: mol_type = other DNA
atggccttcgtggccacccagggcgccaccgtggtggaccagaccaccctgatgaagaagtacctgcagttcgtggccgccctgaccgacgtgaacacccccgacgagaccaagctgaagatgatgcaggaggtgagcgagaacttcgagaacgtgaccagcagcccccagtacagcaccttcctggagcacatcatccccagattcctgaccttcctgcaggacggcgaggtgcagttcctgcaggagaagcccgcccagcagctgagaaagctggtgctggagatcatccacagaatccccaccaacgagcacctgagaccccacaccaagaacgtgctgagcgtgatgttcagattcctggagaccgagaacgaggagaacgtgctgatctgcctgagaatcatcatcgagctgcacaagcagttcagaccccccatcacccaggagatccaccacttcctggacttcgtgaagcagatctacaaggagctgcccaaggtggtgaacagatacttcgagaacccccaggtgatccccgagaacaccgtgcccccccccgagatggtgggcatgatcaccaccatcgccgtgaaggtgaaccccgagagagaggacagcgagaccagaacccacagcatcatccccagaggcagcctgagcctgaaggtgctggccgagctgcccatcatcgtggtgctgatgtaccagctgtacaagctgaacatccacaacgtggtggccgagttcgtgcccctgatcatgaacaccatcgccatccaggtgagcgcccaggccagacagcacaagctgtacaacaaggagctgtacgccgacttcatcgccgcccagatcaagaccctgagcttcctggcctacatcatcagaatctaccaggagctggtgaccaagtacagccagcagatggtgaagggcatgctgcagctgctgagcaactgccccgccgagaccgcccacctgagaaaggagctgctgatcgccgccaagcacatcctgaccaccgagctgagaaaccagttcatcccctgcatggacaagctgttcgacgagagcatcctgatcggcagcggctacaccgccagagagaccctgagacccctggcctacagcaccctggccgacctggtgcaccacgtgagacagcacctgcccctgagcgacctgagcctggccgtgcagctgttcgccaagaacatcgacgacgagagcctgcccagcagcatccagaccatgagctgcaagctgctgctgaacctggtggactgcatcagaagcaagagcgagcaggagagcggcaacggcagagacgtgctgatgagaatgctggaggtgttcgtgctgaagttccacaccatcgccagataccagctgagcgccatcttcaagaagtgcaagccccagagcgagctgggcgccgtggaggccgccctgcccggcgtgcccaccgcccccgccgcccccggccccgcccccagccccgcccccgtgcccgccccccccccccccccccccccccccccccccgccacccccgtgacccccgcccccgtgccccccttcgagaagcagggcgagaaggacaaggaggacaagcagaccttccaggtgaccgactgcagaagcctggtgaagaccctggtgtgcggcgtgaagaccatcacctggggcatcaccagctgcaaggcccccggcgaggcccagttcatccccaacaagcagctgcagcccaaggagacccagatctacatcaagctggtgaagtacgccatgcaggccctggacatctaccaggtgcagatcgccggcaacggccagacctacatcagagtggccaactgccagaccgtgagaatgaaggaggagaaggaggtgctggagcacttcgccggcgtgttcaccatgatgaaccccctgaccttcaaggagatcttccagaccaccgtgccctacatggtggagagaatcagcaagaactacgccctgcagatcgtggccaacagcttcctggccaaccccaccaccagcgccctgttcgccaccatcctggtggagtacctgctggacagactgcccgagatgggcagcaacgtggagctgagcaacctgtacctgaagctgttcaagctggtgttcggcagcgtgagcctgttcgccgccgagaacgagcagatgctgaagccccacctgcacaagatcgtgaacagcagcatggagctggcccagaccgccaaggagccctacaactacttcctgctgctgagagccctgttcagaagcatcggcggcggcagccacgacctgctgtaccaggagttcctgcccctgctgcccaacctgctgcagggcctgaacatgctgcagagcggcctgcacaagcagcacatgaaggacctgttcgtggagctgtgcctgaccgtgcccgtgagactgagcagcctgctgccctacctgcccatgctgatggaccccctggtgagcgccctgaacggcagccagaccctggtgagccagggcctgagaaccctggagctgtgcgtggacaacctgcagcccgacttcctgtacgaccacatccagcccgtgagagccgagctgatgcaggccctgtggagaaccctgagaaaccccgccgacagcatcagccacgtggcctacagagtgctgggcaagttcggcggcagcaacagaaagatgctgaaggagagccagaagctgcactacgtggtgaccgaggtgcagggccccagcatcaccgtggagttcagcgactgcaaggccagcctgcagctgcccatggagaaggccatcgagaccgccctggactgcctgaagagcgccaacaccgagccctactacagaagacaggcctgggaggtgatcaagtgcttcctggtggccatgatgagcctggaggacaacaagcacgccctgtaccagctgctggcccaccccaacttcaccgagaagaccatccccaacgtgatcatcagccacagatacaaggcccaggacacccccgccagaaagaccttcgagcaggccctgaccggcgccttcatgagcgccgtgatcaaggacctgagacccagcgccctgcccttcgtggccagcctgatcagacactacaccatggtggccgtggcccagcagtgcggccccttcctgctgccctgctaccaggtgggcagccagcccagcaccgccatgttccacagcgaggagaacggcagcaagggcatggaccccctggtgctgatcgacgccatcgccatctgcatggcctacgaggagaaggagctgtgcaagatcggcgaggtggccctggccgtgatcttcgacgtggccagcatcatcctgggcagcaaggagagagcctgccagctgcccctgttcagctacatcgtggagagactgtgcgcctgctgctacgagcaggcctggtacgccaagctgggcggcgtggtgagcatcaagttcctgatggagagactgcccctgacctgggtgctgcagaaccagcagaccttcctgaaggccctgctgttcgtgatgatggacctgaccggcgaggtgagcaacggcgccgtggccatggccaagaccaccctggagcagctgctgatgagatgcgccacccccctgaaggacgaggagagagccgaggagatcgtggccgcccaggagaagagcttccaccacgtgacccacgacctggtgagagaggtgaccagccccaacagcaccgtgagaaagcaggccatgcacagcctgcaggtgctggcccaggtgaccggcaagagcgtgaccgtgatcatggagccccacaaggaggtgctgcaggacatggtgccccccaagaagcacctgctgagacaccagcccgccaacgcccagatcggcctgatggagggcaacaccttctgcaccaccctgcagcccagactgttcaccatggacctgaacgtggtggagcacaaggtgttctacaccgagctgctgaacctgtgcgaggccgaggacagcgccctgaccaagctgccctgctacaagagcctgcccagcctggtgcccctgagaatcgccgccctgaacgccctggccgcctgcaactacctgccccagagcagagagaagatcatcgccgccctgttcaaggccctgaacagcaccaacagcgagctgcaggaggccggcgaggcctgcatgagaaagttcctggagggcgccaccatcgaggtggaccagatccacacccacatgagacccctgctgatgatgctgggcgactacagaagcctgaccctgaacgtggtgaacagactgaccagcgtgaccagactgttccccaacagcttcaacgacaagttctgcgaccagatgatgcagcacctgagaaagtggatggaggtggtggtgatcacccacaagggcggccagagaagcgacggcaacgagatgaagatctgcagcgccatcatcaacctgttccacctgatccccgccgccccccagaccctggtgaagcccctgctggaggtggtgatgaagaccgagagagccatgctgatcgaggccggcagccccttcagagagcccctgatcaagttcctgaccagacaccccagccagaccgtggagctgttcatgatggaggccaccctgaacgacccccagtggagcagaatgttcatgagcttcctgaagcacaaggacgccagacccctgagagacgtgctggccgccaaccccaacagattcatcaccctgctgctgcccggcggcgcccagaccgccgtgagacccggcagccccagcaccagcaccatgagactggacctgcagttccaggccatcaagatcatcagcatcatcgtgaagaacgacgacagctggctggccagccagcacagcctggtgagccagctgagaagagtgtgggtgagcgagaacttccaggagagacacagaaaggagaacatggccgccaccaactggaaggagcccaagctgctggcctactgcctgctgaactactgcaagagaaactacggcgacatcgagctgctgttccagctgctgagagccttcaccggcagattcctgtgcaacatgaccttcctgaaggagtacatggaggaggagatccccaagaactacagcatcgcccagaagagagccctgttcttcagattcgtggacttcaacgaccccaacttcggcgacgagctgaaggccaaggtgctgcagcacatcctgaaccccgccttcctgtacagcttcgagaagggcgagggcgagcagctgctgggcccccccaaccccgagggcgacaaccccgagagcatcaccagcgtgttcatcaccaaggtgctggaccccgagaagcaggccgacatgctggacagcctgagaatctacctgctgcagtacgccaccctgctggtggagcacgccccccaccacatccacgacaacaacaagaacagaaacagcaagctgagaagactgatgaccttcgcctggccctgcctgctgagcaaggcctgcgtggaccccgcctgcaagtacagcggccacctgctgctggcccacatcatcgccaagttcgccatccacaagaagatcgtgctgcaggtgttccacagcctgctgaaggcccacgccatggaggccagagccatcgtgagacaggccatggccatcctgacccccgccgtgcccgccagaatggaggacggccaccagatgctgacccactggaccagaaagatcatcgtggaggagggccacaccgtgccccagctggtgcacatcctgcacctgatcgtgcagcacttcaaggtgtactaccccgtgagacaccacctggtgcagcacatggtgagcgccatgcagagactgggcttcacccccagcgtgaccatcgagcagagaagactggccgtggacctgagcgaggtggtgatcaagtgggagctgcagagaatcaaggaccagcagcccgacagcgacatggaccccaacagcagcggcgagggcgtgaacagcgtgagcagcagcatcaagagaggcctgagcgtggacagcgcccaggaggtgaagagattcagaaccgccaccggcgccatcagcgccgtgttcggcagaagccagagcctgcccggcgccgacagcctgctggccaagcccatcgacaagcagcacaccgacaccgtggtgaacttcctgatcagagtggcctgccaggtgaacgacaacaccaacaccgccggcagccccggcgaggtgctgagcagaagatgcgtgaacctgctgaagaccgccctgagacccgacatgtggcccaagagcgagctgaagctgcagtggttcgacaagctgctgatgaccgtggagcagcccaaccaggtgaactacggcaacatctgcaccggcctggaggtgctgagcttcctgctgaccgtgctgcagagccccgccatcctgagcagcttcaagcccctgcagagaggcatcgccgcctgcatgacctgcggcaacaccaaggtgctgagagccgtgcacagcctgctgagcagactgatgagcatcttccccaccgagcccagcaccagcagcgtggccagcaagtacgaggagctggagtgcctgtacgccgccgtgggcaaggtgatctacgagggcctgaccaactacgagaaggccaccaacgccaaccccagccagctgttcggcaccctgatgatcctgaagagcgcctgcagcaacaaccccagctacatcgacagactgatcagcgtgttcatgagaagcctgcagaagatggtgagagagcacctgaacccccaggccgccagcggcagcaccgaggccaccagcggcaccagcgagctggtgatgctgagcctggagctggtgaagaccagactggccgtgatgagcatggagatgagaaagaacttcatccaggccatcctgaccagcctgatcgagaagagccccgacgccaagatcctgagagccgtggtgaagatcgtggaggagtgggtgaagaacaacagccccatggccgccaaccagacccccaccctgagagagaagagcatcctgctggtgaagatgatgacctacatcgagaagagattccccgaggacctggagctgaacgcccagttcctggacctggtgaactacgtgtacagagacgagaccctgagcggcagcgagctgaccgccaagctggagcccgccttcctgagcggcctgagatgcgcccagcccctgatcagagccaagttcttcgaggtgttcgacaacagcatgaagagaagagtgtacgagagactgctgtacgtgacctgcagccagaactgggaggccatgggcaaccacttctggatcaagcagtgcatcgagctgctgctggccgtgtgcgagaagagcacccccatcggcaccagctgccagggcgccatgctgcccagcatcaccaacgtgatcaacctggccgacagccacgacagagccgccttcgccatggtgacccacgtgaagcaggagcccagagagagagagaacagcgagagcaaggaggaggacgtggagatcgacatcgagctggcccccggcgaccagaccagcacccccaagaccaaggagctgagcgagaaggacatcggcaaccagctgcacatgctgaccaacagacacgacaagttcctggacaccctgagagaggtgaagaccggcgccctgctgagcgccttcgtgcagctgtgccacatcagcaccaccctggccgagaagacctgggtgcagctgttccccagactgtggaagatcctgagcgacagacagcagcacgccctggccggcgagatcagccccttcctgtgcagcggcagccaccaggtgcagagagactgccagcccagcgccctgaactgcttcgtggaggccatgagccagtgcgtgccccccatccccatcagaccctgcgtgctgaagtacctgggcaagacccacaacctgtggttcagaagcaccctgatgctggagcaccaggccttcgagaagggcctgagcctgcagatcaagcccaagcagaccaccgagttctacgagcaggagagcatcacccccccccagcaggagatcctggacagcctggccgagctgtacagcctgctgcaggaggaggacatgtgggccggcctgtggcagaagagatgcaagtacagcgagaccgccaccgccatcgcctacgagcagcacggcttcttcgagcaggcccaggagagctacgagaaggccatggacaaggccaagaaggagcacgagagaagcaacgccagccccgccatcttccccgagtaccagctgtgggaggaccactggatcagatgcagcaaggagctgaaccagtgggaggccctgaccgagtacggccagagcaagggccacatcaacccctacctggtgctggagtgcgcctggagagtgagcaactggaccgccatgaaggaggccctggtgcaggtggaggtgagctgccccaaggagatggcctggaaggtgaacatgtacagaggctacctggccatctgccaccccgaggagcagcagctgagcttcatcgagagactggtggagatggccagcagcctggccatcagagagtggagaagactgccccacgtggtgagccacgtgcacacccccctgctgcaggccgcccagcagatcatcgagctgcaggaggccgcccagatcaacgccggcctgcagcccaccaacctgggcagaaacaacagcctgcacgacatgaagaccgtggtgaagacctggagaaacagactgcccatcgtgagcgacgacctgagccactggagcagcatcttcatgtggagacagcaccactaccaggccatcgtgaccgcctacgagaacagcagccagcacgaccccagcagcaacaacgccatgctgggcgtgcacgccagcgccagcgccatcatccagtacggcaagatcgccagaaagcagggcctggtgaacgtggccctggacatcctgagcagaatccacaccatccccaccgtgcccatcgtggactgcttccagaagatcagacagcaggtgaagtgctacctgcagctggccggcgtgatgggcaagaacgagtgcatgcagggcctggaggtgatcgagagcaccaacctgaagtacttcaccaaggagatgaccgccgagttctacgccctgaagggcatgttcctggcccagatcaacaagagcgaggaggccaacaaggccttcagcgccgccgtgcagatgcacgacgtgctggtgaaggcctgggccatgtggggcgactacctggagaacatcttcgtgaaggagagacagctgcacctgggcgtgagcgccatcacctgctacctgcacgcctgcagacaccagaacgagagcaagagcagaaagtacctggccaaggtgctgtggctgctgagcttcgacgacgacaagaacaccctggccgacgccgtggacaagtactgcatcggcgtgccccccatccagtggctggcctggatcccccagctgctgacctgcctggtgggcagcgagggcaagctgctgctgaacctgatcagccaggtgggcagagtgtacccccaggccgtgtacttccccatcagaaccctgtacctgaccctgaagatcgagcagagagagagatacaagagcgaccccggccccatcagagccaccgcccccatgtggagatgcagcagaatcatgcacatgcagagagagctgcaccccaccctgctgagcagcctggagggcatcgtggaccagatggtgtggttcagagagaactggcacgaggaggtgctgagacagctgcagcagggcctggccaagtgctacagcgtggccttcgagaagagcggcgccgtgagcgacgccaagatcaccccccacaccctgaacttcgtgaagaagctggtgagcaccttcggcgtgggcctggagaacgtgagcaacgtgagcaccatgttcagcagcgccgccagcgagagcctggccagaagagcccaggccaccgcccaggaccccgtgttccagaagctgaagggccagttcaccaccgacttcgacttcagcgtgcccggcagcatgaagctgcacaacctgatcagcaagctgaagaagtggatcaagatcctggaggccaagaccaagcagctgcccaagttcttcctgatcgaggagaagtgcagattcctgagcaacttcagcgcccagaccgccgaggtggagatccccggcgagttcctgatgcccaagcccacccactactacatcaagatcgccagattcatgcccagagtggagatcgtgcagaagcacaacaccgccgccagaagactgtacatcagaggccacaacggcaagatctacccctacctggtgatgaacgacgcctgcctgaccgagagcagaagagaggagagagtgctgcagctgctgagactgctgaacccctgcctggagaagagaaaggagaccaccaagagacacctgttcttcaccgtgcccagagtggtggccgtgagcccccagatgagactggtggaggacaaccccagcagcctgagcctggtggagatctacaagcagagatgcgccaagaagggcatcgagcacgacaaccccatcagcagatactacgacagactggccaccgtgcaggccagaggcacccaggccagccaccaggtgctgagagacatcctgaaggaggtgcagagcaacatggtgcccagaagcatgctgaaggagtgggccctgcacaccttccccaacgccaccgactactggaccttcagaaagatgttcaccatccagctggccctgatcggcttcgccgagttcgtgctgcacctgaacagactgaaccccgagatgctgcagatcgcccaggacaccggcaagctgaacgtggcctacttcagattcgacatcaacgacgccaccggcgacctggacgccaacagacccgtgcccttcagactgacccccaacatcagcgagttcctgaccaccatcggcgtgagcggccccctgaccgccagcatgatcgccgtggccagatgcttcgcccagcccaacttcaaggtggacggcatcctgaagaccgtgctgagagacgagatcatcgcctggcacaagaagacccaggaggacaccagcagccccctgagcgccgccggccagcccgagaacatggacagccagcagctggtgagcctggtgcagaaggccgtgaccgccatcatgaccagactgcacaacctggcccagttcgagggcggcgagagcaaggtgaacaccctggtggccgccgccaacagcctggacaacctgtgcagaatggaccccgcctggcacccctggctgtag

SEQ ID NO: 102897 - DNA, 11580 bp, synthetic construct
  misc_feature 1..11580: note = Description of Artificial Sequence: Synthetic coding sequence
  source 1..11580: mol_type = other DNA
atggccttcgtggccacccagggcgccaccgtggtggaccagaccaccctgatgaagaagtacctgcagttcgtggccgccctgaccgacgtgaacacccccgacgagaccaagctgaagatgatgcaggaggtgagcgagaacttcgagaacgtgaccagcagcccccagtacagcaccttcctggagcacatcatccccagattcctgaccttcctgcaggacggcgaggtgcagttcctgcaggagaagcccgcccagcagctgagaaagctggtgctggagatcatccacagaatccccaccaacgagcacctgagaccccacaccaagaacgtgctgagcgtgatgttcagattcctggagaccgagaacgaggagaacgtgctgatctgcctgagaatcatcatcgagctgcacaagcagttcagaccccccatcacccaggagatccaccacttcctggacttcgtgaagcagatctacaaggagctgcccaaggtggtgaacagatacttcgagaacccccaggtgatccccgagaacaccgtgcccccccccgagatggtgggcatgatcaccaccatcgccgtgaaggtgaaccccgagagagaggacagcgagaccagaacccacagcatcatccccagaggcagcctgagcctgaaggtgctggccgagctgcccatcatcgtggtgctgatgtaccagctgtacaagctgaacatccacaacgtggtggccgagttcgtgcccctgatcatgaacaccatcgccatccaggtgagcgcccaggccagacagcacaagctgtacaacaaggagctgtacgccgacttcatcgccgcccagatcaagaccctgagcttcctggcctacatcatcagaatctaccaggagctggtgaccaagtacagccagcagatggtgaagggcatgctgcagctgctgagcaactgccccgccgagaccgcccacctgagaaaggagctgctgatcgccgccaagcacatcctgaccaccgagctgagaaaccagttcatcccctgcatggacaagctgttcgacgagagcatcctgatcggcagcggctacaccgccagagagaccctgagacccctggcctacagcaccctggccgacctggtgcaccacgtgagacagcacctgcccctgagcgacctgagcctggccgtgcagctgttcgccaagaacatcgacgacgagagcctgcccagcagcatccagaccatgagctgcaagctgctgctgaacctggtggactgcatcagaagcaagagcgagcaggagagcggcaacggcagagacgtgctgatgagaatgctggaggtgttcgtgctgaagttccacaccatcgccagataccagctgagcgccatcttcaagaagtgcaagccccagagcgagctgggcgccgtggaggccgccctgcccggcgtgcccaccgcccccgccgcccccggccccgcccccagccccgcccccgtgcccgccccccccccccccccccccccccccccccccgccacccccgtgacccccgcccccgtgccccccttcgagaagcagggcgagaaggacaaggaggacaagcagaccttccaggtgaccgactgcagaagcctggtgaagaccctggtgtgcggcgtgaagaccatcacctggggcatcaccagctgcaaggcccccggcgaggcccagttcatccccaacaagcagctgcagcccaaggagacccagatctacatcaagctggtgaagtacgccatgcaggccctggacatctaccaggtgcagatcgccggcaacggccagacctacatcagagtggccaactgccagaccgtgagaatgaaggaggagaaggaggtgctggagcacttcgccggcgtgttcaccatgatgaaccccctgaccttcaaggagatcttccagaccaccgtgccctacatggtggagagaatcagcaagaactacgccctgcagatcgtggccaacagcttcctggccaaccccaccaccagcgccctgttcgccaccatcctggtggagtacctgctggacagactgcccgagatgggcagcaacgtggagctgagcaacctgtacctgaagctgttcaagctggtgttcggcagcgtgagcctgttcgccgccgagaacgagcagatgctgaagccccacctgcacaagatcgtgaacagcagcatggagctggcccagaccgccaaggagccctacaactacttcctgctgctgagagccctgttcagaagcatcggcggcggcagccacgacctgctgtaccaggagttcctgcccctgctgcccaacctgctgcagggcctgaacatgctgcagagcggcctgcacaagcagcacatgaaggacctgttcgtggagctgtgcctgaccgtgcccgtgagactgagcagcctgctgccctacctgcccatgctgatggaccccctggtgagcgccctgaacggcagccagaccctggtgagccagggcctgagaaccctggagctgtgcgtggacaacctgcagcccgacttcctgtacgaccacatccagcccgtgagagccgagctgatgcaggccctgtggagaaccctgagaaaccccgccgacagcatcagccacgtggcctacagagtgctgggcaagttcggcggcagcaacagaaagatgctgaaggagagccagaagctgcactacgtggtgaccgaggtgcagggccccagcatcaccgtggagttcagcgactgcaaggccagcctgcagctgcccatggagaaggccatcgagaccgccctggactgcctgaagagcgccaacaccgagccctactacagaagacaggcctgggaggtgatcaagtgcttcctggtggccatgatgagcctggaggacaacaagcacgccctgtaccagctgctggcccaccccaacttcaccgagaagaccatccccaacgtgatcatcagccacagatacaaggcccaggacacccccgccagaaagaccttcgagcaggccctgaccggcgccttcatgagcgccgtgatcaaggacctgagacccagcgccctgcccttcgtggccagcctgatcagacactacaccatggtggccgtggcccagcagtgcggccccttcctgctgccctgctaccaggtgggcagccagcccagcaccgccatgttccacagcgaggagaacggcagcaagggcatggaccccctggtgctgatcgacgccatcgccatctgcatggcctacgaggagaaggagctgtgcaagatcggcgaggtggccctggccgtgatcttcgacgtggccagcatcatcctgggcagcaaggagagagcctgccagctgcccctgttcagctacatcgtggagagactgtgcgcctgctgctacgagcaggcctggtacgccaagctgggcggcgtggtgagcatcaagttcctgatggagagactgcccctgacctgggtgctgcagaaccagcagaccttcctgaaggccctgctgttcgtgatgatggacctgaccggcgaggtgagcaacggcgccgtggccatggccaagaccaccctggagcagctgctgatgagatgcgccacccccctgaaggacgaggagagagccgaggagatcgtggccgcccaggagaagagcttccaccacgtgacccacgacctggtgagagaggtgaccagccccaacagcaccgtgagaaagcaggccatgcacagcctgcaggtgctggcccaggtgaccggcaagagcgtgaccgtgatcatggagccccacaaggaggtgctgcaggacatggtgccccccaagaagcacctgctgagacaccagcccgccaacgcccagatcggcctgatggagggcaacaccttctgcaccaccctgcagcccagactgttcaccatggacctgaacgtggtggagcacaaggtgttctacaccgagctgctgaacctgtgcgaggccgaggacagcgccctgaccaagctgccctgctacaagagcctgcccagcctggtgcccctgagaatcgccgccctgaacgccctggccgcctgcaactacctgccccagagcagagagaagatcatcgccgccctgttcaaggccctgaacagcaccaacagcgagctgcaggaggccggcgaggcctgcatgagaaagttcctggagggcgccaccatcgaggtggaccagatccacacccacatgagacccctgctgatgatgctgggcgactacagaagcctgaccctgaacgtggtgaacagactgaccagcgtgaccagactgttccccaacagcttcaacgacaagttctgcgaccagatgatgcagcacctgagaaagtggatggaggtggtggtgatcacccacaagggcggccagagaagcgacggcaacgagagcatcagcgagtgcggcagatgccccctgagccccttctgccagttcgaggagatgaagatctgcagcgccatcatcaacctgttccacctgatccccgccgccccccagaccctggtgaagcccctgctggaggtggtgatgaagaccgagagagccatgctgatcgaggccggcagccccttcagagagcccctgatcaagttcctgaccagacaccccagccagaccgtggagctgttcatgatggaggccaccctgaacgacccccagtggagcagaatgttcatgagcttcctgaagcacaaggacgccagacccctgagagacgtgctggccgccaaccccaacagattcatcaccctgctgctgcccggcggcgcccagaccgccgtgagacccggcagccccagcaccagcaccatgagactggacctgcagttccaggccatcaagatcatcagcatcatcgtgaagaacgacgacagctggctggccagccagcacagcctggtgagccagctgagaagagtgtgggtgagcgagaacttccaggagagacacagaaaggagaacatggccgccaccaactggaaggagcccaagctgctggcctactgcctgctgaactactgcaagagaaactacggcgacatcgagctgctgttccagctgctgagagccttcaccggcagattcctgtgcaacatgaccttcctgaaggagtacatggaggaggagatccccaagaactacagcatcgcccagaagagagccctgttcttcagattcgtggacttcaacgaccccaacttcggcgacgagctgaaggccaaggtgctgcagcacatcctgaaccccgccttcctgtacagcttcgagaagggcgagggcgagcagctgctgggcccccccaaccccgagggcgacaaccccgagagcatcaccagcgtgttcatcaccaaggtgctggaccccgagaagcaggccgacatgctggacagcctgagaatctacctgctgcagtacgccaccctgctggtggagcacgccccccaccacatccacgacaacaacaagaacagaaacagcaagctgagaagactgatgaccttcgcctggccctgcctgctgagcaaggcctgcgtggaccccgcctgcaagtacagcggccacctgctgctggcccacatcatcgccaagttcgccatccacaagaagatcgtgctgcaggtgttccacagcctgctgaaggcccacgccatggaggccagagccatcgtgagacaggccatggccatcctgacccccgccgtgcccgccagaatggaggacggccaccagatgctgacccactggaccagaaagatcatcgtggaggagggccacaccgtgccccagctggtgcacatcctgcacctgatcgtgcagcacttcaaggtgtactaccccgtgagacaccacctggtgcagcacatggtgagcgccatgcagagactgggcttcacccccagcgtgaccatcgagcagagaagactggccgtggacctgagcgaggtggtgatcaagtgggagctgcagagaatcaaggaccagcagcccgacagcgacatggaccccaacagcagcggcgagggcgtgaacagcgtgagcagcagcatcaagagaggcctgagcgtggacagcgcccaggaggtgaagagattcagaaccgccaccggcgccatcagcgccgtgttcggcagaagccagagcctgcccggcgccgacagcctgctggccaagcccatcgacaagcagcacaccgacaccgtggtgaacttcctgatcagagtggcctgccaggtgaacgacaacaccaacaccgccggcagccccggcgaggtgctgagcagaagatgcgtgaacctgctgaagaccgccctgagacccgacatgtggcccaagagcgagctgaagctgcagtggttcgacaagctgctgatgaccgtggagcagcccaaccaggtgaactacggcaacatctgcaccggcctggaggtgctgagcttcctgctgaccgtgctgcagagccccgccatcctgagcagcttcaagcccctgcagagaggcatcgccgcctgcatgacctgcggcaacaccaaggtgctgagagccgtgcacagcctgctgagcagactgatgagcatcttccccaccgagcccagcaccagcagcgtggccagcaagtacgaggagctggagtgcctgtacgccgccgtgggcaaggtgatctacgagggcctgaccaactacgagaaggccaccaacgccaaccccagccagctgttcggcaccctgatgatcctgaagagcgcctgcagcaacaaccccagctacatcgacagactgatcagcgtgttcatgagaagcctgcagaagatggtgagagagcacctgaacccccaggccgccagcggcagcaccgaggccaccagcggcaccagcgagctggtgatgctgagcctggagctggtgaagaccagactggccgtgatgagcatggagatgagaaagaacttcatccaggccatcctgaccagcctgatcgagaagagccccgacgccaagatcctgagagccgtggtgaagatcgtggaggagtgggtgaagaacaacagccccatggccgccaaccagacccccaccctgagagagaagagcatcctgctggtgaagatgatgacctacatcgagaagagattccccgaggacctggagctgaacgcccagttcctggacctggtgaactacgtgtacagagacgagaccctgagcggcagcgagctgaccgccaagctggagcccgccttcctgagcggcctgagatgcgcccagcccctgatcagagccaagttcttcgaggtgttcgacaacagcatgaagagaagagtgtacgagagactgctgtacgtgacctgcagccagaactgggaggccatgggcaaccacttctggatcaagcagtgcatcgagctgctgctggccgtgtgcgagaagagcacccccatcggcaccagctgccagggcgccatgctgcccagcatcaccaacgtgatcaacctggccgacagccacgacagagccgccttcgccatggtgacccacgtgaagcaggagcccagagagagagagaacagcgagagcaaggaggaggacgtggagatcgacatcgagctggcccccggcgaccagaccagcacccccaagaccaaggagctgagcgagaaggacatcggcaaccagctgcacatgctgaccaacagacacgacaagttcctggacaccctgagagaggtgaagaccggcgccctgctgagcgccttcgtgcagctgtgccacatcagcaccaccctggccgagaagacctgggtgcagctgttccccagactgtggaagatcctgagcgacagacagcagcacgccctggccggcgagatcagccccttcctgtgcagcggcagccaccaggtgcagagagactgccagcccagcgccctgaactgcttcgtggaggccatgagccagtgcgtgccccccatccccatcagaccctgcgtgctgaagtacctgggcaagacccacaacctgtggttcagaagcaccctgatgctggagcaccaggccttcgagaagggcctgagcctgcagatcaagcccaagcagaccaccgagttctacgagcaggagagcatcacccccccccagcaggagatcctggacagcctggccgagctgtacagcctgctgcaggaggaggacatgtgggccggcctgtggcagaagagatgcaagtacagcgagaccgccaccgccatcgcctacgagcagcacggcttcttcgagcaggcccaggagagctacgagaaggccatggacaaggccaagaaggagcacgagagaagcaacgccagccccgccatcttccccgagtaccagctgtgggaggaccactggatcagatgcagcaaggagctgaaccagtgggaggccctgaccgagtacggccagagcaagggccacatcaacccctacctggtgctggagtgcgcctggagagtgagcaactggaccgccatgaaggaggccctggtgcaggtggaggtgagctgccccaaggagatggcctggaaggtgaacatgtacagaggctacctggccatctgccaccccgaggagcagcagctgagcttcatcgagagactggtggagatggccagcagcctggccatcagagagtggagaagactgccccacgtggtgagccacgtgcacacccccctgctgcaggccgcccagcagatcatcgagctgcaggaggccgcccagatcaacgccggcctgcagcccaccaacctgggcagaaacaacagcctgcacgacatgaagaccgtggtgaagacctggagaaacagactgcccatcgtgagcgacgacctgagccactggagcagcatcttcatgtggagacagcaccactaccagggcaagcccacctggagcggcatgcacagcagcagcatcgtgaccgcctacgagaacagcagccagcacgaccccagcagcaacaacgccatgctgggcgtgcacgccagcgccagcgccatcatccagtacggcaagatcgccagaaagcagggcctggtgaacgtggccctggacatcctgagcagaatccacaccatccccaccgtgcccatcgtggactgcttccagaagatcagacagcaggtgaagtgctacctgcagctggccggcgtgatgggcaagaacgagtgcatgcagggcctggaggtgatcgagagcaccaacctgaagtacttcaccaaggagatgaccgccgagttctacgccctgaagggcatgttcctggcccagatcaacaagagcgaggaggccaacaaggccttcagcgccgccgtgcagatgcacgacgtgctggtgaaggcctgggccatgtggggcgactacctggagaacatcttcgtgaaggagagacagctgcacctgggcgtgagcgccatcacctgctacctgcacgcctgcagacaccagaacgagagcaagagcagaaagtacctggccaaggtgctgtggctgctgagcttcgacgacgacaagaacaccctggccgacgccgtggacaagtactgcatcggcgtgccccccatccagtggctggcctggatcccccagctgctgacctgcctggtgggcagcgagggcaagctgctgctgaacctgatcagccaggtgggcagagtgtacccccaggccgtgtacttccccatcagaaccctgtacctgaccctgaagatcgagcagagagagagatacaagagcgaccccggccccatcagagccaccgcccccatgtggagatgcagcagaatcatgcacatgcagagagagctgcaccccaccctgctgagcagcctggagggcatcgtggaccagatggtgtggttcagagagaactggcacgaggaggtgctgagacagctgcagcagggcctggccaagtgctacagcgtggccttcgagaagagcggcgccgtgagcgacgccaagatcaccccccacaccctgaacttcgtgaagaagctggtgagcaccttcggcgtgggcctggagaacgtgagcaacgtgagcaccatgttcagcagcgccgccagcgagagcctggccagaagagcccaggccaccgcccaggaccccgtgttccagaagctgaagggccagttcaccaccgacttcgacttcagcgtgcccggcagcatgaagctgcacaacctgatcagcaagctgaagaagtggatcaagatcctggaggccaagaccaagcagctgcccaagttcttcctgatcgaggagaagtgcagattcctgagcaacttcagcgcccagaccgccgaggtggagatccccggcgagttcctgatgcccaagcccacccactactacatcaagatcgccagattcatgcccagagtggagatcgtgcagaagcacaacaccgccgccagaagactgtacatcagaggccacaacggcaagatctacccctacctggtgatgaacgacgcctgcctgaccgagagcagaagagaggagagagtgctgcagctgctgagactgctgaacccctgcctggagaagagaaaggagaccaccaagagacacctgttcttcaccgtgcccagagtggtggccgtgagcccccagatgagactggtggaggacaaccccagcagcctgagcctggtggagatctacaagcagagatgcgccaagaagggcatcgagcacgacaaccccatcagcagatactacgacagactggccaccgtgcaggccagaggcacccaggccagccaccaggtgctgagagacatcctgaaggaggtgcagagcaacatggtgcccagaagcatgctgaaggagtgggccctgcacaccttccccaacgccaccgactactggaccttcagaaagatgttcaccatccagctggccctgatcggcttcgccgagttcgtgctgcacctgaacagactgaaccccgagatgctgcagatcgcccaggacaccggcaagctgaacgtggcctacttcagattcgacatcaacgacgccaccggcgacctggacgccaacagacccgtgcccttcagactgacccccaacatcagcgagttcctgaccaccatcggcgtgagcggccccctgaccgccagcatgatcgccgtggccagatgcttcgcccagcccaacttcaaggtggacggcatcctgaagaccgtgctgagagacgagatcatcgcctggcacaagaagacccaggaggacaccagcagccccctgagcgccgccggccagcccgagaacatggacagccagcagctggtgagcctggtgcagaaggccgtgaccgccatcatgaccagactgcacaacctggcccagttcgagggcggcgagagcaaggtgaacaccctggtggccgccgccaacagcctggacaacctgtgcagaatggaccccgcctggcacccctggctgtag

SEQ ID NO: 102898 - DNA, 216 bp, synthetic construct
  misc_feature 1..216: note = Description of Artificial Sequence: Synthetic coding sequence
  source 1..216: mol_type = other DNA
atggccttcgtggccacccagggcgccaccgtggtggaccagaccaccctgatgaagaagtacctgcagttcgtggccgccctgaccgacgtgaacacccccgacgagaccaagctgaagatgatgcaggaggtgagcgagaacttcgagaacgtgaccagcagcccccagtacagcaccttcctggagcacatcatccccagattcctgacctag

SEQ ID NO: 102899 - DNA, 117 bp, synthetic construct
  misc_feature 1..117: note = Description of Artificial Sequence: Synthetic coding sequence
  source 1..117: mol_type = other DNA
atgagcgacagcggcgagcagaactacggcgagagagtgaacgtggaggagggcaagtgcggcagcagacacctgaccagcttcatcaacgagtacctgaagctgagaaacaagtag

SEQ ID NO: 102900 - DNA, 567 bp, synthetic construct
  misc_feature 1..567: note = Description of Artificial Sequence: Synthetic coding sequence
  source 1..567: mol_type = other DNA
atgagcaccagaagaagacacgtgggcaacagagccaaccccgaccccaactgctgcctgggcgtgttcggcctgagcctgtacaccaccgagagagacctgagagaggtgttcagcaagtacggccccatcgccgacgtgagcatcgtgtacgaccagcagagcagaagaagcagaggcttcgccttcgtgtacttcgagaacgtggacgacgccaaggaggccaaggagagagccaacggcatggagctggacggcagaagaatcagagtggacttcagcatcaccaagagaccccacacccccacccccggcatctacatgggcagacccacctacggcagcagcagaagaagagactactacgacagaggctacgacagaggctacgacgacagagactactacagcagaagctacagaggcggcggcggcggcggcggcggctggagagccgcccaggacagagaccagatctacagaagaagaagccccagcccctactacagcagaggcggctacagaagcagaagcagaagcagaagctacagccccagaagatactag

SEQ ID NO: 102901 - DNA, 867 bp, synthetic construct
  misc_feature 1..867: note = Description of Artificial Sequence: Synthetic coding sequence
  source 1..867: mol_type = other DNA
atgagcgacagcggcgagcagaactacggcgagagagagagcagaagcgccagcagaagcggcagcgcccacggcagcggcaagagcgccagacacacccccgccagaagcagaagcaaggaggacagcagaagaagcagaagcaagagcagaagcagaagcgagagcagaagcagaagcagaagaagcagcagaagacactacaccagaagcagaagcagaagcagaagccacagaagaagcagaagcagaagctacagcagagactacagaagaagacacagccacagccacagccccatgagcaccagaagaagacacgtgggcaacagagccaaccccgaccccaactgctgcctgggcgtgttcggcctgagcctgtacaccaccgagagagacctgagagaggtgttcagcaagtacggccccatcgccgacgtgagcatcgtgtacgaccagcagagcagaagaagcagaggcttcgccttcgtgtacttcgagaacgtggacgacgccaaggaggccaaggagagagccaacggcatggagctggacggcagaagaatcagagtggacttcagcatcaccaagagaccccacacccccacccccggcatctacatgggcagacccacctacggcagcagcagaagaagagactactacgacagaggctacgacagaggctacgacgacagagactactacagcagaagctacagaggcggcggcggcggcggcggcggctggagagccgcccaggacagagaccagatctacagaagaagaagccccagcccctactacagcagaggcggctacagaagcagaagcagaagcagaagctacagccccagaagatactag

SEQ ID NO: 102902 - DNA, 483 bp, synthetic construct
  misc_feature 1..483: note = Description of Artificial Sequence: Synthetic coding sequence
  source 1..483: mol_type = other DNA
atggtgcccagcgccggccagctggccctgttcgccctgggcatcgtgctggccgcctgccaggccctggagaacagcaccagccccctgagcgccgacccccccgtggccgccgccgtggtgagccacttcaacgactgccccgacagccacacccagttctgcttccacggcacctgcagattcctggtgcaggaggacaagcccgcctgcgtgtgccacagcggctacgtgggcgccagatgcgagcacgccgacctgctggccgtggtggccgccagccagaagaagcaggccatcaccgccctggtggtggtgagcatcgtggccctggccgtgctgatcatcacctgcgtgctgatccactgctgccaggtgagaaagcactgcgagtggtgcagagccctgatctgcagacacgagaagcccagcgccctgctgaagggcagaaccgcctgctgccacagcgagaccgtggtgtag

SEQ ID NO: 102903 - DNA, 480 bp, synthetic construct
  misc_feature 1..480: note = Description of Artificial Sequence: Synthetic coding sequence
  source 1..480: mol_type = other DNA
atggtgcccagcgccggccagctggccctgttcgccctgggcatcgtgctggccgcctgccaggccctggagaacagcaccagccccctgagcgacccccccgtggccgccgccgtggtgagccacttcaacgactgccccgacagccacacccagttctgcttccacggcacctgcagattcctggtgcaggaggacaagcccgcctgcgtgtgccacagcggctacgtgggcgccagatgcgagcacgccgacctgctggccgtggtggccgccagccagaagaagcaggccatcaccgccctggtggtggtgagcatcgtggccctggccgtgctgatcatcacctgcgtgctgatccactgctgccaggtgagaaagcactgcgagtggtgcagagccctgatctgcagacacgagaagcccagcgccctgctgaagggcagaaccgcctgctgccacagcgagaccgtggtgtag

SEQ ID NO: 102904 - DNA, 2583 bp, synthetic construct
  misc_feature 1..2583: note = Description of Artificial Sequence: Synthetic coding sequence
  source 1..2583: mol_type = other DNA
atgatgagcatcaaggccttcaccctggtgagcgccgtggagagagagctgctgatgggcgacaaggagagagtgaacatcgagtgcgtggagtgctgcggcagagacctgtacgtgggcaccaacgactgcttcgtgtaccacttcctgctggaggagagacccgtgcccgccggccccgccaccttcaccgccaccaagcagctgcagagacacctgggcttcaagaagcccgtgaacgagctgagagccgccagcgccctgaacagactgctggtgctgtgcgacaacagcatcagcctggtgaacatgctgaacctggagcccgtgcccagcggcgccagaatcaagggcgccgccaccttcgccctgaacgagaaccccgtgagcggcgaccccttctgcgtggaggtgtgcatcatcagcgtgaagagaagaaccatccagatgttcctggtgtacgaggacagagtgcagatcgtgaaggaggtgagcaccgccgagcagcccctggccgtggccgtggacggccacttcctgtgcctggccctgaccacccagtacatcatccacaactacagcaccggcgtgagccaggacctgttcccctactgcagcgaggagagaccccccatcgtgaagagaatcggcagacaggagttcctgctggccggccccggcggcctgggcatgttcgccaccgtggccggcatcagccagagagcccccgtgcactggagcgagaacgtgatcggcgccgccgtgagcttcccctacgtgatcgccctggacgacgagttcatcaccgtgcacagcatgctggaccagcagcagaagcagaccctgcccttcaaggagggccacatcctgcaggacttcgagggcagagtgatcgtggccaccagcaagggcgtgtacatcctggtgcccctgcccctggagaagcagatccaggacctgctggccagcagaagagtggaggaggccctggtgctggccaagggcgccagaagaaacatccccaaggagaagttccaggtgatgtacagaagaatcctgcagcaggccggcttcatccagttcgcccagctgcagttcctggaggccaaggagctgttcagaagcggccagctggacgtgagagagctgatcagcctgtaccccttcctgctgcccaccagcagcagcttcaccagaagccacccccccctgcacgagtacgccgacctgaaccagctgacccagggcgaccaggagaagatggccaagtgcaagagattcctgatgagctacctgaacgaggtgagaagcaccgaggtggccaacggctacaaggaggacatcgacaccgccctgctgaagctgtacgccgaggccgaccacgacagcctgctggacctgctggtgaccgagaacttctgcctgctgaccgacagcgccgcctggctggagaagcacaagaagtacttcgccctgggcctgctgtaccactacaacaaccaggacgccgccgccgtgcagctgtgggtgaacatcgtgaacggcgacgtgcaggacagcaccagaagcgacctgtacgagtacatcgtggacttcctgacctactgcctggacgaggagctggtgtgggcctacgccgactgggtgctgcagaagagcgaggaggtgggcgtgcaggtgttcaccaagagacccctggacgagcagcagaagaacagcttcaaccccgacgacatcatcaactgcctgaagaagtaccccaaggccctggtgaagtacctggagcacctggtgatcgacaagagactgcagaaggaggagtaccacacccacctggccgtgctgtacctggaggaggtgctgctgcagagagccagcgccagcggcaagggcgccgaggccaccgagacccaggccaagctgagaagactgctgcagaagagcgacctgtacagagtgcacttcctgctggagagactgcagggcgccggcctgcccatggagagcgccatcctgcacggcaagctgggcgagcacgagaaggccctgcacatcctggtgcacgagctgcaggacttcgccgccgccgaggactactgcctgtggtgcagcgagggcagagaccccccccacagacagcagctgttccacaccctgctggccatctacctgcacgccggccccaccgcccacgagctggccgtggccgccgtggacctgctgaacagacacgccaccgagttcgacgccgcccaggtgctgcagatgctgcccgacacctggagcgtgcagctgctgtgccccttcctgatgggcgccatgagagacagcatccacgccagaagaaccatgcaggtggccctgggcctggccagaagcgagaacctgatctacacctacgacaagatgaagctgaagggcagcagcatccagctgagcgacaagaagctgtgccagatctgccagaaccccttctgcgagcccgtgttcgtgagataccccaacggcggcctggtgcacacccactgcgccgccagcagacacaccaaccccagcagcagcagccccggcaccagaacctag

SEQ ID NO: 102905 - DNA, 2583 bp, synthetic construct; identical to SEQ ID NO: 102904
  misc_feature 1..2583: note = Description of Artificial Sequence: Synthetic coding sequence
  source 1..2583: mol_type = other DNA

SEQ ID NO: 102906 - DNA, 948 bp, synthetic construct
  misc_feature 1..948: note = Description of Artificial Sequence: Synthetic coding sequence
  source 1..948: mol_type = other DNA
atgctgatcggcagctgcagaaaggtgaagagaagcgtgcaggtgttcaccaagagacccctggacgagcagcagaagaacagcttcaaccccgacgacatcatcaactgcctgaagaagtaccccaaggccctggtgaagtacctggagcacctggtgatcgacaagagactgcagaaggaggagtaccacacccacctggccgtgctgtacctggaggaggtgctgctgcagagagccagcgccagcggcaagggcgccgaggccaccgagacccaggccaagctgagaagactgctgcagaagagcgacctgtacagagtgcacttcctgctggagagactgcagggcgccggcctgcccatggagagcgccatcctgcacggcaagctgggcgagcacgagaaggccctgcacatcctggtgcacgagctgcaggacttcgccgccgccgaggactactgcctgtggtgcagcgagggcagagaccccccccacagacagcagctgttccacaccctgctggccatctacctgcacgccggccccaccgcccacgagctggccgtggccgccgtggacctgctgaacagacacgccaccgagttcgacgccgcccaggtgctgcagatgctgcccgacacctggagcgtgcagctgctgtgccccttcctgatgggcgccatgagagacagcatccacgccagaagaaccatgcaggtggccctgggcctggccagaagcgagaacctgatctacacctacgacaagatgaagctgaagggcagcagcatccagctgagcgacaagaagctgtgccagatctgccagaaccccttctgcgagcccgtgttcgtgagataccccaacggcggcctggtgcacacccactgcgccgccagcagacacaccaaccccagcagcagcagccccggcaccagaacctag

SEQ ID NO: 102907 - DNA, 1704 bp, synthetic construct
  misc_feature 1..1704: note = Description of Artificial Sequence: Synthetic coding sequence
  source 1..1704: mol_type = other DNA
atgggcagaggcctgctgagaggcctgtggcccctgcacatcgtgctgtggaccagaatcgccagcaccatccccccccacgtgcagaagagcgtgaacaacgacatgatcgtgaccgacaacaacggcgccgtgaagttcccccagctgtgcaagttctgcgacgtgagattcagcacctgcgacaaccagaagagctgcatgagcaactgcagcatcaccagcatctgcgagaagccccaggaggtgtgcgtggccgtgtggagaaagaacgacgagaacatcaccctggagaccgtgtgccacgaccccaagctgccctaccacgacttcatcctggaggacgccgccagccccaagtgcatcatgaaggagaagaagaagcccggcgagaccttcttcatgtgcagctgcagcagcgacgagtgcaacgacaacatcatcttcagcgaggagtacaacaccagcaaccccgacctgctgctggtgatcttccaggtgaccggcatcagcctgctgccccccctgggcgtggccatcagcgtgatcatcatcttctactgctacagagtgaacagacagcagaagctgagcagcacctgggagaccggcaagaccagaaagctgatggagttcagcgagcactgcgccatcatcctggaggacgacagaagcgacatcagcagcacctgcgccaacaacatcaaccacaacaccgagctgctgcccatcgagctggacaccctggtgggcaagggcagattcgccgaggtgtacaaggccaagctgaagcagaacaccagcgagcagttcgagaccgtggccgtgaagatcttcccctacgaggagtacgccagctggaagaccgagaaggacatcttcagcgacatcaacctgaagcacgagaacatcctgcagttcctgaccgccgaggagagaaagaccgagctgggcaagcagtactggctgatcaccgccttccacgccaagggcaacctgcaggagtacctgaccagacacgtgatcagctgggaggacctgagaaagctgggcagcagcctggccagaggcatcgcccacctgcacagcgaccacaccccctgcggcagacccaagatgcccatcgtgcacagagacctgaagagcagcaacatcctggtgaagaacgacctgacctgctgcctgtgcgacttcggcctgagcctgagactggaccccaccctgagcgtggacgacctggccaacagcggccaggtgggcaccgccagatacatggcccccgaggtgctggagagcagaatgaacctggagaacgtggagagcttcaagcagaccgacgtgtacagcatggccctggtgctgtgggagatgaccagcagatgcaacgccgtgggcgaggtgaaggactacgagccccccttcggcagcaaggtgagagagcacccctgcgtggagagcatgaaggacaacgtgctgagagacagaggcagacccgagatccccagcttctggctgaaccaccagggcatccagatggtgtgcgagaccctgaccgagtgctgggaccacgaccccgaggccagactgaccgcccagtgcgtggccgagagattcagcgagctggagcacctggacagactgagcggcagaagctgcagcgaggagaagatccccgaggacggcagcctgaacaccaccaagtag

SEQ ID NO: 102908 - DNA, 1779 bp, synthetic construct
  misc_feature 1..1779: note = Description of Artificial Sequence: Synthetic coding sequence
  source 1..1779: mol_type = other DNA
atgggcagaggcctgctgagaggcctgtggcccctgcacatcgtgctgtggaccagaatcgccagcaccatccccccccacgtgcagaagagcgacgtggagatggaggcccagaaggacgagatcatctgccccagctgcaacagaaccgcccaccccctgagacacatcaacaacgacatgatcgtgaccgacaacaacggcgccgtgaagttcccccagctgtgcaagttctgcgacgtgagattcagcacctgcgacaaccagaagagctgcatgagcaactgcagcatcaccagcatctgcgagaagccccaggaggtgtgcgtggccgtgtggagaaagaacgacgagaacatcaccctggagaccgtgtgccacgaccccaagctgccctaccacgacttcatcctggaggacgccgccagccccaagtgcatcatgaaggagaagaagaagcccggcgagaccttcttcatgtgcagctgcagcagcgacgagtgcaacgacaacatcatcttcagcgaggagtacaacaccagcaaccccgacctgctgctggtgatcttccaggtgaccggcatcagcctgctgccccccctgggcgtggccatcagcgtgatcatcatcttctactgctacagagtgaacagacagcagaagctgagcagcacctgggagaccggcaagaccagaaagctgatggagttcagcgagcactgcgccatcatcctggaggacgacagaagcgacatcagcagcacctgcgccaacaacatcaaccacaacaccgagctgctgcccatcgagctggacaccctggtgggcaagggcagattcgccgaggtgtacaaggccaagctgaagcagaacaccagcgagcagttcgagaccgtggccgtgaagatcttcccctacgaggagtacgccagctggaagaccgagaaggacatcttcagcgacatcaacctgaagcacgagaacatcctgcagttcctgaccgccgaggagagaaagaccgagctgggcaagcagtactggctgatcaccgccttccacgccaagggcaacctgcaggagtacctgaccagacacgtgatcagctgggaggacctgagaaagctgggcagcagcctggccagaggcatcgcccacctgcacagcgaccacaccccctgcggcagacccaagatgcccatcgtgcacagagacctgaagagcagcaacatcctggtgaagaacgacctgacctgctgcctgtgcgacttcggcctgagcctgagactggaccccaccctgagcgtggacgacctggccaacagcggccaggtgggcaccgccagatacatggcccccgaggtgctggagagcagaatgaacctggagaacgtggagagcttcaagcagaccgacgtgtacagcatggccctggtgctgtgggagatgaccagcagatgcaacgccgtgggcgaggtgaaggactacgagccccccttcggcagcaaggtgagagagcacccctgcgtggagagcatgaaggacaacgtgctgagagacagaggcagacccgagatccccagcttctggctgaaccaccagggcatccagatggtgtgcgagaccctgaccgagtgctgggaccacgaccccgaggccagactgaccgcccagtgcgtggccgagagattcagcgagctggagcacctggacagactgagcggcagaagctgcagcgaggagaagatccccgaggacggcagcctgaacaccaccaagtag

SEQ ID NO: 102909 - DNA, 339 bp, synthetic construct
  misc_feature 1..339: note = Description of Artificial Sequence: Synthetic coding sequence
  source 1..339: mol_type = other DNA
atgtgcagctgcagcagcgacgagtgcaacgacaacatcatcttcagcgagggcagatgcaagatcagacacatcggcagcaacaacagactgcagagaagcacctgccagaacaccggctgggagagcgcccacgtgatgaagacccccggcttcagagagtacaacaccagcaaccccgacctgctgctggtgatcttccaggtgaccggcatcagcctgctgccccccctgggcgtggccatcagcgtgatcatcatcttctactgctacagagtgaacagacagcagaagctgagcagcacctgggagaccggcaagaccagaaagctgatgtag

SEQ ID NO: 102910 - DNA, 1194 bp, synthetic construct
  misc_feature 1..1194: note = Description of Artificial Sequence: Synthetic coding sequence
  source 1..1194: mol_type = other DNA
atgtgcagctgcagcagcgacgagtgcaacgacaacatcatcttcagcgaggagtacaacaccagcaaccccgacctgctgctggtgatcttccaggtgaccggcatcagcctgctgccccccctgggcgtggccatcagcgtgatcatcatcttctactgctacagagtgaacagacagcagaagctgagcagcacctgggagaccggcaagaccagaaagctgatggagttcagcgagcactgcgccatcatcctggaggacgacagaagcgacatcagcagcacctgcgccaacaacatcaaccacaacaccgagctgctgcccatcgagctggacaccctggtgggcaagggcagattcgccgaggtgtacaaggccaagctgaagcacgagaacatcctgcagttcctgaccgccgaggagagaaagaccgagctgggcaagcagtactggctgatcaccgccttccacgccaagggcaacctgcaggagtacctgaccagacacgtgatcagctgggaggacctgagaaagctgggcagcagcctggccagaggcatcgcccacctgcacagcgaccacaccccctgcggcagacccaagatgcccatcgtgcacagagacctgaagagcagcaacatcctggtgaagaacgacctgacctgctgcctgtgcgacttcggcctgagcctgagactggaccccaccctgagcgtggacgacctggccaacagcggccaggtgggcaccgccagatacatggcccccgaggtgctggagagcagaatgaacctggagaacgtggagagcttcaagcagaccgacgtgtacagcatggccctggtgctgtgggagatgaccagcagatgcaacgccgtgggcgaggtgaaggactacgagccccccttcggcagcaaggtgagagagcacccctgcgtggagagcatgaaggacaacgtgctgagagacagaggcagacccgagatccccagcttctggctgaaccaccagggcatccagatggtgtgcgagaccctgaccgagtgctgggaccacgaccccgaggccagactgaccgcccagtgcgtggccgagagattcagcgagctggagcacctggacagactgagcggcagaagctgcagcgaggagaagatccccgaggacggcagcctgaacaccaccaagtag

SEQ ID NO: 102911 - DNA, 2244 bp, synthetic construct
  misc_feature 1..2244: note = Description of Artificial Sequence: Synthetic coding sequence
  source 1..2244: mol_type = other DNA
atggccgacgaggccgccctggccctgcagcccggcggcagccccagcgccgccggcgccgacagagaggccgccagcagccccgccggcgagcccctgagaaagagacccagaagagacggccccggcctggagagaagccccggcgagcccggcggcgccgcccccgagagagaggtgcccgccgccgccagaggctgccccggcgccgccgccgccgccctgtggagagaggccgaggccgaggccgccgccgccggcggcgagcaggaggcccaggccaccgccgccgccggcgagggcgacaacggccccggcctgcagggccccagcagagagccccccctggccgacaacctgtacgacgaggacgacgacgacgagggcgaggaggaggaggaggccgccgccgccgccatcggctacagagacaacctgctgttcggcgacgagatcatcaccaacggcttccacagctgcgagagcgacgaggaggacagagccagccacgccagcagcagcgactggacccccagacccagaatcggcccctacaccttcgtgcagcagcacctgatgatcggcaccgaccccagaaccatcctgaaggacctgctgcccgagaccatccccccccccgagctggacgacatgaccctgtggcagatcgtgatcaacatcctgagcgagccccccaagagaaagaagagaaaggacatcaacaccatcgaggacgccgtgaagctgctgcaggagtgcaagaagatcatcgtgctgaccggcgccggcgtgagcgtgagctgcggcatccccgacttcagaagcagagacggcatctacgccagactggccgtggacttccccgacctgcccgacccccaggccatgttcgacatcgagtacttcagaaaggaccccagacccttcttcaagttcgccaaggagatctaccccggccagttccagcccagcctgtgccacaagttcatcgccctgagcgacaaggagggcaagctgctgagaaactacacccagaacatcgacaccctggagcaggtggccggcatccagagaatcatccagtgccacggcagcttcgccaccgccagctgcctgatctgcaagtacaaggtggactgcgaggccgtgagaggcgacatcttcaaccaggtggtgcccagatgccccagatgccccgccgacgagcccctggccatcatgaagcccgagatcgtgttcttcggcgagaacctgcccgagcagttccacagagccatgaagtacgacaaggacgaggtggacctgctgatcgtgatcggcagcagcctgaaggtgagacccgtggccctgatccccagcagcatcccccacgaggtgccccagatcctgatcaacagagagcccctgccccacctgcacttcgacgtggagctgctgggcgactgcgacgtgatcatcaacgagctgtgccacagactgggcggcgagtacgccaagctgtgctgcaaccccgtgaagctgagcgagatcaccgagaagccccccagaacccagaaggagctggcctacctgagcgagctgccccccacccccctgcacgtgagcgaggacagcagcagccccgagagaaccagcccccccgacagcagcgtgatcgtgaccctgctggaccaggccgccaagagcaacgacgacctggacgtgagcgagagcaagggctgcatggaggagaagccccaggaggtgcagaccagcagaaacgtggagagcatcgccgagcagatggagaaccccgacctgaagaacgtgggcagcagcaccggcgagaagaacgagagaaccagcgtggccggcaccgtgagaaagtgctggcccaacagagtggccaaggagcagatcagcagaagactggacggcaaccagtacctgttcctgccccccaacagatacatcttccacggcgccgaggtgtacagcgacagcgaggacgacgtgctgagcagcagcagctgcggcagcaacagcgacagcggcacctgccagagccccagcctggaggagcccatggaggacgagagcgagatcgaggagttctacaacggcctggaggacgagcccgacgtgcccgagagagccggcggcgccggcttcggcaccgacggcgacgaccaggaggccatcaacgaggccatcagcgtgaagcaggaggtgaccgacatgaactaccccagcaacaagagctag

SEQ ID NO: 102912 - DNA, 2553 bp, synthetic construct
  misc_feature 1..2553: note = Description of Artificial Sequence: Synthetic coding sequence
  source 1..2553: mol_type = other DNA
atgaccagccactacgtgatcgccatcttcgccctgatgagcagctgcctggccaccgccggccccgagcccggcgccctgtgcgagctgagccccgtgagcgccagccaccccgtgcaggccctgatggagagcttcaccgtgctgagcggctgcgccagcagaggcaccaccggcctgccccaggaggtgcacgtgctgaacctgagaaccgccggccagggccccggccagctgcagagagaggtgaccctgcacctgaaccccatcagcagcgtgcacatccaccacaagagcgtggtgttcctgctgaacagcccccaccccctggtgtggcacctgaagaccgagagactggccaccggcgtgagcagactgttcctggtgagcgagggcagcgtggtgcagttcagcagcgccaacttcagcctgaccgccgagaccgaggagagaaacttcccccacggcaacgagcacctgctgaactgggccagaaaggagtacggcgccgtgaccagcttcaccgagctgaagatcgccagaaacatctacatcaaggtgggcgaggaccaggtgttcccccccaagtgcaacatcggcaagaacttcctgagcctgaactacctggccgagtacctgcagcccaaggccgccgagggctgcgtgatgagcagccagccccagaacgaggaggtgcacatcatcgagctgatcacccccaacagcaacccctacagcgccttccaggtggacatcaccatcgacatcagacccagccaggaggacctggaggtggtgaagaacctgatcctgatcctgaagtgcaagaagagcgtgaactgggtgatcaagagcttcgacgtgaagggcagcctgaagatcatcgcccccaacagcatcggcttcggcaaggagagcgagagaagcatgaccatgaccaagagcatcagagacgacatccccagcacccagggcaacctggtgaagtgggccctggacaacggctacagccccatcaccagctacaccatggcccccgtggccaacagattccacctgagactggagaacaacgaggagatgggcgacgaggaggtgcacaccatcccccccgagctgagaatcctgctggaccccggcgccctgcccgccctgcagaacccccccatcagaggcggcgagggccagaacggcggcctgcccttccccttccccgacatcagcagaagagtgtggaacgaggagggcgaggacggcctgcccagacccaaggaccccgtgatccccagcatccagctgttccccggcctgagagagcccgaggaggtgcagggcagcgtggacatcgccctgagcgtgaagtgcgacaacgagaagatgatcgtggccgtggagaaggacagcttccaggccagcggctacagcggcatggacgtgaccctgctggaccccacctgcaaggccaagatgaacggcacccacttcgtgctggagagccccctgaacggctgcggcaccagacccagatggagcgccctggacggcgtggtgtactacaacagcatcgtgatccaggtgcccgccctgggcgacagcagcggctggcccgacggctacgaggacctggagagcggcgacaacggcttccccggcgacatggacgagggcgacgccagcctgttcaccagacccgagatcgtggtgttcaactgcagcctgcagcaggtgagaaaccccagcagcttccaggagcagccccacggcaacatcaccttcaacatggagctgtacaacaccgacctgttcctggtgcccagccagggcgtgttcagcgtgcccgagaacggccacgtgtacgtggaggtgagcgtgaccaaggccgagcaggagctgggcttcgccatccagacctgcttcatcagcccctacagcaaccccgacagaatgagccactacaccatcatcgagaacatctgccccaaggacgagagcgtgaagttctacagccccaagagagtgcacttccccatcccccaggccgacatggacaagaagagattcagcttcgtgttcaagcccgtgttcaacaccagcctgctgttcctgcagtgcgagctgaccctgtgcaccaagatggagaagcacccccagaagctgcccaagtgcgtgccccccgacgaggcctgcaccagcctggacgccagcatcatctgggccatgatgcagaacaagaagaccttcaccaagcccctggccgtgatccaccacgaggccgagagcaaggagaagggccccagcatgaaggagcccaaccccatcagcccccccatcttccacggcctggacaccctgaccgtgatgggcatcgccttcgccgccttcgtgatcggcgccctgctgaccggcgccctgtggtacatctacagccacaccggcgagaccgccggcagacagcaggtgcccaccagcccccccgccagcgagaacagcagcgccgcccacagcatcggcagcacccagagcaccccctgcagcagcagcagcaccgcctag

SEQ ID NO: 102913 - DNA, 108 bp, synthetic construct
  misc_feature 1..108: note = Description of Artificial Sequence: Synthetic coding sequence
  source 1..108: mol_type = other DNA
atgaccagccactacgtgatcgccatcttcgccctgatgagcagctgcctggccaccgccggccccgagcccggcgccctgtgcgagctgagccccgtgagcgcctag

SEQ ID NO: 102914 - DNA, 2553 bp, synthetic construct; identical to SEQ ID NO: 102912
  misc_feature 1..2553: note = Description of Artificial Sequence: Synthetic coding sequence
  source 1..2553: mol_type = other DNA

SEQ ID NO: 102915 - DNA, 2556 bp, synthetic construct
  misc_feature 1..2556: note = Description of Artificial Sequence: Synthetic coding sequence
  source 1..2556: mol_type = other DNA
atgaccagccactacgtgatcgccatcttcgccctgatgagcagctgcctggccaccgccggccccgagcccggcgccctgtgcgagctgagccccgtgagcgccagccaccccgtgcaggccctgatggagagcttcaccgtgctgagcggctgcgccagcagaggcaccaccggcctgccccaggaggtgcacgtgctgaacctgagaaccgccggccagggccccggccagctgcagagagaggtgaccctgcacctgaaccccatcagcagcgtgcacatccaccacaagagcgtggtgttcctgctgaacagcccccaccccctggtgtggcacctgaagaccgagagactggccaccggcgtgagcagactgttcctggtgagcgagggcagcgtggtgcagttcagcagcgccaacttcagcctgaccgccgagaccgaggagagaaacttcccccacggcaacgagcacctgctgaactgggccagaaaggagtacggcgccgtgaccagcttcaccgagctgaagatcgccagaaacatctacatcaaggtgggcgaggaccaggtgttcccccccaagtgcaacatcggcaagaacttcctgagcctgaactacctggccgagtacctgcagcccaaggccgccgagggctgcgtgatgagcagccagccccagaacgaggaggtgcacatcatcgagctgatcacccccaacagcaacccctacagcgccttccaggtggacatcaccatcgacatcagacccagccaggaggacctggaggtggtgaagaacctgatcctgatcctgaagtgcaagaagagcgtgaactgggtgatcaagagcttcgacgtgaagggcagcctgaagatcatcgcccccaacagcatcggcttcggcaaggagagcgagagaagcatgaccatgaccaagagcatcagagacgacatccccagcacccagggcaacctggtgaagtgggccctggacaacggctacagccccatcaccagctacaccatggcccccgtggccaacagattccacctgagactggagaacaacgccgaggagatgggcgacgaggaggtgcacaccatcccccccgagctgagaatcctgctggaccccggcgccctgcccgccctgcagaacccccccatcagaggcggcgagggccagaacggcggcctgcccttccccttccccgacatcagcagaagagtgtggaacgaggagggcgaggacggcctgcccagacccaaggaccccgtgatccccagcatccagctgttccccggcctgagagagcccgaggaggtgcagggcagcgtggacatcgccctgagcgtgaagtgcgacaacgagaagatgatcgtggccgtggagaaggacagcttccaggccagcggctacagcggcatggacgtgaccctgctggaccccacctgcaaggccaagatgaacggcacccacttcgtgctggagagccccctgaacggctgcggcaccagacccagatggagcgccctggacggcgtggtgtactacaacagcatcgtgatccaggtgcccgccctgggcgacagcagcggctggcccgacggctacgaggacctggagagcggcgacaacggcttccccggcgacatggacgagggcgacgccagcctgttcaccagacccgagatcgtggtgttcaactgcagcctgcagcaggtgagaaaccccagcagcttccaggagcagccccacggcaacatcaccttcaacatggagctgtacaacaccgacctgttcctggtgcccagccagggcgtgttcagcgtgcccgagaacggccacgtgtacgtggaggtgagcgtgaccaaggccgagcaggagctgggcttcgccatccagacctgcttcatcagcccctacagcaaccccgacagaatgagccactacaccatcatcgagaacatctgccccaaggacgagagcgtgaagttctacagccccaagagagtgcacttccccatcccccaggccgacatggacaagaagagattcagcttcgtgttcaagcccgtgttcaacaccagcctgctgttcctgcagtgcgagctgaccctgtgcaccaagatggagaagcacccccagaagctgcccaagtgcgtgccccccgacgaggcctgcaccagcctggacgccagcatcatctgggccatgatgcagaacaagaagaccttcaccaagcccctggccgtgatccaccacgaggccgagagcaaggagaagggccccagcatgaaggagcccaaccccatcagcccccccatcttccacggcctggacaccctgaccgtgatgggcatcgccttcgccgccttcgtgatcggcgccctgctgaccggcgccctgtggtacatctacagccacaccggcgagaccgccggcagacagcaggtgcccaccagcccccccgccagcgagaacagcagcgccgcccacagcatcggcagcacccagagcaccccctgcagcagcagcagcaccgcctag

SEQ ID NO: 102916 - DNA, 2052 bp, synthetic construct
  misc_feature 1..2052: note = Description of Artificial Sequence: Synthetic coding sequence
  source 1..2052: mol_type = other DNA
atggccctgttcgtgagactgctggccctggccctggccctggccctgggccccgccgccaccctggccggccccgccaagagcccctaccagctggtgctgcagcacagcagactgagaggcagacagcacggccccaacgtgtgcgccgtgcagaaggtgatcggcaccaacagaaagtacttcaccaactgcaagcagtggtaccagagaaagatctgcggcaagagcaccgtgatcagctacgagtgctgccccggctacgagaaggtgcccggcgagaagggctgccccgccgccctgcccctgagcaacctgtacgagaccctgggcgtggtgggcagcaccaccacccagctgtacaccgacagaaccgagaagctgagacccgagatggagggccccggcagcttcaccatcttcgcccccagcaacgaggcctgggccagcctgcccgccgaggtgctggacagcctggtgagcaacgtgaacatcgagctgctgaacgccctgagataccacatggtgggcagaagagtgctgaccgacgagctgaagcacggcatgaccctgaccagcatgtaccagaacagcaacatccagatccaccactaccccaacggcatcgtgaccgtgaactgcgccagactgctgaaggccgaccaccacgccaccaacggcgtggtgcacctgatcgacaaggtgatcagcaccatcaccaacaacatccagcagatcatcgagatcgaggacaccttcgagaccctgagagccgccgtggccgccagcggcctgaacaccatgctggagggcaacggccagtacaccctgctggcccccaccaacgaggccttcgagaagatccccagcgagaccctgaacagaatcctgggcgaccccgaggccctgagagacctgctgaacaaccacatcctgaagagcgccatgtgcgccgaggccatcgtggccggcctgagcgtggagaccctggagggcaccaccctggaggtgggctgcagcggcgacatgctgaccatcaacggcaaggccatcatcagcaacaaggacatcctggccaccaacggcgtgatccactacatcgacgagctgctgatccccgacagcgccaagaccctgttcgagctggccgccgagagcgacgtgagcaccgccatcgacctgttcagacaggccggcctgggcaaccacctgagcggcagcgagagactgaccctgctggcccccctgaacagcgtgttcaaggacggcaccccccccatcgacgcccacaccagaaacctgctgagaaaccacatcatcaaggaccagctggccagcaagtacctgtaccacggccagaccctggagaccctgggcggcaagaagctgagagtgttcgtgtacagaaacagcctgtgcatcgagaacagctgcatcgccgcccacgacaagagaggcagatacggcaccctgttcaccatggacagagtgctgaccccccccatgggcaccgtgatggacgtgctgaagggcgacaacagattcagcatgctggtggccgccatccagagcgccggcctgaccgagaccctgaacagagagggcgtgtacaccgtgttcgcccccaccaacgaggccttcagagccctgccccccagagagagaagcagactgctgggcgacgccaaggagctggccaacatcctgaagtaccacatcggcgacgagatcctggtgagcggcggcatcggcgccctggtgagactgaagagcctgcagggcgacaagctggaggtgagcctgaagaacaacgtggtgagcgtgaacaaggagcccgtggccgagcccgacatcatggccaccaacggcgtggtgcacgtgatcaccaacgtgctgcagccccccgccaacagaccccaggagagaggcgacgagctggccgacagcgccctggagatcttcaagcaggccagcgccttcagcagacccgagcagccccaggtgctgtgcagccccgtgtaccagaagctgctggagagaatgaagcactag

SEQ ID NO: 102917 - DNA, 1251 bp, synthetic construct
  misc_feature 1..1251: note = Description of Artificial Sequence: Synthetic coding sequence
  source 1..1251: mol_type = other DNA
atgctggagggcaacggccagtacaccctgctggcccccaccaacgaggccttcgagaagatccccagcgagaccctgaacagaatcctgggcgaccccgaggccctgagagacctgctgaacaaccacatcctgaagagcgccatgtgcgccgaggccatcgtggccggcctgagcgtggagaccctggagggcaccaccctggaggtgggctgcagcggcgacatgctgaccatcaacggcaaggccatcatcagcaacaaggacatcctggccaccaacggcgtgatccactacatcgacgagctgctgatccccgacagcgccaagaccctgttcgagctggccgccgagagcgacgtgagcaccgccatcgacctgttcagacaggccggcctgggcaaccacctgagcggcagcgagagactgaccctgctggcccccctgaacagcgtgttcaaggacggcaccccccccatcgacgcccacaccagaaacctgctgagaaaccacatcatcaaggaccagctggccagcaagtacctgtaccacggccagaccctggagaccctgggcggcaagaagctgagagtgttcgtgtacagaaacagcctgtgcatcgagaacagctgcatcgccgcccacgacaagagaggcagatacggcaccctgttcaccatggacagagtgctgaccccccccatgggcaccgtgatggacgtgctgaagggcgacaacagattcagcatgctggtggccgccatccagagcgccggcctgaccgagaccctgaacagagagggcgtgtacaccgtgttcgcccccaccaacgaggccttcagagccctgccccccagagagagaagcagactgctgggcgacgccaaggagctggccaacatcctgaagtaccacatcggcgacgagatcctggtgagcggcggcatcggcgccctggtgagactgaagagcctgcagggcgacaagctggaggtgagcctgaagaacaacgtggtgagcgtgaacaaggagcccgtggccgagcccgacatcatggccaccaacggcgtggtgcacgtgatcaccaacgtgctgcagccccccgccaacagaccccaggagagaggcgacgagctggccgacagcgccctggagatcttcaagcaggccagcgccttcagcagagccagccagagaagcgtgagactggcccccgtgtaccagaagctgctggagagaatgaagcactag

SEQ ID NO: 102918 - DNA, 2052 bp, synthetic construct
  misc_feature 1..2052: note = Description of Artificial Sequence: Synthetic coding sequence
  source 1..2052: mol_type = other DNA
atggccctgttcgtgagactgctggccctggccctggccctggccctgggccccgccgccaccctggccggccccgccaagagcccctaccagctggtgctgcagcacagcagactgagaggcagacagcacggccccaacgtgtgcgccgtgcagaaggtgatcggcaccaacagaaagtacttcaccaactgcaagcagtggtaccagagaaagatctgcggcaagagcaccgtgatcagctacgagtgctgccccggctacgagaaggtgcccggcgagaagggctgccccgccgccctgcccctgagcaacctgtacgagaccctgggcgtggtgggcagcaccaccacccagctgtacaccgacagaaccgagaagctgagacccgagatggagggccccggcagcttcaccatcttcgcccccagcaacgaggcctgggccagcctgcccgccgaggtgctggacagcctggtgagcaacgtgaacatcgagctgctgaacgccctgagataccacatggtgggcagaagagtgctgaccgacgagctgaagcacggcatgaccctgaccagcatgtaccagaacagcaacatccagatccaccactaccccaacggcatcgtgaccgtgaactgcgccagactgctgaaggccgaccaccacgccaccaacggcgtggtgcacctgatcgacaaggtgatcagcaccatcaccaacaacatccagcagatcatcgagatcgaggacaccttcgagaccctgagagccgccgtggccgccagcggcctgaacaccatgctggagggcaacggccagtacaccctgctggcccccaccaacgaggccttcgagaagatccccagcgagaccctgaacagaatcctgggcgaccccgaggccctgagagacctgctgaacaaccacatcctgaagagcgccatgtgcgccgaggccatcgtggccggcctgagcgtggagaccctggagggcaccaccctggaggtgggctgcagcggcgacatgctgaccatcaacggcaaggccatcatcagcaacaaggacatcctggccaccaacggcgtgatccactacatcgacgagctgctgatccccgacagcgccaagaccctgttcgagctggccgccgagagcgacgtgagcaccgccatcgacctgttcagacaggccggcctgggcaaccacctgagcggcagcgagagactgaccctgctggcccccctgaacagcgtgttcaaggacggcaccccccccatcgacgcccacaccagaaacctgctgagaaaccacatcatcaaggaccagctggccagcaagtacctgtaccacggccagaccctggagaccctgggcggcaagaagctgagagtgttcgtgtacagaaacagcctgtgcatcgagaacagctgcatcgccgcccacgacaagagaggcagatacggcaccctgttcaccatggacagagtgctgaccccccccatgggcaccgtgatggacgtgctgaagggcgacaacagattcagcatgctggtggccgccatccagagcgccggcctgaccgagaccctgaacagagagggcgtgtacaccgtgttcgcccccaccaacgaggccttcagagccctgccccccagagagagaagcagactgctgggcgacgccaaggagctggccaacatcctgaagtaccacatcggcgacgagatcctggtgagcggcggcatcggcgccctggtgagactgaagagcctgcagggcgacaagctggaggtgagcctgaagaacaacgtggtgagcgtgaacaaggagcccgtggccgagcccgacatcatggccaccaacggcgtggtgcacgtgatcaccaacgtgctgcagccccccgccaacagaccccaggagagaggcgacgagctggccgacagcgccctggagatcttcaagcaggccagcgccttcagcagagccagccagagaagcgtgagactggcccccgtgtaccagaagctgctggagagaatgaagcactag

SEQ ID NO: 102919 - DNA, 1188 bp, synthetic construct
  misc_feature 1..1188: note = Description of Artificial Sequence: Synthetic coding sequence
  source 1..1188: mol_type = other DNA
atggccttcagcccctggcagatcctgagccccgtgcagtgggccaagtggacctggagcgccgtgagaggcggcgccgccggcgaggacgaggccggcggccccgagggcgaccccgaggaggaggacagccaggccgagaccaagagcctgagcttcagaagcggctgcaaggtgaagaagcacgagacccagagcctggccctggacgcctgcagcagagacgagggcgccgtgatcagccagatcagcgacatcagcaacagagacggccacgccaccgacgaggagaagctggccagcaccagctgcggccagaagagcgccggcgccgaggtgaagggcgagcccgaggaggacctggagtacttcgagtgcagcaacgtgcccgtgagcaccatcaaccacgccttcagcagcagcgaggccggcatcgagaaggagacctgccagaagatggaggaggacggcagcaccgtgctgggcctgctggagagcagcgccgagaaggcccccgtgagcgtgagctgcggcggcgagagccccctggacggcatctgcctgagcgagagcgacaagaccgccgtgctgaccctgatcagagaggagatcatcaccaaggagatcgaggccaacgagtggaagaagaagtacgaggagaccagacaggaggtgctggagatgagaaagatcgtggccgagtacgagaagaccatcgcccagatgatcgaggacgagcagagaaccagcatgaccagccagaagagcttccagcagctgaccatggagaaggagcaggccctggccgacctgaacagcgtggagagaagcctgagcgacctgttcagaagatacgagaacctgaagggcgtgctggagggcttcaagaagaacgaggaggccctgaagaagtgcgcccaggactacctggccagagtgaagcaggaggagcagagataccaggccctgaagatccacgccgaggagaagctggacaaggccaacgaggagatcgcccaggtgagaaccaaggccaaggccgagagcgccgccctgcacgccggcctgagaaaggagcagatgaaggtggagagcctggagagagccctgcagcagaagaaccaggagatcgaggagctgaccaagatctgcgacgagctgatcgccaagctgggcaagaccgactag

SEQ ID NO: 102920 - DNA, 2418 bp, synthetic construct
  misc_feature 1..2418: note = Description of Artificial Sequence: Synthetic coding sequence
  source 1..2418: mol_type = other DNA
atggccttcagcccctggcagatcctgagccccgtgcagtgggccaagtggacctggagcgccgtgagaggcggcgccgccggcgaggacgaggccggcggccccgagggcgaccccgaggaggaggacagccaggccgagaccaagagcctgagcttcagcagcgacagcgagggcaacttcgagacccccgaggccgagacccccatcagaagccccttcaaggagagctgcgaccccagcctgggcctggccggccccggcgccaagagccaggagagccaggaggccgacgagcagctggtggccgaggtggtggagaagtgcagcagcaagacctgcagcaagcccagcgagaacgaggtgccccagcaggccatcgacagccacagcgtgaagaacttcagagaggagcccgagcacgacttcagcaagatcagcatcgtgagacccttcagcatcgagaccaaggacagcaccgacatcagcgccgtgctgggcaccaaggccgcccacggctgcgtgaccgccgtgagcggcaaggccctgcccagcagcccccccgacgccctgcaggacgaggccatgaccgagggcagcatgggcgtgaccctggaggccagcgccgaggccgacctgaaggccggcaacagctgccccgagctggtgcccagcagaagaagcaagctgagaaagcccaagcccgtgcccctgagaaagaaggccatcggcggcgagttcagcgacaccaacgccgccgtggagggcacccccctgcccaaggccagctaccacttcagccccgaggagctggacgagaacaccagccccctgctgggcgacgccagattccagaagagcccccccgacctgaaggagacccccggcaccctgagcagcgacaccaacgacagcggcgtggagctgggcgaggagagcagaagcagccccctgaagctggagttcgacttcaccgaggacaccggcaacatcgaggccagaaaggccctgcccagaaagctgggcagaaagctgggcagcaccctgacccccaagatccagaaggacggcatcagcaagagcgccggcctggagcagcccaccgaccccgtggccagagacggccccctgagccagaccagcagcaagcccgaccccagccagtgggagagccccagcttcaaccccttcggcagccacagcgtgctgcagaacagcccccccctgagcagcgagggcagctaccacttcgaccccgacaacttcgacgagagcatggaccccttcaagcccaccaccaccctgaccagcagcgacttctgcagccccaccggcaaccacgtgaacgagatcctggagagccccaagaaggccaagagcagactgatcaccagcggctgcaaggtgaagaagcacgagacccagagcctggccctggacgcctgcagcagagacgagggcgccgtgatcagccagatcagcgacatcagcaacagagacggccacgccaccgacgaggagaagctggccagcaccagctgcggccagaagagcgccggcgccgaggtgaagggcgagcccgaggaggacctggagtacttcgagtgcagcaacgtgcccgtgagcaccatcaaccacgccttcagcagcagcgaggccggcatcgagaaggagacctgccagaagatggaggaggacggcagcaccgtgctgggcctgctggagagcagcgccgagaaggcccccgtgagcgtgagctgcggcggcgagagccccctggacggcatctgcctgagcgagagcgacaagaccgccgtgctgaccctgatcagagaggagatcatcaccaaggagatcgaggccaacgagtggaagaagaagtacgaggagaccagacaggaggtgctggagatgagaaagatcgtggccgagtacgagaagaccatcgcccagatgatcgaggacgagcagagaaccagcatgaccagccagaagagcttccagcagctgaccatggagaaggagcaggccctggccgacctgaacagcgtggagagaagcctgagcgacctgttcagaagatacgagaacctgaagggcgtgctggagggcttcaagaagaacgaggaggccctgaagaagtgcgcccaggactacctggccagagtgaagcaggaggagcagagataccaggccctgaagatccacgccgaggagaagctggacaaggccaacgaggagatcgcccaggtgagaaccaaggccaaggccgagagcgccgccctgcacgccggcctgagaaaggagcagatgaaggtggagagcctggagagagccctgcagcagaagaaccaggagatcgaggagctgaccaagatctgcgacgagctgatcgccaagctgggcaagaccgactag

SEQ ID NO: 102921 - DNA, 1140 bp, synthetic construct
  misc_feature 1..1140: note = Description of Artificial Sequence: Synthetic coding sequence
  source 1..1140: mol_type = other DNA
atgggcggcagccacagccagacccccagaggcagagagcccgccggcgagagacaccccagacccaccgagaccgccaccaccgagcaggtgaagttcctgtgcttcctgctgagcggctgcaaggtgaagaagcacgagacccagagcctggccctggacgcctgcagcagagacgagggcgccgtgatcagccagatcagcgacatcagcaacagagacggccacgccaccgacgaggagaagctggccagcaccagctgcggccagaagagcgccggcgccgaggtgaagggcgagcccgaggaggacctggagtacttcgagtgcagcaacgtgcccgtgagcaccatcaaccacgccttcagcagcagcgaggccggcatcgagaaggagacctgccagaagatggaggaggacggcagcaccgtgctgggcctgctggagagcagcgccgagaaggcccccgtgagcgtgagctgcggcggcgagagccccctggacggcatctgcctgagcgagagcgacaagaccgccgtgctgaccctgatcagagaggagatcatcaccaaggagatcgaggccaacgagtggaagaagaagtacgaggagaccagacaggaggtgctggagatgagaaagatcgtggccgagtacgagaagaccatcgcccagatgatcgaggacgagcagagaaccagcatgaccagccagaagagcttccagcagctgaccatggagaaggagcaggccctggccgacctgaacagcgtggagagaagcctgagcgacctgttcagaagatacgagaacctgaagggcgtgctggagggcttcaagaagaacgaggaggccctgaagaagtgcgcccaggactacctggccagagtgaagcaggaggagcagagataccaggccctgaagatccacgccgaggagaagctggacaaggccaacgaggagatcgcccaggtgagaaccaaggccaaggccgagagcgccgccctgcacgccggcctgagaaaggagcagatgaaggtggagagcctggagagagccctgcagcagaagaaccaggagatcgaggagctgaccaagatctgcgacgagctgatcgccaagctgggcaagaccgactag

SEQ ID NO: 102922 - DNA, 1104 bp, synthetic construct
  misc_feature 1..1104: note = Description of Artificial Sequence: Synthetic coding sequence
  source 1..1104: mol_type = other DNA
atgggcggcagccacagccagacccccagaggcagagagcccgccggcgagagacaccccagacccaccgagaccgccagcggctgcaaggtgaagaagcacgagacccagagcctggccctggacgcctgcagcagagacgagggcgccgtgatcagccagatcagcgacatcagcaacagagacggccacgccaccgacgaggagaagctggccagcaccagctgcggccagaagagcgccggcgccgaggtgaagggcgagcccgaggaggacctggagtacttcgagtgcagcaacgtgcccgtgagcaccatcaaccacgccttcagcagcagcgaggccggcatcgagaaggagacctgccagaagatggaggaggacggcagcaccgtgctgggcctgctggagagcagcgccgagaaggcccccgtgagcgtgagctgcggcggcgagagccccctggacggcatctgcctgagcgagagcgacaagaccgccgtgctgaccctgatcagagaggagatcatcaccaaggagatcgaggccaacgagtggaagaagaagtacgaggagaccagacaggaggtgctggagatgagaaagatcgtggccgagtacgagaagaccatcgcccagatgatcgaggacgagcagagaaccagcatgaccagccagaagagcttccagcagctgaccatggagaaggagcaggccctggccgacctgaacagcgtggagagaagcctgagcgacctgttcagaagatacgagaacctgaagggcgtgctggagggcttcaagaagaacgaggaggccctgaagaagtgcgcccaggactacctggccagagtgaagcaggaggagcagagataccaggccctgaagatccacgccgaggagaagctggacaaggccaacgaggagatcgcccaggtgagaaccaaggccaaggccgagagcgccgccctgcacgccggcctgagaaaggagcagatgaaggtggagagcctggagagagccctgcagcagaagaaccaggagatcgaggagctgaccaagatctgcgacgagctgatcgccaagctgggcaagaccgactag

SEQ ID NO: 102923 - DNA, 2454 bp, synthetic construct
  misc_feature 1..2454: note = Description of Artificial Sequence: Synthetic coding sequence
  source 1..2454: mol_type = other DNA
atggccttcagcccctggcagatcctgagccccgtgcagtgggccaagtggacctggagcgccgtgagaggcggcgccgccggcgaggacgaggccggcggccccgagggcgaccccgaggaggaggacagccaggccgagaccaagagcctgagcttcagcagcgacagcgagggcaacttcgagacccccgaggccgagacccccatcagaagccccttcaaggagagctgcgaccccagcctgggcctggccggccccggcgccaagagccaggagagccaggaggccgacgagcagctggtggccgaggtggtggagaagtgcagcagcaagacctgcagcaagcccagcgagaacgaggtgccccagcaggccatcgacagccacagcgtgaagaacttcagagaggagcccgagcacgacttcagcaagatcagcatcgtgagacccttcagcatcgagaccaaggacagcaccgacatcagcgccgtgctgggcaccaaggccgcccacggctgcgtgaccgccgtgagcggcaaggccctgcccagcagcccccccgacgccctgcaggacgaggccatgaccgagggcagcatgggcgtgaccctggaggccagcgccgaggccgacctgaaggccggcaacagctgccccgagctggtgcccagcagaagaagcaagctgagaaagcccaagcccgtgcccctgagaaagaaggccatcggcggcgagttcagcgacaccaacgccgccgtggagggcacccccctgcccaaggccagctaccacttcagccccgaggagctggacgagaacaccagccccctgctgggcgacgccagattccagaagagcccccccgacctgaaggagacccccggcaccctgagcagcgacaccaacgacagcggcgtggagctgggcgaggagagcagaagcagccccctgaagctggagttcgacttcaccgaggacaccggcaacatcgaggccagaaaggccctgcccagaaagctgggcagaaagctgggcagcaccctgacccccaagatccagaaggacggcatcagcaagagcgccggcctggagcagcccaccgaccccgtggccagagacggccccctgagccagaccagcagcaagcccgaccccagccagtgggagagccccagcttcaaccccttcggcagccacagcgtgctgcagaacagcccccccctgagcagcgagggcagctaccacttcgaccccgacaacttcgacgagagcatggaccccttcaagcccaccaccaccctgaccagcagcgacttctgcagccccaccggcaaccacgtgaacgagatcctggagagccccaagaaggccaagagcagactgatcaccaccaccgagcaggtgaagttcctgtgcttcctgctgagcggctgcaaggtgaagaagcacgagacccagagcctggccctggacgcctgcagcagagacgagggcgccgtgatcagccagatcagcgacatcagcaacagagacggccacgccaccgacgaggagaagctggccagcaccagctgcggccagaagagcgccggcgccgaggtgaagggcgagcccgaggaggacctggagtacttcgagtgcagcaacgtgcccgtgagcaccatcaaccacgccttcagcagcagcgaggccggcatcgagaaggagacctgccagaagatggaggaggacggcagcaccgtgctgggcctgctggagagcagcgccgagaaggcccccgtgagcgtgagctgcggcggcgagagccccctggacggcatctgcctgagcgagagcgacaagaccgccgtgctgaccctgatcagagaggagatcatcaccaaggagatcgaggccaacgagtggaagaagaagtacgaggagaccagacaggaggtgctggagatgagaaagatcgtggccgagtacgagaagaccatcgcccagatgatcgaggacgagcagagaaccagcatgaccagccagaagagcttccagcagctgaccatggagaaggagcaggccctggccgacctgaacagcgtggagagaagcctgagcgacctgttcagaagatacgagaacctgaagggcgtgctggagggcttcaagaagaacgaggaggccctgaagaagtgcgcccaggactacctggccagagtgaagcaggaggagcagagataccaggccctgaagatccacgccgaggagaagctggacaaggccaacgaggagatcgcccaggtgagaaccaaggccaaggccgagagcgccgccctgcacgccggcctgagaaaggagcagatgaaggtggagagcctggagagagccctgcagcagaagaaccaggagatcgaggagctgaccaagatctgcgacgagctgatcgccaagctgggcaagaccgactag

SEQ ID NO: 102924 - DNA, 2379 bp, synthetic construct
  misc_feature 1..2379: note = Description of Artificial Sequence: Synthetic coding sequence
  source 1..2379: mol_type = other DNA
atgcagagacagaccatcaagggcgccggcgccggcggcgccgccctgatggccttcagcccctggcagatcctgagccccgtgcagtgggccaagtggacctggagcgccgtgagaggcggcgccgccggcgaggacgaggccggcggccccgagggcgaccccgaggaggaggacagccaggccgagaccaagagcctgagcttcagcagcgacagcgagggcaacttcgagacccccgaggccgagacccccatcagaagccccttcaaggagagctgcgaccccagcctgggcctggccggccccggcgccaagagccaggagagccaggaggccgacgagcagctggtggccgaggtggtggagaagtgcagcagcaagacctgcagcaagcccagcgagaacgaggtgccccagcaggccatcgacagccacagcgtgaagaacttcagagaggagcccgagcacgacttcagcaagatcagcatcgtgagacccttcagcatcgagaccaaggacagcaccgacatcagcgccgtgctgggcaccaaggccgcccacggctgcgtgaccgccgtgagcggcaaggccctgcccagcagcccccccgacgccctgcaggacgaggccatgaccgagggcagcatgggcgtgaccctggaggccagcgccgaggccgacctgaaggccggcaacagctgccccgagctggtgcccagcagaagaagcaagctgagaaagcccaagcccgtgcccctgagaaagaaggccatcggcggcgagttcagcgacaccaacgccgccgtggagggcacccccctgcccaaggccagctaccacttcagccccgaggagctggacgagaacaccagccccctgctgggcgacgccagattccagaagagcccccccgacctgaaggagacccccggcaccctgagcagcgacaccaacgacagcggcgtggagctgggcgaggagagcagaagcagccccctgaagctggagttcgacttcaccgaggacaccggcaacatcgaggccagaaaggccctgcccagaaagctgggcagaaagctgggcagcaccctgacccccaagatccagaaggacggcatcagcaagagcgccggcctggagcagcccaccgaccccgtggccagagacggccccctgagccagaccagcagcaagcccgaccccagccagtgggagagccccagcttcaaccccttcggcagccacagcgtgctgcagaacagcccccccctgagcagcgagggcagctaccacttcgaccccgacaacttcgacgagagcatggaccccttcaagcccaccaccaccctgaccagcagcgacttctgcagccccaccggcaaccacgtgaacgagatcctggagagccccaagaaggccaagagcagactgatcaccagcggctgcaaggtgaagaagcacgagacccagagcctggccctggacgcctgcagcagagacgagggcgccgtgatcagccagatcagcgacatcagcaacagagacggccacgccaccgacgaggagaagctggccagcaccagctgcggccagaagagcgccggcgccgaggtgaagggcatcgagaaggagacctgccagaagatggaggaggacggcagcaccgtgctgggcctgctggagagcagcgccgagaaggcccccgtgagcgtgagctgcggcggcgagagccccctggacggcatctgcctgagcgagagcgacaagaccgccgtgctgaccctgatcagagaggagatcatcaccaaggagatcgaggccaacgagtggaagaagaagtacgaggagaccagacaggaggtgctggagatgagaaagatcgtggccgagtacgagaagaccatcgcccagatgatcgaggacgagcagagaaccagcatgaccagccagaagagcttccagcagctgaccatggagaaggagcaggccctggccgacctgaacagcgtggagagaagcctgagcgacctgttcagaagatacgagaacctgaagggcgtgctggagggcttcaagaagaacgaggaggccctgaagaagtgcgcccaggactacctggccagagtgaagcaggaggagcagagataccaggccctgaagatccacgccgaggagaagctggacaaggccaacgaggagatcgcccaggtgagaaccaaggccaaggccgagagcgccgccctgcacgccggcctgagaaaggagcagatgaaggtggagagcctggagagagccctgcagcagaagaaccaggagatcgaggagctgaccaagatctgcgacgagctgatcgccaagctgggcaagaccgactag

SEQ ID NO: 102925 - DNA, 1431 bp, synthetic construct
  misc_feature 1..1431: note = Description of Artificial Sequence: Synthetic coding sequence
  source 1..1431: mol_type = other DNA
atgaccgagggcagcatgggcgtgaccctggaggccagcgccgaggccgacctgaaggccggcaacagctgccccgagctggtgcccagcagaagaagcaagctgagaaagcccaagcccgtgcccctgagaaagaaggccatcggcggcgagttcagcgacaccaacgccgccgtggagggcacccccctgcccaaggccagctaccacttcagccccgaggagctggacgagaacaccagccccctgctgggcgacgccagattccagaagagcccccccgacctgaaggagacccccggcaccctgagcagcgacaccaacgacagcggcgtggagctgggcgaggagagcagaagcagccccctgaagctggagttcgacttcaccgaggacaccggcaacatcgaggccagaaaggccctgcccagaaagctgggcagaaagctgggcagcaccctgacccccaagatccagaaggacggcatcagcaagagcgccggcctggagcagcccaccgaccccgtggccagagacggccccctgagccagaccagcagcaagcccgaccccagccagtgggagagccccagcttcaaccccttcggcagccacagcgtgctgcagaacagcccccccctgagcagcgagggcagctaccacttcgaccccgacaacttcgacgagagcatggaccccttcaagcccaccaccaccctgaccagcagcgacttctgcagccccaccggcaaccacgtgaacgagatcctggagagccccaagaaggccaagagcagactgatcaccagcggctgcaaggtgaagaagcacgagacccagagcctggccctggacgcctgcagcagagacgagggcgccgtgatcagccagatcagcgacatcagcaacagagacggccacgccaccgacgaggagaagctggccagcaccagctgcggccagaagagcgccggcgccgaggtgaagggcgagcccgaggaggacctggagtacttcgagtgcagcaacgtgcccgtgagcaccatcaaccacgccttcagcagcagcgaggccggcatcgagaaggagacctgccagaagatggaggaggacggcagcaccgtgctgggcctgctggagagcagcgccgagaaggcccccgtgagcgtgagctgcggcggcgagagccccctggacggcatctgcctgagcgagagcgacaagaccgccgtgctgaccctgatcagagaggagatcatcaccaaggagatcgaggccaacgagtggaagaagaagtacttcaacaaggaggtgttcagaggcgacatctgccccaagagattcggcctgcagatccccgtgatcttcaagaagcagctgaccaccaagagcctgagcctgcacagagtgaccgtgaagaagctgatgtag

SEQ ID NO: 102926 - DNA, 2196 bp, synthetic construct
  misc_feature 1..2196: note = Description of Artificial Sequence: Synthetic coding sequence
  source 1..2196: mol_type = other DNA
atgaacaacatcctgaagctgaagagcagcgacagcgagggcaacttcgagacccccgaggccgagacccccatcagaagccccttcaaggagagctgcgaccccagcctgggcctggccggccccggcgccaagagccaggagagccaggaggccgacgagcagctggtggccgaggtggtggagaagtgcagcagcaagacctgcagcaagcccagcgagaacgaggtgccccagcaggccatcgacagccacagcgtgaagaacttcagagaggagcccgagcacgacttcagcaagatcagcatcgtgagacccttcagcatcgagaccaaggacagcaccgacatcagcgccgtgctgggcaccaaggccgcccacggctgcgtgaccgccgtgagcggcaaggccctgcccagcagcccccccgacgccctgcaggacgaggccatgaccgagggcagcatgggcgtgaccctggaggccagcgccgaggccgacctgaaggccggcaacagctgccccgagctggtgcccagcagaagaagcaagctgagaaagcccaagcccgtgcccctgagaaagaaggccatcggcggcgagttcagcgacaccaacgccgccgtggagggcacccccctgcccaaggccagctaccacttcagccccgaggagctggacgagaacaccagccccctgctgggcgacgccagattccagaagagcccccccgacctgaaggagacccccggcaccctgagcagcgacaccaacgacagcggcgtggagctgggcgaggagagcagaagcagccccctgaagctggagttcgacttcaccgaggacaccggcaacatcgaggccagaaaggccctgcccagaaagctgggcagaaagctgggcagcaccctgacccccaagatccagaaggacggcatcagcaagagcgccggcctggagcagcccaccgaccccgtggccagagacggccccctgagccagaccagcagcaagcccgaccccagccagtgggagagccccagcttcaaccccttcggcagccacagcgtgctgcagaacagcccccccctgagcagcgagggcagctaccacttcgaccccgacaacttcgacgagagcatggaccccttcaagcccaccaccaccctgaccagcagcgacttctgcagccccaccggcaaccacgtgaacgagatcctggagagccccaagaaggccaagagcagactgatcaccagcggctgcaaggtgaagaagcacgagacccagagcctggccctggacgcctgcagcagagacgagggcgccgtgatcagccagatcagcgacatcagcaacagagacggccacgccaccgacgaggagaagctggccagcaccagctgcggccagaagagcgccggcgccgaggtgaagggcatcgagaaggagacctgccagaagatggaggaggacggcagcaccgtgctgggcctgctggagagcagcgccgagaaggcccccgtgagcgtgagctgcggcggcgagagccccctggacggcatctgcctgagcgagagcgacaagaccgccgtgctgaccctgatcagagaggagatcatcaccaaggagatcgaggccaacgagtggaagaagaagtacgaggagaccagacaggaggtgctggagatgagaaagatcgtggccgagtacgagaagaccatcgcccagatgatcgaggacgagcagagaaccagcatgaccagccagaagagcttccagcagctgaccatggagaaggagcaggccctggccgacctgaacagcgtggagagaagcctgagcgacctgttcagaagatacgagaacctgaagggcgtgctggagggcttcaagaagaacgaggaggccctgaagaagtgcgcccaggactacctggccagagtgaagcaggaggagcagagataccaggccctgaagatccacgccgaggagaagctggacaaggccaacgaggagatcgcccaggtgagaaccaaggccaaggccgagagcgccgccctgcacgccggcctgagaaaggagcagatgaaggtggagagcctggagagagccctgcagcagaagaaccaggagatcgaggagctgaccaagatctgcgacgagctgatcgccaagctgggcaagaccgactag

SEQ ID NO: 102927 - DNA, 1833 bp, synthetic construct
  misc_feature 1..1833: note = Description of Artificial Sequence: Synthetic coding sequence
  source 1..1833: mol_type = other DNA
atgaccgagggcagcatgggcgtgaccctggaggccagcgccgaggccgacctgaaggccggcaacagctgccccgagctggtgcccagcagaagaagcaagctgagaaagcccaagcccgtgcccctgagaaagaaggccatcggcggcgagttcagcgacaccaacgccgccgtggagggcacccccctgcccaaggccagctaccacttcagccccgaggagctggacgagaacaccagccccctgctgggcgacgccagattccagaagagcccccccgacctgaaggagacccccggcaccctgagcagcgacaccaacgacagcggcgtggagctgggcgaggagagcagaagcagccccctgaagctggagttcgacttcaccgaggacaccggcaacatcgaggccagaaaggccctgcccagaaagctgggcagaaagctgggcagcaccctgacccccaagatccagaaggacggcatcagcaagagcgccggcctggagcagcccaccgaccccgtggccagagacggccccctgagccagaccagcagcaagcccgaccccagccagtgggagagccccagcttcaaccccttcggcagccacagcgtgctgcagaacagcccccccctgagcagcgagggcagctaccacttcgaccccgacaacttcgacgagagcatggaccccttcaagcccaccaccaccctgaccagcagcgacttctgcagccccaccggcaaccacgtgaacgagatcctggagagccccaagaaggccaagagcagactgatcaccagcggctgcaaggtgaagaagcacgagacccagagcctggccctggacgcctgcagcagagacgagggcgccgtgatcagccagatcagcgacatcagcaacagagacggccacgccaccgacgaggagaagctggccagcaccagctgcggccagaagagcgccggcgccgaggtgaagggcgagcccgaggaggacctggagtacttcgagtgcagcaacgtgcccgtgagcaccatcaaccacgccttcagcagcagcgaggccggcatcgagaaggagacctgccagaagatggaggaggacggcagcaccgtgctgggcctgctggagagcagcgccgagaaggcccccgtgagcgtgagctgcggcggcgagagccccctggacggcatctgcctgagcgagagcgacaagaccgccgtgctgaccctgatcagagaggagatcatcaccaaggagatcgaggccaacgagtggaagaagaagtacgaggagaccagacaggaggtgctggagatgagaaagatcgtggccgagtacgagaagaccatcgcccagatgatcgaggacgagcagagaaccagcatgaccagccagaagagcttccagcagctgaccatggagaaggagcaggccctggccgacctgaacagcgtggagagaagcctgagcgacctgttcagaagatacgagaacctgaagggcgtgctggagggcttcaagaagaacgaggaggccctgaagaagtgcgcccaggactacctggccagagtgaagcaggaggagcagagataccaggccctgaagatccacgccgaggagaagctggacaaggccaacgaggagatcgcccaggtgagaaccaaggccaaggccgagagcgccgccctgcacgccggcctgagaaaggagcagatgaaggtggagagcctggagagagccctgcagcagaagaaccaggagatcgaggagctgaccaagatctgcgacgagctgatcgccaagctgggcaagaccgactag

SEQ ID NO: 102928 - DNA, 1746 bp, synthetic construct
  misc_feature 1..1746: note = Description of Artificial Sequence: Synthetic coding sequence
  source 1..1746: mol_type = other DNA
atgaccgagggcagcatgggcgtgaccctggaggccagcgccgaggccgacctgaaggccggcaacagctgccccgagctggtgcccagcagaagaagcaagctgagaaagcccaagcccgtgcccctgagaaagaaggccatcggcggcgagttcagcgacaccaacgccgccgtggagggcacccccctgcccaaggccagctaccacttcagccccgaggagctggacgagaacaccagccccctgctgggcgacgccagattccagaagagcccccccgacctgaaggagacccccggcaccctgagcagcgacaccaacgacagcggcgtggagctgggcgaggagagcagaagcagccccctgaagctggagttcgacttcaccgaggacaccggcaacatcgaggccagaaaggccctgcccagaaagctgggcagaaagctgggcagcaccctgacccccaagatccagaaggacggcatcagcaagagcgccggcctggagcagcccaccgaccccgtggccagagacggccccctgagccagaccagcagcaagcccgaccccagccagtgggagagccccagcttcaaccccttcggcagccacagcgtgctgcagaacagcccccccctgagcagcgagggcagctaccacttcgaccccgacaacttcgacgagagcatggaccccttcaagcccaccaccaccctgaccagcagcgacttctgcagccccaccggcaaccacgtgaacgagatcctggagagccccaagaaggccaagagcagactgatcaccagcggctgcaaggtgaagaagcacgagacccagagcctggccctggacgcctgcagcagagacgagggcgccgtgatcagccagatcagcgacatcagcaacagagacggccacgccaccgacgaggagaagctggccagcaccagctgcggccagaagagcgccggcgccgaggtgaagggcatcgagaaggagacctgccagaagatggaggaggacggcagcaccgtgctgggcctgctggagagcagcgccgagaaggcccccgtgagcgtgagctgcggcggcgagagccccctggacggcatctgcctgagcgagagcgacaagaccgccgtgctgaccctgatcagagaggagatcatcaccaaggagatcgaggccaacgagtggaagaagaagtacgaggagaccagacaggaggtgctggagatgagaaagatcgtggccgagtacgagaagaccatcgcccagatgatcgaggacgagcagagaaccagcatgaccagccagaagagcttccagcagctgaccatggagaaggagcaggccctggccgacctgaacagcgtggagagaagcctgagcgacctgttcagaagatacgagaacctgaagggcgtgctggagggcttcaagaagaacgaggaggccctgaagaagtgcgcccaggactacctggccagagtgaagcaggaggagcagagataccaggccctgaagatccacgccgaggagaagctggacaaggccaacgaggagatcgcccaggtgagaaccaaggccaaggccgagagcgccgccctgcacgccggcctgagaaaggagcagatgaaggtggagagcctggagagagccctgcagcagaagaaccaggagatcgaggagctgaccaagatctgcgacgagctgatcgccaagctgggcaagaccgactag

SEQ ID NO: 102929 - DNA, 93 bp, synthetic construct
  misc_feature 1..93: note = Description of Artificial Sequence: Synthetic coding sequence
  source 1..93: mol_type = other DNA
atgaccgagggcagcatgggcgtgaccctggaggccagcgccgaggccgacctgaaggccggcaacagctgccccgagctggtgcccagctag

SEQ ID NO: 102930 - DNA, 417 bp, synthetic construct
  misc_feature 1..417: note = Description of Artificial Sequence: Synthetic coding sequence
  source 1..417: mol_type = other DNA
atgaccgagggcagcatgggcgtgaccctggaggccagcgccgaggccgacctgaaggccggcaacagctgccccgagctggtgcccagcagaagaagcaagctgagaaagcccaagcccgtgcccctgagaaagaaggccatcggcggcgagttcagcgacaccaacgccgccgtggagggcacccccctgcccaaggccagctaccacttcagccccgaggagctggacgagaacaccagccccctgctgggcgacgccagattccagaagagcccccccgacctgaaggagacccccggcaccctgagcagcgacaccaacgacagcggcgtggagctgggcgaggagagcagaagcagccccctgaagctggagttcgacttcaccgaggacaccggcaacatcgaggcctag

SEQ ID NO: 102931 - DNA, 186 bp, synthetic construct
  misc_feature 1..186: note = Description of Artificial Sequence: Synthetic coding sequence
  source 1..186: mol_type = other DNA
atgaccgagggcagcatgggcgtgaccctggaggccagcgccgaggccgacctgaaggccggcaacagctgccccgagctggtgcccagcagaagaagcaagctgagaaagcccaagcccgtgcccctgagaaagaaggccatcggcggcgagttcagcgacaccaacgccgccgtggagggctag

SEQ ID NO: 102932 - DNA, 390 bp, synthetic construct
  misc_feature 1..390: note = Description of Artificial Sequence: Synthetic coding sequence
  source 1..390: mol_type = other DNA
atggccttcagcccctggcagatcctgagccccgtgcagtgggccaagtggacctggagcgccgtgagaggcggcgccgccggcgaggacgaggccggcggccccgagggcgaccccgaggaggaggacagccaggccgagaccaagagcctgagcttcagcagcgacagcgagggcaacttcgagacccccgaggccgagacccccatcagaagccccttcaaggagagctgcgaccccagcctgggcctggccggccccggcgccaagagccaggagagccaggaggccgacgagcagctggtggccgaggtggtggagaagtgcagcagcaagacctgcagcaagcccagcgagaacgaggtgccccagcaggccatcgacagctag

SEQ ID NO: 102933 - DNA, 3081 bp, synthetic construct
  misc_feature 1..3081: note = Description of Artificial Sequence: Synthetic coding sequence
  source 1..3081: mol_type = other DNA
atgggcggcagccagagcctgcagcccgcccccgccagcgacctgaacctggaggccagcgaggccatgagcagcgacagcgaggaggccttcgagacccccgagagcaccacccccgtgaaggccccccccgccccccccccccccccccccgaggtgatccccgagcccgaggtgagcacccagcccccccccgaggagcccggctgcggcagcgagaccgtgcccgtgcccgacggccccagaagcgacagcgtggagggcagccccttcagaccccccagccacagcttcagcgccgtgttcgacgaggacaagcccatcgccagcagcggcacctacaacctggacttcgacaacatcgagctggtggacaccttccagaccctggagcccagagccagcgacgccaagaaccaggagggcaaggtgaacaccagaagaaagagcaccgacagcgtgcccatcagcaagagcaccctgagcagaagcctgagcctgcaggccagcgacttcgacggcgccagcagcagcggcaaccccgaggccgtggccctggcccccgacgcctacagcaccggcagcagcagcgccagcagcaccctgaagagaaccaagaagcccagaccccccagcctgaagaagaagcagaccaccaagaagcccaccgagaccccccccgtgaaggagacccagcaggagcccgacgaggagagcctggtgcccagcggcgagaacctggccagcgagaccaagaccgagagcgccaagaccgagggccccagccccgccctgctggaggagacccccctggagcccgccgtgggccccaaggccgcctgccccctggacagcgagagcgccgagggcgtggtgccccccgccagcggcggcggcagagtgcagaacagcccccccgtgggcagaaagaccctgcccctgaccaccgcccccgaggccggcgaggtgacccccagcgacagcggcggccaggaggacagccccgccaagggcctgagcgtgagactggagttcgactacagcgaggacaagagcagctgggacaaccagcaggagaaccccccccccaccaagaagatcggcaagaagcccgtggccaagatgcccctgagaagacccaagatgaagaagacccccgagaagctggacaacacccccgccagcccccccagaagccccgccgagcccaacgacatccccatcgccaagggcacctacaccttcgacatcgacaagtgggacgaccccaacttcaaccccttcagcagcaccagcaagatgcaggagagccccaagctgccccagcagagctacaacttcgaccccgacacctgcgacgagagcgtggaccccttcaagaccagcagcaagacccccagcagccccagcaagagccccgccagcttcgagatccccgccagcgccatggaggccaacggcgtggacggcgacggcctgaacaagcccgccaagaagaagaagacccccctgaagaccgacaccttcagagtgaagaagagccccaagagaagccccctgagcgacccccccagccaggaccccacccccgccgccacccccgagaccccccccgtgatcagcgccgtggtgcacgccaccgacgaggagaagctggccgtgaccaaccagaagtggacctgcatgaccgtggacctggaggccgacaagcaggactacccccagcccagcgacctgagcaccttcgtgaacgagaccaagttcagcagccccaccgaggagctggactacagaaacagctacgagatcgagtacatggagaagatcggcagcagcctgccccaggacgacgacgcccccaagaagcaggccctgtacctgatgttcgacaccagccaggagagccccgtgaagagcagccccgtgagaatgagcgagagccccaccccctgcagcggcagcagcttcgaggagaccgaggccctggtgaacaccgccgccaagaaccagcaccccgtgcccagaggcctggcccccaaccaggagagccacctgcaggtgcccgagaagagcagccagaaggagctggaggccatgggcctgggcacccccagcgaggccatcgagatcaccgcccccgagggcagcttcgccagcgccgacgccctgctgagcagactggcccaccccgtgagcctgtgcggcgccctggactacctggagcccgacctggccgagaagaacccccccctgttcgcccagaagctgcaggaggagctggagttcgccatcatgagaatcgaggccctgaagctggccagacagatcgccctggccagcagaagccaccaggacgccaagagagaggccgcccaccccaccgacgtgagcatcagcaagaccgccctgtacagcagaatcggcaccgccgaggtggagaagcccgccggcctgctgttccagcagcccgacctggacagcgccctgcagatcgccagagccgagatcatcaccaaggagagagaggtgagcgagtggaaggacaagtacgaggagagcagaagagaggtgatggagatgagaaagatcgtggccgagtacgagaagaccatcgcccagatgatcgaggacgagcagagagagaagagcgtgagccaccagaccgtgcagcagctggtgctggagaaggagcaggccctggccgacctgaacagcgtggagaagagcctggccgacctgttcagaagatacgagaagatgaaggaggtgctggagggcttcagaaagaacgaggaggtgctgaagagatgcgcccaggagtacctgagcagagtgaagaaggaggagcagagataccaggccctgaaggtgcacgccgaggagaagctggacagagccaacgccgagatcgcccaggtgagaggcaaggcccagcaggagcaggccgcccaccaggccagcctgagaaaggagcagctgagagtggacgccctggagagaaccctggagcagaagaacaaggagatcgaggagctgaccaagatctgcgacgagctgatcgccaagatgggcaagagctag

SEQ ID NO: 102934 - DNA, 8847 bp, synthetic construct
  misc_feature 1..8847: note = Description of Artificial Sequence: Synthetic coding sequence
  source 1..8847: mol_type = other DNA
atgggcaacgagaacagcaccagcgacaaccagagaaccctgagcgcccagacccccagaagcgcccagccccccggcaacagccagaacatcaagagaaagcagcaggacacccccggcagccccgaccacagagacgccagcagcatcggcagcgtgggcctgggcggcttctgcaccgccagcgagagcagcgccagcctggacccctgcctggtgagccccgaggtgaccgagcccagaaaggacccccagggcgccagaggccccgagggcagcctgctgcccagccccccccccagccaggagagagagcaccccagcagcagcatgcccttcgccgagtgcccccccgagggctgcctggccagccccgccgccgcccccgaggacggcccccagacccagagccccagaagagagcccgcccccaacgcccccggcgacatcgccgccgccttccccgccgagagagacagcagcaccccctaccaggagatcgccgccgtgcccagcgccggcagagagagacagcccaaggaggagggccagaagagcagcttcagcttcagcagcggcatcgaccagagccccggcatgagccccgtgcccctgagagagcccatgaaggcccccctgtgcggcgagggcgaccagcccggcggcttcgagagccaggagaaggaggccgccggcggcttcccccccgccgagagcagacagggcgtggccagcgtgcaggtgacccccgaggcccccgccgccgcccagcagggcaccgagagcagcgccgtgctggagaagagccccctgaagcccatggcccccatcccccaggaccccgcccccagagccagcgacagagagagaggccagggcgaggcccccccccagtacctgaccgacgacctggagttcctgagagcctgccacctgcccagaagcaacagcggcgccgcccccgaggccgaggtgaacgccgccagccaggagagctgccagcagcccgtgggcgcctacctgccccacgccgagctgccctggggcctgcccagccccgccctggtgcccgaggccggcggcagcggcaaggaggccctggacaccatcgacgtgcagggccacccccagaccggcatgagaggcaccaagcccaaccaggtggtgtgcgtggccgccggcggccagcccgagggcggcctgcccgtgagccccgagcccagcctgctgacccccaccgaggaggcccaccccgccagcagcctggccagcttccccgccgcccagatccccatcgccgtggaggagcccggcagcagcagcagagagagcgtgagcaaggccggcatgcccgtgagcgccgacgccgccaaggaggtggtggacgccggcctggtgggcctggagagacaggtgagcgacctgggcagcaagggcgagcaccccgagggcgaccccggcgaggtgcccgcccccagcccccaggagagaggcgagcacctgaacaccgagcagagccacgaggtgcagcccggcgtgccccccccccccctgcccaaggagcagagccacgaggtgcagcccggcgccccccccccccccctgcccaaggcccccagcgagagcgccagaggcccccccggccccaccgacggcgccaaggtgcacgaggacagcaccagccccgccgtggccaaggagggcagcagaagccccggcgacagccccggcggcaaggaggaggcccccgagccccccgacggcggcgaccccggcaacctgcagggcgaggacagccaggccttcagcagcaagagagaccccgaggtgggcaaggacgagctgagcaagcccagcagcgacgccgagagcagagaccaccccagcagccacagcgcccagccccccagaaagggcggcgccggccacaccgacggcccccacagccagaccgccgaggccgacgccagcggcctgccccacaagctgggcgaggaggaccccgtgctgccccccgtgcccgacggcgccggcgagcccaccgtgcccgagggcgccatctgggagggcagcggcctgcagcccaagtgccccgacaccctgcagagcagagagggcctgggcagaatggagagcttcctgaccctggagagcgagaagagcgacttcccccccacccccgtggccgaggtggcccccaaggcccaggagggcgagagcaccctggagatcagaaagatgggcagctgcgacggcgagggcctgctgaccagccccgaccagcccagaggccccgcctgcgacgccagcagacaggagttccacgccggcgtgccccaccccccccagggcgagaacctggccgccgacctgggcctgaccgccctgatcctggaccaggaccagcagggcatccccagctgccccggcgagggctggatcagaggcgccgccagcgagtggcccctgctgagcagcgagaagcacctgcagcccagccaggcccagcccgagaccagcatcttcgacgtgctgaaggagcaggcccagccccccgagaacggcaaggagaccagccccagccaccccggcttcaaggaccagggcgccgacagcagccagatccacgtgcccgtggagccccaggaggacaacaacctgcccacccacggcggccaggagcaggccctgggcagcgagctgcagagccagctgcccaagggcaccctgagcgacacccccaccagcagccccaccgacatggtgtgggagagcagcctgaccgaggagagcgagctgagcgcccccaccagacagaagctgcccgccctgggcgagaagagacccgagggcgcctgcggcgacggccagagcagcagagtgagcccccccgccgccgacgtgctgaaggacttcagcctggccggcaacttcagcagaaaggagacctgctgcaccggccagggccccaacaagagccagcaggccctggccgacgccctggaggagggcagccagcacgaggaggcctgccagagacaccccggcgccagcgaggccgccgacggctgcagccccctgtggggcctgagcaagagagagatggccagcggcaacaccggcgaggcccccccctgccagcccgacagcgtggccctgctggacgccgtgccctgcctgcccgccctggcccccgccagccccggcgtgacccccacccaggacgcccccgagaccgaggcctgcgacgagacccaggagggcagacagcagcccgtgcccgccccccagcagaagatggagtgctgggccaccagcgacgccgagagccccaagctgctggccagcttccccagcgccggcgagcagggcggcgaggccggcgccgccgagaccggcggcagcgccggcgccggcgaccccggcaagcagcaggcccccgagaagcccggcgaggccaccctgagctgcggcctgctgcagaccgagcactgcctgaccagcggcgaggaggccagcaccagcgccctgagagagagctgccaggccgagcaccccatggccagctgccaggacgccctgctgcccgccagagagctgggcggcatccccagaagcaccatggacttcagcacccaccaggccgtgcccgaccccaaggagctgctgctgagcggcccccccgaggtggccgcccccgacaccccctacctgcacgtggacagcgccgcccagagaggcgccgaggacagcggcgtgaaggccgtgagcagcgccgaccccagagcccccggcgagagcccctgccccgtgggcgagccccccctggccctggagaacgccgccagcctgaagctgttcgccggcagcctggcccccctgctgcagcccggcgccgccggcggcgagatccccgccgtgcaggccagcagcggcagccccaaggccagaaccaccgagggccccgtggacagcatgccctgcctggacagaatgcccctgctggccaagggcaagcaggccaccggcgaggagaaggccgccaccgcccccggcgccggcgccaaggccagcggcgagggcatggccggcgacgccgccggcgagaccgagggcagcatggagagaatgggcgagcccagccaggaccccaagcagggcaccagcggcggcgtggacaccagcagcgagcagatcgccaccctgaccggcttccccgacttcagagagcacatcgccaagatcttcgagaagcccgtgctgggcgccctggccacccccggcgagaaggccggcgccggcagaagcgccgtgggcaaggacctgaccagacccctgggccccgagaagctgctggacggcccccccggcgtggacgtgaccctgctgcccgccccccccgccagactgcaggtggagaagaagcagcagctggccggcgaggccgagatcagccacctggccctgcaggaccccgccagcgacaagctgctgggccccgccggcctgacctgggagagaaacctgcccggcgccggcgtgggcaaggagatggccggcgtgccccccaccctgagagaggacgagagacccgagggccccggcgccgcctggcccggcctggagggccaggcctacagccagctggagagaagcagacaggagctggccagcggcctgcccagccccgccgccacccaggagctgcccgtggagagagccgccgccttccaggtggccccccacagccacggcgaggaggccgtggcccaggacagaatccccagcggcaagcagcaccaggagaccagcgcctgcgacagcccccacggcgaggacggccccggcgacttcgcccacaccggcgtgcccggccacgtgcccagaagcacctgcgcccccagcccccagagagaggtgctgaccgtgcccgaggccaacagcgagccctggaccctggacaccctgggcggcgagagaagacccggcgtgaccgccggcatcctggagatgagaaacgccctgggcaaccagagcacccccgccccccccaccggcgaggtggccgacacccccctggagcccggcaaggtggccggcgccgccggcgaggccgagggcgacatcaccctgagcaccgccgagacccaggcctgcgccagcggcgacctgcccgaggccggcaccaccagaaccttcagcgtggtggccggcgacctggtgctgcccggcagctgccaggaccccgcctgcagcgacaaggcccccggcatggagggcaccgccgccctgcacggcgacagccccgccagaccccagcaggccaaggagcagcccggccccgagagacccatccccgccggcgacggcaaggtgtgcgtgagcagcccccccgagcccgacgagacccacgaccccaagctgcagcacctggcccccgaggagctgcacaccgacagagagagccccagacccggccccagcatgctgcccagcgtgcccaagaaggacgcccccagagtgatggacaaggtgaccagcgacgagaccagaggcgccgagggcaccgagagcagccccgtggccgacgacatcatccagcccgccgcccccgccgacctggagagccccaccctggccgccagcagctaccacggcgacgtggtgggccaggtgagcaccgacctgatcgcccagagcatcagccccgccgccgcccacgccggcctgccccccagcgccgccgagcacatcgtgagccccagcgcccccgccggcgacagagtggaggccagcacccccagctgccccgaccccgccaaggacctgagcagaagcagcgacagcgaggaggccttcgagacccccgagagcaccacccccgtgaaggccccccccgccccccccccccccccccccgaggtgatccccgagcccgaggtgagcacccagcccccccccgaggagcccggctgcggcagcgagaccgtgcccgtgcccgacggccccagaagcgacagcgtggagggcagccccttcagaccccccagccacagcttcagcgccgtgttcgacgaggacaagcccatcgccagcagcggcacctacaacctggacttcgacaacatcgagctggtggacaccttccagaccctggagcccagagccagcgacgccaagaaccaggagggcaaggtgaacaccagaagaaagagcaccgacagcgtgcccatcagcaagagcaccctgagcagaagcctgagcctgcaggccagcgacttcgacggcgccagcagcagcggcaaccccgaggccgtggccctggcccccgacgcctacagcaccggcagcagcagcgccagcagcaccctgaagagaaccaagaagcccagaccccccagcctgaagaagaagcagaccaccaagaagcccaccgagaccccccccgtgaaggagacccagcaggagcccgacgaggagagcctggtgcccagcggcgagaacctggccagcgagaccaagaccgagagcgccaagaccgagggccccagccccgccctgctggaggagacccccctggagcccgccgtgggccccaaggccgcctgccccctggacagcgagagcgccgagggcgtggtgccccccgccagcggcggcggcagagtgcagaacagcccccccgtgggcagaaagaccctgcccctgaccaccgcccccgaggccggcgaggtgacccccagcgacagcggcggccaggaggacagccccgccaagggcctgagcgtgagactggagttcgactacagcgaggacaagagcagctgggacaaccagcaggagaaccccccccccaccaagaagatcggcaagaagcccgtggccaagatgcccctgagaagacccaagatgaagaagacccccgagaagctggacaacacccccgccagcccccccagaagccccgccgagcccaacgacatccccatcgccaagggcacctacaccttcgacatcgacaagtgggacgaccccaacttcaaccccttcagcagcaccagcaagatgcaggagagccccaagctgccccagcagagctacaacttcgaccccgacacctgcgacgagagcgtggaccccttcaagaccagcagcaagacccccagcagccccagcaagagccccgccagcttcgagatccccgccagcgccatggaggccaacggcgtggacggcgacggcctgaacaagcccgccaagaagaagaagacccccctgaagaccgacaccttcagagtgaagaagagccccaagagaagccccctgagcgacccccccagccaggaccccacccccgccgccacccccgagaccccccccgtgatcagcgccgtggtgcacgccaccgacgaggagaagctggccgtgaccaaccagaagtggacctgcatgaccgtggacctggaggccgacaagcaggactacccccagcccagcgacctgagcaccttcgtgaacgagaccaagttcagcagccccaccgaggagctggactacagaaacagctacgagatcgagtacatggagaagatcggcagcagcctgccccaggacgacgacgcccccaagaagcaggccctgtacctgatgttcgacaccagccaggagagccccgtgaagagcagccccgtgagaatgagcgagagccccaccccctgcagcggcagcagcttcgaggagaccgaggccctggtgaacaccgccgccaagaaccagcaccccgtgcccagaggcctggcccccaaccaggagagccacctgcaggtgcccgagaagagcagccagaaggagctggaggccatgggcctgggcacccccagcgaggccatcgagatcaccgcccccgagggcagcttcgccagcgccgacgccctgctgagcagactggcccaccccgtgagcctgtgcggcgccctggactacctggagcccgacctggccgagaagaacccccccctgttcgcccagaagctgcaggaggagctggagttcgccatcatgagaatcgaggccctgaagctggccagacagatcgccctggccagcagaagccaccaggacgccaagagagaggccgcccaccccaccgacgtgagcatcagcaagaccgccctgtacagcagaatcggcaccgccgaggtggagaagcccgccggcctgctgttccagcagcccgacctggacagcgccctgcagatcgccagagccgagatcatcaccaaggagagagaggtgagcgagtggaaggacaagtacgaggagagcagaagagaggtgatggagatgagaaagatcgtggccgagtacgagaagaccatcgcccagatgatcgaggacgagcagagagagaagagcgtgagccaccagaccgtgcagcagctggtgctggagaaggagcaggccctggccgacctgaacagcgtggagaagagcctggccgacctgttcagaagatacgagaagatgaaggaggtgctggagggcttcagaaagaacgaggaggtgctgaagagatgcgcccaggagtacctgagcagagtgaagaaggaggagcagagataccaggccctgaaggtgcacgccgaggagaagctggacagagccaacgccgagatcgcccaggtgagaggcaaggcccagcaggagcaggccgcccaccaggccagcctgagaaaggagcagctgagagtggacgccctggagagaaccctggagcagaagaacaaggagatcgaggagctgaccaagatctgcgacgagctgatcgccaagatgggcaagagctag

SEQ ID NO: 102935 - DNA, 8586 bp, synthetic construct
  misc_feature 1..8586: note = Description of Artificial Sequence: Synthetic coding sequence
  source 1..8586: mol_type = other DNA
cagagaaccctgagcgcccagacccccagaagcgcccagccccccggcaacagccagaacatcaagagaaagcagcaggacacccccggcagccccgaccacagagacgccagcagcatcggcagcgtgggcctgggcggcttctgcaccgccagcgagagcagcgccagcctggacccctgcctggtgagccccgaggtgaccgagcccagaaaggacccccagggcgccagaggccccgagggcagcctgctgcccagccccccccccagccaggagagagagcaccccagcagcagcatgcccttcgccgagtgcccccccgagggctgcctggccagccccgccgccgcccccgaggacggcccccagacccagagccccagaagagagcccgcccccaacgcccccggcgacatcgccgccgccttccccgccgagagagacagcagcaccccctaccaggagatcgccgccgtgcccagcgccggcagagagagacagcccaaggaggagggccagaagagcagcttcagcttcagcagcggcatcgaccagagccccggcatgagccccgtgcccctgagagagcccatgaaggcccccctgtgcggcgagggcgaccagcccggcggcttcgagagccaggagaaggaggccgccggcggcttcccccccgccgagagcagacagggcgtggccagcgtgcaggtgacccccgaggcccccgccgccgcccagcagggcaccgagagcagcgccgtgctggagaagagccccctgaagcccatggcccccatcccccaggaccccgcccccagagccagcgacagagagagaggccagggcgaggcccccccccagtacctgaccgacgacctggagttcctgagagcctgccacctgcccagaagcaacagcggcgccgcccccgaggccgaggtgaacgccgccagccaggagagctgccagcagcccgtgggcgcctacctgccccacgccgagctgccctggggcctgcccagccccgccctggtgcccgaggccggcggcagcggcaaggaggccctggacaccatcgacgtgcagggccacccccagaccggcatgagaggcaccaagcccaaccaggtggtgtgcgtggccgccggcggccagcccgagggcggcctgcccgtgagccccgagcccagcctgctgacccccaccgaggaggcccaccccgccagcagcctggccagcttccccgccgcccagatccccatcgccgtggaggagcccggcagcagcagcagagagagcgtgagcaaggccggcatgcccgtgagcgccgacgccgccaaggaggtggtggacgccggcctggtgggcctggagagacaggtgagcgacctgggcagcaagggcgagcaccccgagggcgaccccggcgaggtgcccgcccccagcccccaggagagaggcgagcacctgaacaccgagcagagccacgaggtgcagcccggcgtgccccccccccccctgcccaaggagcagagccacgaggtgcagcccggcgccccccccccccccctgcccaaggcccccagcgagagcgccagaggcccccccggccccaccgacggcgccaaggtgcacgaggacagcaccagccccgccgtggccaaggagggcagcagaagccccggcgacagccccggcggcaaggaggaggcccccgagccccccgacggcggcgaccccggcaacctgcagggcgaggacagccaggccttcagcagcaagagagaccccgaggtgggcaaggacgagctgagcaagcccagcagcgacgccgagagcagagaccaccccagcagccacagcgcccagccccccagaaagggcggcgccggccacaccgacggcccccacagccagaccgccgaggccgacgccagcggcctgccccacaagctgggcgaggaggaccccgtgctgccccccgtgcccgacggcgccggcgagcccaccgtgcccgagggcgccatctgggagggcagcggcctgcagcccaagtgccccgacaccctgcagagcagagagggcctgggcagaatggagagcttcctgaccctggagagcgagaagagcgacttcccccccacccccgtggccgaggtggcccccaaggcccaggagggcgagagcaccctggagatcagaaagatgggcagctgcgacggcgagggcctgctgaccagccccgaccagcccagaggccccgcctgcgacgccagcagacaggagttccacgccggcgtgccccaccccccccagggcgagaacctggccgccgacctgggcctgaccgccctgatcctggaccaggaccagcagggcatccccagctgccccggcgagggctggatcagaggcgccgccagcgagtggcccctgctgagcagcgagaagcacctgcagcccagccaggcccagcccgagaccagcatcttcgacgtgctgaaggagcaggcccagccccccgagaacggcaaggagaccagccccagccaccccggcttcaaggaccagggcgccgacagcagccagatccacgtgcccgtggagccccaggaggacaacaacctgcccacccacggcggccaggagcaggccctgggcagcgagctgcagagccagctgcccaagggcaccctgagcgacacccccaccagcagccccaccgacatggtgtgggagagcagcctgaccgaggagagcgagctgagcgcccccaccagacagaagctgcccgccctgggcgagaagagacccgagggcgcctgcggcgacggccagagcagcagagtgagcccccccgccgccgacgtgctgaaggacttcagcctggccggcaacttcagcagaaaggagacctgctgcaccggccagggccccaacaagagccagcaggccctggccgacgccctggaggagggcagccagcacgaggaggcctgccagagacaccccggcgccagcgaggccgccgacggctgcagccccctgtggggcctgagcaagagagagatggccagcggcaacaccggcgaggcccccccctgccagcccgacagcgtggccctgctggacgccgtgccctgcctgcccgccctggcccccgccagccccggcgtgacccccacccaggacgcccccgagaccgaggcctgcgacgagacccaggagggcagacagcagcccgtgcccgccccccagcagaagatggagtgctgggccaccagcgacgccgagagccccaagctgctggccagcttccccagcgccggcgagcagggcggcgaggccggcgccgccgagaccggcggcagcgccggcgccggcgaccccggcaagcagcaggcccccgagaagcccggcgaggccaccctgagctgcggcctgctgcagaccgagcactgcctgaccagcggcgaggaggccagcaccagcgccctgagagagagctgccaggccgagcaccccatggccagctgccaggacgccctgctgcccgccagagagctgggcggcatccccagaagcaccatggacttcagcacccaccaggccgtgcccgaccccaaggagctgctgctgagcggcccccccgaggtggccgcccccgacaccccctacctgcacgtggacagcgccgcccagagaggcgccgaggacagcggcgtgaaggccgtgagcagcgccgaccccagagcccccggcgagagcccctgccccgtgggcgagccccccctggccctggagaacgccgccagcctgaagctgttcgccggcagcctggcccccctgctgcagcccggcgccgccggcggcgagatccccgccgtgcaggccagcagcggcagccccaaggccagaaccaccgagggccccgtggacagcatgccctgcctggacagaatgcccctgctggccaagggcaagcaggccaccggcgaggagaaggccgccaccgcccccggcgccggcgccaaggccagcggcgagggcatggccggcgacgccgccggcgagaccgagggcagcatggagagaatgggcgagcccagccaggaccccaagcagggcaccagcggcggcgtggacaccagcagcgagcagatcgccaccctgaccggcttccccgacttcagagagcacatcgccaagatcttcgagaagcccgtgctgggcgccctggccacccccggcgagaaggccggcgccggcagaagcgccgtgggcaaggacctgaccagacccctgggccccgagaagctgctggacggcccccccggcgtggacgtgaccctgctgcccgccccccccgccagactgcaggtggagaagaagcagcagctggccggcgaggccgagatcagccacctggccctgcaggaccccgccagcgacaagctgctgggccccgccggcctgacctgggagagaaacctgcccggcgccggcgtgggcaaggagatggccggcgtgccccccaccctgagagaggacgagagacccgagggccccggcgccgcctggcccggcctggagggccaggcctacagccagctggagagaagcagacaggagctggccagcggcctgcccagccccgccgccacccaggagctgcccgtggagagagccgccgccttccaggtggccccccacagccacggcgaggaggccgtggcccaggacagaatccccagcggcaagcagcaccaggagaccagcgcctgcgacagcccccacggcgaggacggccccggcgacttcgcccacaccggcgtgcccggccacgtgcccagaagcacctgcgcccccagcccccagagagaggtgctgaccgtgcccgaggccaacagcgagccctggaccctggacaccctgggcggcgagagaagacccggcgtgaccgccggcatcctggagatgagaaacgccctgggcaaccagagcacccccgccccccccaccggcgaggtggccgacacccccctggagcccggcaaggtggccggcgccgccggcgaggccgagggcgacatcaccctgagcaccgccgagacccaggcctgcgccagcggcgacctgcccgaggccggcaccaccagaaccttcagcgtggtggccggcgacctggtgctgcccggcagctgccaggaccccgcctgcagcgacaaggcccccggcatggagggcaccgccgccctgcacggcgacagccccgccagaccccagcaggccaaggagcagcccggccccgagagacccatccccgccggcgacggcaaggtgtgcgtgagcagcccccccgagcccgacgagacccacgaccccaagctgcagcacctggcccccgaggagctgcacaccgacagagagagccccagacccggccccagcatgctgcccagcgtgcccaagaaggacgcccccagagtgatggacaaggtgaccagcgacgagaccagaggcgccgagggcaccgagagcagccccgtggccgacgacatcatccagcccgccgcccccgccgacctggagagccccaccctggccgccagcagctaccacggcgacgtggtgggccaggtgagcaccgacctgatcgcccagagcatcagccccgccgccgcccacgccggcctgccccccagcgccgccgagcacatcgtgagccccagcgcccccgccggcgacagagtggaggccagcacccccagctgccccgaccccgccaaggacctgagcagaagcagcgacagcgaggaggccttcgagacccccgagagcaccacccccgtgaaggccccccccgccccccccccccccccccccgaggtgatccccgagcccgaggtgagcacccagcccccccccgaggagcccggctgcggcagcgagaccgtgcccgtgcccgacggccccagaagcgacagcgtggagggcagccccttcagaccccccagccacagcttcagcgccgtgttcgacgaggacaagcccatcgccagcagcggcacctacaacctggacttcgacaacatcgagctggtggacaccttccagaccctggagcccagagccagcgacgccaagaaccaggagggcaaggtgaacaccagaagaaagagcaccgacagcgtgcccatcagcaagagcaccctgagcagaagcctgagcctgcaggccagcgacttcgacggcgccagcagcagcggcaaccccgaggccgtggccctggcccccgacgcctacagcaccggcagcagcagcgccagcagcaccctgaagagaaccaagaagcccagaccccccagcctgaagaagaagcagaccaccaagaagcccaccgagaccccccccgtgaaggagacccagcaggagcccgacgaggagagcctggtgcccagcggcgagaacctggccagcgagaccaagaccgagagcgccaagaccgagggccccagccccgccctgctggaggagacccccctggagcccgccgtgggccccaaggccgcctgccccctggacagcgagagcgccgagggcgtggtgccccccgccagcggcggcggcagagtgcagaacagcccccccgtgggcagaaagaccctgcccctgaccaccgcccccgaggccggcgaggtgacccccagcgacagcggcggccaggaggacagccccgccaagggcctgagcgtgagactggagttcgactacagcgaggacaagagcagctgggacaaccagcaggagaaccccccccccaccaagaagatcggcaagaagcccgtggccaagatgcccctgagaagacccaagatgaagaagacccccgagaagctggacaacacccccgccagcccccccagaagccccgccgagcccaacgacatccccatcgccaagggcacctacaccttcgacatcgacaagtgggacgaccccaacttcaaccccttcagcagcaccagcaagatgcaggagagccccaagctgccccagcagagctacaacttcgaccccgacacctgcgacgagagcgtggaccccttcaagaccagcagcaagacccccagcagccccagcaagagccccgccagcttcgagatccccgccagcgccatggaggccaacggcgtggacggcgacggcctgaacaagcccgccaagaagaagaagacccccctgaagaccgacaccttcagagtgaagaagagccccaagagaagccccctgagcgacccccccagccaggaccccacccccgccgccacccccgagaccccccccgtgatcagcgccgtggtgcacgccaccgacgaggagaagctggccgtgaccaaccagaagtggacctgcatgaccgtggacctggaggccgacaagcaggactacccccagcccagcgacctgagcaccttcgtgaacgagaccaagttcagcagccccaccgaggagctggactacagaaacagctacgagatcgagtacatggagaagatcggcagcagcctgccccaggacgacgacgcccccaagaagcaggccctgtacctgatgttcgacaccagccaggagagccccgtgaagagcagccccgtgagaatgagcgagagccccaccccctgcagcggcagcagcttcgaggagaccgaggccctggtgaacaccgccgccaagaaccagcaccccgtgcccagaggcctggcccccaaccaggagagccacctgcaggtgcccgagaagagcagccagaaggagctggaggccatgggcctgggcacccccagcgaggccatcgagatcagagaggccgcccaccccaccgacgtgagcatcagcaagaccgccctgtacagcagaatcggcaccgccgaggtggagaagcccgccggcctgctgttccagcagcccgacctggacagcgccctgcagatcgccagagccgagatcatcaccaaggagagagaggtgagcgagtggaaggacaagtacgaggagagcagaagagaggtgatggagatgagaaagatcgtggccgagtacgagaagaccatcgcccagatgatcgaggacgagcagagagagaagagcgtgagccaccagaccgtgcagcagctggtgctggagaaggagcaggccctggccgacctgaacagcgtggagaagagcctggccgacctgttcagaagatacgagaagatgaaggaggtgctggagggcttcagaaagaacgaggaggtgctgaagagatgcgcccaggagtacctgagcagagtgaagaaggaggagcagagataccaggccctgaaggtgcacgccgaggagaagctggacagagccaacgccgagatcgcccaggtgagaggcaaggcccagcaggagcaggccgcccaccaggccagcctgagaaaggagcagctgagagtggacgccctggagagaaccctggagcagaagaacaaggagatcgaggagctgaccaagatctgcgacgagctgatcgccaagatgggcaagagctag

SEQ ID NO: 102936 - DNA, 3285 bp, synthetic construct
  misc_feature 1..3285: note = Description of Artificial Sequence: Synthetic coding sequence
  source 1..3285: mol_type = other DNA
atgggcaacgagaacagcaccagcgacaaccagagaaccctgagcgcccagacccccagaagcgcccagccccccggcaacagccagaacatcaagagaaagcagcaggacacccccggcagccccgaccacagagacgccagcagcagccccgtggccgacgacatcatccagcccgccgcccccgccgacctggagagccccaccctggccgccagcagctaccacggcgacgtggtgggccaggtgagcaccgacctgatcgcccagagaagcagcgacagcgaggaggccttcgagacccccgagagcaccacccccgtgaaggccccccccgccccccccccccccccccccgaggtgatccccgagcccgaggtgagcacccagcccccccccgaggagcccggctgcggcagcgagaccgtgcccgtgcccgacggccccagaagcgacagcgtggagggcagccccttcagaccccccagccacagcttcagcgccgtgttcgacgaggacaagcccatcgccagcagcggcacctacaacctggacttcgacaacatcgagctggtggacaccttccagaccctggagcccagagccagcgacgccaagaaccaggagggcaaggtgaacaccagaagaaagagcaccgacagcgtgcccatcagcaagagcaccctgagcagaagcctgagcctgcaggccagcgacttcgacggcgccagcagcagcggcaaccccgaggccgtggccctggcccccgacgcctacagcaccggcagcagcagcgccagcagcaccctgaagagaaccaagaagcccagaccccccagcctgaagaagaagcagaccaccaagaagcccaccgagaccccccccgtgaaggagacccagcaggagcccgacgaggagagcctggtgcccagcggcgagaacctggccagcgagaccaagaccgagagcgccaagaccgagggccccagccccgccctgctggaggagacccccctggagcccgccgtgggccccaaggccgcctgccccctggacagcgagagcgccgagggcgtggtgccccccgccagcggcggcggcagagtgcagaacagcccccccgtgggcagaaagaccctgcccctgaccaccgcccccgaggccggcgaggtgacccccagcgacagcggcggccaggaggacagccccgccaagggcctgagcgtgagactggagttcgactacagcgaggacaagagcagctgggacaaccagcaggagaaccccccccccaccaagaagatcggcaagaagcccgtggccaagatgcccctgagaagacccaagatgaagaagacccccgagaagctggacaacacccccgccagcccccccagaagccccgccgagcccaacgacatccccatcgccaagggcacctacaccttcgacatcgacaagtgggacgaccccaacttcaaccccttcagcagcaccagcaagatgcaggagagccccaagctgccccagcagagctacaacttcgaccccgacacctgcgacgagagcgtggaccccttcaagaccagcagcaagacccccagcagccccagcaagagccccgccagcttcgagatccccgccagcgccatggaggccaacggcgtggacggcgacggcctgaacaagcccgccaagaagaagaagacccccctgaagaccgacaccttcagagtgaagaagagccccaagagaagccccctgagcgacccccccagccaggaccccacccccgccgccacccccgagaccccccccgtgatcagcgccgtggtgcacgccaccgacgaggagaagctggccgtgaccaaccagaagtggacctgcatgaccgtggacctggaggccgacaagcaggactacccccagcccagcgacctgagcaccttcgtgaacgagaccaagttcagcagccccaccgaggagctggactacagaaacagctacgagatcgagtacatggagaagatcggcagcagcctgccccaggacgacgacgcccccaagaagcaggccctgtacctgatgttcgacaccagccaggagagccccgtgaagagcagccccgtgagaatgagcgagagccccaccccctgcagcggcagcagcttcgaggagaccgaggccctggtgaacaccgccgccaagaaccagcaccccgtgcccagaggcctggcccccaaccaggagagccacctgcaggtgcccgagaagagcagccagaaggagctggaggccatgggcctgggcacccccagcgaggccatcgagatcaccgcccccgagggcagcttcgccagcgccgacgccctgctgagcagactggcccaccccgtgagcctgtgcggcgccctggactacctggagcccgacctggccgagaagaacccccccctgttcgcccagaagctgcaggaggagctggagttcgccatcatgagaatcgaggccctgaagctggccagacagatcgccctggccagcagaagccaccaggacgccaagagagaggccgcccaccccaccgacgtgagcatcagcaagaccgccctgtacagcagaatcggcaccgccgaggtggagaagcccgccggcctgctgttccagcagcccgacctggacagcgccctgcagatcgccagagccgagatcatcaccaaggagagagaggtgagcgagtggaaggacaagtacgaggagagcagaagagaggtgatggagatgagaaagatcgtggccgagtacgagaagaccatcgcccagatgatcgaggacgagcagagagagaagagcgtgagccaccagaccgtgcagcagctggtgctggagaaggagcaggccctggccgacctgaacagcgtggagaagagcctggccgacctgttcagaagatacgagaagatgaaggaggtgctggagggcttcagaaagaacgaggaggtgctgaagagatgcgcccaggagtacctgagcagagtgaagaaggaggagcagagataccaggccctgaaggtgcacgccgaggagaagctggacagagccaacgccgagatcgcccaggtgagaggcaaggcccagcaggagcaggccgcccaccaggccagcctgagaaaggagcagctgagagtggacgccctggagagaaccctggagcagaagaacaaggagatcgaggagctgaccaagatctgcgacgagctgatcgccaagatgggcaagagctag

SEQ ID NO: 102937 - DNA, 2991 bp, synthetic construct
  misc_feature 1..2991: note = Description of Artificial Sequence: Synthetic coding sequence
  source 1..2991: mol_type = other DNA
atgggcggcagccagagcctgcagcccgcccccgccagcgacctgaacctggaggccagcgaggccatgagcagcgacagcgaggaggccttcgagacccccgagagcaccacccccgtgaaggccccccccgccccccccccccccccccccgaggtgatccccgagcccgaggtgagcacccagcccccccccgaggagcccggctgcggcagcgagaccgtgcccgtgcccgacggccccagaagcgacagcgtggagggcagccccttcagaccccccagccacagcttcagcgccgtgttcgacgaggacaagcccatcgccagcagcggcacctacaacctggacttcgacaacatcgagctggtggacaccttccagaccctggagcccagagccagcgacgccaagaaccaggagggcaaggtgaacaccagaagaaagagcaccgacagcgtgcccatcagcaagagcaccctgagcagaagcctgagcctgcaggccagcgacttcgacggcgccagcagcagcggcaaccccgaggccgtggccctggcccccgacgcctacagcaccggcagcagcagcgccagcagcaccctgaagagaaccaagaagcccagaccccccagcctgaagaagaagcagaccaccaagaagcccaccgagaccccccccgtgaaggagacccagcaggagcccgacgaggagagcctggtgcccagcggcgagaacctggccagcgagaccaagaccgagagcgccaagaccgagggccccagccccgccctgctggaggagacccccctggagcccgccgtgggccccaaggccgcctgccccctggacagcgagagcgccgagggcgtggtgccccccgccagcggcggcggcagagtgcagaacagcccccccgtgggcagaaagaccctgcccctgaccaccgcccccgaggccggcgaggtgacccccagcgacagcggcggccaggaggacagccccgccaagggcctgagcgtgagactggagttcgactacagcgaggacaagagcagctgggacaaccagcaggagaaccccccccccaccaagaagatcggcaagaagcccgtggccaagatgcccctgagaagacccaagatgaagaagacccccgagaagctggacaacacccccgccagcccccccagaagccccgccgagcccaacgacatccccatcgccaagggcacctacaccttcgacatcgacaagtgggacgaccccaacttcaaccccttcagcagcaccagcaagatgcaggagagccccaagctgccccagcagagctacaacttcgaccccgacacctgcgacgagagcgtggaccccttcaagaccagcagcaagacccccagcagccccagcaagagccccgccagcttcgagatccccgccagcgccatggaggccaacggcgtggacggcgacggcctgaacaagcccgccaagaagaagaagacccccctgaagaccgacaccttcagagtgaagaagagccccaagagaagccccctgagcgacccccccagccaggaccccacccccgccgccacccccgagaccccccccgtgatcagcgccgtggtgcacgccaccgacgaggagaagctggccgtgaccaaccagaagtggacctgcatgaccgtggacctggaggccgacaagcaggactacccccagcccagcgacctgagcaccttcgtgaacgagaccaagttcagcagccccaccgaggagctggactacagaaacagctacgagatcgagtacatggagaagatcggcagcagcctgccccaggacgacgacgcccccaagaagcaggccctgtacctgatgttcgacaccagccaggagagccccgtgaagagcagccccgtgagaatgagcgagagccccaccccctgcagcggcagcagcttcgaggagaccgaggccctggtgaacaccgccgccaagaaccagcaccccgtgcccagaggcctggcccccaaccaggagagccacctgcaggtgcccgagaagagcagccagaaggagctggaggccatgggcctgggcacccccagcgaggccatcgagatcaccgcccccgagggcagcttcgccagcgccgacgccctgctgagcagactggcccaccccgtgagcctgtgcggcgccctggactacctggagcccgacctggccgagaagaacccccccctgttcgcccagaagctgcagagagaggccgcccaccccaccgacgtgagcatcagcaagaccgccctgtacagcagaatcggcaccgccgaggtggagaagcccgccggcctgctgttccagcagcccgacctggacagcgccctgcagatcgccagagccgagatcatcaccaaggagagagaggtgagcgagtggaaggacaagtacgaggagagcagaagagaggtgatggagatgagaaagatcgtggccgagtacgagaagaccatcgcccagatgatcgaggacgagcagagagagaagagcgtgagccaccagaccgtgcagcagctggtgctggagaaggagcaggccctggccgacctgaacagcgtggagaagagcctggccgacctgttcagaagatacgagaagatgaaggaggtgctggagggcttcagaaagaacgaggaggtgctgaagagatgcgcccaggagtacctgagcagagtgaagaaggaggagcagagataccaggccctgaaggtgcacgccgaggagaagctggacagagccaacgccgagatcgcccaggtgagaggcaaggcccagcaggagcaggccgcccaccaggccagcctgagaaaggagcagctgagagtggacgccctggagagaaccctggagcagaagaacaaggagatcgaggagctgaccaagatctgcgacgagctgatcgccaagatgggcaagagctag

SEQ ID NO: 102938 - DNA, 1716 bp, synthetic construct
  misc_feature 1..1716: note = Description of Artificial Sequence: Synthetic coding sequence
  source 1..1716: mol_type = other DNA
atgcccctgagaagacccaagatgaagaagacccccgagaagctggacaacacccccgccagcccccccagaagccccgccgagcccaacgacatccccatcgccaagggcacctacaccttcgacatcgacaagtgggacgaccccaacttcaaccccttcagcagcaccagcaagatgcaggagagccccaagctgccccagcagagctacaacttcgaccccgacacctgcgacgagagcgtggaccccttcaagaccagcagcaagacccccagcagccccagcaagagccccgccagcttcgagatccccgccagcgccatggaggccaacggcgtggacggcgacggcctgaacaagcccgccaagaagaagaagacccccctgaagaccgtgaagaagagccccaagagaagccccctgagcgacccccccagccaggaccccacccccgccgccacccccgagaccccccccgtgatcagcgccgtggtgcacgccaccgacgaggagaagctggccgtgaccaaccagaagtggacctgcatgaccgtggacctggaggccgacaagcaggactacccccagcccagcgacctgagcaccttcgtgaacgagaccaagttcagcagccccaccgaggagctggactacagaaacagctacgagatcgagtacatggagaagatcggcagcagcctgccccaggacgacgacgcccccaagaagcaggccctgtacctgatgttcgacaccagccaggagagccccgtgaagagcagccccgtgagaatgagcgagagccccaccccctgcagcggcagcagcttcgaggagaccgaggccctggtgaacaccgccgccaagaaccagcaccccgtgcccagaggcctggcccccaaccaggagagccacctgcaggtgcccgagaagagcagccagaaggagctggaggccatgggcctgggcacccccagcgaggccatcgagatcagagaggccgcccaccccaccgacgtgagcatcagcaagaccgccctgtacagcagaatcggcaccgccgaggtggagaagcccgccggcctgctgttccagcagcccgacctggacagcgccctgcagatcgccagagccgagatcatcaccaaggagagagaggtgagcgagtggaaggacaagtacgaggagagcagaagagaggtgatggagatgagaaagatcgtggccgagtacgagaagaccatcgcccagatgatcgaggacgagcagagagagaagagcgtgagccaccagaccgtgcagcagctggtgctggagaaggagcaggccctggccgacctgaacagcgtggagaagagcctggccgacctgttcagaagatacgagaagatgaaggaggtgctggagggcttcagaaagaacgaggaggtgctgaagagatgcgcccaggagtacctgagcagagtgaagaaggaggagcagagataccaggccctgaaggtgcacgccgaggagaagctggacagagccaacgccgagatcgcccaggtgagaggcaaggcccagcaggagcaggccgcccaccaggccagcctgagaaaggagcagctgagagtggacgccctggagagaaccctggagcagaagaacaaggagatcgaggagctgaccaagatctgcgacgagctgatcgccaagatgggcaagagctag

SEQ ID NO: 102939 - DNA, 8847 bp, synthetic construct; identical to SEQ ID NO: 102934
  misc_feature 1..8847: note = Description of Artificial Sequence: Synthetic coding sequence
  source 1..8847: mol_type = other DNA

SEQ ID NO: 102940 - DNA, 8628 bp, synthetic construct
  misc_feature 1..8628: note = Description of Artificial Sequence: Synthetic coding sequence
  source 1..8628: mol_type = other DNA
atgggcaacgagaacagcaccagcgacaaccagagaaccctgagcgcccagacccccagaagcgcccagccccccggcaacagccagaacatcaagagaaagcagcaggacacccccggcagccccgaccacagagacgccagcagcatcggcagcgtgggcctgggcggcttctgcaccgccagcgagagcagcgccagcctggacccctgcctggtgagccccgaggtgaccgagcccagaaaggacccccagggcgccagaggccccgagggcagcctgctgcccagccccccccccagccaggagagagagcaccccagcagcagcatgcccttcgccgagtgcccccccgagggctgcctggccagccccgccgccgcccccgaggacggcccccagacccagagccccagaagagagcccgcccccaacgcccccggcgacatcgccgccgccttccccgccgagagagacagcagcaccccctaccaggagatcgccgccgtgcccagcgccggcagagagagacagcccaaggaggagggccagaagagcagcttcagcttcagcagcggcatcgaccagagccccggcatgagccccgtgcccctgagagagcccatgaaggcccccctgtgcggcgagggcgaccagcccggcggcttcgagagccaggagaaggaggccgccggcggcttcccccccgccgagagcagacagggcgtggccagcgtgcaggtgacccccgaggcccccgccgccgcccagcagggcaccgagagcagcgccgtgctggagaagagccccctgaagcccatggcccccatcccccaggaccccgcccccagagccagcgacagagagagaggccagggcgaggcccccccccagtacctgaccgacgacctggagttcctgagagcctgccacctgcccagaagcaacagcggcgccgcccccgaggccgaggtgaacgccgccagccaggagagctgccagcagcccgtgggcgcctacctgccccacgccgagctgccctggggcctgcccagccccgccctggtgcccgaggccggcggcagcggcaaggaggccctggacaccatcgacgtgcagggccacccccagaccggcatgagaggcaccaagcccaaccaggtggtgtgcgtggccgccggcggccagcccgagggcggcctgcccgtgagccccgagcccagcctgctgacccccaccgaggaggcccaccccgccagcagcctggccagcttccccgccgcccagatccccatcgccgtggaggagcccggcagcagcagcagagagagcgtgagcaaggccggcatgcccgtgagcgccgacgccgccaaggaggtggtggacgccggcctggtgggcctggagagacaggtgagcgacctgggcagcaagggcgagcaccccgagggcgaccccggcgaggtgcccgcccccagcccccaggagagaggcgagcacctgaacaccgagcagagccacgaggtgcagcccggcgtgccccccccccccctgcccaaggagcagagccacgaggtgcagcccggcgccccccccccccccctgcccaaggcccccagcgagagcgccagaggcccccccggccccaccgacggcgccaaggtgcacgaggacagcaccagccccgccgtggccaaggagggcagcagaagccccggcgacagccccggcggcaaggaggaggcccccgagccccccgacggcggcgaccccggcaacctgcagggcgaggacagccaggccttcagcagcaagagagaccccgaggtgggcaaggacgagctgagcaagcccagcagcgacgccgagagcagagaccaccccagcagccacagcgcccagccccccagaaagggcggcgccggccacaccgacggcccccacagccagaccgccgaggccgacgccagcggcctgccccacaagctgggcgaggaggaccccgtgctgccccccgtgcccgacggcgccggcgagcccaccgtgcccgagggcgccatctgggagggcagcggcctgcagcccaagtgccccgacaccctgcagagcagagagggcctgggcagaatggagagcttcctgaccctggagagcgagaagagcgacttcccccccacccccgtggccgaggtggcccccaaggcccaggagggcgagagcaccctggagatcagaaagatgggcagctgcgacggcgagggcctgctgaccagccccgaccagcccagaggccccgcctgcgacgccagcagacaggagttccacgccggcgtgccccaccccccccagggcgagaacctggccgccgacctgggcctgaccgccctgatcctggaccaggaccagcagggcatccccagctgccccggcgagggctggatcagaggcgccgccagcgagtggcccctgctgagcagcgagaagcacctgcagcccagccaggcccagcccgagaccagcatcttcgacgtgctgaaggagcaggcccagccccccgagaacggcaaggagaccagccccagccaccccggcttcaaggaccagggcgccgacagcagccagatccacgtgcccgtggagccccaggaggacaacaacctgcccacccacggcggccaggagcaggccctgggcagcgagctgcagagccagctgcccaagggcaccctgagcgacacccccaccagcagccccaccgacatggtgtgggagagcagcctgaccgaggagagcgagctgagcgcccccaccagacagaagctgcccgccctgggcgagaagagacccgagggcgcctgcggcgacggccagagcagcagagtgagcccccccgccgccgacgtgctgaaggacttcagcctggccggcaacttcagcagaaaggagacctgctgcaccggccagggccccaacaagagccagcaggccctggccgacgccctggaggagggcagccagcacgaggaggcctgccagagacaccccggcgccagcgaggccgccgacggctgcagccccctgtggggcctgagcaagagagagatggccagcggcaacaccggcgaggcccccccctgccagcccgacagcgtggccctgctggacgccgtgccctgcctgcccgccctggcccccgccagccccggcgtgacccccacccaggacgcccccgagaccgaggcctgcgacgagacccaggagggcagacagcagcccgtgcccgccccccagcagaagatggagtgctgggccaccagcgacgccgagagccccaagctgctggccagcttccccagcgccggcgagcagggcggcgaggccggcgccgccgagaccggcggcagcgccggcgccggcgaccccggcaagcagcaggcccccgagaagcccggcgaggccaccctgagctgcggcctgctgcagaccgagcactgcctgaccagcggcgaggaggccagcaccagcgccctgagagagagctgccaggccgagcaccccatggccagctgccaggacgccctgctgcccgccagagagctgggcggcatccccagaagcaccatggacttcagcacccaccaggccgtgcccgaccccaaggagctgctgctgagcggcccccccgaggtggccgcccccgacaccccctacctgcacgtggacagcgccgcccagagaggcgccgaggacagcggcgtgaaggccgtgagcagcgccgaccccagagcccccggcgagagcccctgccccgtgggcgagccccccctggccctggagaacgccgccagcctgaagctgttcgccggcagcctggcccccctgctgcagcccggcgccgccggcggcgagatccccgccgtgcaggccagcagcggcagccccaaggccagaaccaccgagggccccgtggacagcatgccctgcctggacagaatgcccctgctggccaagggcaagcaggccaccggcgaggagaaggccgccaccgcccccggcgccggcgccaaggccagcggcgagggcatggccggcgacgccgccggcgagaccgagggcagcatggagagaatgggcgagcccagccaggaccccaagcagggcaccagcggcggcgtggacaccagcagcgagcagatcgccaccctgaccggcttccccgacttcagagagcacatcgccaagatcttcgagaagcccgtgctgggcgccctggccacccccggcgagaaggccggcgccggcagaagcgccgtgggcaaggacctgaccagacccctgggccccgagaagctgctggacggcccccccggcgtggacgtgaccctgctgcccgccccccccgccagactgcaggtggagaagaagcagcagctggccggcgaggccgagatcagccacctggccctgcaggaccccgccagcgacaagctgctgggccccgccggcctgacctgggagagaaacctgcccggcgccggcgtgggcaaggagatggccggcgtgccccccaccctgagagaggacgagagacccgagggccccggcgccgcctggcccggcctggagggccaggcctacagccagctggagagaagcagacaggagctggccagcggcctgcccagccccgccgccacccaggagctgcccgtggagagagccgccgccttccaggtggccccccacagccacggcgaggaggccgtggcccaggacagaatccccagcggcaagcagcaccaggagaccagcgcctgcgacagcccccacggcgaggacggccccggcgacttcgcccacaccggcgtgcccggccacgtgcccagaagcacctgcgcccccagcccccagagagaggtgctgaccgtgcccgaggccaacagcgagccctggaccctggacaccctgggcggcgagagaagacccggcgtgaccgccggcatcctggagatgagaaacgccctgggcaaccagagcacccccgccccccccaccggcgaggtggccgacacccccctggagcccggcaaggtggccggcgccgccggcgaggccgagggcgacatcaccctgagcaccgccgagacccaggcctgcgccagcggcgacctgcccgaggccggcaccaccagaaccttcagcgtggtggccggcgacctggtgctgcccggcagctgccaggaccccgcctgcagcgacaaggcccccggcatggagggcaccgccgccctgcacggcgacagccccgccagaccccagcaggccaaggagcagcccggccccgagagacccatccccgccggcgacggcaaggtgtgcgtgagcagcccccccgagcccgacgagacccacgaccccaagctgcagcacctggcccccgaggagctgcacaccgacagagagagccccagacccggccccagcatgctgcccagcgtgcccaagaaggacgcccccagagtgatggacaaggtgaccagcgacgagaccagaggcgccgagggcaccgagagaagcgccaaggacatcggcctgtggaaggccatgatgcccagcctggacaccgacaccctggacgtgctggagagaagagtggtgctgatccagcacgagttcctgcacaagaaggaggccaacggccacagcagattcatgtacagcagccccgtggccgacgacatcatccagcccgccgcccccgccgacctggagagccccaccctggccgccagcagctaccacggcgacgtggtgggccaggtgagcaccgacctgatcgcccagagaagcagcgacagcgaggaggccttcgagacccccgagagcaccacccccgtgaaggccccccccgccccccccccccccccccccgaggtgatccccgagcccgaggtgagcacccagcccccccccgaggagcccggctgcggcagcgagaccgtgcccgtgcccgacggccccagaagcgacagcgtggagggcagccccttcagaccccccagccacagcttcagcgccgtgttcgacgaggacaagcccatcgccagcagcggcacctacaacctggacttcgacaacatcgagctggtggacaccttccagaccctggagcccagagccagcgacgccaagaaccaggagggcaaggtgaacaccagaagaaagagcaccgacagcgtgcccatcagcaagagcaccctgagcagaagcctgagcctgcaggccagcgacttcgacggcgccagcagcagcggcaaccccgaggccgtggccctggcccccgacgcctacagcaccggcagcagcagcgccagcagcaccctgaagagaaccaagaagcccagaccccccagcctgaagaagaagcagaccaccaagaagcccaccgagaccccccccgtgaaggagacccagcaggagcccgacgaggagagcctggtgcccagcggcgagaacctggccagcgagaccaagaccgagagcgccaagaccgagggccccagccccgccctgctggaggagacccccctggagcccgccgtgggccccaaggccgcctgccccctggacagcgagagcgccgagggcgtggtgccccccgccagcggcggcggcagagtgcagaacagcccccccgtgggcagaaagaccctgcccctgaccaccgcccccgaggccggcgaggtgacccccagcgacagcggcggccaggaggacagccccgccaagggcctgagcgtgagactggagttcgactacagcgaggacaagagcagctgggacaaccagcaggagaaccccccccccaccaagaagatcggcaagaagcccgtggccaagatgcccctgagaagacccaagatgaagaagacccccgagaagctggacaacacccccgccagcccccccagaagccccgccgagcccaacgacatccccatcgccaagggcacctacaccttcgacatcgacaagtgggacgaccccaacttcaaccccttcagcagcaccagcaagatgcaggagagccccaagctgccccagcagagctacaacttcgaccccgacacctgcgacgagagcgtggaccccttcaagaccagcagcaagacccccagcagccccagcaagagccccgccagcttcgagatccccgccagcgccatggaggccaacggcgtggacggcgacggcctgaacaagcccgccaagaagaagaagacccccctgaagaccgacaccttcagagtgaagaagagccccaagagaagccccctgagcgacccccccagccaggaccccacccccgccgccacccccgagaccccccccgtgatcagcgccgtggtgcacgccaccgacgaggagaagctggccgtgaccaaccagaagtggacctgcatgaccgtggacctggaggccgacaagcaggactacccccagcccagcgacctgagcaccttcgtgaacgagaccaagttcagcagccccaccgaggagctggactacagaaacagctacgagatcgagtacatggagaagatcggcagcagcctgccccaggacgacgacgcccccaagaagcaggccctgtacctgatgttcgacaccagccaggagagccccgtgaagagcagccccgtgagaatgagcgagagccccaccccctgcagcggcagcagcttcgaggagaccgaggccctggtgaacaccgccgccaagaaccagcaccccgtgcccagaggcctggcccccaaccaggagagccacctgcaggtgcccgagaagagcagccagaaggagctggaggccatgggcctgggcacccccagcgaggccatcgagatcagagaggccgcccaccccaccgacgtgagcatcagcaagaccgccctgtacagcagaatcggcaccgccgaggtggagaagcccgccggcctgctgttccagcagcccgacctggacagcgccctgcagatcgccagagccgagatcatcaccaaggagagagaggtgagcgagtggaaggacaagtacgaggagagcagaagagaggtgatggagatgagaaagatcgtggccgagtacgagaagaccatcgcccagatgatcgaggacgagcagagagagaagagcgtgagccaccagaccgtgcagcagctggtgctggagaaggagcaggccctggccgacctgaacagcgtggagaagagcctggccgacctgttcagaagatacgagaagatgaaggaggtgctggagggcttcagaaagaacgaggaggtgctgaagagatgcgcccaggagtacctgagcagagtgaagaaggaggagcagagataccaggccctgaaggtgcacgccgaggagaagctggacagagccaacgccgagatcgcccaggtgagaggcaaggcccagcaggagcaggccgcccaccaggccagcctgagaaaggagcagctgagagtggacgccctggagagaaccctggagcagaagaacaaggagatcgaggagctgaccaagatctgcgacgagctgatcgccaagatgggcaagagctag

SEQ ID NO: 102941 - DNA, 3285 bp, synthetic construct; identical to SEQ ID NO: 102936
  misc_feature 1..3285: note = Description of Artificial Sequence: Synthetic coding sequence
  source 1..3285: mol_type = other DNA

SEQ ID NO: 102942 - DNA, 2517 bp, synthetic construct
  misc_feature 1..2517: note = Description of Artificial Sequence: Synthetic coding sequence
  source 1..2517: mol_type = other DNA
atgagcctgcaggtgctgaacgacaagaacgtgagcaacgagaagaacaccgagaactgcgacttcctgttcagcccccccgaggtgaccggcagaagcagcgtgctgagagtgagccagaaggagaacgtgccccccaagaacctggccaaggccatgaaggtgaccttccagacccccctgagagacccccagacccacagaatcctgagccccagcatggccagcaagctggaggcccccttcacccaggacgacaccctgggcctggagaacagccaccccgtgtggacccagaaggagaaccagcagctgatcaaggaggtggacgccaagaccacccacggcatcctgcagaagcccgtggaggccgacaccgacctgctgggcgacgccagccccgccttcggcagcggcagcagcagcgagagcggccccggcgccctggccgacctggactgcagcagcagcagccagagccccggcagcagcgagaaccagatggtgagccccggcaaggtgagcggcagccccgagcaggccgtggaggagaacctgagcagctacagcctggacagaagagtgacccccgccagcgagaccctggaggacccctgcagaaccgagagccagcacaaggccgagaccccccacggcgccgaggaggagtgcaaggccgagaccccccacggcgccgaggaggagtgcagacacggcggcgtgtgcgcccccgccgccgtggccaccagcccccccggcgccatccccaaggaggcctgcggcggcgcccccctgcagggcctgcccggcgaggccctgggctgccccgccggcgtgggcacccccgtgcccgccgacggcacccagaccctgacctgcgcccacaccagcgcccccgagagcaccgcccccaccaaccacctggtggccggcagagccatgaccctgagcccccaggaggaggtggccgccggccagatggccagcagcagcagaagcggccccgtgaagctggagttcgacgtgagcgacggcgccaccagcaagagagcccccccccccagaagactgggcgagagaagcggcctgaagccccccctgagaaaggccgccgtgagacagcagaaggccccccaggaggtggaggaggacgacggcagaagcggcgccggcgaggacccccccatgcccgccagcagaggcagctaccacctggactgggacaagatggacgaccccaacttcatccccttcggcggcgacaccaagagcggctgcagcgaggcccagccccccgagagccccgagaccagactgggccagcccgccgccgagcagctgcacgccggccccgccaccgaggagcccggcccctgcctgagccagcagctgcacagcgccagcgccgaggacacccccgtggtgcagctggccgccgagacccccaccgccgagagcaaggagagagccctgaacagcgccagcaccagcctgcccaccagctgccccggcagcgagcccgtgcccacccaccagcagggccagcccgccctggagctgaaggaggagagcttcagagaccccgccgaggtgctgggcaccggcgccgaggtggactacctggagcagttcggcaccagcagcttcaaggagagcgccctgagaaagcagagcctgtacctgaagttcgaccccctgctgagagacagccccggcagacccgtgcccgtggccaccgagaccagcagcatgcacggcgccaacgagacccccagcggcagacccagagaggccaagctggtggagttcgacttcctgggcgccctggacatccccgtgcccggccccccccccggcgtgcccgcccccggcggcccccccctgagcaccggccccatcgtggacctgctgcagtacagccagaaggacctggacgccgtggtgaaggccacccaggaggagaacagagagctgagaagcagatgcgaggagctgcacggcaagaacctggagctgggcaagatcatggacagattcgaggaggtggtgtaccaggccatggaggaggtgcagaagcagaaggagctgagcaaggccgagatccagaaggtgctgaaggagaaggaccagctgaccaccgacctgaacagcatggagaagagcttcagcgacctgttcaagagattcgagaagcagaaggaggtgatcgagggctacagaaagaacgaggagagcctgaagaagtgcgtggaggactacctggccagaatcacccaggagggccagagataccaggccctgaaggcccacgccgaggagaagctgcagctggccaacgaggagatcgcccaggtgagaagcaaggcccaggccgaggccctggccctgcaggccagcctgagaaaggagcagatgagaatccagagcctggagaagaccgtggagcagaagaccaaggagaacgaggagctgaccagaatctgcgacgacctgatcagcaagatggagaagatctag

SEQ ID NO: 102943 - DNA, 438 bp, synthetic construct
  misc_feature 1..438: note = Description of Artificial Sequence: Synthetic coding sequence
  source 1..438: mol_type = other DNA
atgagcctgcaggtgctgaacgacaagaacgtgagcaacgagaagaacaccgagaactgcgacttcctgttcagcccccccgaggtgaccggcagaagcagcgtgctgagagtgagccagaaggagaacgtgccccccaagaacctggccaaggccatgaaggtgaccttccagacccccctgagagacccccagacccacagaatcctgagccccagcatggccagcaagctggaggcccccttcacccaggacgacaccctgggcctggagaacagccaccccgtgtggacccagaaggagaaggccgccgccttcagcctgagcggcggccacgcctgcggcgccgtgggcagcagagaccccaacagcagagagcagggcgagagcctggagctgtgccagcacctggccagccacaagctgagcagacagtag

SEQ ID NO: 102944 - DNA, 666 bp, synthetic construct
  misc_feature 1..666: note = Description of Artificial Sequence: Synthetic coding sequence
  source 1..666: mol_type = other DNA
atgagcctgcaggtgctgaacgacaagaacgtgagcaacgagaagaacaccgagaactgcgacttcctgttcagcccccccgaggtgaccggcagaagcagcgtgctgagagtgagccagaaggagaacgtgccccccaagaacctggccaaggccatgaaggtgaccttccagacccccctgagagacccccagacccacagaatcctgagccccagcatggccagcaagctggaggcccccttcacccaggacgacaccctgggcctggagaacagccaccccgtgtggacccagaaggagaaccagcagctgatcaaggaggtggacgccaagaccacccacggcatcctgcagaagcccgtggaggccgacaccgacctgctgggcgacgccagccccgccttcggcagcggcagcagcagcgagagcggccccggcgccctggccgacctggactgcagcagcagcagccagagccccggcagcagcgagaaccagatggtgagccccggcaaggtgagcggcagccccgagcaggccgtggaggagaacctgagcagctacagcctggacagaagagtgacccccgccagcgagaccctggaggacccctgcagaaccgagagccagcacaaggccgagaccccccacggcgccgagtag

SEQ ID NO: 102945 - DNA, 696 bp, synthetic construct
  misc_feature 1..696: note = Description of Artificial Sequence: Synthetic coding sequence
  source 1..696: mol_type = other DNA
atgagcctgcaggtgctgaacgacaagaacgtgagcaacgagaagaacaccgagaactgcgacttcctgttcagcccccccgaggtgaccggcagaagcagcgtgctgagagtgagccagaaggagaacgtgccccccaagaacctggccaaggccatgaaggtgaccttccagacccccctgagagacccccagacccacagaatcctgagccccagcatggccagcaagctggaggcccccttcacccaggacgacaccctgggcctggagaacagccaccccgtgtggacccagaaggagaaccagcagctgatcaaggaggtggacgccaagaccacccacggcatcctgcagaagcccgtggaggccgacaccgacctgctgggcgacgccagccccgccttcggcagcggcagcagcagcgagagcggccccggcgccctggccgacctggactgcagcagcagcagccagagccccggcagcagcgagaaccagatggtgagccccggcaaggtgagcggcagccccgagcaggccgtggaggagaacctgagcagctacagcctggacagaagagtgacccccgccagcgagaccctggaggacccctgcagaaccgagagccagcacaaggccgagaccccccacggcgccgaggaggagtgcaaggccgagaccccccacggctag

SEQ ID NO: 102946 - DNA, 606 bp, synthetic construct
  misc_feature 1..606: note = Description of Artificial Sequence: Synthetic coding sequence
  source 1..606: mol_type = other DNA
atggccaacaagggccccagctacggcatgagcagagaggtgcagagcaagatcgagaagaagtacgacgaggagctggaggagagactggtggagtggatcatcgtgcagtgcggccccgacgtgggcagacccgacagaggcagactgggcttccaggtgtggctgaagaacggcgtgatcctgagcaagctggtgaacagcctgtaccccgacggcagcaagcccgtgaaggtgcccgagaacccccccagcatggtgttcaagcagatggagcaggtggcccagttcctgaaggccgccgaggactacggcgtgatcaagaccgacatgttccagaccgtggacctgttcgagggcaaggacatggccgccgtgcagagaaccctgatggccctgggcagcctggccgtgaccaagaacgacggccactacagaggcgaccccaactggttcatgaagaaggcccaggagcacaagagagagttcaccgagagccagctgcaggagggcaagcacgtgatcggcctgcagatgggcagcaacagaggcgccagccaggccggcatgaccggctacggcagacccagacagatcatcagctag

SEQ ID NO: 102947 - DNA, 108 bp, synthetic construct
  misc_feature 1..108: note = Description of Artificial Sequence: Synthetic coding sequence
  source 1..108: mol_type = other DNA
atggccaacaagggccccagctacggcatgagcagagaggtgcagcccagcagactggcctgcctgacccacaccagagtggtgcccagcgccctggccaagctgtag

SEQ ID NO: 102948 - DNA, 606 bp, synthetic construct; identical to SEQ ID NO: 102946
  misc_feature 1..606: note = Description of Artificial Sequence: Synthetic coding sequence
  source 1..606: mol_type = other DNA

SEQ ID NO: 102949 - DNA, 606 bp, synthetic construct; identical to SEQ ID NO: 102946
  misc_feature 1..606: note = Description of Artificial Sequence: Synthetic coding sequence
  source 1..606: mol_type = other DNA

SEQ ID NO: 102950 - DNA, 276 bp, synthetic construct
  misc_feature 1..276: note = Description of Artificial Sequence: Synthetic coding sequence
  source 1..276: mol_type = other DNA
atggccaacaagggccccagctacggcatgagcagagaggtgcagagcaagatcgagaagaagtacgacgaggagctggaggagagactggtggagtggatcatcgtgcagtgcggccccgacgtgggcagacccgacagaggcagactgggcttccaggtgtggctgaagaacggcgtgatcctgagcaagctggtgaacagcctgtaccccgacggcagcaagcccgtgaaggtgcccgagaacccccccagcatggtgttcaagcagatgtag

SEQ ID NO: 102951 - DNA, 606 bp, synthetic construct; identical to SEQ ID NO: 102946
  misc_feature 1..606: note = Description of Artificial Sequence: Synthetic coding sequence
  source 1..606: mol_type = other DNA

SEQ ID NO: 102952 - DNA, 606 bp, synthetic construct; identical to SEQ ID NO: 102946
  misc_feature 1..606: note = Description of Artificial Sequence: Synthetic coding sequence
  source 1..606: mol_type = other DNA

SEQ ID NO: 102953 - DNA, 600 bp, synthetic construct
  misc_feature 1..600: note = Description of Artificial Sequence: Synthetic coding sequence
  source 1..600: mol_type = other DNA
atggccaacagaggccccgcctacggcctgagcagagaggtgcagcagaagatcgagaagcagtacgacgccgacctggagcagatcctgatccagtggatcaccacccagtgcagaaaggacgtgggcagaccccagcccggcagagagaacttccagaactggctgaaggacggcaccgtgctgtgcgagctgatcaacgccctgtaccccgagggccaggcccccgtgaagaagatccaggccagcaccatggccttcaagcagatggagcagatcagccagttcctgcaggccgccgagagatacggcatcaacaccaccgacatcttccagaccgtggacctgtgggagggcaagaacatggcctgcgtgcagagaaccctgatgaacctgggcggcctggccgtggccagagacgacggcctgttcagcggcgaccccaactggttccccaagaagagcaaggagaaccccagaaacttcagcgacaaccagctgcaggagggcaagaacgtgatcggcctgcagatgggcaccaacagaggcgccagccaggccggcatgaccggctacggcatgcccagacagatcctgtag

SEQ ID NO: 102954 - DNA, 663 bp, synthetic construct
  misc_feature 1..663: note = Description of Artificial Sequence: Synthetic coding sequence
  source 1..663: mol_type = other DNA
atgagcgccttcagcctggccctggccctggtgagcagcccccagccccccccccccatcggcatggccaacagaggccccgcctacggcctgagcagagaggtgcagcagaagatcgagaagcagtacgacgccgacctggagcagatcctgatccagtggatcaccacccagtgcagaaaggacgtgggcagaccccagcccggcagagagaacttccagaactggctgaaggacggcaccgtgctgtgcgagctgatcaacgccctgtaccccgagggccaggcccccgtgaagaagatccaggccagcaccatggccttcaagcagatggagcagatcagccagttcctgcaggccgccgagagatacggcatcaacaccaccgacatcttccagaccgtggacctgtgggagggcaagaacatggcctgcgtgcagagaaccctgatgaacctgggcggcctggccgtggccagagacgacggcctgttcagcggcgaccccaactggttccccaagaagagcaaggagaaccccagaaacttcagcgacaaccagctgcaggagggcaagaacgtgatcggcctgcagatgggcaccaacagaggcgccagccaggccggcatgaccggctacggcatgcccagacagatcctgtag

SEQ ID NO: 102955 - DNA, 600 bp, synthetic construct; identical to SEQ ID NO: 102953
  misc_feature 1..600: note = Description of Artificial Sequence: Synthetic coding sequence
  source 1..600: mol_type = other DNA

SEQ ID NO: 102956 - DNA, 564 bp, synthetic construct
  misc_feature 1..564: note = Description of Artificial Sequence: Synthetic coding sequence
  source 1..564: mol_type = other DNA
atggccaacagaggccccgcctacggcctgagcagagaggtgcagcagaagatcgagaagcagtacgacgccgacctggagcagatcctgatccagtggatcaccacccagtgcagaaaggacgtgggcagaccccagcccggcagagagaacttccagaactggctgaaggacggcaccgtgctgtgcgagctgatcaacgccctgtaccccgagggccaggcccccgtgaagaagatccaggccagcaccatggccttcaagcagatggagcagatcagccagttcctgcaggccgccgagagatacggcatcaacaccaccgacatcttccagaccgtggacctgtgggagggcaagaacatggcctgcgtgcagagaaccctgatgaacctgggcggcctggccgtggccagagacgacggcctgttcagcggcgaccccaactggttccccaagaagagcaaggagaaccccagaaacttcagcgacaaccagctgcaggagggcaagaacgtgatcggcctgcagatgggcaccaacagaggcgccagccaggcctag

SEQ ID NO: 102957 - DNA, 3861 bp, synthetic construct
  misc_feature 1..3861: note = Description of Artificial Sequence: Synthetic coding sequence
  source 1..3861: mol_type = other DNA
atgagccacctggtggaccccaccagcggcgacctgcccgtgagagacatcgacgccatccccctggtgctgcccgccagcaagggcaagaacatgaagacccagccccccctgagcagaatgaacagagaggagctggaggacagcttcttcagactgagagaggaccacatgctggtgaaggagctgagctggaagcagcaggacgagatcaagagactgagaaccaccctgctgagactgaccgccgccggcagagacctgagagtggccgaggaggccgcccccctgagcgagaccgccagaagaggccagaaggccggctggagacagagactgagcatgcaccagagaccccagatgcacagactgcagggccacttccactgcgtgggccccgccagccccagaagagcccagcccagagtgcaggtgggccacagacagctgcacaccgccggcgcccccgtgcccgagaagcccaagagaggccccagagacagactgagctacaccgccccccccagcttcaaggagcacgccaccaacgagaacagaggcgaggtggccagcaagcccagcgagctggtgagcggcagcaacagcatcatcagcttcagcagcgtgatcagcatggccaagcccatcggcctgtgcatgcccaacagcgcccacatcatggccagcaacaccatgcaggtggaggagccccccaagagccccgagaagatgtggcccaaggacgagaacttcgagcagagaagcagcctggagtgcgcccagaaggccgccgagctgagagccagcatcaaggagaaggtggagctgatcagactgaagaagctgctgcacgagagaaacgccagcctggtgatgaccaaggcccagctgaccgaggtgcaggaggcctgcaccttcctgctgacccagaaccagggcatcctgagcgccgcccacgaggccctgctgaagcaggtgaacgagctgagagccgagctgaaggaggagagcaagaaggccgtgagcctgaagagccagctggaggacgtgagcatcctgcagatgaccctgaaggagttccaggagagagtggaggacctggagaaggagagaaagctgctgaacgacaactacgacaagctgctggagagcatgctggacagcagcgacagcagcagccagccccactggagcaacgagctgatcgccgagcagctgcagcagcaggtgagccagctgcaggaccagctggacgccgagctggaggacaagagaaaggtgctgctggagctgagcagagagaaggcccagaacgaggacctgaagctggaggtgaccaacatcctgcagaagcacaagcaggaggtggagctgctgcagaacgccgccaccatcagccagccccccgacagacagagcgagcccgccacccaccccgccgtgctgcaggagaacacccagatcgagcccagcgagcccaagaaccaggaggagaagaagctgagccaggtgctgaacgagctgcaggtgagccacgccgagaccaccctggagctggagaagaccagagacatgctgatcctgcagagaaagatcaacgtgtgctaccaggaggagctggaggccatgatgaccaaggccgacaacgacaacagagaccacaaggagaagctggagagactgaccagactgctggacctgaagaacaacagaatcaagcagctggagggcatcctgagaagccacgacctgcccaccagcgagcagctgaaggacgtggcctacggcaccagacccctgagcctgtgcctggagaccctgcccgcccacggcgacgaggacaaggtggacatcagcctgctgcaccagggcgagaacctgttcgagctgcacatccaccaggccttcctgaccagcgccgccctggcccaggccggcgacacccagcccaccaccttctgcacctacagcttctacgacttcgagacccactgcacccccctgagcgtgggcccccagcccctgtacgacttcaccagccagtacgtgatggagaccgacagcctgttcctgcactacctgcaggaggccagcgccagactggacatccaccaggccatggccagcgagcacagcaccctggccgccggctggatctgcttcgacagagtgctggagaccgtggagaaggtgcacggcctggccaccctgatcggcgccggcggcgaggagttcggcgtgctggagtactggatgagactgagattccccatcaagcccagcctgcaggcctgcaacaagagaaagaaggcccaggtgtacctgagcaccgacgtgctgggcggcagaaaggcccaggaggaggagttcagaagcgagagctgggagccccagaacgagctgtggatcgagatcaccaagtgctgcggcctgagaagcagatggctgggcacccagcccagcccctacgccgtgtacagattcttcaccttcagcgaccacgacaccgccatcatccccgccagcaacaacccctacttcagagaccaggccagattccccgtgctggtgaccagcgacctggaccactacctgagaagagaggccctgagcatccacgtgttcgacgacgaggacctggagcccggcagctacctgggcagagccagagtgcccctgctgcccctggccaagaacgagagcatcaagggcgacttcaacctgaccgaccccgccgagaagcccaacggcagcatccaggtgcagctggactggaagttcccctacatcccccccgagagcttcctgaagcccgaggcccagaccaagggcaaggacaccaaggacagcagcaagatcagcagcgaggaggagaaggccagcttccccagccaggaccagatggccagccccgaggtgcccatcgaggccggccagtacagaagcaagagaaagcccccccacggcggcgagagaaaggagaaggagcaccaggtggtgagctacagcagaagaaagcacggcaagagaatcggcgtgcagggcaagaacagaatggagtacctgagcctgaacatcctgaacggcaacacccccgagcaggtgaactacaccgagtggaagttcagcgagaccaacagcttcatcggcgacggcttcaagaaccagcacgaggaggaggagatgaccctgagccacagcgccctgaagcagaaggagcccctgcaccccgtgaacgacaaggagagcagcgagcagggcagcgaggtgagcgaggcccagaccaccgacagcgacgacgtgatcgtgccccccatgagccagaagtaccccaaggccgacagcgagaagatgtgcatcgagatcgtgagcctggccttctaccccgaggccgaggtgatgagcgacgagaacatcaagcaggtgtacgtggagtacaagttctacgacctgcccctgagcgagaccgagacccccgtgagcctgagaaagcccagagccggcgaggagatccacttccacttcagcaaggtgatcgacctggacccccaggagcagcagggcagaagaagattcctgttcgacatgctgaacggccaggaccccgaccagggccacctgaagttcaccgtggtgagcgaccccctggacgaggagaagaaggagtgcgaggaggtgggctacgcctacctgcagctgtggcagatcctggagagcggcagagacatcctggagcaggagctggacatcgtgagccccgaggacctggccacccccatcggcagactgaaggtgagcctgcaggccgccgccgtgctgcacgccatctacaaggagatgaccgaggacctgttcagctag

SEQ ID NO: 102958 - DNA, 1128 bp, synthetic construct
  misc_feature 1..1128: note = Description of Artificial Sequence: Synthetic coding sequence
  source 1..1128: mol_type = other DNA
atgaagagacccgacctgcccagcggcttcgacggctggcaggtggtggacgccaccccccaggagaccagcagcggcatcttctgctgcggcccctgcagcgtggagagcatcaagaacggcctggtgtacatgaagtacgacacccccttcatcttcgccgaggtgaacagcgacaaggtgtactggcagagacaggacgacggcagcttcaagatcgtgtacgtggaggagaaggccatcggcaccctgatcgtgaccaaggccatcagcagcaacatgagagaggacatcacctacctgtacaagcaccccgagggcagcgacgccgagagaaaggccgtggagaccgccgccgcccacggcagcaagcccaacgtgtacgccaacagaggcagcgccgaggacgtggccatgcaggtggaggcccaggacgccgtgatgggccaggacctgatggtgagcgtgatgctgatcaaccacagcagcagcagaagaaccgtgaagctgcacctgtacctgagcgtgaccttctacaccggcgtgagcggcaccatcttcaaggagaccaagaaggaggtggagctggcccccggcgccagcgacagagtgaccatgcccgtggcctacaaggagtacagaccccacctggtggaccagggcgccatgctgctgaacgtgagcggccacgtgaaggagagcggccaggtgctggccaagcagcacaccttcagactgagaacccccgacctgagcctgaccctgctgggcgccgccgtggtgggccaggagtgcgaggtgcagatcgtgttcaagaaccccctgcccgtgaccctgaccaacgtggtgttcagactggagggcagcggcctgcagagacccaagatcctgaacgtgggcgacatcggcggcaacgagaccgtgaccctgagacagagcttcgtgcccgtgagacccggccccagacagctgatcgccagcctggacagcccccagctgagccaggtgcacggcgtgatccaggtggacgtggcccccgcccccggcgacggcggcttcttcagcgacgccggcggcgacagccacctgggcgagaccatccccatggccagcagaggcggcgcctag

SEQ ID NO: 102959 - DNA, 408 bp, synthetic construct
  misc_feature 1..408: note = Description of Artificial Sequence: Synthetic coding sequence
  source 1..408: mol_type = other DNA
atgatggacggccccagaagcgacgtgggcagatggggcggcaaccccctgcagccccccaccacccccagccccgagcccgagcccgagcccgacggcagaagcagaagaggcggcggcagaagcttctgggccagatgctgcggctgctgcagctgcagaaacgccgccgacgacgactggggccccgagcccagcgacagcagaggcagaggcagcagcagcggcaccagaagacccggcagcagaggcagcgacagcagaagacccgtgagcagaggcagcggcgtgaacgccgccggcgacggcaccatcagagagggcatgctggtggtgaacggcgtggacctgctgagcagcagaagcgaccagaacagaagagagcaccacaccgacgagtacgagtag

SEQ ID NO: 102960 - DNA, 129 bp, synthetic construct
  misc_feature 1..129: note = Description of Artificial Sequence: Synthetic coding sequence
  source 1..129: mol_type = other DNA
atgatggacggccccagaagcgacgtgggcagatggggcggcaaccccctgcagccccccaccacccccagccccgagcccgagcccgagcccgacggcagaagcagaagaggcggcggcagaagctag

SEQ ID NO: 102961 - DNA, 198 bp, synthetic construct
  misc_feature 1..198: note = Description of Artificial Sequence: Synthetic coding sequence
  source 1..198: mol_type = other DNA
atgatggacggccccagaagcgacgtgggcagatggggcggcaaccccctgcagccccccaccacccccagccccgagcccgagcccgagcccgacggcagaagcagaagaggcggcggcagaagcttctgggccagatgctgcggctgctgcagctgcagaaacgccgccgacgacgactggggccccgagccctag

SEQ ID NO: 102962 - DNA, 153 bp, synthetic construct
  misc_feature 1..153: note = Description of Artificial Sequence: Synthetic coding sequence
  source 1..153: mol_type = other DNA
atgatggacggccccagaagcgacgtgggcagatggggcggcaaccccctgcagccccccaccacccccagccccgagcccgagcccgagcccgacggcagaagcagaagaggcggcggcagaagcttctgggccagatgctgcggctgctag

SEQ ID NO: 102963 - DNA, 30 bp, synthetic construct
  misc_feature 1..30: note = Description of Artificial Sequence: Synthetic coding sequence
  source 1..30: mol_type = other DNA
atgatggacggccccagaagcgacgtgtag

SEQ ID NO: 102964 - DNA, 2064 bp, synthetic construct
  misc_feature 1..2064: note = Description of Artificial Sequence: Synthetic coding sequence
  source 1..2064: mol_type = other DNA
atggccgaggagctggtgctggagagatgcgacctggagctggagaccaacggcagagaccaccacaccgccgacctgtgcagagagaagctggtggtgagaagaggccagcccttctggctgaccctgcacttcgagggcagaaactacgaggccagcgtggacagcctgaccttcagcgtggtgaccggccccgcccccagccaggaggccggcaccaaggccagattccccctgagagacgccgtggaggagggcgactggaccgccaccgtggtggaccagcaggactgcaccctgagcctgcagctgaccacccccgccaacgcccccatcggcctgtacagactgagcctggaggccagcaccggctaccagggcagcagcttcgtgctgggccacttcatcctgctgttcaacgcctggtgccccgccgacgccgtgtacctggacagcgaggaggagagacaggagtacgtgctgacccagcagggcttcatctaccagggcagcgccaagttcatcaagaacatcccctggaacttcggccagttcgaggacggcatcctggacatctgcctgatcctgctggacgtgaaccccaagttcctgaagaacgccggcagagactgcagcagaagaagcagccccgtgtacgtgggcagagtggtgagcggcatggtgaactgcaacgacgaccagggcgtgctgctgggcagatgggacaacaactacggcgacggcgtgagccccatgagctggatcggcagcgtggacatcctgagaagatggaagaaccacggctgccagagagtgaagtacggccagtgctgggtgttcgccgccgtggcctgcaccgtgctgagatgcctgggcatccccaccagagtggtgaccaactacaacagcgcccacgaccagaacagcaacctgctgatcgagtacttcagaaacgagttcggcgagatccagggcgacaagagcgagatgatctggaacttccactgctgggtggagagctggatgaccagacccgacctgcagcccggctacgagggctggcaggccctggaccccaccccccaggagaagagcgagggcacctactgctgcggccccgtgcccgtgagagccatcaaggagggcgacctgagcaccaagtacgacgcccccttcgtgttcgccgaggtgaacgccgacgtggtggactggatccagcaggacgacggcagcgtgcacaagagcatcaacagaagcctgatcgtgggcctgaagatcagcaccaagagcgtgggcagagacgagagagaggacatcacccacacctacaagtaccccgagggcagcagcgaggagagagaggccttcaccagagccaaccacctgaacaagctggccgagaaggaggagaccggcatggccatgagaatcagagtgggccagagcatgaacatgggcagcgacttcgacgtgttcgcccacatcaccaacaacaccgccgaggagtacgtgtgcagactgctgctgtgcgccagaaccgtgagctacaacggcatcctgggccccgagtgcggcaccaagtacctgctgaacctgaacctggagcccttcagcgagaagagcgtgcccctgtgcatcctgtacgagaagtacagagactgcctgaccgagagcaacctgatcaaggtgagagccctgctggtggagcccgtgatcaacagctacctgctggccgagagagacctgtacctggagaaccccgagatcaagatcagaatcctgggcgagcccaagcagaagagaaagctggtggccgaggtgagcctgcagaaccccctgcccgtggccctggagggctgcaccttcaccgtggagggcgccggcctgaccgaggagcagaagaccgtggagatccccgaccccgtggaggccggcgaggaggtgaaggtgagaatggacctgctgcccctgcacatgggcctgcacaagctggtggtgaacttcgagagcgacaagctgaaggccgtgaagggcttcagaaacgtgatcatcggccccgcctag

SEQ ID NO: 102965 - DNA, 846 bp, synthetic construct
  misc_feature 1..846: note = Description of Artificial Sequence: Synthetic coding sequence
  source 1..846: mol_type = other DNA
atggccgaggagctggtgctggagagatgcgacctggagctggagaccaacggcagagaccaccacaccgccgacctgtgcagagagaagctggtggtgagaagaggccagcccttctggctgaccctgcacttcgagggcagaaactacgaggccagcgtggacagcctgaccttcagcgtggtgaccggccccgcccccagccaggaggccggcaccaaggccagattccccctgagagacgccgtggaggagggcgactggaccgccaccgtggtggaccagcaggactgcaccctgagcctgcagctgaccacccccgccaacgcccccatcggcctgtacagactgagcctggaggccagcaccggctaccagggcagcagcttcgtgctgggccacttcatcctgctgttcaacgcctggtgccccgccgacgccgtgtacctggacagcgaggaggagagacaggagtacgtgctgacccagcagggcttcatctaccagggcagcgccaagttcatcaagaacatcccctggaacttcggccagttcgaggacggcatcctggacatctgcctgatcctgctggacgtgaaccccaagttcctgaagaacgccggcagagactgcagcagaagaagcagccccgtgtacgtgggcagagtggtgagcggcatggtgaactgcaacgacgaccagggcgtgctgctgggcagatgggacaacaactacggcgacggcgtgagccccatgagctggatcggcagcgtggacatcctgagaagatggaagaaccacggctgccagagagtgaagtacggccagtgctgggtgttcgcctag

SEQ ID NO: 102966 - DNA, 483 bp, synthetic construct
  misc_feature 1..483: note = Description of Artificial Sequence: Synthetic coding sequence
  source 1..483: mol_type = other DNA
atggccgaggagctggtgctggagagatgcgacctggagctggagaccaacggcagagaccaccacaccgccgacctgtgcagagagaagctggtggtgagaagaggccagcccttctggctgaccctgcacttcgagggcagaaactacgaggccagcgtggacagcctgaccttcagcgtggtgaccggccccgcccccagccaggaggccggcaccaaggccagattccccctgagagacgccgtggaggagggcgactggaccgccaccgtggtggaccagcaggactgcaccctgagcctgcagctgaccacccccgccaacgcccccatcggcctgtacagactgagcctggaggccagcaccggctaccagggcagcagcttcgtgctgggccacttcatcctgctgttcaacgcctggtgccccgccgacgccgtgtacctggacagcgaggaggagagacaggagtacgtgtag

SEQ ID NO: 102967 - DNA, 1821 bp, synthetic construct
  misc_feature 1..1821: note = Description of Artificial Sequence: Synthetic coding sequence
  source 1..1821: mol_type = other DNA
atggccgaggagctggtgctggagagatgcgacctggagctggagaccaacggcagagaccaccacaccgccgacctgtgcagagagaagctggtggtgagaagaggccagcccttctggctgaccctgcacttcgagggcagaaactacgaggccagcgtggacagcctgaccttcagcgtggtgaccgccgacgccgtgtacctggacagcgaggaggagagacaggagtacgtgctgacccagcagggcttcatctaccagggcagcgccaagttcatcaagaacatcccctggaacttcggccagttcgaggacggcatcctggacatctgcctgatcctgctggacgtgaaccccaagttcctgaagaacgccggcagagactgcagcagaagaagcagccccgtgtacgtgggcagagtggtgagcggcatggtgaactgcaacgacgaccagggcgtgctgctgggcagatgggacaacaactacggcgacggcgtgagccccatgagctggatcggcagcgtggacatcctgagaagatggaagaaccacggctgccagagagtgaagtacggccagtgctgggtgttcgccgccgtggcctgcaccgtgctgagatgcctgggcatccccaccagagtggtgaccaactacaacagcgcccacgaccagaacagcaacctgctgatcgagtacttcagaaacgagttcggcgagatccagggcgacaagagcgagatgatctggaacttccactgctgggtggagagctggatgaccagacccgacctgcagcccggctacgagggctggcaggccctggaccccaccccccaggagaagagcgagggcacctactgctgcggccccgtgcccgtgagagccatcaaggagggcgacctgagcaccaagtacgacgcccccttcgtgttcgccgaggtgaacgccgacgtggtggactggatccagcaggacgacggcagcgtgcacaagagcatcaacagaagcctgatcgtgggcctgaagatcagcaccaagagcgtgggcagagacgagagagaggacatcacccacacctacaagtaccccgagggcagcagcgaggagagagaggccttcaccagagccaaccacctgaacaagctggccgagaaggaggagaccggcatggccatgagaatcagagtgggccagagcatgaacatgggcagcgacttcgacgtgttcgcccacatcaccaacaacaccgccgaggagtacgtgtgcagactgctgctgtgcgccagaaccgtgagctacaacggcatcctgggccccgagtgcggcaccaagtacctgctgaacctgaacctggagcccttcagcgagaagagcgtgcccctgtgcatcctgtacgagaagtacagagactgcctgaccgagagcaacctgatcaaggtgagagccctgctggtggagcccgtgatcaacagctacctgctggccgagagagacctgtacctggagaaccccgagatcaagatcagaatcctgggcgagcccaagcagaagagaaagctggtggccgaggtgagcctgcagaaccccctgcccgtggccctggagggctgcaccttcaccgtggagggcgccggcctgaccgaggagcagaagaccgtggagatccccgaccccgtggaggccggcgaggaggtgaaggtgagaatggacctgctgcccctgcacatgggcctgcacaagctggtggtgaacttcgagagcgacaagctgaaggccgtgaagggcttcagaaacgtgatcatcggccccgcctag

SEQ ID NO: 102968 - DNA, 1884 bp, synthetic construct
  misc_feature 1..1884: note = Description of Artificial Sequence: Synthetic coding sequence
  source 1..1884: mol_type = other DNA
atggccgagggccccgcccccagccaggaggccggcaccaaggccagattccccctgagagacgccgtggaggagggcgactggaccgccaccgtggtggaccagcaggactgcaccctgagcctgcagctgaccacccccgccaacgcccccatcggcctgtacagactgagcctggaggccagcaccggctaccagggcagcagcttcgtgctgggccacttcatcctgctgttcaacgcctggtgccccgccgacgccgtgtacctggacagcgaggaggagagacaggagtacgtgctgacccagcagggcttcatctaccagggcagcgccaagttcatcaagaacatcccctggaacttcggccagttcgaggacggcatcctggacatctgcctgatcctgctggacgtgaaccccaagttcctgaagaacgccggcagagactgcagcagaagaagcagccccgtgtacgtgggcagagtggtgagcggcatggtgaactgcaacgacgaccagggcgtgctgctgggcagatgggacaacaactacggcgacggcgtgagccccatgagctggatcggcagcgtggacatcctgagaagatggaagaaccacggctgccagagagtgaagtacggccagtgctgggtgttcgccgccgtggcctgcaccgtgctgagatgcctgggcatccccaccagagtggtgaccaactacaacagcgcccacgaccagaacagcaacctgctgatcgagtacttcagaaacgagttcggcgagatccagggcgacaagagcgagatgatctggaacttccactgctgggtggagagctggatgaccagacccgacctgcagcccggctacgagggctggcaggccctggaccccaccccccaggagaagagcgagggcacctactgctgcggccccgtgcccgtgagagccatcaaggagggcgacctgagcaccaagtacgacgcccccttcgtgttcgccgaggtgaacgccgacgtggtggactggatccagcaggacgacggcagcgtgcacaagagcatcaacagaagcctgatcgtgggcctgaagatcagcaccaagagcgtgggcagagacgagagagaggacatcacccacacctacaagtaccccgagggcagcagcgaggagagagaggccttcaccagagccaaccacctgaacaagctggccgagaaggaggagaccggcatggccatgagaatcagagtgggccagagcatgaacatgggcagcgacttcgacgtgttcgcccacatcaccaacaacaccgccgaggagtacgtgtgcagactgctgctgtgcgccagaaccgtgagctacaacggcatcctgggccccgagtgcggcaccaagtacctgctgaacctgaacctggagcccttcagcgagaagagcgtgcccctgtgcatcctgtacgagaagtacagagactgcctgaccgagagcaacctgatcaaggtgagagccctgctggtggagcccgtgatcaacagctacctgctggccgagagagacctgtacctggagaaccccgagatcaagatcagaatcctgggcgagcccaagcagaagagaaagctggtggccgaggtgagcctgcagaaccccctgcccgtggccctggagggctgcaccttcaccgtggagggcgccggcctgaccgaggagcagaagaccgtggagatccccgaccccgtggaggccggcgaggaggtgaaggtgagaatggacctgctgcccctgcacatgggcctgcacaagctggtggtgaacttcgagagcgacaagctgaaggccgtgaagggcttcagaaacgtgatcatcggccccgcctag

SEQ ID NO: 102969 - DNA, 2082 bp, synthetic construct
  misc_feature 1..2082: note = Description of Artificial Sequence: Synthetic coding sequence
  source 1..2082: mol_type = other DNA
atggccgccctgggcgtgcagagcatcaactggcagaccgccttcaacagacaggcccaccacaccgacaagttcagcagccaggagctgatcctgagaagaggccagaacttccaggtgctgatgatcatgaacaagggcctgggcagcaacgagagactggagttcatcgtgagcaccggcccctaccccagcgagagcgccatgaccaaggccgtgttccccctgagcaacggcagcagcggcggctggagcgccgtgctgcaggccagcaacggcaacaccctgaccatcagcatcagcagccccgccagcgcccccatcggcagatacaccatggccctgcagatcttcagccagggcggcatcagcagcgtgaagctgggcaccttcatcctgctgttcaacccctggctgaacgtggacagcgtgttcatgggcaaccacgccgagagagaggagtacgtgcaggaggacgccggcatcatcttcgtgggcagcaccaacagaatcggcatgatcggctggaacttcggccagttcgaggaggacatcctgagcatctgcctgagcatcctggacagaagcctgaacttcagaagagacgccgccaccgacgtggccagcagaaacgaccccaagtacgtgggcagagtgctgagcgccatgatcaacagcaacgacgacaacggcgtgctggccggcaactggagcggcacctacaccggcggcagagaccccagaagctggaacggcagcgtggagatcctgaagaactggaagaagagcggcttcagccccgtgagatacggccagtgctgggtgttcgccggcaccctgaacaccgccctgagaagcctgggcatccccagcagagtgatcaccaacttcaacagcgcccacgacaccgacagaaacctgagcgtggacgtgtactacgaccccatgggcaaccccctggacaagggcagcgacagcgtgtggaacttccacgtgtggaacgagggctggttcgtgagaagcgacctgggccccagctacggcggctggcaggtgctggacgccaccccccaggagagaagccagggcgtgttccagtgcggccccgccagcgtgatcggcgtgagagagggcgacgtgcagctgaacttcgacatgcccttcatcttcgccgaggtgaacgccgacagaatcacctggctgtacgacaacaccaccggcaagcagtggaagaacagcgtgaacagccacaccatcggcagatacatcagcaccaaggccgtgggcagcaacgccagaatggacgtgaccgacaagtacaagtaccccgagggcagcgaccaggagagacaggtgttccagaaggccctgggcaagctgaagcccaacacccccttcgccgccaccagcagcatgggcctggagaccgaggagcaggagcccagcatcatcggcaagctgaaggtggccggcatgctggccgtgggcaaggaggtgaacctggtgctgctgctgaagaacctgagcagagacaccaagaccgtgaccgtgaacatgaccgcctggaccatcatctacaacggcaccctggtgcacgaggtgtggaaggacagcgccaccatgagcctggaccccgaggaggaggccgagcaccccatcaagatcagctacgcccagtacgagaagtacctgaagagcgacaacatgatcagaatcaccgccgtgtgcaaggtgcccgacgagagcgaggtggtggtggagagagacatcatcctggacaaccccaccctgaccctggaggtgctgaacgaggccagagtgagaaagcccgtgaacgtgcagatgctgttcagcaaccccctggacgagcccgtgagagactgcgtgctgatggtggagggcagcggcctgctgctgggcaacctgaagatcgacgtgcccaccctgggccccaaggagggcagcagagtgagattcgacatcctgcccagcagaagcggcaccaagcagctgctggccgacttcagctgcaacaagttccccgccatcaaggccatgctgagcatcgacgtggccgagtag

SEQ ID NO: 102970 - DNA, 1602 bp, synthetic construct
  misc_feature 1..1602: note = Description of Artificial Sequence: Synthetic coding sequence
  source 1..1602: mol_type = other DNA
atggccgccctgggcgtgcagagcatcaactggcagaccgccttcaacagacaggcccaccacaccgacaagttcagcagccaggagctgatcctgagaagaggccagaacttccaggtgctgatgatcatgaacaagggcctgggcagcaacgagagactggagttcatcgtgagcaccggcccctaccccagcgagagcgccatgaccaaggccgtgttccccctgagcaacggcagcagcggcggctggagcgccgtgctgcaggccagcaacggcaacaccctgaccatcagcatcagcagccccgccagcgcccccatcggcagatacaccatggccctgcagatcttcagccagggcggcatcagcagcgtgaagctgggcaccttcatcctgctgttcaacccctggctgaacgtggacagcgtgttcatgggcaaccacgccgagagagaggagtacgtgcaggaggacgccggcatcatcttcgtgggcagcaccaacagaatcggcatgatcggctggaacttcggccagttcgaggaggacatcctgagcatctgcctgagcatcctggacagaagcctgaacttcagaagagacgccgccaccgacgtggccagcagaaacgaccccaagtacgtgggcagagtgctgagcgccatgatcaacagcaacgacgacaacggcgtgctggccggcaactggagcggcacctacaccggcggcagagaccccagaagctggaacggcagcgtggagatcctgaagaactggaagaagagcggcttcagccccgtgagatacggccagtgctgggtgttcgccggcaccctgaacaccgccctgagaagcctgggcatccccagcagagtgatcaccaacttcaacagcgcccacgacaccgacagaaacctgagcgtggacgtgtactacgaccccatgggcaaccccctggacaagggcagcgacagcgtgtggaacttccacgtgtggaacgagggctggttcgtgagaagcgacctgggccccagctacggcggctggcaggtgctggacgccaccccccaggagagaagccagggcgtgttccagtgcggccccgccagcgtgatcggcgtgagagagggcgacgtgcagctgaacttcgacatgcccttcatcttcgccgaggtgaacgccgacagaatcacctggctgtacgacaacaccaccggcaagcagtggaagaacagcgtgaacagccacaccatcggcagatacatcagcaccaaggccgtgggcagcaacgccagaatggacgtgaccgacaagtacaagtaccccgagggcagcgaccaggagagacaggtgttccagaaggccctgggcaagctgaagcccaacacccccttcgccgccaccagcagcatgggcctggagaccgaggagcaggagcccagcatcatcggcaagctgaaggtggccggcatgctggccgtgggcaaggaggtgaacctggtgctgctgctgatcccccacgccctgcagtgctgcagaatggactggcccctgacccagggcctgagcaagagagacaccggcgagaagctggtgtag

SEQ ID NO: 102971 - DNA, 2055 bp, synthetic construct
  misc_feature 1..2055: note = Description of Artificial Sequence: Synthetic coding sequence
  source 1..2055: mol_type = other DNA
atgatggacgccagcaaggagctgcaggtgctgcacatcgacttcctgaaccaggacaacgccgtgagccaccacacctgggagttccagaccagcagccccgtgttcagaagaggccaggtgttccacctgagactggtgctgaaccagcccctgcagagctaccaccagctgaagctggagttcagcaccggccccaaccccagcatcgccaagcacaccctggtggtgctggaccccagaacccccagcgaccactacaactggcaggccaccctgcagaacgagagcggcaaggaggtgaccgtggccgtgaccagcagccccaacgccatcctgggcaagtaccagctgaacgtgaagaccggcaaccacatcctgaagagcgaggagaacatcctgtacctgctgttcaacccctggtgcaaggaggacatggtgttcatgcccgacgaggacgagagaaaggagtacatcctgaacgacaccggctgccactacgtgggcgccgccagaagcatcaagtgcaagccctggaacttcggccagttcgagaagaacgtgctggactgctgcatcagcctgctgaccgagagcagcctgaagcccaccgacagaagagaccccgtgctggtgtgcagagccatgtgcgccatgatgagcttcgagaagggccagggcgtgctgatcggcaactggaccggcgactacgagggcggcaccgccccctacaagtggaccggcagcgcccccatcctgcagcagtactacaacaccaagcaggccgtgtgcttcggccagtgctgggtgttcgccggcatcctgaccaccgtgctgagagccctgggcatccccgccagaagcgtgaccggcttcgacagcgcccacgacaccgagagaaacctgaccgtggacacctacgtgaacgagaacggcgagaagatcaccagcatgacccacgacagcgtgtggaacttccacgtgtggaccgacgcctggatgaagagacccgacctgcccaagggctacgacggctggcaggccgtggacgccaccccccaggagagaagccagggcgtgttctgctgcggccccagccccctgaccgccatcagaaagggcgacatcttcatcgtgtacgacaccagattcgtgttcagcgaggtgaacggcgacagactgatctggctggtgaagatggtgaacggccaggaggagctgcacgtgatcagcatggagaccaccagcatcggcaagaacatcagcaccaaggccgtgggccaggacagaagaagagacatcacctacgagtacaagtaccccgagggcagcagcgaggagagacaggtgatggaccacgccttcctgctgctgagcagcgagagagagcacagaagacccgtgaaggagaacttcctgcacatgagcgtgcagagcgacgacgtgctgctgggcaacagcgtgaacttcaccgtgatcctgaagagaaagaccgccgccctgcagaacgtgaacatcctgggcagcttcgagctgcagctgtacaccggcaagaagatggccaagctgtgcgacctgaacaagaccagccagatccagggccaggtgagcgaggtgaccctgaccctggacagcaagacctacatcaacagcctggccatcctggacgacgagcccgtgatcagaggcttcatcatcgccgagatcgtggagagcaaggagatcatggccagcgaggtgttcaccagcttccagtaccccgagttcagcatcgagctgcccaacaccggcagaatcggccagctgctggtgtgcaactgcatcttcaagaacaccctggccatccccctgaccgacgtgaagttcagcctggagagcctgggcatcagcagcctgcagaccagcgaccacggcaccgtgcagcccggcgagaccatccagagccagatcaagtgcacccccatcaagaccggccccaagaagttcatcgtgaagctgagcagcaagcaggtgaaggagatcaacgcccagaagatcgtgctgatcaccaagtag

SEQ ID NO: 102972 - DNA, 1626 bp, synthetic construct
  misc_feature 1..1626: note = Description of Artificial Sequence: Synthetic coding sequence
  source 1..1626: mol_type = other DNA
atgttcagctggatgggcagacaggccggcggcagagagagagccggcggcgccgacgccgtgcagaccgtgaccggcggcctgagaagcctgtacctgagaaaggtgctgcccctggaggaggcctacagattccacgagttccacagccccgccctggaggacgccgacttcgagaacaagcccatgatcctgctggtgggccagtacagcaccggcaagaccaccttcatcagatacctgctggagcaggacttccccggcatgagaatcggccccgagcccaccaccgacagcttcatcgccgtgatgtacggcgagaccgagggcagcacccccggcaacgccctggtggtggaccccaagaagcccttcagaaagctgagcagattcggcaacgccttcctgaacagattcatgtgcagccagctgcccaaccaggtgctgaagagcatcagcgtgatcgacagccccggcatcctgagcggcgagaagcagagaatcagcagaggctacgacttctgccaggtgctgcagtggttcgccgagagagtggacagaatcatcctgctgttcgacgcccacaagctggacatcagcgacgagttcagcgaggccatcaaggccttcagaggccaggacgacaagatcagagtggtgctgaacaaggccgaccaggtggacacccagcagctgatgagagtgtacggcgccctgatgtggagcctgggcaaggtgatcaacacccccgaggtgctgagagtgtacatcggcagcttctgggcccagcccctgcagaacaccgacaacagaagactgttcgaggccgaggcccaggacctgttcagagacatccagagcctgccccagaaggccgccgtgagaaagctgaacgacctgatcaagagagccagactggccaaggtgcacgcctacatcatcagctacctgaagaaggagatgcccagcgtgttcggcaaggagaacaagaagagagagctgatcagcagactgcccgagatctacatccagctgcagagagagtaccagatcagcgccggcgacttccccgaggtgaaggccatgcaggagcagctggagaactacgacttcaccaagttccacagcctgaagcccaagctgatcgaggccgtggacaacatgctgagcaacaagatcagccccctgatgaacctgatcagccaggaggagaccagcacccccacccagctggtgcagggcggcgccttcgacggcaccaccgagggccccttcaaccagggctacggcgagggcgccaaggagggcgccgacgaggaggagtgggtggtggccaaggacaagcccgtgtacgacgagctgttctacaccctgagccccatcaacggcaagatcagcggcgtgaacgccaagaaggagatggtgaccagcaagctgcccaacagcgtgctgggcaagatctggaagctggccgactgcgactgcgacggcatgctggacgaggaggagttcgccctggccaagcacctgatcaagatcaagctggacggctacgagctgcccagcagcctgcccccccacctggtgccccccagccacagaaagagcctgcccaaggccgactag

SEQ ID NO: 102973 - DNA, 1917 bp, synthetic construct
  misc_feature 1..1917: note = Description of Artificial Sequence: Synthetic coding sequence
  source 1..1917: mol_type = other DNA
atggcccagggcctggaggtggccctgaccgacctgcagagcagcagaaacaacgtgagacaccacaccgaggagatcaccgtggaccacctgctggtgagaagaggccaggccttcaacctgaccctgtacttcagaaacagaagcttccagcccggcctggacaacatcatcttcgtggtggagaccgaggacgccgtgtacctggacagcgagccccagagacaggagtacgtgatgaacgactacggcttcatctaccagggcagcaagaactggatcagaccctgcccctggaactacggccagttcgaggacaagatcatcgacatctgcctgaagctgctggacaagagcctgcacttccagaccgaccccgccaccgactgcgccctgagaggcagccccgtgtacgtgagcagagtggtgtgcgccatgatcaacagcaacgacgacaacggcgtgctgaacggcaactggagcgagaactacaccgacggcgccaaccccgccgagtggaccggcagcgtggccatcctgaagcagtggaacgccaccggctgccagcccgtgagatacggccagtgctgggtgttcgccgccgtgatgtgcaccgtgatgagatgcctgggcatccccaccagagtgatcaccaacttcgacagcggccacgacaccgacggcaacctgatcatcgacgagtactacgacaacaccggcagaatcctgggcaacaagaagaaggacaccatctggaacttccacgtgtggaacgagtgctggatggccagaaaggacctgccccccgcctacggcggctggcaggtgctggacgccaccccccaggagatgagcaacggcgtgtactgctgcggccccgccagcgtgagagccatcaaggagggcgaggtggacctgaactacgacacccccttcgtgttcagcatggtgaacgccgactgcatgagctggctggtgcagggcggcaaggagcagaagctgcaccaggacaccagcagcgtgggcaacttcatcagcaccaagagcatccagagcgacgagagagacgacatcaccgagaactacaagtacgaggagggcagcctgcaggagagacaggtgttcctgaaggccctgcagaagctgaaggccagaagcttccacggcagccagagaggcgccgagctgcagcccagcagacccaccagcctgagccaggacagccccagaagcctgcacacccccagcctgagacccagcgacgtggtgcaggtgagcctgaagttcaagctgctggacccccccaacatgggccaggacatctgcttcgtgctgctggccctgaacatgagcagccagttcaaggacctgaaggtgaacctgagcgcccagagcctgctgcacgacggcagccccctgagccccttctggcaggacaccgccttcatcaccctgagccccaaggaggccaagacctacccctgcaagatcagctacagccagtacagccagtacctgagcaccgacaagctgatcagaatcagcgccctgggcgaggagaagagcagccccgagaagatcctggtgaacaagatcatcaccctgagctaccccagcatcaccatcaacgtgctgggcgccgccgtggtgaaccagcccctgagcatccaggtgatcttcagcaaccccctgagcgagcaggtggaggactgcgtgctgaccgtggagggcagcggcctgttcaagaagcagcagaaggtgttcctgggcgtgctgaagccccagcaccaggccagcatcatcctggagaccgtgcccttcaagagcggccagagacagatccaggccaacatgagaagcaacaagttcaaggacatcaagggctacagaaacgtgtacgtggacttcgccctgtag

SEQ ID NO: 102974 - DNA, 2160 bp, synthetic construct
  misc_feature 1..2160: note = Description of Artificial Sequence: Synthetic coding sequence
  source 1..2160: mol_type = other DNA
gcccagggcctggaggtggccctgaccgacctgcagagcagcagaaacaacgtgagacaccacaccgaggagatcaccgtggaccacctgctggtgagaagaggccaggccttcaacctgaccctgtacttcagaaacagaagcttccagcccggcctggacaacatcatcttcgtggtggagaccggccccctgcccgacctggccctgggcaccagagccgtgttcagcctggccagacaccacagccccagcccctggatcgcctggctggagaccaacggcgccaccagcaccgaggtgagcctgtgcgccccccccaccgccgccgtgggcagatacctgctgaagatccacatcgacagcttccagggcagcgtgaccgcctaccagctgggcgagttcatcctgctgttcaacccctggtgccccgaggacgccgtgtacctggacagcgagccccagagacaggagtacgtgatgaacgactacggcttcatctaccagggcagcaagaactggatcagaccctgcccctggaactacggccagttcgaggacaagatcatcgacatctgcctgaagctgctggacaagagcctgcacttccagaccgaccccgccaccgactgcgccctgagaggcagccccgtgtacgtgagcagagtggtgtgcgccatgatcaacagcaacgacgacaacggcgtgctgaacggcaactggagcgagaactacaccgacggcgccaaccccgccgagtggaccggcagcgtggccatcctgaagcagtggaacgccaccggctgccagcccgtgagatacggccagtgctgggtgttcgccgccgtgatgtgcaccgtgatgagatgcctgggcatccccaccagagtgatcaccaacttcgacagcggccacgacaccgacggcaacctgatcatcgacgagtactacgacaacaccggcagaatcctgggcaacaagaagaaggacaccatctggaacttccacgtgtggaacgagtgctggatggccagaaaggacctgccccccgcctacggcggctggcaggtgctggacgccaccccccaggagatgagcaacggcgtgtactgctgcggccccgccagcgtgagagccatcaaggagggcgaggtggacctgaactacgacacccccttcgtgttcagcatggtgaacgccgactgcatgagctggctggtgcagggcggcaaggagcagaagctgcaccaggacaccagcagcgtgggcaacttcatcagcaccaagagcatccagagcgacgagagagacgacatcaccgagaactacaagtacgaggagggcagcctgcaggagagacaggtgttcctgaaggccctgcagaagctgaaggccagaagcttccacggcagccagagaggcgccgagctgcagcccagcagacccaccagcctgagccaggacagccccagaagcctgcacacccccagcctgagacccagcgacgtggtgcaggtgagcctgaagttcaagctgctggacccccccaacatgggccaggacatctgcttcgtgctgctggccctgaacatgagcagccagttcaaggacctgaaggtgaacctgagcgcccagagcctgctgcacgacggcagccccctgagccccttctggcaggacaccgccttcatcaccctgagccccaaggaggccaagacctacccctgcaagatcagctacagccagtacagccagtacctgagcaccgacaagctgatcagaatcagcgccctgggcgaggagaagagcagccccgagaagatcctggtgaacaagatcatcaccctgagctaccccagcatcaccatcaacgtgctgggcgccgccgtggtgaaccagcccctgagcatccaggtgatcttcagcaaccccctgagcgagcaggtggaggactgcgtgctgaccgtggagggcagcggcctgttcaagaagcagcagaaggtgttcctgggcgtgctgaagccccagcaccaggccagcatcatcctggagaccgtgcccttcaagagcggccagagacagatccaggccaacatgagaagcaacaagttcaaggacatcaagggctacagaaacgtgtacgtggacttcgccctgtag

SEQ ID NO: 102975 - DNA, 2121 bp, synthetic construct
  misc_feature 1..2121: note = Description of Artificial Sequence: Synthetic coding sequence
  source 1..2121: mol_type = other DNA
atggccggcatcagagtgaccaaggtggactggcagagaagcagaaacggcgccgcccaccacacccaggagtacccctgccccgagctggtggtgagaagaggccagagcttcagcctgaccctggagctgagcagagccctggactgcgaggagatcctgatcttcaccatggagaccggccccagagccagcgaggccctgcacaccaaggccgtgttccagaccagcgagctggagagaggcgagggctggaccgccgccagagaggcccagatggagaagaccctgaccgtgagcctggccagcccccccagcgccgtgatcggcagatacctgctgagcatcagactgagcagccacagaaagcacagcaacagaagactgggcgagttcgtgctgctgttcaacccctggtgcgccgaggacgacgtgttcctggccagcgaggaggagagacaggagtacgtgctgagcgacagcggcatcatcttcagaggcgtggagaagcacatcagagcccagggctggaactacggccagttcgaggaggacatcctgaacatctgcctgagcatcctggacagaagccccggccaccagaacaaccccgccaccgacgtgagctgcagacacaaccccatctacgtgaccagagtgatcagcgccatggtgaacagcaacaacgacagaggcgtggtgcagggccagtggcagggcaagtacggcggcggcaccagccccctgcactggagaggcagcgtggccatcctgcagaagtggctgaagggcagatacaagcccgtgaagtacggccagtgctgggtgttcgccggcgtgctgtgcaccgtgctgagatgcctgggcatcgccaccagagtggtgagcaacttcaacagcgcccacgacaccgaccagaacctgagcgtggacaagtacgtggacagcttcggcagaaccctggaggacctgaccgaggacagcatgtggaacttccacgtgtggaacgagagctggttcgccagacaggacctgggccccagctacaacggctggcaggtgctggacgccaccccccaggaggagagcgagggcgtgttcagatgcggccccgccagcgtgaccgccatcagagagggcgacgtgcacctggcccacgacggccccttcgtgttcgccgaggtgaacgccgactacatcacctggctgtggcacgaggacgagagcagagagagagtgtacagcaacaccaagaagatcggcagatgcatcagcaccaaggccgtgggcagcgacagcagagtggacatcaccgacctgtacaagtaccccgagggcagcagaaaggagagacaggtgtacagcaaggccgtgaacagactgttcggcgtggaggccagcggcagaagaatctggatcagaagagccggcggcagatgcctgtggagagacgacctgctggagcccgccaccaagcccagcatcgccggcaagttcaaggtgctggagccccccatgctgggccacgacctgagactggccctgtgcctggccaacctgaccagcagagcccagagagtgagagtgaacctgagcggcgccaccatcctgtacaccagaaagcccgtggccgagatcctgcacgagagccacgccgtgagactgggcccccaggaggagaagagaatccccatcaccatcagctacagcaagtacaaggaggacctgaccgaggacaagaagatcctgctggccgccatgtgcctggtgaccaagggcgagaagctgctggtggagaaggacatcaccctggaggacttcatcaccatcaaggtgctgggccccgccatggtgggcgtggccgtgaccgtggaggtgaccgtggtgaaccccctgatcgagagagtgaaggactgcgccctgatggtggagggcagcggcctgctgcaggagcagctgagcatcgacgtgcccaccctggagccccaggagagagccagcgtgcagttcgacatcacccccagcaagagcggccccagacagctgcaggtggacctggtgagcccccacttccccgacatcaagggcttcgtgatcgtgcacgtggccaccgccaagtag

SEQ ID NO: 102976 - DNA, 1878 bp, synthetic construct
  misc_feature 1..1878: note = Description of Artificial Sequence: Synthetic coding sequence
  source 1..1878: mol_type = other DNA
atggccggcatcagagtgaccaaggtggactggcagagaagcagaaacggcgccgcccaccacacccaggagtacccctgccccgagctggtggtgagaagaggccagagcttcagcctgaccctggagctgagcagagccctggactgcgaggagatcctgatcttcaccatggagaccggccccagagccagcgaggccctgcacaccaaggccgtgttccagaccagcgagctggagagaggcgagggctggaccgccgccagagaggcccagatggagaagaccctgaccgtgagcctggccagcccccccagcgccgtgatcggcagatacctgctgagcatcagactgagcagccacagaaagcacagcaacagaagactgggcgagttcgtgctgctgttcaacccctggtgcgccgaggacgacgtgttcctggccagcgaggaggagagacaggagtacgtgctgagcgacagcggcatcatcttcagaggcgtggagaagcacatcagagcccagggctggaactacggccagttcgaggaggacatcctgaacatctgcctgagcatcctggacagaagccccggccaccagaacaaccccgccaccgacgtgagctgcagacacaaccccatctacgtgaccagagtgatcagcgccatggtgaacagcaacaacgacagaggcgtggtgcagggccagtggcagggcaagtacggcggcggcaccagccccctgcactggagaggcagcgtggccatcctgcagaagtggctgaagggcagatacaagcccgtgaagtacggccagtgctgggtgttcgccggcgtgctgtgcaccgtgctgagatgcctgggcatcgccaccagagtggtgagcaacttcaacagcgcccacgacaccgaccagaacctgagcgtggacaagtacgtggacagcttcggcagaaccctggaggacctgaccgaggacagcatgtggaacttccacgtgtggaacgagagctggttcgccagacaggacctgggccccagctacaacggctggcaggtgctggacgccaccccccaggaggagagcgagggcgtgttcagatgcggccccgccagcgtgaccgccatcagagagggcgacgtgcacctggcccacgacggccccttcgtgttcgccgaggtgaacgccgactacatcacctggctgtggcacgaggacgagagcagagagagagtgtacagcaacaccaagaagatcggcagatgcatcagcaccaaggccgtgggcagcgacagcagagtggacatcaccgacctgtacaagtaccccgagggcagcagaaaggagagacaggtgtacagcaaggccgtgaacagactgttcggcgtggaggccagcggcagaagaatctggatcagaagagccggcggcagatgcctgtggagagacgacctgctggagcccgccaccaagcccagcatcgccggcaagttcaaggtgctggagccccccatgctgggccacgacctgagactggccctgtgcctggccaacctgaccagcagagcccagagagtgagagtgaacctgagcggcgccaccatcctgtacaccagaaagcccgtggccgagatcctgcacgagagccacgccgtgagactgggcccccaggaggagaagagaatccccatcaccatcagctacagcaagtacaaggaggacctgaccgaggacaagaagatcctgctggccgccatgtgcctggtgaccaagggcgagaagctgctggtggagaaggacatcaccctggaggacttcatcaccatcaagagagcctaccccggcgccagcggcgagggcctgagccccgtgtag

SEQ ID NO: 102977 - DNA, 2133 bp, synthetic construct
  misc_feature 1..2133: note = Description of Artificial Sequence: Synthetic coding sequence
  source 1..2133: mol_type = other DNA
atggaccaggtggccaccctgagactggagagcgtggacctgcagagcagcagaaacaacaaggagcaccacacccaggagatgggcgtgaagagactgaccgtgagaagaggccagcccttctacctgagactgagcttcagcagacccttccagagccagaacgaccacatcaccttcgtggccgagaccggccccaagcccagcgagctgctgggcaccagagccaccttcttcctgaccagagtgcagcccggcaacgtgtggagcgccagcgacttcaccatcgacagcaacagcctgcaggtgagcctgttcacccccgccaacgccgtgatcggccactacaccctgaagatcgagatcagccagggccagggccacagcgtgacctaccccctgggcaccttcatcctgctgttcaacccctggagccccgaggacgacgtgtacctgcccagcgagatcctgctgcaggagtacatcatgagagactacggcttcgtgtacaagggccacgagagattcatcaccagctggccctggaactacggccagttcgaggaggacatcatcgacatctgcttcgagatcctgaacaagagcctgtaccacctgaagaaccccgccaaggactgcagccagagaaacgacgtggtgtacgtgtgcagagtggtgagcgccatgatcaacagcaacgacgacaacggcgtgctgcagggcaactggggcgaggactacagcaagggcgtgagccccctggagtggaagggcagcgtggccatcctgcagcagtggagcgccagaggcggccagcccgtgaagtacggccagtgctgggtgttcgccagcgtgatgtgcaccgtgatgagatgcctgggcgtgcccaccagagtggtgagcaacttcagaagcgcccacaacgtggacagaaacctgaccatcgacacctactacgacagaaacgccgagatgctgagcacccagaagagagacaagatctggaacttccacgtgtggaacgagtgctggatgatcagaaaggacctgccccccggctacaacggctggcaggtgctggaccccaccccccagcagaccagcagcggcctgttctgctgcggccccgccagcgtgaaggccatcagagagggcgacgtgcacctggcctacgacacccccttcgtgtacgccgaggtgaacgccgacgaggtgatctggctgctgggcgacggccaggcccaggagatcctggcccacaacaccagcagcatcggcaaggagatcagcaccaagatggtgggcagcgaccagagacagagcatcaccagcagctacaagtaccccgagggcagccccgaggagagagccgtgttcatgaaggccagcagaaagatgctgggcccccagagagccagcctgcccttcctggacctgctggagagcggcggcctgagagaccagcccgcccagctgcagctgcacctggccagaatccccgagtggggccaggacctgcagctgctgctgagaatccagagagtgcccgacagcacccaccccagaggccccatcggcctggtggtgagattctgcgcccaggccctgctgcacggcggcggcacccagaagcccttctggagacacaccgtgagaatgaacctggacttcggcaaggagacccagtggcccctgctgctgccctacagcaactacagaaacaagctgaccgacgagaagctgatcagagtgagcggcatcgccgaggtggaggagaccggcagaagcatgctggtgctgaaggacatctgcctggagcccccccacctgagcatcgaggtgagcgagagagccgaggtgggcaaggccctgagagtgcacgtgaccctgaccaacaccctgatggtggccctgagcagctgcaccatggtgctggagggcagcggcctgatcaacggccagatcgccaaggacctgggcaccctggtggccggccacaccctgcagatccagctggacctgtaccccaccaaggccggccccagacagctgcaggtgctgatcagcagcaacgaggtgaaggagatcaagggctacaaggacatcttcgtgaccgtggccggcgccccctag

SEQ ID NO: 102978 - DNA, 846 bp, synthetic construct
  misc_feature 1..846: note = Description of Artificial Sequence: Synthetic coding sequence
  source 1..846: mol_type = other DNA
atgagattcgtggtggccctggtgctgctgaacgtggccgccgccggcgccgtgcccctgctggccaccgagagcgtgaagcaggaggaggccggcgtgagacccagcgccggcaacgtgagcacccaccccagcctgagccagagacccggcggcagcaccaagagccaccccgagccccagacccccaaggacagccccagcaagagcagcagcgaggcccagaccaccaaggacgtgcccaacaagagcggcgccgacggccagacccccaaggacggcagcagcaagagcggcgccgaggaccagacccccaaggacgtgcccaacaagagcggcgccgagaagcagacccccaaggacggcagcaacaagagcggcgccgaggagcagggccccatcgacggccccagcaagagcggcgccgaggagcagaccagcaaggacagccccaacaaggaggaggtgaagagcagcgagcccaccgaggacgtggagcccaaggaggccgaggacgacgacaccggccccgaggagggcagcccccccaaggaggagaaggagaagatgagcggcagcgccagcagcgagaacagagagggcaccctgagcgacagcaccggcagcgagaaggacgacctgtaccccaacggcagcggcaacggcagcgccgagagcagccacttcttcgcctacctggtgaccgccgccatcctggtggccgtgctgtacatcgcccaccacaacaagagaaagatcatcgccttcgtgctggagggcaagagaagcaaggtgaccagaagacccaaggccagcgactaccagagactggaccagaagagctag

SEQ ID NO: 102979 - DNA, 1314 bp, synthetic construct
  misc_feature 1..1314: note = Description of Artificial Sequence: Synthetic coding sequence
  source 1..1314: mol_type = other DNA
atgagattcgtggtggccctggtgctgctgaacgtggccgccgccggcgccgtgcccctgctggccaccgagagcgtgaagcaggaggaggccggcgtgagacccagcgccggcaacgtgagcacccaccccagcctgagccagagacccggcggcagcaccaagagccaccccgagccccagacccccaaggacagccccagcaagagcagcgccgaggcccagacccccgaggacacccccaacaagagcggcgccgaggccaagacccagaaggacagcagcaacaagagcggcgccgaggccaagacccagaagggcagcaccagcaagagcggcagcgaggcccagaccaccaaggacagcaccagcaagagccaccccgagctgcagacccccaaggacagcaccggcaagagcggcgccgaggcccagacccccgaggacagccccaacagaagcggcgccgaggccaagacccagaaggacagccccagcaagagcggcagcgaggcccagaccaccaaggacgtgcccaacaagagcggcgccgacggccagacccccaaggacggcagcagcaagagcggcgccgaggaccagacccccaaggacgtgcccaacaagagcggcgccgagaagcagacccccaaggacggcagcaacaagagcggcgccgaggagcagggccccatcgacggccccagcaagagcggcgccgaggagcagaccagcaaggacagccccaacaaggtggtgcccgagcagcccagcagaaaggaccacagcaagcccatcagcaaccccagcgacaacaaggagctgcccaaggccgacaccaaccagctggccgacaagggcaagctgagcccccacgccttcaagaccgagagcggcgaggagaccgacctgatcagccccccccaggaggaggtgaagagcagcgagcccaccgaggacgtggagcccaaggaggccgaggacgacgacaccggccccgaggagggcagcccccccaaggaggagaaggagaagatgagcggcagcgccagcagcgagaacagagagggcaccctgagcgacagcaccggcagcgagaaggacgacctgtaccccaacggcagcggcaacggcagcgccgagagcagccacttcttcgcctacctggtgaccgccgccatcctggtggccgtgctgtacatcgcccaccacaacaagagaaagatcatcgccttcgtgctggagggcaagagaagcaaggtgaccagaagacccaaggccagcgactaccagagactggaccagaagagctag

SEQ ID NO: 102980 - DNA, 1140 bp, synthetic construct
  misc_feature 1..1140: note = Description of Artificial Sequence: Synthetic coding sequence
  source 1..1140: mol_type = other DNA
atgagattcgtggtggccctggtgctgctgaacgtggccgccgccggcgccgtgcccctgctggccaccgagagcgtgaagcaggaggaggccggcgtgagacccagcgccggcaacgtgagcacccaccccagcctgagccagagacccggcggcagcaccaagagccaccccgagccccagacccccaaggacagccccagcaagagcagcgccgaggcccagacccccgaggacacccccaacaagagcggcgccgaggccaagacccagaaggacagcagcaacaagagcggcgccgaggccaagacccagaagggcagcaccagcaagagcggcagcgaggcccagaccaccaaggacagcaccagcaagagccaccccgagctgcagacccccaaggacagcaccggcaagagcggcgccgaggcccagacccccgaggacagccccaacagaagcggcgccgaggccaagacccagaaggacagccccagcaagagcggcagcgaggcccagaccaccaaggacgtgcccaacaagagcggcgccgacggccagacccccaaggacggcagcagcaagagcggcgccgaggaccagacccccaaggacgtgcccaacaagagcggcgccgagaagcagacccccaaggacggcagcaacaagagcggcgccgaggagcagggccccatcgacggccccagcaagagcggcgccgaggagcagaccagcaaggacagccccaacaaggaggaggtgaagagcagcgagcccaccgaggacgtggagcccaaggaggccgaggacgacgacaccggccccgaggagggcagcccccccaaggaggagaaggagaagatgagcggcagcgccagcagcgagaacagagagggcaccctgagcgacagcaccggcagcgagaaggacgacctgtaccccaacggcagcggcaacggcagcgccgagagcagccacttcttcgcctacctggtgaccgccgccatcctggtggccgtgctgtacatcgcccaccacaacaagagaaagatcatcgccttcgtgctggagggcaagagaagcaaggtgaccagaagacccaaggccagcgactaccagagactggaccagaagagctag

SEQ ID NO: 102981 - DNA, 1362 bp, synthetic construct
  misc_feature 1..1362: note = Description of Artificial Sequence: Synthetic coding sequence
  source 1..1362: mol_type = other DNA
atgagattcgtggtggccctggtgctgctgaacgtggccgccgccggcgccgtgcccctgctggccaccgagagcgtgaagcaggaggaggccggcgtgagacccagcgccggcaacgtgagcacccaccccagcctgagccagagacccggcggcagcaccaagagccaccccgagccccagacccccaaggacagccccagcaagagcagcgccgaggcccagacccccgaggacacccccaacaagagcggcgccgaggccaagacccagaaggacagcagcaacaagagcggcgccgaggccaagacccagaagggcagcaccagcaagagcggcagcgaggcccagaccaccaaggacagcaccagcaagagccaccccgagctgcagacccccaaggacagcaccggcaagagcggcgccgaggcccagacccccgaggacagccccaacagaagcggcgccgaggccaagacccagaaggacagccccagcaagagcggcagcgaggcccagaccaccaaggacgtgcccaacaagagcggcgccgacggccagacccccaaggacggcagcagcaagagcggcgccgaggaccagacccccaaggacgtgcccaacaagagcggcgccgagaagcagacccccaaggacggcagcaacaagagcggcgccgaggagcagggccccatcgacggccccagcaagagcggcgccgaggagcagaccagcaaggacagccccaacaaggtggtgcccgagcagcccagcagaaaggaccacagcaagcccatcagcaaccccagcgacaacaaggagctgcccaaggccgacaccaaccagctggccgacaagggcaagctgagcccccacgccttcaagaccgagagcggcgaggagaccgacctgatcagccccccccaggaggaggtgaagagcagcgagcccaccgaggacgtggagcccaaggaggccgaggacgacgacaccggccccgaggagggcagcccccccaaggaggagaaggagaagatgagcggcagcgccagcagcgagaacagagagggcaccctgagcgacagcaccggcagcgagaaggacgacctgtaccccaacggcagcggcaacggcagcgccgagagcagccacttcttcgcctacctggtgaccgccgccatcctggtggccgtgctgtacatcgcccaccacaacaagagaaagatcatcgccttcgtgctggagggcaagagaagcaaggtgaccagaagacccaaggccagcgactaccagagactggaccagaagatcttcttccccctgagccccaacagaatggtgtacagcagcggcaagagatag

SEQ ID NO: 102982 - DNA, 693 bp, synthetic construct
  misc_feature 1..693: note = Description of Artificial Sequence: Synthetic coding sequence
  source 1..693: mol_type = other DNA
atgtacgtgagagtgagcttcgacaccaagcccgacctgctgctgcacctgatgaccaaggagtggcagctggagctgcccaagctgctgatcagcgtgcacggcggcctgcagaacttcgagctgcagcccaagctgaagcaggtgttcggcaagggcctgatcaaggccgccatgaccaccggcgcctggatcttcaccggcggcgtgaacaccggcgtgatcagacacgtgggcgacgccctgaaggaccacgccagcaagagcagaggcaagatctgcaccatcggcatcgccccctggggcatcgtggagaaccaggaggacctgatcggcagagacgtggtgagaccctaccagaccatgagcaaccccatgagcaagctgaccgtgctgaacagcatgcacagccacttcatcctggccgacaacggcaccaccggcaagtacggcgccgaggtgaagctgagaagacagctggagaagcacatcagcctgcagaagatcaacaccagaatcggccagggcgtgcccgtggtggccctgatcgtggagggcggccccaacgtgatcagcatcgtgctggagtacctgagagacaccccccccgtgcccgtggtggtgtgcgacggcagcggcagagccagcgacatcctggccttcggccacaagtacagcgaggagggcggctag

SEQ ID NO: 102983 - DNA, 2520 bp, synthetic construct
  misc_feature 1..2520: note = Description of Artificial Sequence: Synthetic coding sequence
  source 1..2520: mol_type = other DNA
atgaagaagtggagcagcaccgacctgggcgccgccgccgaccccctgcagaaggacacctgccccgaccccctggacggcgaccccaacagcagacccccccccgccaagccccagctgagcaccgccaagagcagaaccagactgttcggcaagggcgacagcgaggaggccttccccgtggactgcccccacgaggagggcgagctggacagctgccccaccatcaccgtgagccccgtgatcaccatccagagacccggcgacggccccaccggcgccagactgctgagccaggacagcgtggccgccagcaccgagaagaccctgagactgtacgacagaagaagcatcttcgaggccgtggcccagaacaactgccaggacctggagagcctgctgctgttcctgcagaagagcaagaagcacctgaccgacaacgagttcaaggaccccgagaccggcaagacctgcctgctgaaggccatgctgaacctgcacgacggccagaacaccaccatccccctgctgctggagatcgccagacagaccgacagcctgaaggagctggtgaacgccagctacaccgacagctactacaagggccagaccgccctgcacatcgccatcgagagaagaaacatggccctggtgaccctgctggtggagaacggcgccgacgtgcaggccgccgcccacggcgacttcttcaagaagaccaagggcagacccggcttctacttcggcgagctgcccctgagcctggccgcctgcaccaaccagctgggcatcgtgaagttcctgctgcagaacagctggcagaccgccgacatcagcgccagagacagcgtgggcaacaccgtgctgcacgccctggtggaggtggccgacaacaccgccgacaacaccaagttcgtgaccagcatgtacaacgagatcctgatgctgggcgccaagctgcaccccaccctgaagctggaggagctgaccaacaagaagggcatgacccccctggccctggccgccggcaccggcaagatcggcgtgctggcctacatcctgcagagagagatccaggagcccgagtgcagacacctgagcagaaagttcaccgagtgggcctacggccccgtgcacagcagcctgtacgacctgagctgcatcgacacctgcgagaagaacagcgtgctggaggtgatcgcctacagcagcagcgagacccccaacagacacgacatgctgctggtggagcccctgaacagactgctgcaggacaagtgggacagattcgtgaagagaatcttctacttcaacttcctggtgtactgcctgtacatgatcatcttcaccatggccgcctactacagacccgtggacggcctgccccccttcaagatggagaagaccggcgactacttcagagtgaccggcgagatcctgagcgtgctgggcggcgtgtacttcttcttcagaggcatccagtacttcctgcagagaagacccagcatgaagaccctgttcgtggacagctacagcgagatgctgttcttcctgcagagcctgttcatgctggccaccgtggtgctgtacttcagccacctgaaggagtacgtggccagcatggtgttcagcctggccctgggctggaccaacatgctgtactacaccagaggcttccagcagatgggcatctacgccgtgatgatcgagaagatgatcctgagagacctgtgcagattcatgttcgtgtacatcgtgttcctgttcggcttcagcaccgccgtggtgaccctgatcgaggacggcaagaacgacagcctgcccagcgagagcaccagccacagatggagaggccccgcctgcagaccccccgacagcagctacaacagcctgtacagcacctgcctggagctgttcaagttcaccatcggcatgggcgacctggagttcaccgagaactacgacttcaaggccgtgttcatcatcctgctgctggcctacgtgatcctgacctacatcctgctgctgaacatgctgatcgccctgatgggcgagaccgtgaacaagatcgcccaggagagcaagaacatctggaagctgcagagagccatcaccatcctggacaccgagaagagcttcctgaagtgcatgagaaaggccttcagaagcggcaagctgctgcaggtgggctacacccccgacggcaaggacgactacagatggtgcttcagagtggacgaggtgaactggaccacctggaacaccaacgtgggcatcatcaacgaggaccccggcaactgcgagggcgtgaagagaaccctgagcttcagcctgagaagcagcagagtgagcggcagacactggaagaacttcgccctggtgcccctgctgagagaggccagcgccagagacagacagagcgcccagcccgaggaggtgtacctgagacagttcagcggcagcctgaagcccgaggacgccgaggtgttcaagagccccgccgccagcggcgagaagtag

SEQ ID NO: 102984 - DNA, 2373 bp, synthetic construct
  misc_feature 1..2373: note = Description of Artificial Sequence: Synthetic coding sequence
  source 1..2373: mol_type = other DNA
atgaaggcccaccccaaggagatggtgcccctgatgggcaagagagtggccgcccccagcggcaaccccgccatcctgcccgagaagagacccgccgagatcacccccaccaagaagagcgcccacttcttcctggagatcgagggcttcgagcccaaccccaccgtggccaagaccagcccccccgtgttcagcaagcccatggacagcaacatcagacagtgcatcagcggcaactgcgacgacatggacagcccccagagcccccaggacgacgtgaccgagacccccagcaaccccaacagccccagcgcccagctggccaaggaggagcagagaagaaagaagagaagactgaagaagagaatcttcgccgccgtgagcgagggctgcgtggaggagctggtggagctgctggtggagctgcaggagctgtgcagaagaagacacgacgaggacgtgcccgacttcctgatgcacaagctgaccgccagcgacaccggcaagacctgcctgatgaaggccctgctgaacatcaaccccaacaccaaggagatcgtgagaatcctgctggccttcgccgaggagaacgacatcctgggcagattcatcaacgccgagtacaccgaggaggcctacgagggccagaccgccctgaacatcgccatcgagagaagacagggcgacatcgccgccctgctgatcgccgccggcgccgacgtgaacgcccacgccaagggcgccttcttcaaccccaagtaccagcacgagggcttctacttcggcgagacccccctggccctggccgcctgcaccaaccagcccgagatcgtgcagctgctgatggagcacgagcagaccgacatcaccagcagagacagcagaggcaacaacatcctgcacgccctggtgaccgtggccgaggacttcaagacccagaacgacttcgtgaagagaatgtacgacatgatcctgctgagaagcggcaactgggagctggagaccaccagaaacaacgacggcctgacccccctgcagctggccgccaagatgggcaaggccgagatcctgaagtacatcctgagcagagagatcaaggagaagagactgagaagcctgagcagaaagttcaccgactgggcctacggccccgtgagcagcagcctgtacgacctgaccaacgtggacaccaccaccgacaacagcgtgctggagatcaccgtgtacaacaccaacatcgacaacagacacgagatgctgaccctggagcccctgcacaccctgctgcacatgaagtggaagaagttcgccaagcacatgttcttcctgagcttctgcttctacttcttctacaacatcaccctgaccctggtgagctactacagacccagagaggaggaggccatcccccaccccctggccctgacccacaagatgggctggctgcagctgctgggcagaatgttcgtgctgatctgggccatgtgcatcagcgtgaaggagggcatcgccatcttcctgctgagacccagcgacctgcagagcatcctgagcgacgcctggttccacttcgtgttcttcatccaggccgtgctggtgatcctgagcgtgttcctgtacctgttcgcctacaaggagtacctggcctgcctggtgctggccatggccctgggctgggccaacatgctgtactacaccagaggcttccagagcatgggcatgtacagcgtgatgatccagaaggtgatcctgcacgacgtgctgaagttcctgttcgtgtacatcgtgttcctgctgggcttcggcgtggccctggccagcctgatcgagaagtgccccaaggacaacaaggactgcagcagctacggcagcttcagcgacgccgtgctggagctgttcaagctgaccatcggcctgggcgacctgaacatccagcagaacagcaagtaccccatcctgttcctgttcctgctgatcacctacgtgatcctgaccttcgtgctgctgctgaacatgctgatcgccctgatgggcgagaccgtggagaacgtgagcaaggagagcgagagaatctggagactgcagagagccagaaccatcctggagttcgagaagatgctgcccgagtggctgagaagcagattcagaatgggcgagctgtgcaaggtggccgaggacgacttcagactgtgcctgagaatcaacgaggtgaagtggaccgagtggaagacccacgtgagcttcctgaacgaggaccccggccccgtgagaagaaccgacttcaacaagatccaggacagcagcagaaacaacagcaagaccaccctgaacgccttcgaggaggtggaggagttccccgagaccagcgtgtag

SEQ ID NO: 102985 - DNA, 3360 bp, synthetic construct
  misc_feature 1..3360: note = Description of Artificial Sequence: Synthetic coding sequence
  source 1..3360: mol_type = other DNA
atgaagagaagcctgagaaagatgtggagacccggcgagaagaaggagccccagggcgtggtgtacgaggacgtgcccgacgacaccgaggacttcaaggagagcctgaaggtggtgttcgagggcagcgcctacggcctgcagaacttcaacaagcagaagaagctgaagagatgcgacgacatggacaccttcttcctgcactacgccgccgccgagggccagatcgagctgatggagaagatcaccagagacagcagcctggaggtgctgcacgagatggacgactacggcaacacccccctgcactgcgccgtggagaagaaccagatcgagagcgtgaagttcctgctgagcagaggcgccaaccccaacctgagaaacttcaacatgatggcccccctgcacatcgccgtgcagggcatgaacaacgaggtgatgaaggtgctgctggagcacagaaccatcgacgtgaacctggagggcgagaacggcaacaccgccgtgatcatcgcctgcaccaccaacaacagcgaggccctgcagatcctgctgaagaagggcgccaagccctgcaagagcaacaagtggggctgcttccccatccaccaggccgccttcagcggcagcaaggagtgcatggagatcatcctgagattcggcgaggagcacggctacagcagacagctgcacatcaacttcatgaacaacggcaaggccacccccctgcacctggccgtgcagaacggcgacctggagatgatcaagatgtgcctggacaacggcgcccagatcgaccccgtggagaagggcagatgcaccgccatccacttcgccgccacccagggcgccaccgagatcgtgaagctgatgatcagcagctacagcggcagcgtggacatcgtgaacaccaccgacggctgccacgagaccatgctgcacagagccagcctgttcgaccaccacgagctggccgactacctgatcagcgtgggcgccgacatcaacaagatcgacagcgagggcagaagccccctgatcctggccaccgccagcgccagctggaacatcgtgaacctgctgctgagcaagggcgcccaggtggacatcaaggacaacttcggcagaaacttcctgcacctgaccgtgcagcagccctacggcctgaagaacctgagacccgagttcatgcagatgcagcagatcaaggagctggtgatggacgaggacaacgacggctgcacccccctgcactacgcctgcagacagggcggccccggcagcgtgaacaacctgctgggcttcaacgtgagcatccacagcaagagcaaggacaagaagagccccctgcacttcgccgccagctacggcagaatcaacacctgccagagactgctgcaggacatcagcgacaccagactgctgaacgagggcgacctgcacggcatgacccccctgcacctggccgccaagaacggccacgacaaggtggtgcagctgctgctgaagaagggcgccctgttcctgagcgaccacaacggctggaccgccctgcaccacgccagcatgggcggctacacccagaccatgaaggtgatcctggacaccaacctgaagtgcaccgacagactggacgaggacggcaacaccgccctgcacttcgccgccagagagggccacgccaaggccgtggccctgctgctgagccacaacgccgacatcgtgctgaacaagcagcaggccagcttcctgcacctggccctgcacaacaagagaaaggaggtggtgctgaccatcatcagaagcaagagatgggacgagtgcctgaagatcttcagccacaacagccccggcaacaagtgccccatcaccgagatgatcgagtacctgcccgagtgcatgaaggtgctgctggacttctgcatgctgcacagcaccgaggacaagagctgcagagactactacatcgagtacaacttcaagtacctgcagtgccccctggagttcaccaagaagacccccacccaggacgtgatctacgagcccctgaccgccctgaacgccatggtgcagaacaacagaatcgagctgctgaaccaccccgtgtgcaaggagtacctgctgatgaagtggctggcctacggcttcagagcccacatgatgaacctgggcagctactgcctgggcctgatccccatgaccatcctggtggtgaacatcaagcccggcatggccttcaacagcaccggcatcatcaacgagaccagcgaccacagcgagatcctggacaccaccaacagctacctgatcaagacctgcatgatcctggtgttcctgagcagcatcttcggctactgcaaggaggccggccagatcttccagcagaagagaaactacttcatggacatcagcaacgtgctggagtggatcatctacaccaccggcatcatcttcgtgctgcccctgttcgtggagatccccgcccacctgcagtggcagtgcggcgccatcgccgtgtacttctactggatgaacttcctgctgtacctgcagagattcgagaactgcggcatcttcatcgtgatgctggaggtgatcctgaagaccctgctgagaagcaccgtggtgttcatcttcctgctgctggccttcggcctgagcttctacatcctgctgaacctgcaggaccccttcagcagccccctgctgagcatcatccagaccttcagcatgatgctgggcgacatcaactacagagagagcttcctggagccctacctgagaaacgagctggcccaccccgtgctgagcttcgcccagctggtgagcttcaccatcttcgtgcccatcgtgctgatgaacctgctgatcggcctggccgtgggcgacatcgccgaggtgcagaagcacgccagcctgaagagaatcgccatgcaggtggagctgcacaccagcctggagaagaagctgcccctgtggttcctgagaaaggtggaccagaagagcaccatcgtgtaccccaacaagcccagaagcggcggcatgctgttccacatcttctgcttcctgttctgcaccggcgagatcagacaggagatccccaacgccgacaagagcctggagatggagatcctgaagcagaagtacagactgaaggacctgaccttcctgctggagaagcagcacgagctgatcaagctgatcatccagaagatggagatcatcagcgagaccgaggacgacgacagccactgcagcttccaggacagattcaagaaggagcagatggagcagagaaacagcagatggaacaccgtgctgagagccgtgaaggccaagacccaccacctggagccctag

SEQ ID NO: 102986 - DNA, 2280 bp, synthetic construct
  misc_feature 1..2280: note = Description of Artificial Sequence: Synthetic coding sequence
  source 1..2280: mol_type = other DNA
atgatggccgccctgtaccccagcaccgacctgagcggcgccagcagcagcagcctgcccagcagccccagcagcagcagccccaacgaggtgatggccctgaaggacgtgagagaggtgaaggaggagaacaccctgaacgagaagctgttcctgctggcctgcgacaagggcgactactacatggtgaagaagatcctggaggagaacagcagcggcgacctgaacatcaactgcgtggacgtgctgggcagaaacgccgtgaccatcaccatcgagaacgagaacctggacatcctgcagctgctgctggactacggctgccagaagctgatggagagaatccagaaccccgagtacagcaccaccatggacgtggcccccgtgatcctggccgcccacagaaacaactacgagatcctgaccatgctgctgaagcaggacgtgagcctgcccaagccccacgccgtgggctgcgagtgcaccctgtgcagcgccaagaacaagaaggacagcctgagacacagcagattcagactggacatctacagatgcctggccagccccgccctgatcatgctgaccgaggaggaccccatcctgagagccttcgagctgagcgccgacctgaaggagctgagcctggtggaggtggagttcagaaacgactacgaggagctggccagacagtgcaagatgttcgccaaggacctgctggcccaggccagaaacagcagagagctggaggtgatcctgaaccacaccagcagcgacgagcccctggacaagagaggcctgctggaggagagaatgaacctgagcagactgaagctggccatcaagtacaaccagaaggagttcgtgagccagagcaactgccagcagttcctgaacaccgtgtggttcggccagatgagcggctacagaagaaagcccacctgcaagaagatcatgaccgtgctgaccgtgggcatcttctggcccgtgctgagcctgtgctacctgatcgcccccaagagccagttcggcagaatcatccacacccccttcatgaagttcatcatccacggcgccagctacttcaccttcctgctgctgctgaacctgtacagcctggtgtacaacgaggacaagaagaacaccatgggccccgccctggagagaatcgactacctgctgatcctgtggatcatcggcatgatctggagcgacatcaagagactgtggtacgagggcctggaggacttcctggaggagagcagaaaccagctgagcttcgtgatgaacagcctgtacctggccaccttcgccctgaaggtggtggcccacaacaagttccacgacttcgccgacagaaaggactgggacgccttccaccccaccctggtggccgagggcctgttcgccttcgccaacgtgctgagctacctgagactgttcttcatgtacaccaccagcagcatcctgggccccctgcagatcagcatgggccagatgctgcaggacttcggcaagttcctgggcatgttcctgctggtgctgttcagcttcaccatcggcctgacccagctgtacgacaagggctacaccagcaaggagcagaaggactgcgtgggcatcttctgcgagcagcagagcaacgacaccttccacagcttcatcggcacctgcttcgccctgttctggtacatcttcagcctggcccacgtggccatcttcgtgaccagattcagctacggcgaggagctgcagagcttcgtgggcgccgtgatcgtgggcacctacaacgtggtggtggtgatcgtgctgaccaagctgctggtggccatgctgcacaagagcttccagctgatcgccaaccacgaggacaaggagtggaagttcgccagagccaagctgtggctgagctacttcgacgacaagtgcaccctgcccccccccttcaacatcatccccagccccaagaccatctgctacatgatcagcagcctgagcaagtggatctgcagccacaccagcaagggcaaggtgaagagacagaacagcctgaaggagtggagaaacctgaagcagaagagagacgagaactaccagaaggtgatgtgctgcctggtgcacagatacctgaccagcatgagacagaagatgcagagcaccgaccaggccaccgtggagaacctgaacgagctgagacaggacctgagcaagttcagaaacgagatcagagacctgctgggcttcagaaccagcaagtacgccatgttctaccccagaaactag

SEQ ID NO: 102987 - DNA, 435 bp, synthetic construct
  misc_feature 1..435: note = Description of Artificial Sequence: Synthetic coding sequence
  source 1..435: mol_type = other DNA
atgatctggagcgacatcaagagactgtggtacgagggcctggaggacttcctggaggagagcagaaaccagctgagcttcgtgatgaacagcctgtacctggccaccttcgccctgaaggtggtggcccacaacaagatcagcatgggccagatgctgcaggacttcggcaagttcctgggcatgttcctgctggtgctgttcagcttcaccatcggcctgacccagctgtacgacaagggctacaccagcaaggagcagaaggactgcgtgggcatcttctgcgagcagcagagcaacgacaccttccacagcttcatcggcacctgcttcgccctgttctggtacatcttcagcctggcccacgtggccatcttcgtgaccagattcagctacggcgaggagctgcagagcttcgtgggcgccgtgatctag

SEQ ID NO: 102988 - DNA, 2382 bp, synthetic construct
  misc_feature 1..2382: note = Description of Artificial Sequence: Synthetic coding sequence
  source 1..2382: mol_type = other DNA
atgatggccgccctgtaccccagcaccgacctgagcggcgccagcagcagcagcctgcccagcagccccagcagcagcagccccaacgaggtgatggccctgaaggacgtgagagaggtgaaggaggagaacaccctgaacgagaagctgttcctgctggcctgcgacaagggcgactactacatggtgaagaagatcctggaggagaacagcagcggcgacctgaacatcaactgcgtggacgtgctgggcagaaacgccgtgaccatcaccatcgagaacgagaacctggacatcctgcagctgctgctggactacggctgccagagcgccgacgccctgctggtggccatcgacagcgaggtggtgggcgccgtggacatcctgctgaaccacagacccaagagaagcagcagacccaccatcgtgaagctgatggagagaatccagaaccccgagtacagcaccaccatggacgtggcccccgtgatcctggccgcccacagaaacaactacgagatcctgaccatgctgctgaagcaggacgtgagcctgcccaagccccacgccgtgggctgcgagtgcaccctgtgcagcgccaagaacaagaaggacagcctgagacacagcagattcagactggacatctacagatgcctggccagccccgccctgatcatgctgaccgaggaggaccccatcctgagagccttcgagctgagcgccgacctgaaggagctgagcctggtggaggtggagttcagaaacgactacgaggagctggccagacagtgcaagatgttcgccaaggacctgctggcccaggccagaaacagcagagagctggaggtgatcctgaaccacaccagcagcgacgagcccctggacaagagaggcctgctggaggagagaatgaacctgagcagactgaagctggccatcaagtacaaccagaaggagttcgtgagccagagcaactgccagcagttcctgaacaccgtgtggttcggccagatgagcggctacagaagaaagcccacctgcaagaagatcatgaccgtgctgaccgtgggcatcttctggcccgtgctgagcctgtgctacctgatcgcccccaagagccagttcggcagaatcatccacacccccttcatgaagttcatcatccacggcgccagctacttcaccttcctgctgctgctgaacctgtacagcctggtgtacaacgaggacaagaagaacaccatgggccccgccctggagagaatcgactacctgctgatcctgtggatcatcggcatgatctggagcgacatcaagagactgtggtacgagggcctggaggacttcctggaggagagcagaaaccagctgagcttcgtgatgaacagcctgtacctggccaccttcgccctgaaggtggtggcccacaacaagttccacgacttcgccgacagaaaggactgggacgccttccaccccaccctggtggccgagggcctgttcgccttcgccaacgtgctgagctacctgagactgttcttcatgtacaccaccagcagcatcctgggccccctgcagatcagcatgggccagatgctgcaggacttcggcaagttcctgggcatgttcctgctggtgctgttcagcttcaccatcggcctgacccagctgtacgacaagggctacaccagcaaggagcagaaggactgcgtgggcatcttctgcgagcagcagagcaacgacaccttccacagcttcatcggcacctgcttcgccctgttctggtacatcttcagcctggcccacgtggccatcttcgtgaccagattcagctacggcgaggagctgcagagcttcgtgggcgccgtgatcgtgggcacctacaacgtggtggtggtgatcgtgctgaccaagctgctggtggccatgctgcacaagagcttccagctgatcgccaaccacgaggacaaggagtggaagttcgccagagccaagctgtggctgagctacttcgacgacaagtgcaccctgcccccccccttcaacatcatccccagccccaagaccatctgctacatgatcagcagcctgagcaagtggatctgcagccacaccagcaagggcaaggtgaagagacagaacagcctgaaggagtggagaaacctgaagcagaagagagacgagaactaccagaaggtgatgtgctgcctggtgcacagatacctgaccagcatgagacagaagatgcagagcaccgaccaggccaccgtggagaacctgaacgagctgagacaggacctgagcaagttcagaaacgagatcagagacctgctgggcttcagaaccagcaagtacgccatgttctaccccagaaactag

SEQ ID NO: 102989 - DNA, 2415 bp, synthetic construct
  misc_feature 1..2415: note = Description of Artificial Sequence: Synthetic coding sequence
  source 1..2415: mol_type = other DNA
atggcccagttctactacaagagaaacgtgaacgccccctacagagacagaatccccctgagaatcgtgagagccgagagcgagctgagccccagcgagaaggcctacctgaacgccgtggagaagggcgactacgccagcgtgaagaagagcctggaggaggccgagatctacttcaagatcaacatcaactgcatcgaccccctgggcagaaccgccctgctgatcgccatcgagaacgagaacctggagctgatcgagctgctgctgagcttcaacgtgtacgtgggcgacgccctgctgcacgccatcagaaaggaggtggtgggcgccgtggagctgctgctgaaccacaagaagcccagcggcgagaagcagttcgtggcccagcccaactgccagcagctgctggccagcagatggtacgacgagttccccggctggagaagaagacactgggccgtgaagatggtgacctgcttcatcatcggcctgctgttccccgtgttcagcgtgtgctacctgatcgcccccaagagccccctgggcctgttcatcagaaagcccttcatcaagttcatctgccacaccgccagctacctgaccttcctgttcctgctgctgctggccagccagcacatcgacagaagcgacctgaacagacagggccccccccccaccatcgtggagtggatgatcctgccctgggtgctgggcttcatctggggcgagatcaagcagatgtgggacggcggcctgcaggactacatccacgactggtggaacctgatggacttcgtgatgaacagcctgtacctggccaccatcagcctgaagatcgtggccttcgtgaagtacagcgccctgaaccccagagagagctgggacatgtggcaccccaccctggtggccgaggccctgttcgccatcgccaacatcttcagcagcctgagactgatcagcctgttcaccgccaacagccacctgggccccctgcagatcagcctgggcagaatgctgctggacatcctgaagttcctgttcatctactgcctggtgctgctggccttcgccaacggcctgaaccagctgtacttctactacgaggagaccaagggcctgacctgcaagggcatcagatgcgagaagcagaacaacgccttcagcaccctgttcgagaccctgcagagcctgttctggagcatcttcggcctgatcaacctgtacgtgaccaacgtgaaggcccagcacgagttcaccgagttcgtgggcgccaccatgttcggcacctacaacgtgatcagcctggtggtgctgctgaacatgctgatcgccatgatgaacaacagctaccagctgatcgccgaccacgccgacatcgagtggaagttcgccagaaccaagctgtggatgagctacttcgaggagggcggcaccctgcccacccccttcaacgtgatccccagccccaagagcctgtggtacctgatcaagtggatctggacccacctgtgcaagaagaagatgagaagaaagcccgagagcttcggcaccatcggcagaagagccgccgacaacctgagaagacaccaccagtaccaggaggtgatgagaaacctggtgaagagatacgtggccgccatgatcagagacgccaagaccgaggagggcctgaccgaggagaacttcaaggagctgaagcaggacatcagcagcttcagattcgaggtgctgggcctgctgagaggcagcaagctgagcaccatccagagcgccaacgccagcaaggagagcagcaacagcgccgacagcgacgagaagagcgacagcgagggcaacagcaaggacaagaagaagaacttcagcctgttcgacctgaccaccctgatccaccccagaagcgccgccatcgccagcgagagacacaacatcagcaacggcagcgccctggtggtgcaggagccccccagagagaagcagagaaaggtgaacttcgtgaccgacatcaagaacttcggcctgttccacagaagaagcaagcagaacgccgccgagcagaacgccaaccagatcttcagcgtgagcgaggaggtggccagacagcaggccgccggccccctggagagaaacatccagctggagagcagaggcctggccagcagaggcgacctgagcatccccggcctgagcgagcagtgcgtgctggtggaccacagagagagaaacaccgacaccctgggcctgcaggtgggcaagagagtgtgccccttcaagagcgagaaggtggtggtggaggacaccgtgcccatcatccccaaggagaagcacgccaaggaggaggacagcagcatcgactacgacctgaacctgcccgacaccgtgacccacgaggactacgtgaccaccagactgtag

SEQ ID NO: 102990 - DNA, 2511 bp, synthetic construct
  misc_feature 1..2511: note = Description of Artificial Sequence: Synthetic coding sequence
  source 1..2511: mol_type = other DNA
atggcccagttctactacaagagaaacgtgaacgccccctacagagacagaatccccctgagaatcgtgagagccgagagcgagctgagccccagcgagaaggcctacctgaacgccgtggagaagggcgactacgccagcgtgaagaagagcctggaggaggccgagatctacttcaagatcaacatcaactgcatcgaccccctgggcagaaccgccctgctgatcgccatcgagaacgagaacctggagctgatcgagctgctgctgagcttcaacgtgtacgtgggcgacgccctgctgcacgccatcagaaaggaggtggtgggcgccgtggagctgctgctgaaccacaagaagcccagcggcgagaagcaggtgccccccatcctgctggacaagcagttcagcgagttcacccccgacatcacccccatcatcctggccgcccacaccaacaactacgagatcatcaagctgctggtgcagaagggcgtgagcgtgcccagaccccacgaggtgagatgcaactgcgtggagtgcgtgagcagcagcgacgtggacagcctgagacacagcagaagcagactgaacatctacaaggccctggccagccccagcctgatcgccctgagcagcgaggaccccttcctgaccgccttccagctgagctgggagctgcaggagctgagcaaggtggagaacgagttcaagagcgagtacgaggagctgagcagacagtgcaagcagttcgccaaggacctgctggaccagaccagaagcagcagagagctggagatcatcctgaactacagagacgacaacagcctgatcgaggagcagagcggcaacgacctggccagactgaagctggccatcaagtacagacagaaggagttcgtggcccagcccaactgccagcagctgctggccagcagatggtacgacgagttccccggctggagaagaagacactgggccgtgaagatggtgacctgcttcatcatcggcctgctgttccccgtgttcagcgtgtgctacctgatcgcccccaagagccccctgggcctgttcatcagaaagcccttcatcaagttcatctgccacaccgccagctacctgaccttcctgttcctgctgctgctggccagccagcacatcgacagaagcgacctgaacagacagggccccccccccaccatcgtggagtggatgatcctgccctgggtgctgggcttcatctggggcgagatcaagcagatgtgggacggcggcctgcaggactacatccacgactggtggaacctgatggacttcgtgatgaacagcctgtacctggccaccatcagcctgaagatcgtggccttcgtgaagtacagcgccctgaaccccagagagagctgggacatgtggcaccccaccctggtggccgaggccctgttcgccatcgccaacatcttcagcagcctgagactgatcagcctgttcaccgccaacagccacctgggccccctgcagatcagcctgggcagaatgctgctggacatcctgaagttcctgttcatctactgcctggtgctgctggccttcgccaacggcctgaaccagctgtacttctactacgaggagaccaagggcctgacctgcaagggcatcagatgcgagaagcagaacaacgccttcagcaccctgttcgagaccctgcagagcctgttctggagcatcttcggcctgatcaacctgtacgtgaccaacgtgaaggcccagcacgagttcaccgagttcgtgggcgccaccatgttcggcacctacaacgtgatcagcctggtggtgctgctgaacatgctgatcgccatgatgaacaacagctaccagctgatcgccgaccacgccgacatcgagtggaagttcgccagaaccaagctgtggatgagctacttcgaggagggcggcaccctgcccacccccttcaacgtgatccccagccccaagagcctgtggtacctgatcaagtggatctggacccacctgtgcaagaagaagatgagaagaaagcccgagagcttcggcaccatcggcagaagagccgccgacaacctgagaagacaccaccagtaccaggaggtgatgagaaacctggtgaagagatacgtggccgccatgatcagagacgccaagaccgaggaggtggccagacagcaggccgccggccccctggagagaaacatccagctggagagcagaggcctggccagcagaggcgacctgagcatccccggcctgagcgagcagtgcgtgctggtggaccacagagagagaaacaccgacaccctgggcctgcaggtgggcaagagagtgtgccccttcaagagcgagaaggtggtggtggaggacaccgtgcccatcatccccaaggagaagcacgccaaggaggaggacagcagcatcgactacgacctgaacctgcccgacaccgtgacccacgaggactacgtgaccaccagactgtag

SEQ ID NO: 102991 - DNA, 2682 bp, synthetic construct
  misc_feature 1..2682: note = Description of Artificial Sequence: Synthetic coding sequence
  source 1..2682: mol_type = other DNA
atggcccagttctactacaagagaaacgtgaacgccccctacagagacagaatccccctgagaatcgtgagagccgagagcgagctgagccccagcgagaaggcctacctgaacgccgtggagaagggcgactacgccagcgtgaagaagagcctggaggaggccgagatctacttcaagatcaacatcaactgcatcgaccccctgggcagaaccgccctgctgatcgccatcgagaacgagaacctggagctgatcgagctgctgctgagcttcaacgtgtacgtgggcgacgccctgctgcacgccatcagaaaggaggtggtgggcgccgtggagctgctgctgaaccacaagaagcccagcggcgagaagcaggtgccccccatcctgctggacaagcagttcagcgagttcacccccgacatcacccccatcatcctggccgcccacaccaacaactacgagatcatcaagctgctggtgcagaagggcgtgagcgtgcccagaccccacgaggtgagatgcaactgcgtggagtgcgtgagcagcagcgacgtggacagcctgagacacagcagaagcagactgaacatctacaaggccctggccagccccagcctgatcgccctgagcagcgaggaccccttcctgaccgccttccagctgagctgggagctgcaggagctgagcaaggtggagaacgagttcaagagcgagtacgaggagctgagcagacagtgcaagcagttcgccaaggacctgctggaccagaccagaagcagcagagagctggagatcatcctgaactacagagacgacaacagcctgatcgaggagcagagcggcaacgacctggccagactgaagctggccatcaagtacagacagaaggagttcgtggcccagcccaactgccagcagctgctggccagcagatggtacgacgagttccccggctggagaagaagacactgggccgtgaagatggtgacctgcttcatcatcggcctgctgttccccgtgttcagcgtgtgctacctgatcgcccccaagagccccctgggcctgttcatcagaaagcccttcatcaagttcatctgccacaccgccagctacctgaccttcctgttcctgctgctgctggccagccagcacatcgacagaagcgacctgaacagacagggccccccccccaccatcgtggagtggatgatcctgccctgggtgctgggcttcatctggggcgagatcaagcagatgtgggacggcggcctgcaggactacatccacgactggtggaacctgatggacttcgtgatgaacagcctgtacctggccaccatcagcctgaagatcgtggccttcgtgaagtacagcgccctgaaccccagagagagctgggacatgtggcaccccaccctggtggccgaggccctgttcgccatcgccaacatcttcagcagcctgagactgatcagcctgttcaccgccaacagccacctgggccccctgcagatcagcctgggcagaatgctgctggacatcctgaagttcctgttcatctactgcctggtgctgctggccttcgccaacggcctgaaccagctgtacttctactacgaggagaccaagggcctgacctgcaagggcatcagatgcgagaagcagaacaacgccttcagcaccctgttcgagaccctgcagagcctgttctggagcatcttcggcctgatcaacctgtacgtgaccaacgtgaaggcccagcacgagttcaccgagttcgtgggcgccaccatgttcggcacctacaacgtgatcagcctggtggtgctgctgaacatgctgatcgccatgatgaacaacagctaccagctgatcgccgaccacgccgacatcgagtggaagttcgccagaaccaagctgtggatgagctacttcgaggagggcggcaccctgcccacccccttcaacgtgatccccagccccaagagcctgtggtacctgatcaagtggatctggacccacctgtgcaagaagaagatgagaagaaagcccgagagcttcggcaccatcggcagaagagccgccgacaacctgagaagacaccaccagtaccaggaggtgatgagaaacctggtgaagagatacgtggccgccatgatcagagacgccaagaccgaggagggcctgaccgaggagaacttcaaggagctgaagcaggacatcagcagcttcagattcgaggtgctgggcctgctgagaggcagcaagctgagcaccatccagagcgccaacgccagcaaggagagcagcaacagcgccgacagcgacgagaagagcgacagcgaggaggaggtggccagacagcaggccgccggccccctggagagaaacatccagctggagagcagaggcctggccagcagaggcgacctgagcatccccggcctgagcgagcagtgcgtgctggtggaccacagagagagaaacaccgacaccctgggcctgcaggtgggcaagagagtgtgccccttcaagagcgagaaggtggtggtggaggacaccgtgcccatcatccccaaggagaagcacgccaaggaggaggacagcagcatcgactacgacctgaacctgcccgacaccgtgacccacgaggactacgtgaccaccagactgtag

SEQ ID NO: 102992 - DNA, 2487 bp, synthetic construct
  misc_feature 1..2487: note = Description of Artificial Sequence: Synthetic coding sequence
  source 1..2487: mol_type = other DNA
atggcccagttctactacaagagaaacgtgaacgccccctacagagacagaatccccctgagaatcgtgagagccgagagcgagctgagccccagcgagaaggcctacctgaacgccgtggagaagggcgactacgccagcgtgaagaagagcctggaggaggccgagatctacttcaagatcaacatcaactgcatcgaccccctgggcagaaccgccctgctgatcgccatcgagaacgagaacctggagctgatcgagctgctgctgagcttcaacgtgtacgtgggcgacgccctgctgcacgccatcagaaaggaggtggtgggcgccgtggagctgctgctgaaccacaagaagcccagcggcgagaagcaggtgccccccatcctgctggacaagcagttcagcgagttcacccccgacatcacccccatcatcctggccgcccacaccaacaactacgagatcatcaagctgctggtgcagaagggcgtgagcgtgcccagaccccacgaggtgagatgcaactgcgtggagtgcgtgagcagcagcgacgtggacagcctgagacacagcagaagcagactgaacatctacaaggccctggccagccccagcctgatcgccctgagcagcgaggaccccttcctgaccgccttccagctgagctgggagctgcaggagctgagcaaggtggagaacgagttcaagagcgagtacgaggagctgagcagacagtgcaagcagttcgccaaggacctgctggaccagaccagaagcagcagagagctggagatcatcctgaactacagagacgacaacagcctgatcgaggagcagagcggcaacgacctggccagactgaagctggccatcaagtacagacagaaggagttcgtggcccagcccaactgccagcagctgctggccagcagatggtacgacgagttccccggctggagaagaagacactgggccgtgaagatggtgacctgcttcatcatcggcctgctgttccccgtgttcagcgtgtgctacctgatcgcccccaagagccccctgggcctgttcatcagaaagcccttcatcaagttcatctgccacaccgccagctacctgaccttcctgttcctgctgctgctggccagccagcacatcgacagaagcgacctgaacagacagggccccccccccaccatcgtggagtggatgatcctgccctgggtgctgggcttcatctggggcgagatcaagcagatgtgggacggcggcctgcaggactacatccacgactggtggaacctgatggacttcgtgatgaacagcctgtacctggccaccatcagcctgaagatcgtggccttcgtgaagtacagcgccctgaaccccagagagagctgggacatgtggcaccccaccctggtggccgaggccctgttcgccatcgccaacatcttcagcagcctgagactgatcagcctgttcaccgccaacagccacctgggccccctgcagatcagcctgggcagaatgctgctggacatcctgaagttcctgttcatctactgcctggtgctgctggccttcgccaacggcctgaaccagctgtacttctactacgaggagaccaagggcctgacctgcaagggcatcagatgcgagaagcagaacaacgccttcagcaccctgttcgagaccctgcagagcctgttctggagcatcttcggcctgatcaacctgtacgtgaccaacgtgaaggcccagcacgagttcaccgagttcgtgggcgccaccatgttcggcacctacaacgtgatcagcctggtggtgctgctgaacatgctgatcgccatgatgaacaacagctaccagctgatcgccagaagagccgccgacaacctgagaagacaccaccagtaccaggaggtgatgagaaacctggtgaagagatacgtggccgccatgatcagagacgccaagaccgaggagggcctgaccgaggagaacttcaaggagctgaagcaggacatcagcagcttcagattcgaggtgctgggcctgctgagaggcagcaagctgagcaccatccagagcgccaacgccagcaaggagagcagcaacagcgccgacagcgacgagaagagcgacagcgaggaggaggtggccagacagcaggccgccggccccctggagagaaacatccagctggagagcagaggcctggccagcagaggcgacctgagcatccccggcctgagcgagcagtgcgtgctggtggaccacagagagagaaacaccgacaccctgggcctgcaggtgggcaagagagtgtgccccttcaagagcgagaaggtggtggtggaggacaccgtgcccatcatccccaaggagaagcacgccaaggaggaggacagcagcatcgactacgacctgaacctgcccgacaccgtgacccacgaggactacgtgaccaccagactgtag

SEQ ID NO: 102993 - DNA, 2415 bp, synthetic construct; identical to SEQ ID NO: 102989
  misc_feature 1..2415: note = Description of Artificial Sequence: Synthetic coding sequence
  source 1..2415: mol_type = other DNA

SEQ ID NO: 102994 - DNA, 2949 bp, synthetic construct
  misc_feature 1..2949: note = Description of Artificial Sequence: Synthetic coding sequence
  source 1..2949: mol_type = other DNA
atggcccagttctactacaagagaaacgtgaacgccccctacagagacagaatccccctgagaatcgtgagagccgagagcgagctgagccccagcgagaaggcctacctgaacgccgtggagaagggcgactacgccagcgtgaagaagagcctggaggaggccgagatctacttcaagatcaacatcaactgcatcgaccccctgggcagaaccgccctgctgatcgccatcgagaacgagaacctggagctgatcgagctgctgctgagcttcaacgtgtacgtgggcgacgccctgctgcacgccatcagaaaggaggtggtgggcgccgtggagctgctgctgaaccacaagaagcccagcggcgagaagcaggtgccccccatcctgctggacaagcagttcagcgagttcacccccgacatcacccccatcatcctggccgcccacaccaacaactacgagatcatcaagctgctggtgcagaagggcgtgagcgtgcccagaccccacgaggtgagatgcaactgcgtggagtgcgtgagcagcagcgacgtggacagcctgagacacagcagaagcagactgaacatctacaaggccctggccagccccagcctgatcgccctgagcagcgaggaccccttcctgaccgccttccagctgagctgggagctgcaggagctgagcaaggtggagaacgagttcaagagcgagtacgaggagctgagcagacagtgcaagcagttcgccaaggacctgctggaccagaccagaagcagcagagagctggagatcatcctgaactacagagacgacaacagcctgatcgaggagcagagcggcaacgacctggccagactgaagctggccatcaagtacagacagaaggagttcgtggcccagcccaactgccagcagctgctggccagcagatggtacgacgagttccccggctggagaagaagacactgggccgtgaagatggtgacctgcttcatcatcggcctgctgttccccgtgttcagcgtgtgctacctgatcgcccccaagagccccctgggcctgttcatcagaaagcccttcatcaagttcatctgccacaccgccagctacctgaccttcctgttcctgctgctgctggccagccagcacatcgacagaagcgacctgaacagacagggccccccccccaccatcgtggagtggatgatcctgccctgggtgctgggcttcatctggggcgagatcaagcagatgtgggacggcggcctgcaggactacatccacgactggtggaacctgatggacttcgtgatgaacagcctgtacctggccaccatcagcctgaagatcgtggccttcgtgaagtacagcgccctgaaccccagagagagctgggacatgtggcaccccaccctggtggccgaggccctgttcgccatcgccaacatcttcagcagcctgagactgatcagcctgttcaccgccaacagccacctgggccccctgcagatcagcctgggcagaatgctgctggacatcctgaagttcctgttcatctactgcctggtgctgctggccttcgccaacggcctgaaccagctgtacttctactacgaggagaccaagggcctgacctgcaagggcatcagatgcgagaagcagaacaacgccttcagcaccctgttcgagaccctgcagagcctgttctggagcatcttcggcctgatcaacctgtacgtgaccaacgtgaaggcccagcacgagttcaccgagttcgtgggcgccaccatgttcggcacctacaacgtgatcagcctggtggtgctgctgaacatgctgatcgccatgatgaacaacagctaccagctgatcgccgaccacgccgacatcgagtggaagttcgccagaaccaagctgtggatgagctacttcgaggagggcggcaccctgcccacccccttcaacgtgatccccagccccaagagcctgtggtacctgatcaagtggatctggacccacctgtgcaagaagaagatgagaagaaagcccgagagcttcggcaccatcggcgtgagaacccagcacagaagagccgccgacaacctgagaagacaccaccagtaccaggaggtgatgagaaacctggtgaagagatacgtggccgccatgatcagagacgccaagaccgaggagggcctgaccgaggagaacttcaaggagctgaagcaggacatcagcagcttcagattcgaggtgctgggcctgctgagaggcagcaagctgagcaccatccagagcgccaacgccagcaaggagagcagcaacagcgccgacagcgacgagaagagcgacagcgagggcaacagcaaggacaagaagaagaacttcagcctgttcgacctgaccaccctgatccaccccagaagcgccgccatcgccagcgagagacacaacatcagcaacggcagcgccctggtggtgcaggagccccccagagagaagcagagaaaggtgaacttcgtgaccgacatcaagaacttcggcctgttccacagaagaagcaagcagaacgccgccgagcagaacgccaaccagatcttcagcgtgagcgaggaggtggccagacagcaggccgccggccccctggagagaaacatccagctggagagcagaggcctggccagcagaggcgacctgagcatccccggcctgagcgagcagtgcgtgctggtggaccacagagagagaaacaccgacaccctgggcctgcaggtgggcaagagagtgtgccccttcaagagcgagaaggtggtggtggaggacaccgtgcccatcatccccaaggagaagcacgccaaggaggaggacagcagcatcgactacgacctgaacctgcccgacaccgtgacccacgaggactacgtgaccaccagactgtag

SEQ ID NO: 102995 - DNA, 2934 bp, synthetic construct
  misc_feature 1..2934: note = Description of Artificial Sequence: Synthetic coding sequence
  source 1..2934: mol_type = other DNA
atggcccagttctactacaagagaaacgtgaacgccccctacagagacagaatccccctgagaatcgtgagagccgagagcgagctgagccccagcgagaaggcctacctgaacgccgtggagaagggcgactacgccagcgtgaagaagagcctggaggaggccgagatctacttcaagatcaacatcaactgcatcgaccccctgggcagaaccgccctgctgatcgccatcgagaacgagaacctggagctgatcgagctgctgctgagcttcaacgtgtacgtgggcgacgccctgctgcacgccatcagaaaggaggtggtgggcgccgtggagctgctgctgaaccacaagaagcccagcggcgagaagcaggtgccccccatcctgctggacaagcagttcagcgagttcacccccgacatcacccccatcatcctggccgcccacaccaacaactacgagatcatcaagctgctggtgcagaagggcgtgagcgtgcccagaccccacgaggtgagatgcaactgcgtggagtgcgtgagcagcagcgacgtggacagcctgagacacagcagaagcagactgaacatctacaaggccctggccagccccagcctgatcgccctgagcagcgaggaccccttcctgaccgccttccagctgagctgggagctgcaggagctgagcaaggtggagaacgagttcaagagcgagtacgaggagctgagcagacagtgcaagcagttcgccaaggacctgctggaccagaccagaagcagcagagagctggagatcatcctgaactacagagacgacaacagcctgatcgaggagcagagcggcaacgacctggccagactgaagctggccatcaagtacagacagaaggagttcgtggcccagcccaactgccagcagctgctggccagcagatggtacgacgagttccccggctggagaagaagacactgggccgtgaagatggtgacctgcttcatcatcggcctgctgttccccgtgttcagcgtgtgctacctgatcgcccccaagagccccctgggcctgttcatcagaaagcccttcatcaagttcatctgccacaccgccagctacctgaccttcctgttcctgctgctgctggccagccagcacatcgacagaagcgacctgaacagacagggccccccccccaccatcgtggagtggatgatcctgccctgggtgctgggcttcatctggggcgagatcaagcagatgtgggacggcggcctgcaggactacatccacgactggtggaacctgatggacttcgtgatgaacagcctgtacctggccaccatcagcctgaagatcgtggccttcgtgaagtacagcgccctgaaccccagagagagctgggacatgtggcaccccaccctggtggccgaggccctgttcgccatcgccaacatcttcagcagcctgagactgatcagcctgttcaccgccaacagccacctgggccccctgcagatcagcctgggcagaatgctgctggacatcctgaagttcctgttcatctactgcctggtgctgctggccttcgccaacggcctgaaccagctgtacttctactacgaggagaccaagggcctgacctgcaagggcatcagatgcgagaagcagaacaacgccttcagcaccctgttcgagaccctgcagagcctgttctggagcatcttcggcctgatcaacctgtacgtgaccaacgtgaaggcccagcacgagttcaccgagttcgtgggcgccaccatgttcggcacctacaacgtgatcagcctggtggtgctgctgaacatgctgatcgccatgatgaacaacagctaccagctgatcgccgaccacgccgacatcgagtggaagttcgccagaaccaagctgtggatgagctacttcgaggagggcggcaccctgcccacccccttcaacgtgatccccagccccaagagcctgtggtacctgatcaagtggatctggacccacctgtgcaagaagaagatgagaagaaagcccgagagcttcggcaccatcggcagaagagccgccgacaacctgagaagacaccaccagtaccaggaggtgatgagaaacctggtgaagagatacgtggccgccatgatcagagacgccaagaccgaggagggcctgaccgaggagaacttcaaggagctgaagcaggacatcagcagcttcagattcgaggtgctgggcctgctgagaggcagcaagctgagcaccatccagagcgccaacgccagcaaggagagcagcaacagcgccgacagcgacgagaagagcgacagcgagggcaacagcaaggacaagaagaagaacttcagcctgttcgacctgaccaccctgatccaccccagaagcgccgccatcgccagcgagagacacaacatcagcaacggcagcgccctggtggtgcaggagccccccagagagaagcagagaaaggtgaacttcgtgaccgacatcaagaacttcggcctgttccacagaagaagcaagcagaacgccgccgagcagaacgccaaccagatcttcagcgtgagcgaggaggtggccagacagcaggccgccggccccctggagagaaacatccagctggagagcagaggcctggccagcagaggcgacctgagcatccccggcctgagcgagcagtgcgtgctggtggaccacagagagagaaacaccgacaccctgggcctgcaggtgggcaagagagtgtgccccttcaagagcgagaaggtggtggtggaggacaccgtgcccatcatccccaaggagaagcacgccaaggaggaggacagcagcatcgactacgacctgaacctgcccgacaccgtgacccacgaggactacgtgaccaccagactgtag

SEQ ID NO: 102996 - DNA, 1383 bp, synthetic construct
  misc_feature 1..1383: note = Description of Artificial Sequence: Synthetic coding sequence
  source 1..1383: mol_type = other DNA
atggcccagttctactacaagagaaacgtgaacgccccctacagagacagaatccccctgagaatcgtgagagccgagagcgagctgagccccagcgagaaggcctacctgaacgccgtggagaagggcgactacgccagcgtgaagaagagcctggaggaggccgagatctacttcaagatcaacatcaactgcatcgaccccctgggcagaaccgccctgctgatcgccatcgagaacgagaacctggagctgatcgagctgctgctgagcttcaacgtgtacgtgggcgacgccctgctgcacgccatcagaaaggaggtggtgggcgccgtggagctgctgctgaaccacaagaagcccagcggcgagaagcaggtgccccccatcctgctggacaagcagttcagcgagttcacccccgacatcacccccatcatcctggccgcccacaccaacaactacgagatcatcaagctgctggtgcagaagggcgtgagcgtgcccagaccccacgaggtgagatgcaactgcgtggagtgcgtgagcagcagcgacgtggacagcctgagacacagcagaagcagactgaacatctacaaggccctggccagccccagcctgatcgccctgagcagcgaggaccccttcctgaccgccttccagctgagctgggagctgcaggagctgagcaaggtggagaacgagttcaagagcgagtacgaggagctgagcagacagtgcaagcagttcgccaaggacctgctggaccagaccagaagcagcagagagctggagatcatcctgaactacagagacgacaacagcctgatcgaggagcagagcggcaacgacctggccagactgaagctggccatcaagtacagacagaaggagttcgtggcccagcccaactgccagcagctgctggccagcagatggtacgacgagttccccggctggagaagaagacactgggccgtgaagatggtgacctgcttcatcatcggcctgctgttccccgtgttcagcgtgtgctacctgatcgcccccaagagccccctgggcctgttcatcagaaagcccttcatcaagttcatctgccacaccgccagctacctgaccttcctgttcctgctgctgctggccagccagcacatcgacagaagcgacctgaacagacagggccccccccccaccatcgtggagtggatgatcctgccctgggtgctgggcttcatctggggcgagatcaagcagatgtgggacggcggcctgcaggactacatccacgactggtggaacctgatggacttcgtgatgaacagcctgtacctggccaccatcagcctgaagatcgtggccttcgtgaaggtgatctag

SEQ ID NO: 102997 - DNA, 2511 bp, synthetic construct; identical to SEQ ID NO: 102990
  misc_feature 1..2511: note = Description of Artificial Sequence: Synthetic coding sequence
  source 1..2511: mol_type = other DNA

SEQ ID NO: 102998 - DNA, 2394 bp, synthetic construct
  misc_feature 1..2394: note = Description of Artificial Sequence: Synthetic coding sequence
  source 1..2394: mol_type = other DNA
atggccgccgcccccgtggccgccggcagcggcgccggcagaggcagaagaagcgccgccaccgtggccgcctggggcggctggggcggcagacccagacccggcaacatcctgctgcagctgagacagggccagctgaccggcagaggcctggtgagagccgtgcagttcaccgagaccttcctgaccgagagagacaagcagagcaagtggagcggcatcccccagctgctgctgaagctgcacaccaccagccacctgcacagcgacttcgtggagtgccagaacatcctgaaggagatcagccccctgctgagcatggaggccatggccttcgtgaccgaggagagaaagctgacccaggagaccacctaccccaacacctacatcttcgacctgttcggcggcgtggacctgctggtggagatcctgatgagacccaccatcagcatcagaggccagaagctgaagatcagcgacgagatgagcaaggactgcctgagcatcctgtacaacacctgcgtgtgcaccgagggcgtgaccaagagactggccgagaagaacgacttcgtgatcttcctgttcaccctgatgaccagcaagaagaccttcctgcagaccgccaccctgatcgaggacatcctgggcgtgaagaaggagatgatcagactggacgaggtgcccaacctgagcagcctggtgagcaacttcgaccagcagcagctggccaacttctgcagaatcctggccgtgaccatcagcgagatggacaccggcaacgacgacaagcacaccctgctggccaagaacgcccagcagaagaagagcctgagcctgggccccagcgccgccgagatcaaccaggccgccctgctgagcatccccggcttcgtggagagactgtgcaagctggccaccagaaaggtgagcgagagcaccggcaccgccagcttcctgcaggagctggaggagtggtacacctggctggacaacgccctggtgctggacgccctgatgagagtggccaacgaggagagcgagcacaaccaggccagcatcgtgttccccccccccggcgccagcgaggagaacggcctgccccacaccagcgccagaacccagctgccccagagcatgaagatcatgcacgagatcatgtacaagctggaggtgctgtacgtgctgtgcgtgctgctgatgggcagacagagaaaccaggtgcacagaatgatcgccgagttcaagctgatccccggcctgaacaacctgttcgacaagctgatctggagaaagcacagcgccagcgccctggtgctgcacggccacaaccagaactgcgactgcagccccgacatcaccctgaagatccagttcctgagactgctgcagagcttcagcgaccaccacgagaacaagtacctgctgctgaacaaccaggagctgaacgagctgagcgccatcagcctgaaggccaacatccccgaggtggaggccgtgctgaacaccgacagaagcctggtgtgcgacggcaagagaggcctgctgaccagactgctgcaggtgatgaagaaggagcccgccgagagcagcttcagattctggcaggccagagccgtggagagcttcctgagaggcaccaccagctacgccgaccagatgttcctgctgaagagaggcctgctggagcacatcctgtactgcatcgtggacagcgagtgcaagagcagagacgtgctgcagagctacttcgacctgctgggcgagctgatgaagttcaacgtggacgccttcaagagattcaacaagtacatcaacaccgacgccaagttccaggtgttcctgaagcagatcaacagcagcctggtggacagcaacatgctggtgagatgcgtgaccctgagcctggacagattcgagaaccaggtggacatgaaggtggccgaggtgctgagcgagtgcagactgctggcctacatcagccaggtgcccacccagatgagcttcctgttcagactgatcaacatcatccacgtgcagaccctgacccaggagaacgtgagctgcctgaacaccagcctggtgatcctgatgctggccagaagaaaggagagactgcccctgtacctgagactgctgcagagaatggagcacagcaagaagtaccccggcttcctgctgaacaacttccacaacctgctgagattctggcagcagcactacctgcacaaggacaaggacagcacctgcctggagaacagcagctgcatcagcttcagctactggaaggagaccgtgagcatcctgctgaaccccgacagacagagccccagcgccctggtgagctacatcgaggagccctacatggacatcgacagagacttcaccgaggagtag

SEQ ID NO: 102999 - DNA, 2277 bp, synthetic construct
  misc_feature 1..2277: note = Description of Artificial Sequence: Synthetic coding sequence
  source 1..2277: mol_type = other DNA
atggccgccgcccccgtggccgccggcagcggcgccggcagaggcagaagaagcgccgccaccgtggccgcctggggcggctggggcggcagacccagacccggcaacatcctgctgcagctgagacagggccagctgaccggcagaggcctggtgagagccgtgcagttcaccgagaccttcctgaccgagagagacaagcagagcaagtggagcggcatcccccagctgctgctgaagctgcacaccaccagccacctgcacagcgacttcgtggagtgccagaacatcctgaagctgctggtggagatcctgatgagacccaccatcagcatcagaggccagaagctgaagatcagcgacgagatgagcaaggactgcctgagcatcctgtacaacacctgcgtgtgcaccgagggcgtgaccaagagactggccgagaagaacgacttcgtgatcttcctgttcaccctgatgaccagcaagaagaccttcctgcagaccgccaccctgatcgaggacatcctgggcgtgaagaaggagatgatcagactggacgaggtgcccaacctgagcagcctggtgagcaacttcgaccagcagcagctggccaacttctgcagaatcctggccgtgaccatcagcgagatggacaccggcaacgacgacaagcacaccctgctggccaagaacgcccagcagaagaagagcctgagcctgggccccagcgccgccgagatcaaccaggccgccctgctgagcatccccggcttcgtggagagactgtgcaagctggccaccagaaaggtgagcgagagcaccggcaccgccagcttcctgcaggagctggaggagtggtacacctggctggacaacgccctggtgctggacgccctgatgagagtggccaacgaggagagcgagcacaaccaggccagcatcgtgttccccccccccggcgccagcgaggagaacggcctgccccacaccagcgccagaacccagctgccccagagcatgaagatcatgcacgagatcatgtacaagctggaggtgctgtacgtgctgtgcgtgctgctgatgggcagacagagaaaccaggtgcacagaatgatcgccgagttcaagctgatccccggcctgaacaacctgttcgacaagctgatctggagaaagcacagcgccagcgccctggtgctgcacggccacaaccagaactgcgactgcagccccgacatcaccctgaagatccagttcctgagactgctgcagagcttcagcgaccaccacgagaacaagtacctgctgctgaacaaccaggagctgaacgagctgagcgccatcagcctgaaggccaacatccccgaggtggaggccgtgctgaacaccgacagaagcctggtgtgcgacggcaagagaggcctgctgaccagactgctgcaggtgatgaagaaggagcccgccgagagcagcttcagattctggcaggccagagccgtggagagcttcctgagaggcaccaccagctacgccgaccagatgttcctgctgaagagaggcctgctggagcacatcctgtactgcatcgtggacagcgagtgcaagagcagagacgtgctgcagagctacttcgacctgctgggcgagctgatgaagttcaacgtggacgccttcaagagattcaacaagtacatcaacaccgacgccaagttccaggtgttcctgaagcagatcaacagcagcctggtggacagcaacatgctggtgagatgcgtgaccctgagcctggacagattcgagaaccaggtggacatgaaggtggccgaggtgctgagcgagtgcagactgctggcctacatcagccaggtgcccacccagatgagcttcctgttcagactgatcaacatcatccacgtgcagaccctgacccaggagaacgtgagctgcctgaacaccagcctggtgatcctgatgctggccagaagaaaggagagactgcccctgtacctgagactgctgcagagaatggagcacagcaagaagtaccccggcttcctgctgaacaacttccacaacctgctgagattctggcagcagcactacctgcacaaggacaaggacagcacctgcctggagaacagcagctgcatcagcttcagctactggaaggagaccgtgagcatcctgctgaaccccgacagacagagccccagcgccctggtgagctacatcgaggagccctacatggacatcgacagagacttcaccgaggagtag

SEQ ID NO: 103000 - DNA, 2370 bp, synthetic construct
  misc_feature 1..2370: note = Description of Artificial Sequence: Synthetic coding sequence
  source 1..2370: mol_type = other DNA
atggccgccgcccccgtggccgccggcagcggcgccggcagaggcagaagaagcgccgccaccgtggccgcctggggcggctggggcggcagacccagacccggcaacatcctgctgcagctgagacagggccagctgaccggcagaggcctggtgagagccgtgcagttcaccgagaccttcctgaccgagagagacaagcagagcaagtggagcggcatcccccagctgctgctgaagctgcacaccaccagccacctgcacagcgacttcgtggagtgccagaacatcctgaaggagatcagccccctgctgagcatggaggccatggccttcgtgaccgaggagagaaagctgacccaggagaccacctaccccaacacctacatcttcgacctgttcggcggcgtggacctgctggtggagatcctgatgagacccaccatcagcatcagaggccagaagctgaagatcagcgacgagatgagcaaggactgcctgagcatcctgtacaacacctgcgtgtgcaccgagggcgtgaccaagagactggccgagaagaacgacttcgtgatcttcctgttcaccctgatgaccagcaagaagaccttcctgcagaccgccaccctgatcgaggacatcctgggcgtgaagaaggagatgatcagactggacgaggtgcccaacctgagcagcctggtgagcaacttcgaccagcagcagctggccaacttctgcagaatcctggccgtgaccatcagcgagatggacaccggcaacgacgacaagcacaccctgctggccaagaacgcccagcagaagaagagcctgagcctgggccccagcgccgccgagatcaaccaggccgccctgctgagcatccccggcttcgtggagagactgtgcaagctggccaccagaaaggtgagcgagagcaccggcaccgccagcttcctgcaggagctggaggagtggtacacctggctggacaacgccctggtgctggacgccctgatgagagtggccaacgaggagagcgagcacaaccagggcgccagcgaggagaacggcctgccccacaccagcgccagaacccagctgccccagagcatgaagatcatgcacgagatcatgtacaagctggaggtgctgtacgtgctgtgcgtgctgctgatgggcagacagagaaaccaggtgcacagaatgatcgccgagttcaagctgatccccggcctgaacaacctgttcgacaagctgatctggagaaagcacagcgccagcgccctggtgctgcacggccacaaccagaactgcgactgcagccccgacatcaccctgaagatccagttcctgagactgctgcagagcttcagcgaccaccacgagaacaagtacctgctgctgaacaaccaggagctgaacgagctgagcgccatcagcctgaaggccaacatccccgaggtggaggccgtgctgaacaccgacagaagcctggtgtgcgacggcaagagaggcctgctgaccagactgctgcaggtgatgaagaaggagcccgccgagagcagcttcagattctggcaggccagagccgtggagagcttcctgagaggcaccaccagctacgccgaccagatgttcctgctgaagagaggcctgctggagcacatcctgtactgcatcgtggacagcgagtgcaagagcagagacgtgctgcagagctacttcgacctgctgggcgagctgatgaagttcaacgtggacgccttcaagagattcaacaagtacatcaacaccgacgccaagttccaggtgttcctgaagcagatcaacagcagcctggtggacagcaacatgctggtgagatgcgtgaccctgagcctggacagattcgagaaccaggtggacatgaaggtggccgaggtgctgagcgagtgcagactgctggcctacatcagccaggtgcccacccagatgagcttcctgttcagactgatcaacatcatccacgtgcagaccctgacccaggagaacgtgagctgcctgaacaccagcctggtgatcctgatgctggccagaagaaaggagagactgcccctgtacctgagactgctgcagagaatggagcacagcaagaagtaccccggcttcctgctgaacaacttccacaacctgctgagattctggcagcagcactacctgcacaaggacaaggacagcacctgcctggagaacagcagctgcatcagcttcagctactggaaggagaccgtgagcatcctgctgaaccccgacagacagagccccagcgccctggtgagctacatcgaggagccctacatggacatcgacagagacttcaccgaggagtag

SEQ ID NO: 103001 - DNA, 1200 bp, synthetic construct
  misc_feature 1..1200: note = Description of Artificial Sequence: Synthetic coding sequence
  source 1..1200: mol_type = other DNA
atgagaagccagagcaccatcaaggtgcacagaatgatcgccgagttcaagctgatccccggcctgaacaacctgttcgacaagctgatctggagaaagcacagcgccagcgccctggtgctgcacggccacaaccagaactgcgactgcagccccgacatcaccctgaagatccagttcctgagactgctgcagagcttcagcgaccaccacgagaacaagtacctgctgctgaacaaccaggagctgaacgagctgagcgccatcagcctgaaggccaacatccccgaggtggaggccgtgctgaacaccgacagaagcctggtgtgcgacggcaagagaggcctgctgaccagactgctgcaggtgatgaagaaggagcccgccgagagcagcttcagattctggcaggccagagccgtggagagcttcctgagaggcaccaccagctacgccgaccagatgttcctgctgaagagaggcctgctggagcacatcctgtactgcatcgtggacagcgagtgcaagagcagagacgtgctgcagagctacttcgacctgctgggcgagctgatgaagttcaacgtggacgccttcaagagattcaacaagtacatcaacaccgacgccaagttccaggtgttcctgaagcagatcaacagcagcctggtggacagcaacatgctggtgagatgcgtgaccctgagcctggacagattcgagaaccaggtggacatgaaggtggccgaggtgctgagcgagtgcagactgctggcctacatcagccaggtgcccacccagatgagcttcctgttcagactgatcaacatcatccacgtgcagaccctgacccaggagaacgtgagctgcctgaacaccagcctggtgatcctgatgctggccagaagaaaggagagactgcccctgtacctgagactgctgcagagaatggagcacagcaagaagtaccccggcttcctgctgaacaacttccacaacctgctgagattctggcagcagcactacctgcacaaggacaaggacagcacctgcctggagaacagcagctgcatcagcttcagctactggaaggagaccgtgagcatcctgctgaaccccgacagacagagccccagcgccctggtgagctacatcgaggagccctacatggacatcgacagagacttcaccgaggagtag

SEQ ID NO: 103002 - DNA, 2349 bp, synthetic construct
  misc_feature 1..2349: note = Description of Artificial Sequence: Synthetic coding sequence
  source 1..2349: mol_type = other DNA
atggccgccgcccccgtggccgccggcagcggcgccggcagaggcagaagaagcgccgccaccgtggccgcctggggcggctggggccagctgaccggcagaggcctggtgagagccgtgcagttcaccgagaccttcctgaccgagagagacaagcagagcaagtggagcggcatcccccagctgctgctgaagctgcacaccaccagccacctgcacagcgacttcgtggagtgccagaacatcctgaaggagatcagccccctgctgagcatggaggccatggccttcgtgaccgaggagagaaagctgacccaggagaccacctaccccaacacctacatcttcgacctgttcggcggcgtggacctgctggtggagatcctgatgagacccaccatcagcatcagaggccagaagctgaagatcagcgacgagatgagcaaggactgcctgagcatcctgtacaacacctgcgtgtgcaccgagggcgtgaccaagagactggccgagaagaacgacttcgtgatcttcctgttcaccctgatgaccagcaagaagaccttcctgcagaccgccaccctgatcgaggacatcctgggcgtgaagaaggagatgatcagactggacgaggtgcccaacctgagcagcctggtgagcaacttcgaccagcagcagctggccaacttctgcagaatcctggccgtgaccatcagcgagatggacaccggcaacgacgacaagcacaccctgctggccaagaacgcccagcagaagaagagcctgagcctgggccccagcgccgccgagatcaaccaggccgccctgctgagcatccccggcttcgtggagagactgtgcaagctggccaccagaaaggtgagcgagagcaccggcaccgccagcttcctgcaggagctggaggagtggtacacctggctggacaacgccctggtgctggacgccctgatgagagtggccaacgaggagagcgagcacaaccaggccagcatcgtgttccccccccccggcgccagcgaggagaacggcctgccccacaccagcgccagaacccagctgccccagagcatgaagatcatgcacgagatcatgtacaagctggaggtgctgtacgtgctgtgcgtgctgctgatgggcagacagagaaaccaggtgcacagaatgatcgccgagttcaagctgatccccggcctgaacaacctgttcgacaagctgatctggagaaagcacagcgccagcgccctggtgctgcacggccacaaccagaactgcgactgcagccccgacatcaccctgaagatccagttcctgagactgctgcagagcttcagcgaccaccacgagaacaagtacctgctgctgaacaaccaggagctgaacgagctgagcgccatcagcctgaaggccaacatccccgaggtggaggccgtgctgaacaccgacagaagcctggtgtgcgacggcaagagaggcctgctgaccagactgctgcaggtgatgaagaaggagcccgccgagagcagcttcagattctggcaggccagagccgtggagagcttcctgagaggcaccaccagctacgccgaccagatgttcctgctgaagagaggcctgctggagcacatcctgtactgcatcgtggacagcgagtgcaagagcagagacgtgctgcagagctacttcgacctgctgggcgagctgatgaagttcaacgtggacgccttcaagagattcaacaagtacatcaacaccgacgccaagttccaggtgttcctgaagcagatcaacagcagcctggtggacagcaacatgctggtgagatgcgtgaccctgagcctggacagattcgagaaccaggtggacatgaaggtggccgaggtgctgagcgagtgcagactgctggcctacatcagccaggtgcccacccagatgagcttcctgttcagactgatcaacatcatccacgtgcagaccctgacccaggagaacgtgagctgcctgaacaccagcctggtgatcctgatgctggccagaagaaaggagagactgcccctgtacctgagactgctgcagagaatggagcacagcaagaagtaccccggcttcctgctgaacaacttccacaacctgctgagattctggcagcagcactacctgcacaaggacaaggacagcacctgcctggagaacagcagctgcatcagcttcagctactggaaggagaccgtgagcatcctgctgaaccccgacagacagagccccagcgccctggtgagctacatcgaggagccctacatggacatcgacagagacttcaccgaggagtag

SEQ ID NO: 103003 - DNA, 2922 bp, synthetic construct
  misc_feature 1..2922: note = Description of Artificial Sequence: Synthetic coding sequence
  source 1..2922: mol_type = other DNA
atggcccagctgtactacaagaaggtgaactacagcccctacagagacagaatccccctgcagatcgtgagagccgagaccgagctgagcgccgaggagaaggccttcctgaacgccgtggagaagggcgactacgccaccgtgaagcaggccctgcaggaggccgagatctactacaacgtgaacatcaactgcatggaccccctgggcagaagcgccctgctgatcgccatcgagaacgagaacctggagatcatggagctgctgctgaaccacagcgtgtacgtgggcgacgccctgctgtacgccatcagaaaggaggtggtgggcgccgtggagctgctgctgagctacagaagacccagcggcgagaagcaggtgcccaccctgatgatggacacccagttcagcgagttcacccccgacatcacccccatcatgctggccgcccacaccaacaactacgagatcatcaagctgctggtgcagaagagagtgaccatccccagaccccaccagatcagatgcaactgcgtggagtgcgtgagcagcagcgaggtggacagcctgagacacagcagaagcagactgaacatctacaaggccctggccagccccagcctgatcgccctgagcagcgaggaccccatcctgaccgccttcagactgggctgggagctgaaggagctgagcaaggtggagaacgagttcaaggccgagtacgaggagctgagccagcagtgcaagctgttcgccaaggacctgctggaccaggccagaagcagcagagagctggagatcatcctgaaccacagagacgaccacagcgaggagctggacccccagaagtaccacgacctggccaagctgaaggtggccatcaagtaccaccagaaggagttcgtggcccagcccaactgccagcagctgctggccaccctgtggtacgacggcttccccggctggagaagaaagcactgggtggtgaagctgctgacctgcatgaccatcggcttcctgttccccatgctgagcatcgcctacctgatcagccccagaagcaacctgggcctgttcatcaagaagcccttcatcaagttcatctgccacaccgccagctacctgaccttcctgttcatgctgctgctggccagccagcacatcgtgagaaccgacctgcacgtgcagggccccccccccaccgtggtggagtggatgatcctgccctgggtgctgggcttcatctggggcgagatcaaggagatgtgggacggcggcttcaccgagtacatccacgactggtggaacctgatggacttcgccatgaacagcctgtacctggccaccatcagcctgaagatcgtggcctacgtgaagtacaacggcagcagacccagagaggagtgggagatgtggcaccccaccctgatcgccgaggccctgttcgccatcagcaacatcctgagcagcctgagactgatcagcctgttcaccgccaacagccacctgggccccctgcagatcagcctgggcagaatgctgctggacatcctgaagttcctgttcatctactgcctggtgctgctggccttcgccaacggcctgaaccagctgtacttctactacgagaccagagccatcgacgagcccaacaactgcaagggcatcagatgcgagaagcagaacaacgccttcagcaccctgttcgagaccctgcagagcctgttctggagcgtgttcggcctgctgaacctgtacgtgaccaacgtgaaggccagacacgagttcaccgagttcgtgggcgccaccatgttcggcacctacaacgtgatcagcctggtggtgctgctgaacatgctgatcgccatgatgaacaacagctaccagctgatcgccgaccacgccgacatcgagtggaagttcgccagaaccaagctgtggatgagctacttcgacgagggcggcaccctgcccccccccttcaacatcatccccagccccaagagcttcctgtacctgggcaactggttcaacaacaccttctgccccaagagagaccccgacggcagaagaagaagaagaaacctgagaagcttcaccgagagaaacgccgacagcctgatccagaaccagcactaccaggaggtgatcagaaacctggtgaagagatacgtggccgccatgatcagaaacagcaagacccacgagggcctgaccgaggagaacttcaaggagctgaagcaggacatcagcagcttcagatacgaggtgctggacctgctgggcaacagaaagcaccccagaagcttcagcaccagcagcaccgagctgagccagagagacgacaacaacgacggcagcggcggcgccagagccaagagcaagagcgtgagcttcaacctgggctgcaagaagaagacctgccacggcccccccctgatcagaaccatgcccagaagcagcggcgcccagggcaagagcaaggccgagagcagcagcaagagaagcttcatgggccccagcctgaagaagctgggcctgctgttcagcaagttcaacggccacatgagcgagcccagcagcgagcccatgtacaccatcagcgacggcatcgtgcagcagcactgcatgtggcaggacatcagatacagccagatggagaagggcaaggccgaggcctgcagccagagcgagatcaacctgagcgaggtggagctgggcgaggtgcagggcgccgcccagagcagcgagtgccccctggcctgcagcagcagcctgcactgcgccagcagcatctgcagcagcaacagcaagctgctggacagcagcgaggacgtgttcgagacctggggcgaggcctgcgacctgctgatgcacaagtggggcgacggccaggaggagcaggtgaccaccagactgtag

SEQ ID NO: 103004 - DNA, 2796 bp, synthetic construct
  misc_feature 1..2796: note = Description of Artificial Sequence: Synthetic coding sequence
  source 1..2796: mol_type = other DNA
atgagccagagccccgccttcggccccagaagaggcagcagccccagaggcgccgccggcgccgccgccagaagaaacgagagccaggactacctgctgatggacagcgagctgggcgaggacggctgcccccaggcccccctgccctgctacggctactacccctgcttcagaggcagcgacaacagactggcccacagaagacagaccgtgctgagagagaagggcagaagactggccaacagaggccccgcctacatgttcagcgacagaagcaccagcctgagcatcgaggaggagagattcctggacgccgccgagtacggcaacatccccgtggtgagaaagatgctggaggagtgccacagcctgaacgtgaactgcgtggactacatgggccagaacgccctgcagctggccgtggccaacgagcacctggagatcaccgagctgctgctgaagaaggagaacctgagcagagtgggcgacgccctgctgctggccatcagcaagggctacgtgagaatcgtggaggccatcctgagccaccccgccttcgccgagggcaagagactggccaccagccccagccagagcgagctgcagcaggacgacttctacgcctacgacgaggacggcaccagattcagccacgacgtgacccccatcatcctggccgcccactgccaggagtacgagatcgtgcacaccctgctgagaaagggcgccagaatcgagagaccccacgactacttctgcaagtgcaacgactgcaaccagaagcagaagcacgacagcttcagccacagcagaagcagaatcaacgcctacaagggcctggccagccccgcctacctgagcctgagcagcgaggaccccgtgatgaccgccctggagctgagcaacgagctggccgtgctggccaacatcgagaaggagttcaagaacgactacaagaagctgagcatgcagtgcaaggacttcgtggtgggcctgctggacctgtgcagaaacaccgaggaggtggaggccatcctgaacggcgacgtggagaccctgcagagcggcgaccacggcagacccaacctgagcagactgaagctggccatcaagtacgaggtgaagaagttcgtggcccaccccaactgccagcagcagctgctgagcatctggtacgagaacctgagcggcctgagacagcagaccatggccgtgaagttcctggtggtgctggccgtggccatcggcctgcccttcctggccctgatctactggttcgccccctgcagcaagatgggcaagatcatgagaggccccttcatgaagttcgtggcccacgccgccagcttcaccatcttcctgggcctgctggtgatgaacgccgccgacagattcgagggcaccaagctgctgcccaacgagaccagcaccgacaacgccaagcagctgttcagaatgaagaccagctgcttcagctggatggagatgctgatcatcagctgggtgatcggcatgatctgggccgagtgcaaggagatctggacccagggccccaaggagtacctgttcgagctgtggaacatgctggacttcggcatgctggccatcttcgccgccagcttcatcgccagattcatggccttctggcacgccagcaaggcccagagcatcatcgacgccaacgacaccctgaaggacctgaccaaggtgaccctgggcgacaacgtgaagtactacaacctggccagaatcaagtgggaccccagcgacccccagatcatcagcgagggcctgtacgccatcgccgtggtgctgagcttcagcagaatcgcctacatcctgcccgccaacgagagcttcggccccctgcagatcagcctgggcagaaccgtgaaggacatcttcaagttcatggtgatcttcatcatggtgttcgtggccttcatgatcggcatgttcaacctgtacagctactacatcggcgccaagcagaacgaggccttcaccaccgtggaggagagcttcaagaccctgttctgggccatcttcggcctgagcgaggtgaagagcgtggtgatcaactacaaccacaagttcatcgagaacatcggctacgtgctgtacggcgtgtacaacgtgaccatggtgatcgtgctgctgaacatgctgatcgccatgatcaacagcagcttccaggagatcgaggacgacgccgacgtggagtggaagttcgccagagccaagctgtggttcagctacttcgaggagggcagaaccctgcccgtgcccttcaacctggtgcccagccccaagagcctgttctacctgctgctgaagctgaagaagtggatcagcgagctgttccagggccacaagaagggcttccaggaggacgccgagatgaacaagatcaacgaggagaagaagctgggcatcctgggcagccacgaggacctgagcaagctgagcctggacaagaagcaggtgggccacaacaagcagcccagcatcagaagcagcgaggacttccacctgaacagcttcaacaacccccccagacagtaccagaagatcatgaagagactgatcaagagatacgtgctgcaggcccagatcgacaaggagagcgacgaggtgaacgagggcgagctgaaggagatcaagcaggacatcagcagcctgagatacgagctgctggaggagaagagccagaacaccgaggacctggccgagctgatcagagagctgggcgagaagctgagcatggagcccaaccaggaggagaccaacagatag

SEQ ID NO: 103005 - DNA, 2448 bp, synthetic construct
  misc_feature 1..2448: note = Description of Artificial Sequence: Synthetic coding sequence
  source 1..2448: mol_type = other DNA
atgagccagagccccgccttcggccccagaagaggcagcagccccagaggcgccgccggcgccgccgccagaagaaacgagagccaggactacctgctgatggacagcgagctgggcgaggacggctgcccccaggcccccctgccctgctacggctactacccctgcttcagaggcagcgacaacagactggcccacagaagacagaccgtgctgagagagaagggcagaagactggccaacagaggccccgcctacatgttcagcgacagaagcaccagcctgagcatcgaggaggagagattcctggacgccgccgagtacggcaacatccccgtggtgagaaagatgctggaggagtgccacagcctgaacgtgaactgcgtggactacatgggccagaacgccctgcagctggccgtggccaacgagcacctggagatcaccgagctgctgctgaagaaggagaacctgagcagagtgggcgacgccctgctgctggccatcagcaagggctacgtgagaatcgtggaggccatcctgagccaccccgccttcgccgagggcaagagactggccaccagccccagccagagcgagctgcagcaggacgacttctacgcctacgacgaggacggcaccagattcagccacgacgtgacccccatcatcctggccgcccactgccaggagtacgagatcgtgcacaccctgctgagaaagggcgccagaatcgagagaccccacgactacttctgcaagtgcaacgactgcaaccagaagcagaagcacgacagcttcagccacagcagaagcagaatcaacgcctacaagggcctggccagccccgcctacctgagcctgagcagcgaggaccccgtgatgaccgccctggagctgagcaacgagctggccgtgctggccaacatcgagaaggagttcaagatgggcaagatcatgagaggccccttcatgaagttcgtggcccacgccgccagcttcaccatcttcctgggcctgctggtgatgaacgccgccgacagattcgagggcaccaagctgctgcccaacgagaccagcaccgacaacgccaagcagctgttcagaatgaagaccagctgcttcagctggatggagatgctgatcatcagctgggtgatcggcatgatctgggccgagtgcaaggagatctggacccagggccccaaggagtacctgttcgagctgtggaacatgctggacttcggcatgctggccatcttcgccgccagcttcatcgccagattcatggccttctggcacgccagcaaggcccagagcatcatcgacgccaacgacaccctgaaggacctgaccaaggtgaccctgggcgacaacgtgaagtactacaacctggccagaatcaagtgggaccccagcgacccccagatcatcagcgagggcctgtacgccatcgccgtggtgctgagcttcagcagaatcgcctacatcctgcccgccaacgagagcttcggccccctgcagatcagcctgggcagaaccgtgaaggacatcttcaagttcatggtgatcttcatcatggtgttcgtggccttcatgatcggcatgttcaacctgtacagctactacatcggcgccaagcagaacgaggccttcaccaccgtggaggagagcttcaagaccctgttctgggccatcttcggcctgagcgaggtgaagagcgtggtgatcaactacaaccacaagttcatcgagaacatcggctacgtgctgtacggcgtgtacaacgtgaccatggtgatcgtgctgctgaacatgctgatcgccatgatcaacagcagcttccaggagatcgaggacgacgccgacgtggagtggaagttcgccagagccaagctgtggttcagctacttcgaggagggcagaaccctgcccgtgcccttcaacctggtgcccagccccaagagcctgttctacctgctgctgaagctgaagaagtggatcagcgagctgttccagggccacaagaagggcttccaggaggacgccgagatgaacaagatcaacgaggagaagaagctgggcatcctgggcagccacgaggacctgagcaagctgagcctggacaagaagcaggtgggccacaacaagcagcccagcatcagaagcagcgaggacttccacctgaacagcttcaacaacccccccagacagtaccagaagatcatgaagagactgatcaagagatacgtgctgcaggcccagatcgacaaggagagcgacgaggtgaacgagggcgagctgaaggagatcaagcaggacatcagcagcctgagatacgagctgctggaggagaagagccagaacaccgaggacctggccgagctgatcagagagctgggcgagaagctgagcatggagcccaaccaggaggagaccaacagatag

SEQ ID NO: 103006 - DNA, 2631 bp, synthetic construct
  misc_feature 1..2631: note = Description of Artificial Sequence: Synthetic coding sequence
  source 1..2631: mol_type = other DNA
atgagccagagccccgccttcggccccagaagaggcagcagccccagaggcgccgccggcgccgccgccagaagaaacgagagccaggactacctgctgatggacagcgagctgggcgaggacggctgcccccaggcccccctgccctgctacggctactacccctgcttcagaggcagcgacaacagactggcccacagaagacagaccgtgctgagagagaagggcagaagactggccaacagaggccccgcctacatgttcagcgacagaagcaccagcctgagcatcgaggaggagagattcctggacgccgccgagtacggcaacatccccgtggtgagaaagatgctggaggagtgccacagcctgaacgtgaactgcgtggactacatgggccagaacgccctgcagctggccgtggccaacgagcacctggagatcaccgagctgctgctgaagaaggagaacctgagcagagtgggcgacgccctgctgctggccatcagcaagggctacgtgagaatcgtggaggccatcctgagccaccccgccttcgccgagggcaagagactggccaccagccccagccagagcgagctgcagcaggacgacttctacgcctacgacgaggacggcaccagattcagccacgacgtgacccccatcatcctggccgcccactgccaggagtacgagatcgtgcacaccctgctgagaaagggcgccagaatcgagagaccccacgactacttctgcaagtgcaacgactgcaaccagaagcagaagcacgacagcttcagccacagcagaagcagaatcaacgcctacaagggcctggccagccccgcctacctgagcctgagcagcgaggaccccgtgatgaccgccctggagctgagcaacgagctggccgtgctggccaacatcgagaaggagttcaagaacgactacaagaagctgagcatgcagtgcaaggacttcgtggtgggcctgctggacctgtgcagaaacaccgaggaggtggaggccatcctgaacggcgacgtggagaccctgcagagcggcgaccacggcagacccaacctgagcagactgaagctggccatcaagtacgaggtgaagaagatgggcaagatcatgagaggccccttcatgaagttcgtggcccacgccgccagcttcaccatcttcctgggcctgctggtgatgaacgccgccgacagattcgagggcaccaagctgctgcccaacgagaccagcaccgacaacgccaagcagctgttcagaatgaagaccagctgcttcagctggatggagatgctgatcatcagctgggtgatcggcatgatctgggccgagtgcaaggagatctggacccagggccccaaggagtacctgttcgagctgtggaacatgctggacttcggcatgctggccatcttcgccgccagcttcatcgccagattcatggccttctggcacgccagcaaggcccagagcatcatcgacgccaacgacaccctgaaggacctgaccaaggtgaccctgggcgacaacgtgaagtactacaacctggccagaatcaagtgggaccccagcgacccccagatcatcagcgagggcctgtacgccatcgccgtggtgctgagcttcagcagaatcgcctacatcctgcccgccaacgagagcttcggccccctgcagatcagcctgggcagaaccgtgaaggacatcttcaagttcatggtgatcttcatcatggtgttcgtggccttcatgatcggcatgttcaacctgtacagctactacatcggcgccaagcagaacgaggccttcaccaccgtggaggagagcttcaagaccctgttctgggccatcttcggcctgagcgaggtgaagagcgtggtgatcaactacaaccacaagttcatcgagaacatcggctacgtgctgtacggcgtgtacaacgtgaccatggtgatcgtgctgctgaacatgctgatcgccatgatcaacagcagcttccaggagatcgaggacgacgccgacgtggagtggaagttcgccagagccaagctgtggttcagctacttcgaggagggcagaaccctgcccgtgcccttcaacctggtgcccagccccaagagcctgttctacctgctgctgaagctgaagaagtggatcagcgagctgttccagggccacaagaagggcttccaggaggacgccgagatgaacaagatcaacgaggagaagaagctgggcatcctgggcagccacgaggacctgagcaagctgagcctggacaagaagcaggtgggccacaacaagcagcccagcatcagaagcagcgaggacttccacctgaacagcttcaacaacccccccagacagtaccagaagatcatgaagagactgatcaagagatacgtgctgcaggcccagatcgacaaggagagcgacgaggtgaacgagggcgagctgaaggagatcaagcaggacatcagcagcctgagatacgagctgctggaggagaagagccagaacaccgaggacctggccgagctgatcagagagctgggcgagaagctgagcatggagcccaaccaggaggagaccaacagatag

SEQ ID NO: 103007 - DNA, 2406 bp, synthetic construct
  misc_feature 1..2406: note = Description of Artificial Sequence: Synthetic coding sequence
  source 1..2406: mol_type = other DNA
atgctgagaaacagcaccttcaagaacatgcagagaagacacaccaccctgagagagaagggcagaagacaggccatcagaggccccgcctacatgttcaacgagaagggcaccagcctgacccccgaggaggagagattcctggacagcgccgagtacggcaacatccccgtggtgagaaagatgctggaggagagcaagaccctgaacttcaactgcgtggactacatgggccagaacgccctgcagctggccgtgggcaacgagcacctggaggtgaccgagctgctgctgaagaaggagaacctggccagagtgggcgacgccctgctgctggccatcagcaagggctacgtgagaatcgtggaggccatcctgaaccaccccgccttcgcccagggccagagactgaccctgagccccctggagcaggagctgagagacgacgacttctacgcctacgacgaggacggcaccagattcagccacgacatcacccccatcatcctggccgcccactgccaggagtacgagatcgtgcacatcctgctgctgaagggcgccagaatcgagagaccccacgactacttctgcaagtgcaacgagtgcaccgagaagcagagaaaggacagcttcagccacagcagaagcagaatgaacgcctacaagggcctggccagcgccgcctacctgagcctgagcagcgaggaccccgtgctgaccgccctggagctgagcaacgagctggccagactggccaacatcgagaccgagttcaagttcgtggcccaccccaactgccagcagcagctgctgaccatgtggtacgagaacctgagcggcctgagacagcagagcatcgccgtgaagttcctggccgtgttcggcgtgagcatcggcctgcccttcctggccatcgcctactggatcgccccctgcagcaagctgggcagaaccctgagaagccccttcatgaagttcgtggcccacgccgtgagcttcaccatcttcctgggcctgctggtggtgaacgccagcgacagattcgagggcgtgaagaccctgcccaacgagaccttcaccgactaccccaagcagatcttcagagtgaagaccacccagttcagctggaccgagatgctgatcatgaagtgggtgctgggcatgatctggagcgagtgcaaggagatctgggaggagggccccagagagtacgtgctgcacctgtggaacctgctggacttcggcatgctgagcatcttcgtggccagcttcaccgccagattcatggccttcctgaaggccaccgaggcccagctgtacgtggaccagcacgtgcaggacgacaccctgcacaacgtgagcctgccccccgaggtggcctacttcacctacgccagagacaagtggtggcccagcgacccccagatcatcagcgagggcctgtacgccatcgccgtggtgctgagcttcagcagaatcgcctacatcctgcccgccaacgagagcttcggccccctgcagatcagcctgggcagaaccgtgaaggacatcttcaagttcatggtgatcttcatcatggtgttcgtggccttcatgatcggcatgttcaacctgtacagctactacagaggcgccaagtacaaccccgccttcaccaccgtggaggagagcttcaagaccctgttctggagcatcttcggcctgagcgaggtgatcagcgtggtgctgaagtacgaccacaagttcatcgagaacatcggctacgtgctgtacggcgtgtacaacgtgaccatggtggtggtgctgctgaacatgctgatcgccatgatcaacaacagctaccaggagatcgaggaggacgccgacgtggagtggaagttcgccagagccaagctgtggctgagctacttcgacgagggcagaaccctgcccgcccccttcaacctggtgcccagccccaagagcttctactacctgatcatgagaatcaagatgtgcctgatcaagctgtgcaagagcaaggccaagagctgcgagaacgacctggagatgggcatgctgaacagcaagttcaagaagaccagataccaggccggcatgagaaacagcgagaacctgaccgccaacaacaccctgagcaagcccaccagataccagaagatcatgaagagactgatcaagagatacgtgctgaaggcccaggtggacagagagaacgacgaggtgaacgagggcgagctgaaggagatcaagcaggacatcagcagcctgagatacgagctgctggaggagaagagccaggccaccggcgagctggccgacctgatccagcagctgagcgagaagttcggcaagaacctgaacaaggaccacctgagagtgaacaagggcaaggacatctag

SEQ ID NO: 103008 - DNA, 2241 bp, synthetic construct
  misc_feature 1..2241: note = Description of Artificial Sequence: Synthetic coding sequence
  source 1..2241: mol_type = other DNA
atgctgagaaacagcaccttcaagaacatgcagagaagacacaccaccctgagagagaagggcagaagacaggccatcagaggccccgcctacatgttcaacgagaagggcaccagcctgacccccgaggaggagagattcctggacagcgccgagtacggcaacatccccgtggtgagaaagatgctggaggagagcaagaccctgaacttcaactgcgtggactacatgggccagaacgccctgcagctggccgtgggcaacgagcacctggaggtgaccgagctgctgctgaagaaggagaacctggccagagtgggcgacgccctgctgctggccatcagcaagggctacgtgagaatcgtggaggccatcctgaaccaccccgccttcgcccagggccagagactgaccctgagccccctggagcaggagctgagagacgacgacttctacgcctacgacgaggacggcaccagattcagccacgacatcacccccatcatcctggccgcccactgccaggagtacgagatcgtgcacatcctgctgctgaagggcgccagaatcgagagaccccacgactacttctgcaagtgcaacgagtgcaccgagaagcagagaaaggacagcttcagccacagcagaagcagaatgaacgcctacaagggcctggccagcgccgcctacctgagcctgagcagcgaggaccccgtgctgaccgccctggagctgagcaacgagctggccagactggccaacatcgagaccgagttcaagctgggcagaaccctgagaagccccttcatgaagttcgtggcccacgccgtgagcttcaccatcttcctgggcctgctggtggtgaacgccagcgacagattcgagggcgtgaagaccctgcccaacgagaccttcaccgactaccccaagcagatcttcagagtgaagaccacccagttcagctggaccgagatgctgatcatgaagtgggtgctgggcatgatctggagcgagtgcaaggagatctgggaggagggccccagagagtacgtgctgcacctgtggaacctgctggacttcggcatgctgagcatcttcgtggccagcttcaccgccagattcatggccttcctgaaggccaccgaggcccagctgtacgtggaccagcacgtgcaggacgacaccctgcacaacgtgagcctgccccccgaggtggcctacttcacctacgccagagacaagtggtggcccagcgacccccagatcatcagcgagggcctgtacgccatcgccgtggtgctgagcttcagcagaatcgcctacatcctgcccgccaacgagagcttcggccccctgcagatcagcctgggcagaaccgtgaaggacatcttcaagttcatggtgatcttcatcatggtgttcgtggccttcatgatcggcatgttcaacctgtacagctactacagaggcgccaagtacaaccccgccttcaccaccgtggaggagagcttcaagaccctgttctggagcatcttcggcctgagcgaggtgatcagcgtggtgctgaagtacgaccacaagttcatcgagaacatcggctacgtgctgtacggcgtgtacaacgtgaccatggtggtggtgctgctgaacatgctgatcgccatgatcaacaacagctaccaggagatcgaggaggacgccgacgtggagtggaagttcgccagagccaagctgtggctgagctacttcgacgagggcagaaccctgcccgcccccttcaacctggtgcccagccccaagagcttctactacctgatcatgagaatcaagatgtgcctgatcaagctgtgcaagagcaaggccaagagctgcgagaacgacctggagatgggcatgctgaacagcaagttcaagaagaccagataccaggccggcatgagaaacagcgagaacctgaccgccaacaacaccctgagcaagcccaccagataccagaagatcatgaagagactgatcaagagatacgtgctgaaggcccaggtggacagagagaacgacgaggtgaacgagggcgagctgaaggagatcaagcaggacatcagcagcctgagatacgagctgctggaggagaagagccaggccaccggcgagctggccgacctgatccagcagctgagcgagaagttcggcaagaacctgaacaaggaccacctgagagtgaacaagggcaaggacatctag

SEQ ID NO: 103009 - DNA, 2589 bp, synthetic construct
  misc_feature 1..2589: note = Description of Artificial Sequence: Synthetic coding sequence
  source 1..2589: mol_type = other DNA
atgctgagaaacagcaccttcaagaacatgcagagaagacacaccaccctgagagagaagggcagaagacaggccatcagaggccccgcctacatgttcaacgagaagggcaccagcctgacccccgaggaggagagattcctggacagcgccgagtacggcaacatccccgtggtgagaaagatgctggaggagagcaagaccctgaacttcaactgcgtggactacatgggccagaacgccctgcagctggccgtgggcaacgagcacctggaggtgaccgagctgctgctgaagaaggagaacctggccagagtgggcgacgccctgctgctggccatcagcaagggctacgtgagaatcgtggaggccatcctgaaccaccccgccttcgcccagggccagagactgaccctgagccccctggagcaggagctgagagacgacgacttctacgcctacgacgaggacggcaccagattcagccacgacatcacccccatcatcctggccgcccactgccaggagtacgagatcgtgcacatcctgctgctgaagggcgccagaatcgagagaccccacgactacttctgcaagtgcaacgagtgcaccgagaagcagagaaaggacagcttcagccacagcagaagcagaatgaacgcctacaagggcctggccagcgccgcctacctgagcctgagcagcgaggaccccgtgctgaccgccctggagctgagcaacgagctggccagactggccaacatcgagaccgagttcaagaacgactacagaaagctgagcatgcagtgcaaggacttcgtggtgggcgtgctggacctgtgcagagacaccgaggaggtggaggccatcctgaacggcgacgtgaacttccaggtgtggagcgaccaccacagacccagcctgagcagaatcaagctggccatcaagtacgaggtgaagaagttcgtggcccaccccaactgccagcagcagctgctgaccatgtggtacgagaacctgagcggcctgagacagcagagcatcgccgtgaagttcctggccgtgttcggcgtgagcatcggcctgcccttcctggccatcgcctactggatcgccccctgcagcaagctgggcagaaccctgagaagccccttcatgaagttcgtggcccacgccgtgagcttcaccatcttcctgggcctgctggtggtgaacgccagcgacagattcgagggcgtgaagaccctgcccaacgagaccttcaccgactaccccaagcagatcttcagagtgaagaccacccagttcagctggaccgagatgctgatcatgaagtgggtgctgggcatgatctggagcgagtgcaaggagatctgggaggagggccccagagagtacgtgctgcacctgtggaacctgctggacttcggcatgctgagcatcttcgtggccagcttcaccgccagattcatggccttcctgaaggccaccgaggcccagctgtacgtggaccagcacgtgcaggacgacaccctgcacaacgtgagcctgccccccgaggtggcctacttcacctacgccagagacaagtggtggcccagcgacccccagatcatcagcgagggcctgtacgccatcgccgtggtgctgagcttcagcagaatcgcctacatcctgcccgccaacgagagcttcggccccctgcagatcagcctgggcagaaccgtgaaggacatcttcaagttcatggtgatcttcatcatggtgttcgtggccttcatgatcggcatgttcaacctgtacagctactacagaggcgccaagtacaaccccgccttcaccaccgtggaggagagcttcaagaccctgttctggagcatcttcggcctgagcgaggtgatcagcgtggtgctgaagtacgaccacaagttcatcgagaacatcggctacgtgctgtacggcgtgtacaacgtgaccatggtggtggtgctgctgaacatgctgatcgccatgatcaacaacagctaccaggagatcgaggaggacgccgacgtggagtggaagttcgccagagccaagctgtggctgagctacttcgacgagggcagaaccctgcccgcccccttcaacctggtgcccagccccaagagcttctactacctgatcatgagaatcaagatgtgcctgatcaagctgtgcaagagcaaggccaagagctgcgagaacgacctggagatgggcatgctgaacagcaagttcaagaagaccagataccaggccggcatgagaaacagcgagaacctgaccgccaacaacaccctgagcaagcccaccagataccagaagatcatgaagagactgatcaagagatacgtgctgaaggcccaggtggacagagagaacgacgaggtgaacgagggcgagctgaaggagatcaagcaggacatcagcagcctgagatacgagctgctggaggagaagagccaggccaccggcgagctggccgacctgatccagcagctgagcgagaagttcggcaagaacctgaacaaggaccacctgagagtgaacaagggcaaggacatctag

SEQ ID NO: 103010 - DNA, 4350 bp, synthetic construct
  misc_feature 1..4350: note = Description of Artificial Sequence: Synthetic coding sequence
  source 1..4350: mol_type = other DNA
atggagcccagcgccctgagaaaggccggcagcgagcaggaggagggcttcgagggcctgcccagaagagtgaccgacctgggcatggtgagcaacctgagaagaagcaacagcagcctgttcaagagctggagactgcagtgccccttcggcaacaacgacaagcaggagagcctgagcagctggatccccgagaacatcaagaagaaggagtgcgtgtacttcgtggagagcagcaagctgagcgacgccggcaaggtggtgtgccagtgcggctacacccacgagcagcacctggaggaggccaccaagccccacaccttccagggcacccagtgggaccccaagaagcacgtgcaggagatgcccaccgacgccttcggcgacatcgtgttcaccggcctgagccagaaggtgaagaagtacgtgagagtgagccaggacacccccagcagcgtgatctaccacctgatgacccagcactggggcctggacgtgcccaacctgctgatcagcgtgaccggcggcgccaagaacttcaacatgaagcccagactgaagagcatcttcagaagaggcctggtgaaggtggcccagaccaccggcgcctggatcatcaccggcggcagccacaccggcgtgatgaagcaggtgggcgaggccgtgagagacttcagcctgagcagcagctacaaggagggcgagctgatcaccatcggcgtggccacctggggcaccgtgcacagaagagagggcctgatccaccccaccggcagcttccccgccgagtacatcctggacgaggacggccagggcaacctgacctgcctggacagcaaccacagccacttcatcctggtggacgacggcacccacggccagtacggcgtggagatccccctgagaaccagactggagaagttcatcagcgagcagaccaaggagagaggcggcgtggccatcaagatccccatcgtgtgcgtggtgctggagggcggccccggcaccctgcacaccatcgacaacgccaccaccaacggcaccccctgcgtggtggtggagggcagcggcagagtggccgacgtgatcgcccaggtggccaacctgcccgtgagcgacatcaccatcagcctgatccagcagaagctgagcgtgttcttccaggagatgttcgagaccttcaccgagagcagaatcgtggagtggaccaagaagatccaggacatcgtgagaagaagacagctgctgaccgtgttcagagagggcaaggacggccagcaggacgtggacgtggccatcctgcaggccctgctgaaggccagcagaagccaggaccacttcggccacgagaactgggaccaccagctgaagctggccgtggcctggaacagagtggacatcgccagaagcgagatcttcatggacgagtggcagtggaagcccagcgacctgcaccccaccatgaccgccgccctgatcagcaacaagcccgagttcgtgaagctgttcctggagaacggcgtgcagctgaaggagttcgtgacctgggacaccctgctgtacctgtacgagaacctggaccccagctgcctgttccacagcaagctgcagatgcaccacgtggcccaggtgctgagagagctgctgggcgacttcacccagcccctgtaccccagacccagacacaacgacagactgagactgctgctgcccgtgccccacgtgaagctgaacgtgcagggcgtgagcctgagaagcctgtacaagagaagcagcggccacgtgaccttcaccatggaccccatcagagacctgctgatctgggccatcgtgcagaacagaagagagctggccggcatcatctgggcccagagccaggactgcatcgccgccgccctggcctgcagcaagatcctgaaggagctgagcaaggaggaggaggacaccgacagcagcgaggagatgctggccctggccgaggagtacgagcacagagccatcggcgtgttcaccgagtgctacagaaaggacgaggagagagcccagaagctgctgaccagagtgagcgaggcctggggcaagaccacctgcctgcagctggccctggaggccaaggacatgaagttcgtgagccacggcggcatccaggccttcctgaccaaggtgtggtggggccagctgagcgtggacaacggcctgtggagagtgaccctgtgcatgctggccttccccctgctgctgaccggcctgatcagcttcagagagaagagactgcaggacgtgggcacccccgccgccagagccagagccttcttcaccgcccccgtggtggtgttccacctgaacatcctgagctacttcgccttcctgtgcctgttcgcctacgtgctgatggtggacttccagcccgtgcccagctggtgcgagtgcgccatctacctgtggctgttcagcctggtgtgcgaggagatgagacagctgttctacgaccccgacgagtgcggcctgatgaagaaggccgccctgtacttcagcgacttctggaacaagctggacgtgggcgccatcctgctgttcgtggccggcctgacctgcagactgatccccgccaccctgtaccccggcagagtgatcctgagcctggacttcatcctgttctgcctgagactgatgcacatcttcaccatcagcaagaccctgggccccaagatcatcatcgtgaagagaatgatgaaggacgtgttcttcttcctgttcctgctggccgtgtgggtggtgagcttcggcgtggccaagcaggccatcctgatccacaacgagagaagagtggactggctgttcagaggcgccgtgtaccacagctacctgaccatcttcggccagatccccggctacatcgacggcgtgaacttcaaccccgagcactgcagccccaacggcaccgacccctacaagcccaagtgccccgagagcgacgccacccagcagagacccgccttccccgagtggctgaccgtgctgctgctgtgcctgtacctgctgttcaccaacatcctgctgctgaacctgctgatcgccatgttcaactacaccttccagcaggtgcaggagcacaccgaccagatctggaagttccagagacacgacctgatcgaggagtaccacggcagacccgccgcccccccccccttcatcctgctgagccacctgcagctgttcatcaagagagtggtgctgaagacccccgccaagagacacaagcagctgaagaacaagctggagaagaacgaggaggccgccctgctgagctgggagatctacctgaaggagaactacctgcagaacagacagttccagcagaagcagagacccgagcagaagatcgaggacatcagcaacaaggtggacgccatggtggacctgctggacctggaccccctgaagagaagcggcagcatggagcagagactggccagcctggaggagcaggtggcccagaccgcccaggccctgcactggatcgtgagaaccctgagagccagcggcttcagcagcgaggccgacgtgcccaccctggccagccagaaggccgccgaggagcccgacgccgagcccggcggcagaaagaagaccgaggagcccggcgacagctaccacgtgaacgccagacacctgctgtaccccaactgccccgtgaccagattccccgtgcccaacgagaaggtgccctgggagaccgagttcctgatctacgacccccccttctacaccgccgagagaaaggacgccgccgccatggaccccatgggcgagaaccccatgggcagaaccggcctgagaggcagaggcagcctgagctgcttcggccccaaccacaccctgtaccccatggtgaccagatggagaagaaacgaggacggcgccatctgcagaaagagcatcaagaagatgctggaggtgctggtggtgaagctgcccctgagcgagcactgggccctgcccggcggcagcagagagcccggcgagatgctgcccagaaagctgaagagaatcctgagacaggagcactggcccagcttcgagaacctgctgaagtgcggcatggaggtgtacaagggctacatggacgaccccagaaacaccgacaacgcctggatcgagaccgtggccgtgagcgtgcacttccaggaccagaacgacgtggagctgaacagactgaacagcaacctgcacgcctgcgacagcggcgccagcatcagatggcaggtggtggacagaagaatccccctgtacgccaaccacaagaccctgctgcagaaggccgccgccgagttcggcgcccactactag

SEQ ID NO: 103011 - DNA, 4512 bp, synthetic construct
  misc_feature 1..4512: note = Description of Artificial Sequence: Synthetic coding sequence
  source 1..4512: mol_type = other DNA
atggagcccagcgccctgagaaaggccggcagcgagcaggaggagggcttcgagggcctgcccagaagagtgaccgacctgggcatggtgagcaacctgagaagaagcaacagcagcctgttcaagagctggagactgcagtgccccttcggcaacaacgacaagcaggagagcctgagcagctggatccccgagaacatcaagaagaaggagtgcgtgtacttcgtggagagcagcaagctgagcgacgccggcaaggtggtgtgccagtgcggctacacccacgagcagcacctggaggaggccaccaagccccacaccttccagggcacccagtgggaccccaagaagcacgtgcaggagatgcccaccgacgccttcggcgacatcgtgttcaccggcctgagccagaaggtgaagaagtacgtgagagtgagccaggacacccccagcagcgtgatctaccacctgatgacccagcactggggcctggacgtgcccaacctgctgatcagcgtgaccggcggcgccaagaacttcaacatgaagcccagactgaagagcatcttcagaagaggcctggtgaaggtggcccagaccaccggcgcctggatcatcaccggcggcagccacaccggcgtgatgaagcaggtgggcgaggccgtgagagacttcagcctgagcagcagctacaaggagggcgagctgatcaccatcggcgtggccacctggggcaccgtgcacagaagagagggcctgatccaccccaccggcagcttccccgccgagtacatcctggacgaggacggccagggcaacctgacctgcctggacagcaaccacagccacttcatcctggtggacgacggcacccacggccagtacggcgtggagatccccctgagaaccagactggagaagttcatcagcgagcagaccaaggagagaggcggcgtggccatcaagatccccatcgtgtgcgtggtgctggagggcggccccggcaccctgcacaccatcgacaacgccaccaccaacggcaccccctgcgtggtggtggagggcagcggcagagtggccgacgtgatcgcccaggtggccaacctgcccgtgagcgacatcaccatcagcctgatccagcagaagctgagcgtgttcttccaggagatgttcgagaccttcaccgagagcagaatcgtggagtggaccaagaagatccaggacatcgtgagaagaagacagctgctgaccgtgttcagagagggcaaggacggccagcaggacgtggacgtggccatcctgcaggccctgctgaaggccagcagaagccaggaccacttcggccacgagaactgggaccaccagctgaagctggccgtggcctggaacagagtggacatcgccagaagcgagatcttcatggacgagtggcagtggaagcccagcgacctgcaccccaccatgaccgccgccctgatcagcaacaagcccgagttcgtgaagctgttcctggagaacggcgtgcagctgaaggagttcgtgacctgggacaccctgctgtacctgtacgagaacctggaccccagctgcctgttccacagcaagctgcagaaggtgctggtggaggaccccgagagacccgcctgcgcccccgccgcccccagactgcagatgcaccacgtggcccaggtgctgagagagctgctgggcgacttcacccagcccctgtaccccagacccagacacaacgacagactgagactgctgctgcccgtgccccacgtgaagctgaacgtgcagggcgtgagcctgagaagcctgtacaagagaagcagcggccacgtgaccttcaccatggaccccatcagagacctgctgatctgggccatcgtgcagaacagaagagagctggccggcatcatctgggcccagagccaggactgcatcgccgccgccctggcctgcagcaagatcctgaaggagctgagcaaggaggaggaggacaccgacagcagcgaggagatgctggccctggccgaggagtacgagcacagagccatcggcgtgttcaccgagtgctacagaaaggacgaggagagagcccagaagctgctgaccagagtgagcgaggcctggggcaagaccacctgcctgcagctggccctggaggccaaggacatgaagttcgtgagccacggcggcatccaggccttcctgaccaaggtgtggtggggccagctgagcgtggacaacggcctgtggagagtgaccctgtgcatgctggccttccccctgctgctgaccggcctgatcagcttcagagagaagagactgcaggacgtgggcacccccgccgccagagccagagccttcttcaccgcccccgtggtggtgttccacctgaacatcctgagctacttcgccttcctgtgcctgttcgcctacgtgctgatggtggacttccagcccgtgcccagctggtgcgagtgcgccatctacctgtggctgttcagcctggtgtgcgaggagatgagacagctgttctacgaccccgacgagtgcggcctgatgaagaaggccgccctgtacttcagcgacttctggaacaagctggacgtgggcgccatcctgctgttcgtggccggcctgacctgcagactgatccccgccaccctgtaccccggcagagtgatcctgagcctggacttcatcctgttctgcctgagactgatgcacatcttcaccatcagcaagaccctgggccccaagatcatcatcgtgaagagaatgatgaaggacgtgttcttcttcctgttcctgctggccgtgtgggtggtgagcttcggcgtggccaagcaggccatcctgatccacaacgagagaagagtggactggctgttcagaggcgccgtgtaccacagctacctgaccatcttcggccagatccccggctacatcgacggcgtgaacttcaaccccgagcactgcagccccaacggcaccgacccctacaagcccaagtgccccgagagcgacgccacccagcagagacccgccttccccgagtggctgaccgtgctgctgctgtgcctgtacctgctgttcaccaacatcctgctgctgaacctgctgatcgccatgttcaactacaccttccagcaggtgcaggagcacaccgaccagatctggaagttccagagacacgacctgatcgaggagtaccacggcagacccgccgcccccccccccttcatcctgctgagccacctgcagctgttcatcaagagagtggtgctgaagacccccgccaagagacacaagcagctgaagaacaagctggagaagaacgaggaggccgccctgctgagctgggagatctacctgaaggagaactacctgcagaacagacagttccagcagaagcagagacccgagcagaagatcgaggacatcagcaacaaggtggacgccatggtggacctgctggacctggaccccctgaagagaagcggcagcatggagcagagactggccagcctggaggagcaggtggcccagaccgcccaggccctgcactggatcgtgagaaccctgagagccagcggcttcagcagcgaggccgacgtgcccaccctggccagccagaaggccgccgaggagcccgacgccgagcccggcggcagaaagaagaccgaggagcccggcgacagctaccacgtgaacgccagacacctgctgtaccccaactgccccgtgaccagattccccgtgcccaacgagaaggtgccctgggagaccgagttcctgatctacgacccccccttctacaccgccgagagaaaggacgccgccgccatggaccccatgggcgacaccctggagcccctgagcaccatccagtacaacgtggtggacggcctgagagacagaagaagcttccacggcccctacaccgtgcaggccggcctgcccctgaaccccatgggcagaaccggcctgagaggcagaggcagcctgagctgcttcggccccaaccacaccctgtaccccatggtgaccagatggagaagaaacgaggacggcgccatctgcagaaagagcatcaagaagatgctggaggtgctggtggtgaagctgcccctgagcgagcactgggccctgcccggcggcagcagagagcccggcgagatgctgcccagaaagctgaagagaatcctgagacaggagcactggcccagcttcgagaacctgctgaagtgcggcatggaggtgtacaagggctacatggacgaccccagaaacaccgacaacgcctggatcgagaccgtggccgtgagcgtgcacttccaggaccagaacgacgtggagctgaacagactgaacagcaacctgcacgcctgcgacagcggcgccagcatcagatggcaggtggtggacagaagaatccccctgtacgccaaccacaagaccctgctgcagaaggccgccgccgagttcggcgcccactactag

SEQ ID NO: 103012 - DNA, 4512 bp, synthetic construct; identical to SEQ ID NO: 103011
  misc_feature 1..4512: note = Description of Artificial Sequence: Synthetic coding sequence
  source 1..4512: mol_type = other DNA

SEQ ID NO: 103013 - DNA, 435 bp, synthetic construct
  misc_feature 1..435: note = Description of Artificial Sequence: Synthetic coding sequence
  source 1..435: mol_type = other DNA
atggagcccagcgccctgagaaaggccggcagcgagcaggaggagggcttcgagggcctgcccagaagagtgaccgacctgggcatggtgagcaacctgagaagaagcaacagcagcctgttcaagagctggagactgcagtgccccttcggcaacaacgacaagcaggagagcctgagcagctggatccccgagaacatcaagaagaaggagtgcgtgtacttcgtggagagcagcaagctgagcgacgccggcaaggtggtgtgccagtgcggctacacccacgagcagcacctggaggaggccaccaagccccacaccttccagggcacccagtgggaccccaagaagcacgtgcaggagatgcccaccgacgccttcggcgacatcgtgttcaccggcctgagccagaaggtgaagaagtacgtgagatag

SEQ ID NO: 103014 - DNA, 744 bp, synthetic construct
  misc_feature 1..744: note = Description of Artificial Sequence: Synthetic coding sequence
  source 1..744: mol_type = other DNA
atgctgagcagagagcaggaggaggacggcggcgccggcagacagtaccacgtgaacgccagacacctgctgtaccccaactgccccgtgaccagattccccgtgcccaacgagaaggtgccctgggagaccgagttcctgatctacgacccccccttctacaccgccgagagaaaggacgccgccgccatggaccccatgggcgagaaccccatgggcagaaccggcctgagaggcagaggcagcctgagctgcttcggccccaaccacaccctgtaccccatggtgaccagatggagaagaaacgaggacggcgccatctgcagaaagagcatcaagaagatgctggaggtgctggtggtgaagctgcccctgagcgagcactgggccctgcccggcggcagcagagagcccggcgagatgctgcccagaaagctgaagagaatcctgagacaggagcactggcccagcttcgagaacctgctgaagtgcggcatggaggtgtacaagggctacatggacgaccccagaaacaccgacaacgcctggatcgagaccgtggccgtgagcgtgcacttccaggaccagaacgacgtggagctgaacagactgaacagcaacctgcacgcctgcgacagcggcgccagcatcagatggcaggtggtggacagaagaatccccctgtacgccaaccacaagaccctgctgcagaaggccgccgccgagttcggcgcccactactag

SEQ ID NO: 103015 - DNA, 5136 bp, synthetic construct
  misc_feature 1..5136: note = Description of Artificial Sequence: Synthetic coding sequence
  source 1..5136: mol_type = other DNA
atgggcaagaagtggagagacgccgccgagatggagagaggctgcagcgacagagaggacaacgccgagagcagaagaagaagcagaagcgccagcagaggcagattcgccgagagctggaagagactgagcagcaagcagggcagcaccaagagaagcggcctgcccagccagcagacccccgcccagaagagctggatcgagagagccttctacaagagagagtgcgtgcacatcatccccagcaccaaggacccccacagatgctgctgcggcagactgatcggccagcacgtgggcctgacccccagcatcagcgtgctgcagaacgagaagaacgagagcagactgagcagaaacgacatccagagcgagaagtggagcatcagcaagcacacccagctgagccccaccgacgccttcggcaccatcgagttccagggcggcggccacagcaacaaggccatgtacgtgagagtgagcttcgacaccaagcccgacctgctgctgcacctgatgaccaaggagtggcagctggagctgcccaagctgctgatcagcgtgcacggcggcctgcagaacttcgagctgcagcccaagctgaagcaggtgttcggcaagggcctgatcaaggccgccatgaccaccggcgcctggatcttcaccggcggcgtgaacaccggcgtgatcagacacgtgggcgacgccctgaaggaccacgccagcaagagcagaggcaagatctgcaccatcggcatcgccccctggggcatcgtggagaaccaggaggacctgatcggcagagacgtggtgagaccctaccagaccatgagcaaccccatgagcaagctgaccgtgctgaacagcatgcacagccacttcatcctggccgacaacggcaccaccggcaagtacggcgccgaggtgaagctgagaagacagctggagaagcacatcagcctgcagaagatcaacaccagaatcggccagggcgtgcccgtggtggccctgatcgtggagggcggccccaacgtgatcagcatcgtgctggagtacctgagagacaccccccccgtgcccgtggtggtgtgcgacggcagcggcagagccagcgacatcctggccttcggccacaagtacagcgaggagggcggcctgatcaacgagagcctgagagaccagctgctggtgaccatccagaagaccttcacctacaccagaacccaggcccagcacctgttcatcatcctgatggagtgcatgaagaagaaggagctgatcaccgtgttcagaatgggcagcgagggccaccaggacatcgacctggccatcctgaccgccctgctgaagggcgccaacgccagcgcccccgaccagctgagcctggccctggcctggaacagagtggacatcgccagaagccagatcttcatctacggccagcagtggcccgtgggcagcctggagcaggccatgctggacgccctggtgctggacagagtggacttcgtgaagctgctgatcgagaacggcgtgagcatgcacagattcctgaccatcagcagactggaggagctgtacaacaccagacacggccccagcaacaccctgtaccacctggtgagagacgtgaagaagagagagtaccccggcttcggctggatctacttcaagggcaacctgccccccgactacagaatcagcctgatcgacatcggcctggtgatcgagtacctgatgggcggcgcctacagatgcaactacaccagaaagagattcagaaccctgtaccacaacctgttcggccccaagagagacgacatccccctgagaagaggcagaaagaccaccaagaagagagaggaggaggtggacatcgacctggacgaccccgagatcaaccacttccccttccccttccacgagctgatggtgtgggccgtgctgatgaagagacagaagatggccctgttcttctggcagcacggcgaggaggccatggccaaggccctggtggcctgcaagctgtgcaaggccatggcccacgaggccagcgagaacgacatggtggacgacatcagccaggagctgaaccacaacagcagagacttcggccagctggccgtggagctgctggaccagagctacaagcaggacgagcagctggccatgaagctgctgacctacgagctgaagaactggagcaacgccacctgcctgcagctggccgtggccgccaagcacagagacttcatcgcccacacctgcagccagatgctgctgaccgacatgtggatgggcagactgagaatgagaaagaacagcggcctgaaggtgatcctgggcatcctgctgccccccagcatcctgagcctggagttcaagaacaaggacgacatgccctacatgagccaggcccaggagatccacctgcaggagaaggaggccgaggagcccgagaagcccaccaaggagaaggaggaggaggacatggagctgaccgccatgctgggcagaaacaacggcgagagcagcagaaagaaggacgaggaggaggtgcagagcaagcacagactgatccccctgggcagaaagatctacgagttctacaacgcccccatcgtgaagttctggttctacaccctggcctacatcggctacctgatgctgttcaactacatcgtgctggtgaagatggagagatggcccagcacccaggagtggatcgtgatcagctacatcttcaccctgggcatcgagaagatgagagagatcctgatgagcgagcccggcaagctgctgcagaaggtgaaggtgtggctgcaggagtactggaacgtgaccgacctgatcgccatcctgctgttcagcgtgggcatgatcctgagactgcaggaccagcccttcagaagcgacggcagagtgatctactgcgtgaacatcatctactggtacatcagactgctggacatcttcggcgtgaacaagtacctgggcccctacgtgatgatgatcggcaagatgatgatcgacatgatgtacttcgtgatcatcatgctggtggtgctgatgagcttcggcgtggccagacaggccatcctgttccccaacgaggagcccagctggaagctggccaagaacatcttctacatgccctactggatgatctacggcgaggtgttcgccgaccagatcgaccccccctgcggccagaacgagaccagagaggacggcaagatcatccagctgcccccctgcaagaccggcgcctggatcgtgcccgccatcatggcctgctacctgctggtggccaacatcctgctggtgaacctgctgatcgccgtgttcaacaacaccttcttcgaggtgaagagcatcagcaaccaggtgtggaagttccagagataccagctgatcatgaccttccacgagagacccgtgctgcccccccccctgatcatcttcagccacatgaccatgatcttccagcacctgtgctgcagatggagaaagcacgagagcgaccccgacgagagagactacggcctgaagctgttcatcaccgacgacgagctgaagaaggtgcacgacttcgaggagcagtgcatcgaggagtacttcagagagaaggacgacagattcaacagcagcaacgacgagagaatcagagtgaccagcgagagagtggagaacatgagcatgagactggaggaggtgaacgagagagagcacagcatgaaggccagcctgcagaccgtggacatcagactggcccagctggaggacctgatcggcagaatggccaccgccctggagagactgaccggcctggagagagccgagagcaacaagatcagaagcagaaccagcagcgactgcaccgacgccgcctacatcgtgagacagagcagcttcaacagccaggagggcaacaccttcaagctgcaggagagcatcgaccccgccggcgaggagaccatgagccccaccagccccaccctgatgcccagaatgagaagccacagcttctacagcgtgaacatgaaggacaagggcggcatcgagaagctggagagcatcttcaaggagagaagcctgagcctgcacagagccaccagcagccacagcgtggccaaggagcccaaggcccccgccgcccccgccaacaccctggccatcgtgcccgacagcagaagacccagcagctgcatcgacatctacgtgagcgccatggacgagctgcactgcgacatcgaccccctggacaacagcgtgaacatcctgggcctgggcgagcccagcttcagcacccccgtgcccagcaccgcccccagcagcagcgcctacgccaccctggcccccaccgacagaccccccagcagaagcatcgacttcgaggacatcaccagcatggacaccagaagcttcagcagcgactacacccacctgcccgagtgccagaacccctgggacagcgagccccccatgtaccacaccatcgagagaagcaagagcagcagatacctggccaccacccccttcctgctggaggaggcccccatcgtgaagagccacagcttcatgttcagccccagcagaagctactacgccaacttcggcgtgcccgtgaagaccgccgagtacaccagcatcaccgactgcatcgacaccagatgcgtgaacgccccccaggccatcgccgacagagccgccttccccggcggcctgggcgacaaggtggaggacctgacctgctgccaccccgagagagaggccgagctgagccaccccagcagcgacagcgaggagaacgaggccaagggcagaagagccaccatcgccatcagcagccaggagggcgacaacagcgagagaaccctgagcaacaacatcaccgtgcccaagatcgagagagccaacagctacagcgccgaggagcccagcgccccctacgcccacaccagaaagagcttcagcatcagcgacaagctggacagacagagaaacaccgccagcctgagaaaccccttccagagaagcaagagcagcaagcccgagggcagaggcgacagcctgagcatgagaagactgagcagaaccagcgccttccagagcttcgagagcaagcacaactag

SEQ ID NO: 103016 - DNA, 4710 bp, synthetic construct
  misc_feature 1..4710: note = Description of Artificial Sequence: Synthetic coding sequence
  source 1..4710: mol_type = other DNA
atgtacgtgagagtgagcttcgacaccaagcccgacctgctgctgcacctgatgaccaaggagtggcagctggagctgcccaagctgctgatcagcgtgcacggcggcctgcagaacttcgagctgcagcccaagctgaagcaggtgttcggcaagggcctgatcaaggccgccatgaccaccggcgcctggatcttcaccggcggcgtgaacaccggcgtgatcagacacgtgggcgacgccctgaaggaccacgccagcaagagcagaggcaagatctgcaccatcggcatcgccccctggggcatcgtggagaaccaggaggacctgatcggcagagacgtggtgagaccctaccagaccatgagcaaccccatgagcaagctgaccgtgctgaacagcatgcacagccacttcatcctggccgacaacggcaccaccggcaagtacggcgccgaggtgaagctgagaagacagctggagaagcacatcagcctgcagaagatcaacaccagatgcctgcccttcttcagcctggacagcagactgttctacagcttctggggcagctgccagctggacagcgtgggcatcggccagggcgtgcccgtggtggccctgatcgtggagggcggccccaacgtgatcagcatcgtgctggagtacctgagagacaccccccccgtgcccgtggtggtgtgcgacggcagcggcagagccagcgacatcctggccttcggccacaagtacagcgaggagggcggcctgatcaacgagagcctgagagaccagctgctggtgaccatccagaagaccttcacctacaccagaacccaggcccagcacctgttcatcatcctgatggagtgcatgaagaagaaggagctgatcaccgtgttcagaatgggcagcgagggccaccaggacatcgacctggccatcctgaccgccctgctgaagggcgccaacgccagcgcccccgaccagctgagcctggccctggcctggaacagagtggacatcgccagaagccagatcttcatctacggccagcagtggcccgtgggcagcctggagcaggccatgctggacgccctggtgctggacagagtggacttcgtgaagctgctgatcgagaacggcgtgagcatgcacagattcctgaccatcagcagactggaggagctgtacaacaccagacacggccccagcaacaccctgtaccacctggtgagagacgtgaagaagggcaacctgccccccgactacagaatcagcctgatcgacatcggcctggtgatcgagtacctgatgggcggcgcctacagatgcaactacaccagaaagagattcagaaccctgtaccacaacctgttcggccccaagagagacgacatccccctgagaagaggcagaaagaccaccaagaagagagaggaggaggtggacatcgacctggacgaccccgagatcaaccacttccccttccccttccacgagctgatggtgtgggccgtgctgatgaagagacagaagatggccctgttcttctggcagcacggcgaggaggccatggccaaggccctggtggcctgcaagctgtgcaaggccatggcccacgaggccagcgagaacgacatggtggacgacatcagccaggagctgaaccacaacagcagagacttcggccagctggccgtggagctgctggaccagagctacaagcaggacgagcagctggccatgaagctgctgacctacgagctgaagaactggagcaacgccacctgcctgcagctggccgtggccgccaagcacagagacttcatcgcccacacctgcagccagatgctgctgaccgacatgtggatgggcagactgagaatgagaaagaacagcggcctgaaggtgatcctgggcatcctgctgccccccagcatcctgagcctggagttcaagaacaaggacgacatgccctacatgagccaggcccaggagatccacctgcaggagaaggaggccgaggagcccgagaagcccaccaaggagaaggaggaggaggacatggagctgaccgccatgctgggcagaaacaacggcgagagcagcagaaagaaggacgaggaggaggtgcagagcaagcacagactgatccccctgggcagaaagatctacgagttctacaacgcccccatcgtgaagttctggttctacaccctggcctacatcggctacctgatgctgttcaactacatcgtgctggtgaagatggagagatggcccagcacccaggagtggatcgtgatcagctacatcttcaccctgggcatcgagaagatgagagagatcctgatgagcgagcccggcaagctgctgcagaaggtgaaggtgtggctgcaggagtactggaacgtgaccgacctgatcgccatcctgctgttcagcgtgggcatgatcctgagactgcaggaccagcccttcagaagcgacggcagagtgatctactgcgtgaacatcatctactggtacatcagactgctggacatcttcggcgtgaacaagtacctgggcccctacgtgatgatgatcggcaagatgatgatcgacatgatgtacttcgtgatcatcatgctggtggtgctgatgagcttcggcgtggccagacaggccatcctgttccccaacgaggagcccagctggaagctggccaagaacatcttctacatgccctactggatgatctacggcgaggtgttcgccgaccagatcgaccccccctgcggccagaacgagaccagagaggacggcaagatcatccagctgcccccctgcaagaccggcgcctggatcgtgcccgccatcatggcctgctacctgctggtggccaacatcctgctggtgaacctgctgatcgccgtgttcaacaacaccttcttcgaggtgaagagcatcagcaaccaggtgtggaagttccagagataccagctgatcatgaccttccacgagagacccgtgctgcccccccccctgatcatcttcagccacatgaccatgatcttccagcacctgtgctgcagatggagaaagcacgagagcgaccccgacgagagagactacggcctgaagctgttcatcaccgacgacgagctgaagaaggtgcacgacttcgaggagcagtgcatcgaggagtacttcagagagaaggacgacagattcaacagcagcaacgacgagagaatcagagtgaccagcgagagagtggagaacatgagcatgagactggaggaggtgaacgagagagagcacagcatgaaggccagcctgcagaccgtggacatcagactggcccagctggaggacctgatcggcagaatggccaccgccctggagagactgaccggcctggagagagccgagagcaacaagatcagaagcagaaccagcagcgactgcaccgacgccgcctacatcgtgagacagagcagcttcaacagccaggagggcaacaccttcaagctgcaggagagcatcgaccccgccggcgaggagaccatgagccccaccagccccaccctgatgcccagaatgagaagccacagcttctacagcgtgaacatgaaggacaagggcggcatcgagaagctggagagcatcttcaaggagagaagcctgagcctgcacagagccaccagcagccacagcgtggccaaggagcccaaggcccccgccgcccccgccaacaccctggccatcgtgcccgacagcagaagacccagcagctgcatcgacatctacgtgagcgccatggacgagctgcactgcgacatcgaccccctggacaacagcgtgaacatcctgggcctgggcgagcccagcttcagcacccccgtgcccagcaccgcccccagcagcagcgcctacgccaccctggcccccaccgacagaccccccagcagaagcatcgacttcgaggacatcaccagcatggacaccagaagcttcagcagcgactacacccacctgcccgagtgccagaacccctgggacagcgagccccccatgtaccacaccatcgagagaagcaagagcagcagatacctggccaccacccccttcctgctggaggaggcccccatcgtgaagagccacagcttcatgttcagccccagcagaagctactacgccaacttcggcgtgcccgtgaagaccgccgagtacaccagcatcaccgactgcatcgacaccagatgcgtgaacgccccccaggccatcgccgacagagccgccttccccggcggcctgggcgacaaggtggaggacctgacctgctgccaccccgagagagaggccgagctgagccaccccagcagcgacagcgaggagaacgaggccaagggcagaagagccaccatcgccatcagcagccaggagggcgacaacagcgagagaaccctgagcaacaacatcaccgtgcccaagatcgagagagccaacagctacagcgccgaggagcccagcgccccctacgcccacaccagaaagagcttcagcatcagcgacaagctggacagacagagaaacaccgccagcctgagaaaccccttccagagaagcaagagcagcaagcccgagggcagaggcgacagcctgagcatgagaagactgagcagaaccagcgccttccagagcttcgagagcaagcacaactag

SEQ ID NO: 103017 - DNA, 4710 bp, synthetic construct; identical to SEQ ID NO: 103016
  misc_feature 1..4710: note = Description of Artificial Sequence: Synthetic coding sequence
  source 1..4710: mol_type = other DNA

SEQ ID NO: 103018 - DNA, 4701 bp, synthetic construct
  misc_feature 1..4701: note = Description of Artificial Sequence: Synthetic coding sequence
  source 1..4701: mol_type = other DNA
atgtacgtgagagtgagcttcgacaccaagcccgacctgctgctgcacctgatgaccaaggagtggcagctggagctgcccaagctgctgatcagcgtgcacggcggcctgcagaacttcgagctgcagcccaagctgaagcaggtgttcggcaagggcctgatcaaggccgccatgaccaccggcgcctggatcttcaccggcggcgtgaacaccggcgtgatcagacacgtgggcgacgccctgaaggaccacgccagcaagagcagaggcaagatctgcaccatcggcatcgccccctggggcatcgtggagaaccaggaggacctgatcggcagagacgtggtgagaccctaccagaccatgagcaaccccatgagcaagctgaccgtgctgaacagcatgcacagccacttcatcctggccgacaacggcaccaccggcaagtacggcgccgaggtgaagctgagaagacagctggagaagcacatcagcctgcagaagatcaacaccagaatcggccagggcgtgcccgtggtggccctgatcgtggagggcggccccaacgtgatcagcatcgtgctggagtacctgagagacaccccccccgtgcccgtggtggtgtgcgacggcagcggcagagccagcgacatcctggccttcggccacaagtacagcgaggagggcggcctgatcaacgagagcctgagagaccagctgctggtgaccatccagaagaccttcacctacaccagaacccaggcccagcacctgttcatcatcctgatggagtgcatgaagaagaaggagctgatcaccgtgttcagaatgggcagcgagggccaccaggacatcgacctggccatcctgaccgccctgctgaagggcgccaacgccagcgcccccgaccagctgagcctggccctggcctggaacagagtggacatcgccagaagccagatcttcatctacggccagcagtggcccgtgggcagcctggagcaggccatgctggacgccctggtgctggacagagtggacttcgtgaagctgctgatcgagaacggcgtgagcatgcacagattcctgaccatcagcagactggaggagctgtacaacaccagacacggccccagcaacaccctgtaccacctggtgagagacgtgaagaagagagagtaccccggcttcggctggatctacttcaagggcaacctgccccccgactacagaatcagcctgatcgacatcggcctggtgatcgagtacctgatgggcggcgcctacagatgcaactacaccagaaagagattcagaaccctgtaccacaacctgttcggccccaagagacccaaggccctgaagctgctgggcatggaggacgacatccccctgagaagaggcagaaagaccaccaagaagagagaggaggaggtggacatcgacctggacgaccccgagatcaaccacttccccttccccttccacgagctgatggtgtgggccgtgctgatgaagagacagaagatggccctgttcttctggcagcacggcgaggaggccatggccaaggccctggtggcctgcaagctgtgcaaggccatggcccacgaggccagcgagaacgacatggtggacgacatcagccaggagctgaaccacaacagcagagacttcggccagctggccgtggagctgctggaccagagctacaagcaggacgagcagctggccatgaagctgctgacctacgagctgaagaactggagcaacgccacctgcctgcagctggccgtggccgccaagcacagagacttcatcgcccacacctgcagccagatgctgctgaccgacatgtggatgggcagactgagaatgagaaagaacagcggcctgaaggtgatcctgggcatcctgctgccccccagcatcctgagcctggagttcaagaacaaggacgacatgccctacatgagccaggcccaggagatccacctgcaggagaaggaggccgaggagcccgagaagcccaccaaggagaaggaggaggaggacatggagctgaccgccatgctgggcagaaacaacggcgagagcagcagaaagaaggacgaggaggaggtgcagagcaagcacagactgatccccctgggcagaaagatctacgagttctacaacgcccccatcgtgaagttctggttctacaccctggcctacatcggctacctgatgctgttcaactacatcgtgctggtgaagatggagagatggcccagcacccaggagtggatcgtgatcagctacatcttcaccctgggcatcgagaagatgagagagatcctgatgagcgagcccggcaagctgctgcagaaggtgaaggtgtggctgcaggagtactggaacgtgaccgacctgatcgccatcctgctgttcagcgtgggcatgatcctgagactgcaggaccagcccttcagaagcgacggcagagtgatctactgcgtgaacatcatctactggtacatcagactgctggacatcttcggcgtgaacaagtacctgggcccctacgtgatgatgatcggcaagatgatgatcgacatgatgtacttcgtgatcatcatgctggtggtgctgatgagcttcggcgtggccagacaggccatcctgttccccaacgaggagcccagctggaagctggccaagaacatcttctacatgccctactggatgatctacggcgaggtgttcgccgaccagatcgaccccccctgcggccagaacgagaccagagaggacggcaagatcatccagctgcccccctgcaagaccggcgcctggatcgtgcccgccatcatggcctgctacctgctggtggccaacatcctgctggtgaacctgctgatcgccgtgttcaacaacaccttcttcgaggtgaagagcatcagcaaccaggtgtggaagttccagagataccagctgatcatgaccttccacgagagacccgtgctgcccccccccctgatcatcttcagccacatgaccatgatcttccagcacctgtgctgcagatggagaaagcacgagagcgaccccgacgagagagactacggcctgaagctgttcatcaccgacgacgagctgaagaaggtgcacgacttcgaggagcagtgcatcgaggagtacttcagagagaaggacgacagattcaacagcagcaacgacgagagaatcagagtgaccagcgagagagtggagaacatgagcatgagactggaggaggtgaacgagagagagcacagcatgaaggccagcctgcagaccgtggacatcagactggcccagctggaggacctgatcggcagaatggccaccgccctggagagactgaccggcctggagagagccgagagcaacaagatcagaagcagaaccagcagcgactgcaccgacgccgcctacatcgtgagacagagcagcttcaacagccaggagggcaacaccttcaagctgcaggagagcatcgaccccgccggcgaggagaccatgagccccaccagccccaccctgatgcccagaatgagaagccacagcttctacagcgtgaacatgaaggacaagggcggcatcgagaagctggagagcatcttcaaggagagaagcctgagcctgcacagagccaccagcagccacagcgtggccaaggagcccaaggcccccgccgcccccgccaacaccctggccatcgtgcccgacagcagaagacccagcagctgcatcgacatctacgtgagcgccatggacgagctgcactgcgacatcgaccccctggacaacagcgtgaacatcctgggcctgggcgagcccagcttcagcacccccgtgcccagcaccgcccccagcagcagcgcctacgccaccctggcccccaccgacagaccccccagcagaagcatcgacttcgaggacatcaccagcatggacaccagaagcttcagcagcgactacacccacctgcccgagtgccagaacccctgggacagcgagccccccatgtaccacaccatcgagagaagcaagagcagcagatacctggccaccacccccttcctgctggaggaggcccccatcgtgaagagccacagcttcatgttcagccccagcagaagctactacgccaacttcggcgtgcccgtgaagaccgccgagtacaccagcatcaccgactgcatcgacaccagatgcgtgaacgccccccaggccatcgccgacagagccgccttccccggcggcctgggcgacaaggtggaggacctgacctgctgccaccccgagagagaggccgagctgagccaccccagcagcgacagcgaggagaacgaggccaagggcagaagagccaccatcgccatcagcagccaggagggcgacaacagcgagagaaccctgagcaacaacatcaccgtgcccaagatcgagagagccaacagctacagcgccgaggagcccagcgccccctacgcccacaccagaaagagcttcagcatcagcgacaagctggacagacagagaaacaccgccagcctgagaaaccccttccagagaagcaagagcagcaagcccgagggcagaggcgacagcctgagcatgagaagactgagcagaaccagcgccttccagagcttcgagagcaagcacaactag

SEQ ID NO: 103019 - DNA, 4740 bp, synthetic construct
  misc_feature 1..4740: note = Description of Artificial Sequence: Synthetic coding sequence
  source 1..4740: mol_type = other DNA
atgtacgtgagagtgagcttcgacaccaagcccgacctgctgctgcacctgatgaccaaggagtggcagctggagctgcccaagctgctgatcagcgtgcacggcggcctgcagaacttcgagctgcagcccaagctgaagcaggtgttcggcaagggcctgatcaaggccgccatgaccaccggcgcctggatcttcaccggcggcgtgaacaccggcgtgatcagacacgtgggcgacgccctgaaggaccacgccagcaagagcagaggcaagatctgcaccatcggcatcgccccctggggcatcgtggagaaccaggaggacctgatcggcagagacgtggtgagaccctaccagaccatgagcaaccccatgagcaagctgaccgtgctgaacagcatgcacagccacttcatcctggccgacaacggcaccaccggcaagtacggcgccgaggtgaagctgagaagacagctggagaagcacatcagcctgcagaagatcaacaccagatgcctgcccttcttcagcctggacagcagactgttctacagcttctggggcagctgccagctggacagcgtgggcatcggccagggcgtgcccgtggtggccctgatcgtggagggcggccccaacgtgatcagcatcgtgctggagtacctgagagacaccccccccgtgcccgtggtggtgtgcgacggcagcggcagagccagcgacatcctggccttcggccacaagtacagcgaggagggcggcctgatcaacgagagcctgagagaccagctgctggtgaccatccagaagaccttcacctacaccagaacccaggcccagcacctgttcatcatcctgatggagtgcatgaagaagaaggagctgatcaccgtgttcagaatgggcagcgagggccaccaggacatcgacctggccatcctgaccgccctgctgaagggcgccaacgccagcgcccccgaccagctgagcctggccctggcctggaacagagtggacatcgccagaagccagatcttcatctacggccagcagtggcccgtgggcagcctggagcaggccatgctggacgccctggtgctggacagagtggacttcgtgaagctgctgatcgagaacggcgtgagcatgcacagattcctgaccatcagcagactggaggagctgtacaacaccagacacggccccagcaacaccctgtaccacctggtgagagacgtgaagaagggcaacctgccccccgactacagaatcagcctgatcgacatcggcctggtgatcgagtacctgatgggcggcgcctacagatgcaactacaccagaaagagattcagaaccctgtaccacaacctgttcggccccaagagacccaaggccctgaagctgctgggcatggaggacgacatccccctgagaagaggcagaaagaccaccaagaagagagaggaggaggtggacatcgacctggacgaccccgagatcaaccacttccccttccccttccacgagctgatggtgtgggccgtgctgatgaagagacagaagatggccctgttcttctggcagcacggcgaggaggccatggccaaggccctggtggcctgcaagctgtgcaaggccatggcccacgaggccagcgagaacgacatggtggacgacatcagccaggagctgaaccacaacagcagagacttcggccagctggccgtggagctgctggaccagagctacaagcaggacgagcagctggccatgaagctgctgacctacgagctgaagaactggagcaacgccacctgcctgcagctggccgtggccgccaagcacagagacttcatcgcccacacctgcagccagatgctgctgaccgacatgtggatgggcagactgagaatgagaaagaacagcggcctgaaggtgatcctgggcatcctgctgccccccagcatcctgagcctggagttcaagaacaaggacgacatgccctacatgagccaggcccaggagatccacctgcaggagaaggaggccgaggagcccgagaagcccaccaaggagaaggaggaggaggacatggagctgaccgccatgctgggcagaaacaacggcgagagcagcagaaagaaggacgaggaggaggtgcagagcaagcacagactgatccccctgggcagaaagatctacgagttctacaacgcccccatcgtgaagttctggttctacaccctggcctacatcggctacctgatgctgttcaactacatcgtgctggtgaagatggagagatggcccagcacccaggagtggatcgtgatcagctacatcttcaccctgggcatcgagaagatgagagagatcctgatgagcgagcccggcaagctgctgcagaaggtgaaggtgtggctgcaggagtactggaacgtgaccgacctgatcgccatcctgctgttcagcgtgggcatgatcctgagactgcaggaccagcccttcagaagcgacggcagagtgatctactgcgtgaacatcatctactggtacatcagactgctggacatcttcggcgtgaacaagtacctgggcccctacgtgatgatgatcggcaagatgatgatcgacatgatgtacttcgtgatcatcatgctggtggtgctgatgagcttcggcgtggccagacaggccatcctgttccccaacgaggagcccagctggaagctggccaagaacatcttctacatgccctactggatgatctacggcgaggtgttcgccgaccagatcgaccccccctgcggccagaacgagaccagagaggacggcaagatcatccagctgcccccctgcaagaccggcgcctggatcgtgcccgccatcatggcctgctacctgctggtggccaacatcctgctggtgaacctgctgatcgccgtgttcaacaacaccttcttcgaggtgaagagcatcagcaaccaggtgtggaagttccagagataccagctgatcatgaccttccacgagagacccgtgctgcccccccccctgatcatcttcagccacatgaccatgatcttccagcacctgtgctgcagatggagaaagcacgagagcgaccccgacgagagagactacggcctgaagctgttcatcaccgacgacgagctgaagaaggtgcacgacttcgaggagcagtgcatcgaggagtacttcagagagaaggacgacagattcaacagcagcaacgacgagagaatcagagtgaccagcgagagagtggagaacatgagcatgagactggaggaggtgaacgagagagagcacagcatgaaggccagcctgcagaccgtggacatcagactggcccagctggaggacctgatcggcagaatggccaccgccctggagagactgaccggcctggagagagccgagagcaacaagatcagaagcagaaccagcagcgactgcaccgacgccgcctacatcgtgagacagagcagcttcaacagccaggagggcaacaccttcaagctgcaggagagcatcgaccccgccggcgaggagaccatgagccccaccagccccaccctgatgcccagaatgagaagccacagcttctacagcgtgaacatgaaggacaagggcggcatcgagaagctggagagcatcttcaaggagagaagcctgagcctgcacagagccaccagcagccacagcgtggccaaggagcccaaggcccccgccgcccccgccaacaccctggccatcgtgcccgacagcagaagacccagcagctgcatcgacatctacgtgagcgccatggacgagctgcactgcgacatcgaccccctggacaacagcgtgaacatcctgggcctgggcgagcccagcttcagcacccccgtgcccagcaccgcccccagcagcagcgcctacgccaccctggcccccaccgacagaccccccagcagaagcatcgacttcgaggacatcaccagcatggacaccagaagcttcagcagcgactacacccacctgcccgagtgccagaacccctgggacagcgagccccccatgtaccacaccatcgagagaagcaagagcagcagatacctggccaccacccccttcctgctggaggaggcccccatcgtgaagagccacagcttcatgttcagccccagcagaagctactacgccaacttcggcgtgcccgtgaagaccgccgagtacaccagcatcaccgactgcatcgacaccagatgcgtgaacgccccccaggccatcgccgacagagccgccttccccggcggcctgggcgacaaggtggaggacctgacctgctgccaccccgagagagaggccgagctgagccaccccagcagcgacagcgaggagaacgaggccaagggcagaagagccaccatcgccatcagcagccaggagggcgacaacagcgagagaaccctgagcaacaacatcaccgtgcccaagatcgagagagccaacagctacagcgccgaggagcccagcgccccctacgcccacaccagaaagagcttcagcatcagcgacaagctggacagacagagaaacaccgccagcctgagaaaccccttccagagaagcaagagcagcaagcccgagggcagaggcgacagcctgagcatgagaagactgagcagaaccagcgccttccagagcttcgagagcaagcacaactag

SEQ ID NO: 103020 - DNA, 5124 bp, synthetic construct
  misc_feature 1..5124: note = Description of Artificial Sequence: Synthetic coding sequence
  source 1..5124: mol_type = other DNA
atgcccgagccctggggcaccgtgtacttcctgggcatcgcccaggtgttcagcttcctgttcagctggtggaacctggagggcgtgatgaaccaggccgacgcccccagacccctgaactggaccatcagaaagctgtgccacgccgccttcctgcccagcgtgagactgctgaaggcccagaagagctggatcgagagagccttctacaagagagagtgcgtgcacatcatccccagcaccaaggacccccacagatgctgctgcggcagactgatcggccagcacgtgggcctgacccccagcatcagcgtgctgcagaacgagaagaacgagagcagactgagcagaaacgacatccagagcgagaagtggagcatcagcaagcacacccagctgagccccaccgacgccttcggcaccatcgagttccagggcggcggccacagcaacaaggccatgtacgtgagagtgagcttcgacaccaagcccgacctgctgctgcacctgatgaccaaggagtggcagctggagctgcccaagctgctgatcagcgtgcacggcggcctgcagaacttcgagctgcagcccaagctgaagcaggtgttcggcaagggcctgatcaaggccgccatgaccaccggcgcctggatcttcaccggcggcgtgaacaccggcgtgatcagacacgtgggcgacgccctgaaggaccacgccagcaagagcagaggcaagatctgcaccatcggcatcgccccctggggcatcgtggagaaccaggaggacctgatcggcagagacgtggtgagaccctaccagaccatgagcaaccccatgagcaagctgaccgtgctgaacagcatgcacagccacttcatcctggccgacaacggcaccaccggcaagtacggcgccgaggtgaagctgagaagacagctggagaagcacatcagcctgcagaagatcaacaccagaatcggccagggcgtgcccgtggtggccctgatcgtggagggcggccccaacgtgatcagcatcgtgctggagtacctgagagacaccccccccgtgcccgtggtggtgtgcgacggcagcggcagagccagcgacatcctggccttcggccacaagtacagcgaggagggcggcctgatcaacgagagcctgagagaccagctgctggtgaccatccagaagaccttcacctacaccagaacccaggcccagcacctgttcatcatcctgatggagtgcatgaagaagaaggagctgatcaccgtgttcagaatgggcagcgagggccaccaggacatcgacctggccatcctgaccgccctgctgaagggcgccaacgccagcgcccccgaccagctgagcctggccctggcctggaacagagtggacatcgccagaagccagatcttcatctacggccagcagtggcccgtgggcagcctggagcaggccatgctggacgccctggtgctggacagagtggacttcgtgaagctgctgatcgagaacggcgtgagcatgcacagattcctgaccatcagcagactggaggagctgtacaacaccagacacggccccagcaacaccctgtaccacctggtgagagacgtgaagaagggcaacctgccccccgactacagaatcagcctgatcgacatcggcctggtgatcgagtacctgatgggcggcgcctacagatgcaactacaccagaaagagattcagaaccctgtaccacaacctgttcggccccaagagacccaaggccctgaagctgctgggcatggaggacgacatccccctgagaagaggcagaaagaccaccaagaagagagaggaggaggtggacatcgacctggacgaccccgagatcaaccacttccccttccccttccacgagctgatggtgtgggccgtgctgatgaagagacagaagatggccctgttcttctggcagcacggcgaggaggccatggccaaggccctggtggcctgcaagctgtgcaaggccatggcccacgaggccagcgagaacgacatggtggacgacatcagccaggagctgaaccacaacagcagagacttcggccagctggccgtggagctgctggaccagagctacaagcaggacgagcagctggccatgaagctgctgacctacgagctgaagaactggagcaacgccacctgcctgcagctggccgtggccgccaagcacagagacttcatcgcccacacctgcagccagatgctgctgaccgacatgtggatgggcagactgagaatgagaaagaacagcggcctgaaggtgatcctgggcatcctgctgccccccagcatcctgagcctggagttcaagaacaaggacgacatgccctacatgagccaggcccaggagatccacctgcaggagaaggaggccgaggagcccgagaagcccaccaaggagaaggaggaggaggacatggagctgaccgccatgctgggcagaaacaacggcgagagcagcagaaagaaggacgaggaggaggtgcagagcaagcacagactgatccccctgggcagaaagatctacgagttctacaacgcccccatcgtgaagttctggttctacaccctggcctacatcggctacctgatgctgttcaactacatcgtgctggtgaagatggagagatggcccagcacccaggagtggatcgtgatcagctacatcttcaccctgggcatcgagaagatgagagagatcctgatgagcgagcccggcaagctgctgcagaaggtgaaggtgtggctgcaggagtactggaacgtgaccgacctgatcgccatcctgctgttcagcgtgggcatgatcctgagactgcaggaccagcccttcagaagcgacggcagagtgatctactgcgtgaacatcatctactggtacatcagactgctggacatcttcggcgtgaacaagtacctgggcccctacgtgatgatgatcggcaagatgatgatcgacatgatgtacttcgtgatcatcatgctggtggtgctgatgagcttcggcgtggccagacaggccatcctgttccccaacgaggagcccagctggaagctggccaagaacatcttctacatgccctactggatgatctacggcgaggtgttcgccgaccagatcgaccccccctgcggccagaacgagaccagagaggacggcaagatcatccagctgcccccctgcaagaccggcgcctggatcgtgcccgccatcatggcctgctacctgctggtggccaacatcctgctggtgaacctgctgatcgccgtgttcaacaacaccttcttcgaggtgaagagcatcagcaaccaggtgtggaagttccagagataccagctgatcatgaccttccacgagagacccgtgctgcccccccccctgatcatcttcagccacatgaccatgatcttccagcacctgtgctgcagatggagaaagcacgagagcgaccccgacgagagagactacggcctgaagctgttcatcaccgacgacgagctgaagaaggtgcacgacttcgaggagcagtgcatcgaggagtacttcagagagaaggacgacagattcaacagcagcaacgacgagagaatcagagtgaccagcgagagagtggagaacatgagcatgagactggaggaggtgaacgagagagagcacagcatgaaggccagcctgcagaccgtggacatcagactggcccagctggaggacctgatcggcagaatggccaccgccctggagagactgaccggcctggagagagccgagagcaacaagatcagaagcagaaccagcagcgactgcaccgacgccgcctacatcgtgagacagagcagcttcaacagccaggagggcaacaccttcaagctgcaggagagcatcgaccccgccggcgaggagaccatgagccccaccagccccaccctgatgcccagaatgagaagccacagcttctacagcgtgaacatgaaggacaagggcggcatcgagaagctggagagcatcttcaaggagagaagcctgagcctgcacagagccaccagcagccacagcgtggccaaggagcccaaggcccccgccgcccccgccaacaccctggccatcgtgcccgacagcagaagacccagcagctgcatcgacatctacgtgagcgccatggacgagctgcactgcgacatcgaccccctggacaacagcgtgaacatcctgggcctgggcgagcccagcttcagcacccccgtgcccagcaccgcccccagcagcagcgcctacgccaccctggcccccaccgacagaccccccagcagaagcatcgacttcgaggacatcaccagcatggacaccagaagcttcagcagcgactacacccacctgcccgagtgccagaacccctgggacagcgagccccccatgtaccacaccatcgagagaagcaagagcagcagatacctggccaccacccccttcctgctggaggaggcccccatcgtgaagagccacagcttcatgttcagccccagcagaagctactacgccaacttcggcgtgcccgtgaagaccgccgagtacaccagcatcaccgactgcatcgacaccagatgcgtgaacgccccccaggccatcgccgacagagccgccttccccggcggcctgggcgacaaggtggaggacctgacctgctgccaccccgagagagaggccgagctgagccaccccagcagcgacagcgaggagaacgaggccaagggcagaagagccaccatcgccatcagcagccaggagggcgacaacagcgagagaaccctgagcaacaacatcaccgtgcccaagatcgagagagccaacagctacagcgccgaggagcccagcgccccctacgcccacaccagaaagagcttcagcatcagcgacaagctggacagacagagaaacaccgccagcctgagaaaccccttccagagaagcaagagcagcaagcccgagggcagaggcgacagcctgagcatgagaagactgagcagaaccagcgccttccagagcttcgagagcaagcacaactag

SEQ ID NO: 103021 - DNA, 3978 bp, synthetic construct
  misc_feature 1..3978: note = Description of Artificial Sequence: Synthetic coding sequence
  source 1..3978: mol_type = other DNA
atgcccgagccctggggcaccgtgtacttcctgggcatcgcccaggtgttcagcttcctgttcagctggtggaacctggagggcgtgatgaaccaggccgacgcccccagacccctgaactggaccatcagaaagctgtgccacgccgccttcctgcccagcgtgagactgctgaaggcccagaagagctggatcgagagagccttctacaagagagagtgcgtgcacatcatccccagcaccaaggacccccacagatgctgctgcggcagactgatcggccagcacgtgggcctgacccccagcatcagcgtgctgcagaacgagaagaacgagagcagactgagcagaaacgacatccagagcgagaagtggagcatcagcaagcacacccagctgagccccaccgacgccttcggcaccatcgagttccagggcggcggccacagcaacaaggccatgtacgtgagagtgagcttcgacaccaagcccgacctgctgctgcacctgatgaccaaggagtggcagctggagctgcccaagctgctgatcagcgtgcacggcggcctgcagaacttcgagctgcagcccaagctgaagcaggtgttcggcaagggcctgatcaaggccgccatgaccaccggcgcctggatcttcaccggcggcgtgaacaccggcgtgatcagacacgtgggcgacgccctgaaggaccacgccagcaagagcagaggcaagatctgcaccatcggcatcgccccctggggcatcgtggagaaccaggaggacctgatcggcagagacgtggtgagaccctaccagaccatgagcaaccccatgagcaagctgaccgtgctgaacagcatgcacagccacttcatcctggccgacaacggcaccaccggcaagtacggcgccgaggtgaagctgagaagacagctggagaagcacatcagcctgcagaagatcaacaccagaatcggccagggcgtgcccgtggtggccctgatcgtggagggcggccccaacgtgatcagcatcgtgctggagtacctgagagacaccccccccgtgcccgtggtggtgtgcgacggcagcggcagagccagcgacatcctggccttcggccacaagtacagcgaggagggcggcctgatcaacgagagcctgagagaccagctgctggtgaccatccagaagaccttcacctacaccagaacccaggcccagcacctgttcatcatcctgatggagtgcatgaagaagaaggagctgatcaccgtgttcagaatgggcagcgagggccaccaggacatcgacctggccatcctgaccgccctgctgaagggcgccaacgccagcgcccccgaccagctgagcctggccctggcctggaacagagtggacatcgccagaagccagatcttcatctacggccagcagtggcccgtgggcagcctggagcaggccatgctggacgccctggtgctggacagagtggacttcgtgaagctgctgatcgagaacggcgtgagcatgcacagattcctgaccatcagcagactggaggagctgtacaacaccagacacggccccagcaacaccctgtaccacctggtgagagacgtgaagaagggcaacctgccccccgactacagaatcagcctgatcgacatcggcctggtgatcgagtacctgatgggcggcgcctacagatgcaactacaccagaaagagattcagaaccctgtaccacaacctgttcggccccaagagacccaaggccctgaagctgctgggcatggaggacgacatccccctgagaagaggcagaaagaccaccaagaagagagaggaggaggtggacatcgacctggacgaccccgagatcaaccacttccccttccccttccacgagctgatggtgtgggccgtgctgatgaagagacagaagatggccctgttcttctggcagcacggcgaggaggccatggccaaggccctggtggcctgcaagctgtgcaaggccatggcccacgaggccagcgagaacgacatggtggacgacatcagccaggagctgaaccacaacagcagagacttcggccagctggccgtggagctgctggaccagagctacaagcaggacgagcagctggccatgaagctgctgacctacgagctgaagaactggagcaacgccacctgcctgcagctggccgtggccgccaagcacagagacttcatcgcccacacctgcagccagatgctgctgaccgacatgtggatgggcagactgagaatgagaaagaacagcggcctgaaggtgatcctgggcatcctgctgccccccagcatcctgagcctggagttcaagaacaaggacgacatgccctacatgagccaggcccaggagatccacctgcaggagaaggaggccgaggagcccgagaagcccaccaaggagaaggaggaggaggacatggagctgaccgccatgctgggcagaaacaacggcgagagcagcagaaagaaggacgaggaggaggtgcagagcaagcacagactgatccccctgggcagaaagatctacgagttctacaacgcccccatcgtgaagttctggttctacaccctggcctacatcggctacctgatgctgttcaactacatcgtgctggtgaagatggagagatggcccagcacccaggagtggatcgtgatcagctacatcttcaccctgggcatcgagaagatgagagagatcctgatgagcgagcccggcaagctgctgcagaaggtgaaggtgtggctgcaggagtactggaacgtgaccgacctgatcgccatcctgctgttcagcgtgggcatgatcctgagactgcaggaccagcccttcagaagcgacggcagagtgatctactgcgtgaacatcatctactggtacatcagactgctggacatcttcggcgtgaacaagtacctgggcccctacgtgatgatgatcggcaagatgatgatcgacatgatgtacttcgtgatcatcatgctggtggtgctgatgagcttcggcgtggccagacaggccatcctgttccccaacgaggagcccagctggaagctggccaagaacatcttctacatgccctactggatgatctacggcgaggtgttcgccgaccagatcgaccccccctgcggccagaacgagaccagagaggacggcaagatcatccagctgcccccctgcaagaccggcgcctggatcgtgcccgccatcatggcctgctacctgctggtggccaacatcctgctggtgaacctgctgatcgccgtgttcaacaacaccttcttcgaggtgaagagcatcagcaaccaggtgtggaagttccagagataccagctgatcatgaccttccacgagagacccgtgctgcccccccccctgatcatcttcagccacatgaccatgatcttccagcacctgtgctgcagatggagaaagcacgagagcgaccccgacgagagagactacggcctgaagctgttcatcaccgacgacgagctgaagaaggtgcacgacttcgaggagcagtgcatcgaggagtacttcagagagaaggacgacagattcaacagcagcaacgacgagagaatcagagtgaccagcgagagagtggagaacatgagcatgagactggaggaggtgaacgagagagagcacagcatgaaggccagcctgcagaccgtggacatcagactggcccagctggaggacctgatcggcagaatggccaccgccctggagagactgaccggcctggagagagccgagagcaacaagatcagaagcagaaccagcagcgactgcaccgacgccgcctacatcgtgagacagagcagcttcaacagccaggagggcaacaccttcaagctgcaggagagcatcgaccccgccgagcaccccctgtacagcgtgtag

SEQ ID NO: 103022 - DNA, 4671 bp, synthetic construct
  misc_feature 1..4671: note = Description of Artificial Sequence: Synthetic coding sequence
  source 1..4671: mol_type = other DNA
tgatacgtgagagtgagcttcgacaccaagcccgacctgctgctgcacctgatgaccaaggagtggcagctggagctgcccaagctgctgatcagcgtgcacggcggcctgcagaacttcgagctgcagcccaagctgaagcaggtgttcggcaagggcctgatcaaggccgccatgaccaccggcgcctggatcttcaccggcggcgtgaacaccggcgtgatcagacacgtgggcgacgccctgaaggaccacgccagcaagagcagaggcaagatctgcaccatcggcatcgccccctggggcatcgtggagaaccaggaggacctgatcggcagagacgtggtgagaccctaccagaccatgagcaaccccatgagcaagctgaccgtgctgaacagcatgcacagccacttcatcctggccgacaacggcaccaccggcaagtacggcgccgaggtgaagctgagaagacagctggagaagcacatcagcctgcagaagatcaacaccagaatcggccagggcgtgcccgtggtggccctgatcgtggagggcggccccaacgtgatcagcatcgtgctggagtacctgagagacaccccccccgtgcccgtggtggtgtgcgacggcagcggcagagccagcgacatcctggccttcggccacaagtacagcgaggagggcggcctgatcaacgagagcctgagagaccagctgctggtgaccatccagaagaccttcacctacaccagaacccaggcccagcacctgttcatcatcctgatggagtgcatgaagaagaaggagctgatcaccgtgttcagaatgggcagcgagggccaccaggacatcgacctggccatcctgaccgccctgctgaagggcgccaacgccagcgcccccgaccagctgagcctggccctggcctggaacagagtggacatcgccagaagccagatcttcatctacggccagcagtggcccgtgggcagcctggagcaggccatgctggacgccctggtgctggacagagtggacttcgtgaagctgctgatcgagaacggcgtgagcatgcacagattcctgaccatcagcagactggaggagctgtacaacaccagacacggccccagcaacaccctgtaccacctggtgagagacgtgaagaagagagagtaccccggcttcggctggatctacttcaagggcaacctgccccccgactacagaatcagcctgatcgacatcggcctggtgatcgagtacctgatgggcggcgcctacagatgcaactacaccagaaagagattcagaaccctgtaccacaacctgttcggccccaagagagacgacatccccctgagaagaggcagaaagaccaccaagaagagagaggaggaggtggacatcgacctggacgaccccgagatcaaccacttccccttccccttccacgagctgatggtgtgggccgtgctgatgaagagacagaagatggccctgttcttctggcagcacggcgaggaggccatggccaaggccctggtggcctgcaagctgtgcaaggccatggcccacgaggccagcgagaacgacatggtggacgacatcagccaggagctgaaccacaacagcagagacttcggccagctggccgtggagctgctggaccagagctacaagcaggacgagcagctggccatgaagctgctgacctacgagctgaagaactggagcaacgccacctgcctgcagctggccgtggccgccaagcacagagacttcatcgcccacacctgcagccagatgctgctgaccgacatgtggatgggcagactgagaatgagaaagaacagcggcctgaaggtgatcctgggcatcctgctgccccccagcatcctgagcctggagttcaagaacaaggacgacatgccctacatgagccaggcccaggagatccacctgcaggagaaggaggccgaggagcccgagaagcccaccaaggagaaggaggaggaggacatggagctgaccgccatgctgggcagaaacaacggcgagagcagcagaaagaaggacgaggaggaggtgcagagcaagcacagactgatccccctgggcagaaagatctacgagttctacaacgcccccatcgtgaagttctggttctacaccctggcctacatcggctacctgatgctgttcaactacatcgtgctggtgaagatggagagatggcccagcacccaggagtggatcgtgatcagctacatcttcaccctgggcatcgagaagatgagagagatcctgatgagcgagcccggcaagctgctgcagaaggtgaaggtgtggctgcaggagtactggaacgtgaccgacctgatcgccatcctgctgttcagcgtgggcatgatcctgagactgcaggaccagcccttcagaagcgacggcagagtgatctactgcgtgaacatcatctactggtacatcagactgctggacatcttcggcgtgaacaagtacctgggcccctacgtgatgatgatcggcaagatgatgatcgacatgatgtacttcgtgatcatcatgctggtggtgctgatgagcttcggcgtggccagacaggccatcctgttccccaacgaggagcccagctggaagctggccaagaacatcttctacatgccctactggatgatctacggcgaggtgttcgccgaccagatcgaccccccctgcggccagaacgagaccagagaggacggcaagatcatccagctgcccccctgcaagaccggcgcctggatcgtgcccgccatcatggcctgctacctgctggtggccaacatcctgctggtgaacctgctgatcgccgtgttcaacaacaccttcttcgaggtgaagagcatcagcaaccaggtgtggaagttccagagataccagctgatcatgaccttccacgagagacccgtgctgcccccccccctgatcatcttcagccacatgaccatgatcttccagcacctgtgctgcagatggagaaagcacgagagcgaccccgacgagagagactacggcctgaagctgttcatcaccgacgacgagctgaagaaggtgcacgacttcgaggagcagtgcatcgaggagtacttcagagagaaggacgacagattcaacagcagcaacgacgagagaatcagagtgaccagcgagagagtggagaacatgagcatgagactggaggaggtgaacgagagagagcacagcatgaaggccagcctgcagaccgtggacatcagactggcccagctggaggacctgatcggcagaatggccaccgccctggagagactgaccggcctggagagagccgagagcaacaagatcagaagcagaaccagcagcgactgcaccgacgccgcctacatcgtgagacagagcagcttcaacagccaggagggcaacaccttcaagctgcaggagagcatcgaccccgccggcgaggagaccatgagccccaccagccccaccctgatgcccagaatgagaagccacagcttctacagcgtgaacatgaaggacaagggcggcatcgagaagctggagagcatcttcaaggagagaagcctgagcctgcacagagccaccagcagccacagcgtggccaaggagcccaaggcccccgccgcccccgccaacaccctggccatcgtgcccgacagcagaagacccagcagctgcatcgacatctacgtgagcgccatggacgagctgcactgcgacatcgaccccctggacaacagcgtgaacatcctgggcctgggcgagcccagcttcagcacccccgtgcccagcaccgcccccagcagcagcgcctacgccaccctggcccccaccgacagaccccccagcagaagcatcgacttcgaggacatcaccagcatggacaccagaagcttcagcagcgactacacccacctgcccgagtgccagaacccctgggacagcgagccccccatgtaccacaccatcgagagaagcaagagcagcagatacctggccaccacccccttcctgctggaggaggcccccatcgtgaagagccacagcttcatgttcagccccagcagaagctactacgccaacttcggcgtgcccgtgaagaccgccgagtacaccagcatcaccgactgcatcgacaccagatgcgtgaacgccccccaggccatcgccgacagagccgccttccccggcggcctgggcgacaaggtggaggacctgacctgctgccaccccgagagagaggccgagctgagccaccccagcagcgacagcgaggagaacgaggccaagggcagaagagccaccatcgccatcagcagccaggagggcgacaacagcgagagaaccctgagcaacaacatcaccgtgcccaagatcgagagagccaacagctacagcgccgaggagcccagcgccccctacgcccacaccagaaagagcttcagcatcagcgacaagctggacagacagagaaacaccgccagcctgagaaaccccttccagagaagcaagagcagcaagcccgagggcagaggcgacagcctgagcatgagaagactgagcagaaccagcgccttccagagcttcgagagcaagcacaactag

SEQ ID NO: 103023 - DNA, 4701 bp, synthetic construct
  misc_feature 1..4701: note = Description of Artificial Sequence: Synthetic coding sequence
  source 1..4701: mol_type = other DNA
atgtacgtgagagtgagcttcgacaccaagcccgacctgctgctgcacctgatgaccaaggagtggcagctggagctgcccaagctgctgatcagcgtgcacggcggcctgcagaacttcgagctgcagcccaagctgaagcaggtgttcggcaagggcctgatcaaggccgccatgaccaccggcgcctggatcttcaccggcggcgtgaacaccggcgtgatcagacacgtgggcgacgccctgaaggaccacgccagcaagagcagaggcaagatctgcaccatcggcatcgccccctggggcatcgtggagaaccaggaggacctgatcggcagagacgtggtgagaccctaccagaccatgagcaaccccatgagcaagctgaccgtgctgaacagcatgcacagccacttcatcctggccgacaacggcaccaccggcaagtacggcgccgaggtgaagctgagaagacagctggagaagcacatcagcctgcagaagatcaacaccagaatcggccagggcgtgcccgtggtggccctgatcgtggagggcggccccaacgtgatcagcatcgtgctggagtacctgagagacaccccccccgtgcccgtggtggtgtgcgacggcagcggcagagccagcgacatcctggccttcggccacaagtacagcgaggagggcggcctgatcaacgagagcctgagagaccagctgctggtgaccatccagaagaccttcacctacaccagaacccaggcccagcacctgttcatcatcctgatggagtgcatgaagaagaaggagctgatcaccgtgttcagaatgggcagcgagggccaccaggacatcgacctggccatcctgaccgccctgctgaagggcgccaacgccagcgcccccgaccagctgagcctggccctggcctggaacagagtggacatcgccagaagccagatcttcatctacggccagcagtggcccgtgggcagcctggagcaggccatgctggacgccctggtgctggacagagtggacttcgtgaagctgctgatcgagaacggcgtgagcatgcacagattcctgaccatcagcagactggaggagctgtacaacaccagacacggccccagcaacaccctgtaccacctggtgagagacgtgaagaagggcaacctgccccccgactacagaatcagcctgatcgacatcggcctggtgatcgagtacctgatgggcggcgcctacagatgcaactacaccagaaagagattcagaaccctgtaccacaacctgttcggccccaagagacccaaggccctgaagctgctgggcatggaggacgacatccccctgagaagaggcagaaagaccaccaagaagagagaggaggaggtggacatcgacctggacgaccccgagatcaaccacttccccttccccttccacgagctgatggtgtgggccgtgctgatgaagagacagaagatggccctgttcttctggcagcacggcgaggaggccatggccaaggccctggtggcctgcaagctgtgcaaggccatggcccacgaggccagcgagaacgacatggtggacgacatcagccaggagctgaaccacaacagcagagacttcggccagctggccgtggagctgctggaccagagctacaagcaggacgagcagctggccatgaagctgctgacctacgagctgaagaactggagcaacgccacctgcctgcagctggccgtggccgccaagcacagagacttcatcgcccacacctgcagccagatgctgctgaccgacatgtggatgggcagactgagaatgagaaagaacagcggcctgaaggtgatcctgggcatcctgctgccccccagcatcctgagcctggagttcaagaacaaggacgacatgccctacatgagccaggcccaggagatccacctgcaggagaaggaggccgaggagcccgagaagcccaccaaggagaaggaggaggaggacatggagctgaccgccatgctgggcagaaacaacggcgagagcagcagaaagaaggacgaggaggaggtgcagagcaagcacagactgatccccctgggcagaaagatctacgagttctacaacgcccccatcgtgaagttctggttctacaccctggcctacatcggctacctgatgctgttcaactacatcgtgctggtgaagatggagagatggcccagcacccaggagtggatcgtgatcagctacatcttcaccctgggcatcgagaagatgagagagatcctgatgagcgagcccggcaagctgctgcagaaggtgaaggtgtggctgcaggagtactggaacgtgaccgacctgatcgccatcctgctgttcagcgtgggcatgatcctgagactgcaggaccagcccttcagaagcgacggcagagtgatctactgcgtgaacatcatctactggtacatcagactgctggacatcttcggcgtgaacaagtacctgggcccctacgtgatgatgatcggcaagatgatgatcgacatgatgtacttcgtgatcatcatgctggtggtgctgatgagcttcggcgtggccagacaggccatcctgttccccaacgaggagcccagctggaagctggccaagaacatcttctacatgccctactggatgatctacggcgaggtgttcgccgaccagatcgacagaaagcaggtgtacgacagccacacccccaagagcgccccctgcggccagaacgagaccagagaggacggcaagatcatccagctgcccccctgcaagaccggcgcctggatcgtgcccgccatcatggcctgctacctgctggtggccaacatcctgctggtgaacctgctgatcgccgtgttcaacaacaccttcttcgaggtgaagagcatcagcaaccaggtgtggaagttccagagataccagctgatcatgaccttccacgagagacccgtgctgcccccccccctgatcatcttcagccacatgaccatgatcttccagcacctgtgctgcagatggagaaagcacgagagcgaccccgacgagagagactacggcctgaagctgttcatcaccgacgacgagctgaagaaggtgcacgacttcgaggagcagtgcatcgaggagtacttcagagagaaggacgacagattcaacagcagcaacgacgagagaatcagagtgaccagcgagagagtggagaacatgagcatgagactggaggaggtgaacgagagagagcacagcatgaaggccagcctgcagaccgtggacatcagactggcccagctggaggacctgatcggcagaatggccaccgccctggagagactgaccggcctggagagagccgagagcaacaagatcagaagcagaaccagcagcgactgcaccgacgccgcctacatcgtgagacagagcagcttcaacagccaggagggcaacaccttcaagctgcaggagagcatcgaccccgccggcgaggagaccatgagccccaccagccccaccctgatgcccagaatgagaagccacagcttctacagcgtgaacatgaaggacaagggcggcatcgagaagctggagagcatcttcaaggagagaagcctgagcctgcacagagccaccagcagccacagcgtggccaaggagcccaaggcccccgccgcccccgccaacaccctggccatcgtgcccgacagcagaagacccagcagctgcatcgacatctacgtgagcgccatggacgagctgcactgcgacatcgaccccctggacaacagcgtgaacatcctgggcctgggcgagcccagcttcagcacccccgtgcccagcaccgcccccagcagcagcgcctacgccaccctggcccccaccgacagaccccccagcagaagcatcgacttcgaggacatcaccagcatggacaccagaagcttcagcagcgactacacccacctgcccgagtgccagaacccctgggacagcgagccccccatgtaccacaccatcgagagaagcaagagcagcagatacctggccaccacccccttcctgctggaggaggcccccatcgtgaagagccacagcttcatgttcagccccagcagaagctactacgccaacttcggcgtgcccgtgaagaccgccgagtacaccagcatcaccgactgcatcgacaccagatgcgtgaacgccccccaggccatcgccgacagagccgccttccccggcggcctgggcgacaaggtggaggacctgacctgctgccaccccgagagagaggccgagctgagccaccccagcagcgacagcgaggagaacgaggccaagggcagaagagccaccatcgccatcagcagccaggagggcgacaacagcgagagaaccctgagcaacaacatcaccgtgcccaagatcgagagagccaacagctacagcgccgaggagcccagcgccccctacgcccacaccagaaagagcttcagcatcagcgacaagctggacagacagagaaacaccgccagcctgagaaaccccttccagagaagcaagagcagcaagcccgagggcagaggcgacagcctgagcatgagaagactgagcagaaccagcgccttccagagcttcgagagcaagcacaactag

SEQ ID NO: 103024 - DNA, 4740 bp, synthetic construct; identical to SEQ ID NO: 103019
  misc_feature 1..4740: note = Description of Artificial Sequence: Synthetic coding sequence
  source 1..4740: mol_type = other DNA

SEQ ID NO: 103025 - DNA, 4701 bp, synthetic construct; identical to SEQ ID NO: 103018
  misc_feature 1..4701: note = Description of Artificial Sequence: Synthetic coding sequence
  source 1..4701: mol_type = other DNA

SEQ ID NO: 103026 - DNA, 5205 bp, synthetic construct
  misc_feature 1..5205: note = Description of Artificial Sequence: Synthetic coding sequence
  source 1..5205: mol_type = other DNA
atgggcaagaagtggagagacgccgccgagatggagagaggctgcagcgacagagaggacaacgccgagagcagaagaagaagcagaagcgccagcagaggcagattcgccgagagctggaagagactgagcagcaagcagggcagcaccaagagaagcggcctgcccagccagcagacccccgcccagaagagctggatcgagagagccttctacaagagagagtgcgtgcacatcatccccagcaccaaggacccccacagatgctgctgcggcagactgatcggccagcacgtgggcctgacccccagcatcagcgtgctgcagaacgagaagaacgagagcagactgagcagaaacgacatccagagcgagaagtggagcatcagcaagcacacccagctgagccccaccgacgccttcggcaccatcgagttccagggcggcggccacagcaacaaggccatgtacgtgagagtgagcttcgacaccaagcccgacctgctgctgcacctgatgaccaaggagtggcagctggagctgcccaagctgctgatcagcgtgcacggcggcctgcagaacttcgagctgcagcccaagctgaagcaggtgttcggcaagggcctgatcaaggccgccatgaccaccggcgcctggatcttcaccggcggcgtgaacaccggcgtgatcagacacgtgggcgacgccctgaaggaccacgccagcaagagcagaggcaagatctgcaccatcggcatcgccccctggggcatcgtggagaaccaggaggacctgatcggcagagacgtggtgagaccctaccagaccatgagcaaccccatgagcaagctgaccgtgctgaacagcatgcacagccacttcatcctggccgacaacggcaccaccggcaagtacggcgccgaggtgaagctgagaagacagctggagaagcacatcagcctgcagaagatcaacaccagatgcctgcccttcttcagcctggacagcagactgttctacagcttctggggcagctgccagctggacagcgtgggcatcggccagggcgtgcccgtggtggccctgatcgtggagggcggccccaacgtgatcagcatcgtgctggagtacctgagagacaccccccccgtgcccgtggtggtgtgcgacggcagcggcagagccagcgacatcctggccttcggccacaagtacagcgaggagggcggcctgatcaacgagagcctgagagaccagctgctggtgaccatccagaagaccttcacctacaccagaacccaggcccagcacctgttcatcatcctgatggagtgcatgaagaagaaggagctgatcaccgtgttcagaatgggcagcgagggccaccaggacatcgacctggccatcctgaccgccctgctgaagggcgccaacgccagcgcccccgaccagctgagcctggccctggcctggaacagagtggacatcgccagaagccagatcttcatctacggccagcagtggcccgtgggcagcctggagcaggccatgctggacgccctggtgctggacagagtggacttcgtgaagctgctgatcgagaacggcgtgagcatgcacagattcctgaccatcagcagactggaggagctgtacaacaccagacacggccccagcaacaccctgtaccacctggtgagagacgtgaagaagggcaacctgccccccgactacagaatcagcctgatcgacatcggcctggtgatcgagtacctgatgggcggcgcctacagatgcaactacaccagaaagagattcagaaccctgtaccacaacctgttcggccccaagagacccaaggccctgaagctgctgggcatggaggacgacatccccctgagaagaggcagaaagaccaccaagaagagagaggaggaggtggacatcgacctggacgaccccgagatcaaccacttccccttccccttccacgagctgatggtgtgggccgtgctgatgaagagacagaagatggccctgttcttctggcagcacggcgaggaggccatggccaaggccctggtggcctgcaagctgtgcaaggccatggcccacgaggccagcgagaacgacatggtggacgacatcagccaggagctgaaccacaacagcagagacttcggccagctggccgtggagctgctggaccagagctacaagcaggacgagcagctggccatgaagctgctgacctacgagctgaagaactggagcaacgccacctgcctgcagctggccgtggccgccaagcacagagacttcatcgcccacacctgcagccagatgctgctgaccgacatgtggatgggcagactgagaatgagaaagaacagcggcctgaaggtgatcctgggcatcctgctgccccccagcatcctgagcctggagttcaagaacaaggacgacatgccctacatgagccaggcccaggagatccacctgcaggagaaggaggccgaggagcccgagaagcccaccaaggagaaggaggaggaggacatggagctgaccgccatgctgggcagaaacaacggcgagagcagcagaaagaaggacgaggaggaggtgcagagcaagcacagactgatccccctgggcagaaagatctacgagttctacaacgcccccatcgtgaagttctggttctacaccctggcctacatcggctacctgatgctgttcaactacatcgtgctggtgaagatggagagatggcccagcacccaggagtggatcgtgatcagctacatcttcaccctgggcatcgagaagatgagagagatcctgatgagcgagcccggcaagctgctgcagaaggtgaaggtgtggctgcaggagtactggaacgtgaccgacctgatcgccatcctgctgttcagcgtgggcatgatcctgagactgcaggaccagcccttcagaagcgacggcagagtgatctactgcgtgaacatcatctactggtacatcagactgctggacatcttcggcgtgaacaagtacctgggcccctacgtgatgatgatcggcaagatgatgatcgacatgatgtacttcgtgatcatcatgctggtggtgctgatgagcttcggcgtggccagacaggccatcctgttccccaacgaggagcccagctggaagctggccaagaacatcttctacatgccctactggatgatctacggcgaggtgttcgccgaccagatcgaccccccctgcggccagaacgagaccagagaggacggcaagatcatccagctgcccccctgcaagaccggcgcctggatcgtgcccgccatcatggcctgctacctgctggtggccaacatcctgctggtgaacctgctgatcgccgtgttcaacaacaccttcttcgaggtgaagagcatcagcaaccaggtgtggaagttccagagataccagctgatcatgaccttccacgagagacccgtgctgcccccccccctgatcatcttcagccacatgaccatgatcttccagcacctgtgctgcagatggagaaagcacgagagcgaccccgacgagagagactacggcctgaagctgttcatcaccgacgacgagctgaagaaggtgcacgacttcgaggagcagtgcatcgaggagtacttcagagagaaggacgacagattcaacagcagcaacgacgagagaatcagagtgaccagcgagagagtggagaacatgagcatgagactggaggaggtgaacgagagagagcacagcatgaaggccagcctgcagaccgtggacatcagactggcccagctggaggacctgatcggcagaatggccaccgccctggagagactgaccggcctggagagagccgagagcaacaagatcagaagcagaaccagcagcgactgcaccgacgccgcctacatcgtgagacagagcagcttcaacagccaggagggcaacaccttcaagctgcaggagagcatcgaccccgccggcgaggagaccatgagccccaccagccccaccctgatgcccagaatgagaagccacagcttctacagcgtgaacatgaaggacaagggcggcatcgagaagctggagagcatcttcaaggagagaagcctgagcctgcacagagccaccagcagccacagcgtggccaaggagcccaaggcccccgccgcccccgccaacaccctggccatcgtgcccgacagcagaagacccagcagctgcatcgacatctacgtgagcgccatggacgagctgcactgcgacatcgaccccctggacaacagcgtgaacatcctgggcctgggcgagcccagcttcagcacccccgtgcccagcaccgcccccagcagcagcgcctacgccaccctggcccccaccgacagaccccccagcagaagcatcgacttcgaggacatcaccagcatggacaccagaagcttcagcagcgactacacccacctgcccgagtgccagaacccctgggacagcgagccccccatgtaccacaccatcgagagaagcaagagcagcagatacctggccaccacccccttcctgctggaggaggcccccatcgtgaagagccacagcttcatgttcagccccagcagaagctactacgccaacttcggcgtgcccgtgaagaccgccgagtacaccagcatcaccgactgcatcgacaccagatgcgtgaacgccccccaggccatcgccgacagagccgccttccccggcggcctgggcgacaaggtggaggacctgacctgctgccaccccgagagagaggccgagctgagccaccccagcagcgacagcgaggagaacgaggccaagggcagaagagccaccatcgccatcagcagccaggagggcgacaacagcgagagaaccctgagcaacaacatcaccgtgcccaagatcgagagagccaacagctacagcgccgaggagcccagcgccccctacgcccacaccagaaagagcttcagcatcagcgacaagctggacagacagagaaacaccgccagcctgagaaaccccttccagagaagcaagagcagcaagcccgagggcagaggcgacagcctgagcatgagaagactgagcagaaccagcgccttccagagcttcgagagcaagcacaactag

SEQ ID NO: 103027 - DNA, 645 bp, synthetic construct
  misc_feature 1..645: note = Description of Artificial Sequence: Synthetic coding sequence
  source 1..645: mol_type = other DNA
atgtacgtgagagtgagcttcgacaccaagcccgacctgctgctgcacctgatgaccaaggagtggcagctggagctgcccaagctgctgatcagcgtgcacggcggcctgcagaacttcgagctgcagcccaagctgaagcaggtgttcggcaagggcctgatcaaggccgccatgaccaccggcgcctggatcttcaccggcggcgtgaacaccggcgtgatcagacacgtgggcgacgccctgaaggaccacgccagcaagagcagaggcaagatctgcaccatcggcatcgccccctggggcatcgtggagaaccaggaggacctgatcggcagagacgtggtgagaccctaccagaccatgagcaaccccatgagcaagctgaccgtgctgaacagcatgcacagccacttcatcctggccgacaacggcaccaccggcaagtacggcgccgaggtgaagctgagaagacagctggagaagcacatcagcctgcagaagatcaacaccagcttccacagctacaagaccgcccacgtggacctgcaggacaagagacaggtgaagaccgccctggagcaggccgagtggcagcccggcagaggcatgttcgaccacgacaacctgatgcagagcacctag

SEQ ID NO: 103028 - DNA, 3645 bp, synthetic construct
  misc_feature 1..3645: note = Description of Artificial Sequence: Synthetic coding sequence
  source 1..3645: mol_type = other DNA
atggtggtgcccgagaaggagcagagctggatccccaagatcttcaagaagaagacctgcaccaccttcatcgtggacagcaccgaccccggcggcaccctgtgccagtgcggcagacccagaaccgcccaccccgccgtggccatggaggacgccttcggcgccgccgtggtgaccgtgtgggacagcgacgcccacaccaccgagaagcccaccgacgcctacggcgagctggacttcaccggcgccggcagaaagcacagcaacttcctgagactgagcgacagaaccgaccccgccgccgtgtacagcctggtgaccagaacctggggcttcagagcccccaacctggtggtgagcgtgctgggcggcagcggcggccccgtgctgcagacctggctgcaggacctgctgagaagaggcctggtgagagccgcccagagcaccggcgcctggatcgtgaccggcggcctgcacaccggcatcggcagacacgtgggcgtggccgtgagagaccaccagatggccagcaccggcggcaccaaggtggtggccatgggcgtggccccctggggcgtggtgagaaacagagacaccctgatcaaccccaagggcagcttccccgccagatacagatggagaggcgaccccgaggacggcgtgcagttccccctggactacaactacagcgccttcttcctggtggacgacggcacccacggctgcctgggcggcgagaacagattcagactgagactggagagctacatcagccagcagaagaccggcgtgggcggcaccggcatcgacatccccgtgctgctgctgctgatcgacggcgacgagaagatgctgaccagaatcgagaacgccacccaggcccagctgccctgcctgctggtggccggcagcggcggcgccgccgactgcctggccgagaccctggaggacaccctggcccccggcagcggcggcgccagacagggcgaggccagagacagaatcagaagattcttccccaagggcgacctggaggtgctgcaggcccaggtggagagaatcatgaccagaaaggagctgctgaccgtgtacagcagcgaggacggcagcgaggagttcgagaccatcgtgctgaaggccctggtgaaggcctgcggcagcagcgaggccagcgcctacctggacgagctgagactggccgtggcctggaacagagtggacatcgcccagagcgagctgttcagaggcgacatccagtggagaagcttccacctggaggccagcctgatggacgccctgctgaacgacagacccgagttcgtgagactgctgatcagccacggcctgagcctgggccacttcctgacccccatgagactggcccagctgtacagcgccgcccccagcaacagcctgatcagaaacctgctggaccaggccagccacagcgccggcaccaaggcccccgccctgaagggcggcgccgccgagctgagaccccccgacgtgggccacgtgctgagaatgctgctgggcaagatgtgcgcccccagataccccagcggcggcgcctgggacccccaccccggccagggcttcggcgagagcatgtacctgctgagcgacaaggccaccagccccctgagcctggacgccggcctgggccaggccccctggagcgacctgctgctgtgggccctgctgctgaacagagcccagatggccatgtacttctgggagatgggcagcaacgccgtgagcagcgccctgggcgcctgcctgctgctgagagtgatggccagactggagcccgacgccgaggaggccgccagaagaaaggacctggccttcaagttcgagggcatgggcgtggacctgttcggcgagtgctacagaagcagcgaggtgagagccgccagactgctgctgagaagatgccccctgtggggcgacgccacctgcctgcagctggccatgcaggccgacgccagagccttcttcgcccaggacggcgtgcagagcctgctgacccagaagtggtggggcgacatggccagcaccacccccatctgggccctggtgctggccttcttctgcccccccctgatctacaccagactgatcaccttcagaaagagcgaggaggagcccaccagagaggagctggagttcgacatggacagcgtgatcaacggcgagggccccgtgggcaccgccgaccccgccgagaagacccccctgggcgtgcccagacagagcggcagacccggctgctgcggcggcagatgcggcggcagaagatgcctgagaagatggttccacttctggggcgcccccgtgaccatcttcatgggcaacgtggtgagctacctgctgttcctgctgctgttcagcagagtgctgctggtggacttccagcccgccccccccggcagcctggagctgctgctgtacttctgggccttcaccctgctgtgcgaggagctgagacagggcctgagcggcggcggcggcagcctggccagcggcggccccggccccggccacgccagcctgagccagagactgagactgtacctggccgacagctggaaccagtgcgacctggtggccctgacctgcttcctgctgggcgtgggctgcagactgacccccggcctgtaccacctgggcagaaccgtgctgtgcatcgacttcatggtgttcaccgtgagactgctgcacatcttcaccgtgaacaagcagctgggccccaagatcgtgatcgtgagcaagatgatgaaggacgtgttcttcttcctgttcttcctgggcgtgtggctggtggcctacggcgtggccaccgagggcctgctgagacccagagacagcgacttccccagcatcctgagaagagtgttctacagaccctacctgcagatcttcggccagatcccccaggaggacatggacgtggccctgatggagcacagcaactgcagcagcgagcccggcttctgggcccacccccccggcgcccaggccggcacctgcgtgagccagtacgccaactggctggtggtgctgctgctggtgatcttcctgctggtggccaacatcctgctggtgaacctgctgatcgccatgttcagctacaccttcggcaaggtgcagggcaacagcgacctgtactggaaggcccagagatacagactgatcagagagttccacagcagacccgccctggccccccccttcatcgtgatcagccacctgagactgctgctgagacagctgtgcagaagacccagaagcccccagcccagcagccccgccctggagcacttcagagtgtacctgagcaaggaggccgagagaaagctgctgacctgggagagcgtgcacaaggagaacttcctgctggccagagccagagacaagagagagagcgacagcgagagactgaagagaaccagccagaaggtggacctggccctgaagcagctgggccacatcagagagtacgagcagagactgaaggtgctggagagagaggtgcagcagtgcagcagagtgctgggctgggtggccgaggccctgagcagaagcgccctgctgccccccggcggcccccccccccccgacctgcccggcagcaaggactag

SEQ ID NO: 103029 - DNA, 2583 bp, synthetic construct
  misc_feature 1..2583: note = Description of Artificial Sequence: Synthetic coding sequence
  source 1..2583: mol_type = other DNA
atgctgaccagaatcgagaacgccacccaggcccagctgccctgcctgctggtggccggcagcggcggcgccgccgactgcctggccgagaccctggaggacaccctggcccccggcagcggcggcgccagacagggcgaggccagagacagaatcagaagattcttccccaagggcgacctggaggtgctgcaggcccagagcttccacctggaggccagcctgatggacgccctgctgaacgacagacccgagttcgtgagactgctgatcagccacggcctgagcctgggccacttcctgacccccatgagactggcccagctgtacagcgccgcccccagcaacagcctgatcagaaacctgctggaccaggccagccacagcgccggcaccaaggcccccgccctgaagggcggcgccgccgagctgagaccccccgacgtgggccacgtgctgagaatgctgctgggcaagatgtgcgcccccagataccccagcggcggcgcctgggacccccaccccggccagggcttcggcgagagcatgtacctgctgagcgacaaggccaccagccccctgagcctggacgccggcctgggccaggccccctggagcgacctgctgctgtgggccctgctgctgaacagagcccagatggccatgtacttctgggagatgggcagcaacgccgtgagcagcgccctgggcgcctgcctgctgctgagagtgatggccagactggagcccgacgccgaggaggccgccagaagaaaggacctggccttcaagttcgagggcatgggcgtggacctgttcggcgagtgctacagaagcagcgaggtgagagccgccagactgctgctgagaagatgccccctgtggggcgacgccacctgcctgcagctggccatgcaggccgacgccagagccttcttcgcccaggacggcgtgcagagcctgctgacccagaagtggtggggcgacatggccagcaccacccccatctgggccctggtgctggccttcttctgcccccccctgatctacaccagactgatcaccttcagaaagagcgaggaggagcccaccagagaggagctggagttcgacatggacagcgtgatcaacggcgagggccccgtgggcaccgccgaccccgccgagaagacccccctgggcgtgcccagacagagcggcagacccggctgctgcggcggcagatgcggcggcagaagatgcctgagaagatggttccacttctggggcgcccccgtgaccatcttcatgggcaacgtggtgagctacctgctgttcctgctgctgttcagcagagtgctgctggtggacttccagcccgccccccccggcagcctggagctgctgctgtacttctgggccttcaccctgctgtgcgaggagctgagacagggcctgagcggcggcggcggcagcctggccagcggcggccccggccccggccacgccagcctgagccagagactgagactgtacctggccgacagctggaaccagtgcgacctggtggccctgacctgcttcctgctgggcgtgggctgcagactgacccccggcctgtaccacctgggcagaaccgtgctgtgcatcgacttcatggtgttcaccgtgagactgctgcacatcttcaccgtgaacaagcagctgggccccaagatcgtgatcgtgagcaagatgatgaaggacgtgttcttcttcctgttcttcctgggcgtgtggctggtggcctacggcgtggccaccgagggcctgctgagacccagagacagcgacttccccagcatcctgagaagagtgttctacagaccctacctgcagatcttcggccagatcccccaggaggacatggacgtggccctgatggagcacagcaactgcagcagcgagcccggcttctgggcccacccccccggcgcccaggccggcacctgcgtgagccagtacgccaactggctggtggtgctgctgctggtgatcttcctgctggtggccaacatcctgctggtgaacctgctgatcgccatgttcagctacaccttcggcaaggtgcagggcaacagcgacctgtactggaaggcccagagatacagactgatcagagagttccacagcagacccgccctggccccccccttcatcgtgatcagccacctgagactgctgctgagacagctgtgcagaagacccagaagcccccagcccagcagccccgccctggagcacttcagagtgtacctgagcaaggaggccgagagaaagctgctgacctgggagagcgtgcacaaggagaacttcctgctggccagagccagagacaagagagagagcgacagcgagagactgaagagaaccagccagaaggtggacctggccctgaagcagctgggccacatcagagagtacgagcagagactgaaggtgctggagagagaggtgcagcagtgcagcagagtgctgggctgggtggccgaggccctgagcagaagcgccctgctgccccccggcggcccccccccccccgacctgcccggcagcaaggactag

SEQ ID NO: 103030 - DNA, 3210 bp, synthetic construct
  misc_feature 1..3210: note = Description of Artificial Sequence: Synthetic coding sequence
  source 1..3210: mol_type = other DNA
atggtggtgcccgagaaggagcagagctggatccccaagatcttcaagaagaagacctgcaccaccttcatcgtggacagcaccgaccccggcggcaccctgtgccagtgcggcagacccagaaccgcccaccccgccgtggccatggaggacgccttcggcgccgccgtggtgaccgtgtgggacagcgacgcccacaccaccgagaagcccaccgacgcctacggcgagctggacttcaccggcgccggcagaaagcacagcaacttcctgagactgagcgacagaaccgaccccgccgccgtgtacagcctggtgaccagaacctggggcttcagagcccccaacctggtggtgagcgtgctgggcggcagcggcggccccgtgctgcagacctggctgcaggacctgctgagaagaggcctggtgagagccgcccagagcaccggcgcctggatcgtgaccggcggcctgcacaccggcatcggcagacacgtgggcgtggccgtgagagaccaccagatggccagcaccggcggcaccaaggtggtggccatgggcgtggccccctggggcgtggtgagaaacagagacaccctgatcaaccccaagggcagcttccccgccagatacagatggagaggcgaccccgaggacggcgtgcagttccccctggactacaactacagcgccttcttcctggtggacgacggcacccacggctgcctgggcggcgagaacagattcagactgagactggagagctacatcagccagcagaagaccggcgtgggcggcaccggcatcgacatccccgtgctgctgctgctgatcgacggcgacgagaagatgctgaccagaatcgagaacgccacccaggcccagctgccctgcctgctggtggccggcagcggcggcgccgccgactgcctggccgagaccctggaggacaccctggcccccggcagcggcggcgccagacagggcgaggccagagacagaatcagaagattcttccccaagggcgacctggaggtgctgcaggcccaggtggagagaatcatgaccagaaaggagctgctgaccgtgtacagcagcgaggacggcagcgaggagttcgagaccatcgtgctgaaggccctggtgaaggcctgcggcagcagcgaggccagcgcctacctggacgagctgagactggccgtggcctggaacagagtggacatcgcccagagcgagctgttcagaggcgacatccagtggagaagcttccacctggaggccagcctgatggacgccctgctgaacgacagacccgagttcgtgagactgctgatcagccacggcctgagcctgggccacttcctgacccccatgagactggcccagctgtacagcgccgcccccagcaacagcctgatcagaaacctgctggaccaggccagccacagcgccggcaccaaggcccccgccctgaagggcggcgccgccgagctgagaccccccgacgtgggccacgtgctgagaatgctgctgggcaagatgtgcgcccccagataccccagcggcggcgcctgggacccccaccccggccagggcttcggcgagagcatgtacctgctgagcgacaaggccaccagccccctgagcctggacgccggcctgggccaggccccctggagcgacctgctgctgtgggccctgctgctgaacagagcccagatggccatgtacttctgggagatgggcagcaacgccgtgagcagcgccctgggcgcctgcctgctgctgagagtgatggccagactggagcccgacgccgaggaggccgccagaagaaaggacctggccttcaagttcgagggcatgggcgtggacctgttcggcgagtgctacagaagcagcgaggtgagagccgccagactgctgctgagaagatgccccctgtggggcgacgccacctgcctgcagctggccatgcaggccgacgccagagccttcttcgcccaggacggcgtgcagagcctgctgacccagaagtggtggggcgacatggccagcaccacccccatctgggccctggtgctggccttcttctgcccccccctgatctacaccagactgatcaccttcagaaagagcgaggaggagcccaccagagaggagctggagttcgacatggacagcgtgatcaacggcgagggccccgtgggcctgacccccggcctgtaccacctgggcagaaccgtgctgtgcatcgacttcatggtgttcaccgtgagactgctgcacatcttcaccgtgaacaagcagctgggccccaagatcgtgatcgtgagcaagatgatgaaggacgtgttcttcttcctgttcttcctgggcgtgtggctggtggcctacggcgtggccaccgagggcctgctgagacccagagacagcgacttccccagcatcctgagaagagtgttctacagaccctacctgcagatcttcggccagatcccccaggaggacatggacgtggccctgatggagcacagcaactgcagcagcgagcccggcttctgggcccacccccccggcgcccaggccggcacctgcgtgagccagtacgccaactggctggtggtgctgctgctggtgatcttcctgctggtggccaacatcctgctggtgaacctgctgatcgccatgttcagctacaccttcggcaaggtgcagggcaacagcgacctgtactggaaggcccagagatacagactgatcagagagttccacagcagacccgccctggccccccccttcatcgtgatcagccacctgagactgctgctgagacagctgtgcagaagacccagaagcccccagcccagcagccccgccctggagcacttcagagtgtacctgagcaaggaggccgagagaaagctgctgacctgggagagcgtgcacaaggagaacttcctgctggccagagccagagacaagagagagagcgacagcgagagactgaagagaaccagccagaaggtggacctggccctgaagcagctgggccacatcagagagtacgagcagagactgaaggtgctggagagagaggtgcagcagtgcagcagagtgctgggctgggtggccgaggccctgagcagaagcgccctgctgccccccggcggcccccccccccccgacctgcccggcagcaaggactag

SEQ ID NO: 103031 - DNA, 3498 bp, synthetic construct
  misc_feature 1..3498: note = Description of Artificial Sequence: Synthetic coding sequence
  source 1..3498: mol_type = other DNA
atgcaggacgtgcagggccccagacccggcagccccggcgacgccgaggacagaagagagctgggcctgcacagaggcgaggtgaacttcggcggcagcggcaagaagagaggcaagttcgtgagagtgcccagcggcgtggcccccagcgtgctgttcgacctgctgctggccgagtggcacctgcccgcccccaacctggtggtgagcctggtgggcgaggagcagcccttcgccatgaagagctggctgagagacgtgctgagaaagggcctggtgaaggccgcccagagcaccggcgcctggatcctgaccagcgccctgagagtgggcctggccagacacgtgggccaggccgtgagagaccacagcctggccagcaccagcaccaaggtgagagtggtggccgtgggcatggccagcctgggcagagtgctgcacagaagaatcctggaggaggcccaggaggacttccccgtgcactaccccgaggacgacggcggcagccagggccccctgtgcagcctggacagcaacctgagccacttcatcctggtggagcccggcccccccggcaagggcgacggcctgaccgagctgagactgagactggagaagcacatcagcgagcagagagccggctacggcggcaccggcagcatcgagatccccgtgctgtgcctgctggtgaacggcgaccccaacaccctggagagaatcagcagagccgtggagcaggccgccccctggctgatcctggtgggcagcggcggcatcgccgacgtgctggccgccctggtgaaccagccccacctgctggtgcccaaggtggccgagaagcagttcaaggagaagttccccagcaagcacttcagctgggaggacatcgtgagatggaccaagctgctgcagaacatcaccagccaccagcacctgctgaccgtgtacgacttcgagcaggagggcagcgaggagctggacaccgtgatcctgaaggccctggtgaaggcctgcaagagccacagccaggagccccaggactacctggacgagctgaagctggccgtggcctgggacagagtggacatcgccaagagcgagatcttcaacggcgacgtggagtggaagagctgcgacctggaggaggtgatggtggacgccctggtgagcaacaagcccgagttcgtgagactgttcgtggacaacggcgccgacgtggccgacttcctgacctacggcagactgcaggagctgtacagaagcgtgagcagaaagagcctgctgttcgacctgctgcagagaaagcaggaggaggccagactgaccctggccggcctgggcacccagcaggccagagagccccccgccggcccccccgccttcagcctgcacgaggtgagcagagtgctgaaggacttcctgcaggacgcctgcagaggcttctaccaggacggcagacccggcgacagaagaagagccgagaagggccccgccaagagacccaccggccagaagtggctgctggacctgaaccagaagagcgagaacccctggagagacctgttcctgtgggccgtgctgcagaacagacacgagatggccacctacttctgggccatgggccaggagggcgtggccgccgccctggccgcctgcaagatcctgaaggagatgagccacctggagaccgaggccgaggccgccagagccaccagagaggccaagtacgagagactggccctggacctgttcagcgagtgctacagcaacagcgaggccagagccttcgccctgctggtgagaagaaacagatgctggagcaagaccacctgcctgcacctggccaccgaggccgacgccaaggccttcttcgcccacgacggcgtgcaggccttcctgaccagaatctggtggggcgacatggccgccggcacccccatcctgagactgctgggcgccttcctgtgccccgccctggtgtacaccaacctgatcaccttcagcgaggaggcccccctgagaaccggcctggaggacctgcaggacctggacagcctggacaccgagaagagccccctgtacggcctgcagagcagagtggaggagctggtggaggcccccagagcccagggcgacagaggccccagagccgtgttcctgctgaccagatggagaaagttctggggcgcccccgtgaccgtgttcctgggcaacgtggtgatgtacttcgccttcctgttcctgttcacctacgtgctgctggtggacttcagaccccccccccagggccccagcggccccgaggtgaccctgtacttctgggtgttcaccctggtgctggaggagatcagacagggcttcttcaccgacgaggacacccacctggtgaagaagttcaccctgtacgtgggcgacaactggaacaagtgcgacatggtggccatcttcctgttcatcgtgggcgtgacctgcagaatgctgcccagcgccttcgaggccggcagaaccgtgctggccatggacttcatggtgttcaccctgagactgatccacatcttcgccatccacaagcagctgggccccaagatcatcgtggtggagagaatgatgaaggacgtgttcttcttcctgttcttcctgagcgtgtggctggtggcctacggcgtgaccacccaggccctgctgcacccccacgacggcagactggagtggatcttcagaagagtgctgtacagaccctacctgcagatcttcggccagatccccctggacgagatcgacgaggccagagtgaactgcagcacccaccccctgctgctggaggacagccccagctgccccagcctgtacgccaactggctggtgatcctgctgctggtgaccttcctgctggtgaccaacgtgctgctgatgaacctgctgatcgccatgttcagctacaccttccaggtggtgcagggcaacgccgacatgttctggaagttccagagatacaacctgatcgtggagtaccacgagagacccgccctggccccccccttcatcctgctgagccacctgagcctgaccctgagaagagtgttcaagaaggaggccgagcacaagagagagcacctggagagagacctgcccgaccccctggaccagaaggtggtgacctgggagaccgtgcagaaggagaacttcctgagcaagatggagaagagaagaagagacagcgagggcgaggtgctgagaaagaccgcccacagagtggacttcatcgccaagtacctgggcggcctgagagagcaggagaagagaatcaagtgcctggagagccagatcaactactgcagcgtgctggtgagcagcgtggccgacgtgctggcccagggcggcggccccagaagcagccagcactgcggcgagggcagccagctggtggccgccgaccacagaggcggcctggacggctgggagcagcccggcgccggccagccccccagcgacacctag

SEQ ID NO: 103032 - DNA, 2619 bp, synthetic construct
  misc_feature 1..2619: note = Description of Artificial Sequence: Synthetic coding sequence
  source 1..2619: mol_type = other DNA
atgcaggacgtgcagggccccagacccggcagccccggcgacgccgaggacagaagagagctgggcctgcacagaggcgaggtgaacttcggcggcagcggcaagaagagaggcaagttcgtgagagtgcccagcggcgtggcccccagcgtgctgttcgacctgctgctggccgagtggcacctgcccgcccccaacctggtggtgagcctggtgggcgaggagcagcccttcgccatgaagagctggctgagagacgtgctgagaaagggcctggtgaaggccgcccagagcaccggcgcctggatcctgaccagcgccctgagagtgggcctggccagacacgtgggccaggccgtgagagaccacagcctggccagcaccagcaccaaggtgagagtggtggccgtgggcatggccagcctgggcagagtgctgcacagaagaatcctggaggaggcccaggaggacttccccgtgcactaccccgaggacgacggcggcagccagggccccctgtgcagcctggacagcaacctgagccacttcatcctggtggagcccggcccccccggcaagggcgacggcctgaccgagctgagactgagactggagaagcacatcagcgagcagagagccggctacggcggcaccggcagcatcgagatccccgtgctgtgcctgctggtgaacggcgaccccaacaccctggagagaatcagcagagccgtggagcaggccgccccctggctgatcctggtgggcagcggcggcatcgccgacgtgctggccgccctggtgaaccagccccacctgctggtgcccaaggtggccgagaagcagttcaaggagaagttccccagcaagcacttcagctgggaggacatcgtgagatggaccaagctgctgcagaacatcaccagccaccagcacctgctgaccgtgtacgacttcgagcaggagggcagcgaggagctggacaccgtgatcctgaaggccctggtgaaggcctgcaagagccacagccaggagccccaggactacctggacgagctgaagctggccgtggcctgggacagagtggacatcgccaagagcgagatcttcaacggcgacgtggagtggaagagctgcgacctggaggaggtgatggtggacgccctggtgagcaacaagcccgagttcgtgagactgttcgtggacaacggcgccgacgtggccgacttcctgacctacggcagactgcaggagctgtacagaagcgtgagcagaaagagcctgctgttcgacctgctgcagagaaagcaggaggaggccagactgaccctggccggcctgggcacccagcaggccagagagccccccgccggcccccccgccttcagcctgcacgaggtgagcagagtgctgaaggacttcctgcaggacgcctgcagaggcttctaccaggacggcagacccggcgacagaagaagagccgagaagggccccgccaagagacccaccggccagaagtggctgctggacctgaaccagaagagcgagaacccctggagagacctgttcctgtgggccgtgctgcagaacagacacgagatggccacctacttctgggccatgggccaggagggcgtggccgccgccctggccgcctgcaagatcctgaaggagatgagccacctggagaccgaggccgaggccgccagagccaccagagaggccaagtacgagagactggccctggacctgttcagcgagtgctacagcaacagcgaggccagagccttcgccctgctggtgagaagaaacagatgctggagcaagaccacctgcctgcacctggccaccgaggccgacgccaaggccttcttcgcccacgacggcgtgcaggccttcctgaccagaatctggtggggcgacatggccgccggcacccccatcctgagactgctgggcgccttcctgtgccccgccctggtgtacaccaacctgatcaccttcagcgaggaggcccccctgagaaccggcctggaggacctgcaggacctggacagcctggacaccgagaagagccccctgtacggcctgcagagcagagtggaggagctggtggaggcccccagagcccagggcgacagaggccccagagccgtgttcctgctgaccagatggagaaagttctggggcgcccccgtgaccgtgttcctgggcaacgtggtgatgtacttcgccttcctgttcctgttcacctacgtgctgctggtggacttcagaccccccccccagggccccagcggccccgaggtgaccctgtacttctgggtgttcaccctggtgctggaggagatcagacagggcttcttcaccgacgaggacacccacctggtgaagaagttcaccctgtacgtgggcgacaactggaacaagtgcgacatggtggccatcttcctgttcatcgtgggcgtgacctgcagaatgctgcccagcgccttcgaggccggcagaaccgtgctggccatggacttcatggtgttcaccctgagactgatccacatcttcgccatccacaagcagctgggccccaagatcatcgtggtggagagaatgaagcccgtgtag

SEQ ID NO: 103033 - DNA, 3504 bp, synthetic construct
  misc_feature 1..3504: note = Description of Artificial Sequence: Synthetic coding sequence
  source 1..3504: mol_type = other DNA
atgcaggacgtgcagggccccagacccggcagccccggcgacgccgaggacagaagagagctgggcctgcacagaggcgaggtgaacttcggcggcagcggcaagaagagaggcaagttcgtgagagtgcccagcggcgtggcccccagcgtgctgttcgacctgctgctggccgagtggcacctgcccgcccccaacctggtggtgagcctggtgggcgaggagcagcccttcgccatgaagagctggctgagagacgtgctgagaaagggcctggtgaaggccgcccagagcaccggcgcctggatcctgaccagcgccctgagagtgggcctggccagacacgtgggccaggccgtgagagaccacagcctggccagcaccagcaccaaggtgagagtggtggccgtgggcatggccagcctgggcagagtgctgcacagaagaatcctggaggaggcccaggtgcacgaggacttccccgtgcactaccccgaggacgacggcggcagccagggccccctgtgcagcctggacagcaacctgagccacttcatcctggtggagcccggcccccccggcaagggcgacggcctgaccgagctgagactgagactggagaagcacatcagcgagcagagagccggctacggcggcaccggcagcatcgagatccccgtgctgtgcctgctggtgaacggcgaccccaacaccctggagagaatcagcagagccgtggagcaggccgccccctggctgatcctggtgggcagcggcggcatcgccgacgtgctggccgccctggtgaaccagccccacctgctggtgcccaaggtggccgagaagcagttcaaggagaagttccccagcaagcacttcagctgggaggacatcgtgagatggaccaagctgctgcagaacatcaccagccaccagcacctgctgaccgtgtacgacttcgagcaggagggcagcgaggagctggacaccgtgatcctgaaggccctggtgaaggcctgcaagagccacagccaggagccccaggactacctggacgagctgaagctggccgtggcctgggacagagtggacatcgccaagagcgagatcttcaacggcgacgtggagtggaagagctgcgacctggaggaggtgatggtggacgccctggtgagcaacaagcccgagttcgtgagactgttcgtggacaacggcgccgacgtggccgacttcctgacctacggcagactgcaggagctgtacagaagcgtgagcagaaagagcctgctgttcgacctgctgcagagaaagcaggaggaggccagactgaccctggccggcctgggcacccagcaggccagagagccccccgccggcccccccgccttcagcctgcacgaggtgagcagagtgctgaaggacttcctgcaggacgcctgcagaggcttctaccaggacggcagacccggcgacagaagaagagccgagaagggccccgccaagagacccaccggccagaagtggctgctggacctgaaccagaagagcgagaacccctggagagacctgttcctgtgggccgtgctgcagaacagacacgagatggccacctacttctgggccatgggccaggagggcgtggccgccgccctggccgcctgcaagatcctgaaggagatgagccacctggagaccgaggccgaggccgccagagccaccagagaggccaagtacgagagactggccctggacctgttcagcgagtgctacagcaacagcgaggccagagccttcgccctgctggtgagaagaaacagatgctggagcaagaccacctgcctgcacctggccaccgaggccgacgccaaggccttcttcgcccacgacggcgtgcaggccttcctgaccagaatctggtggggcgacatggccgccggcacccccatcctgagactgctgggcgccttcctgtgccccgccctggtgtacaccaacctgatcaccttcagcgaggaggcccccctgagaaccggcctggaggacctgcaggacctggacagcctggacaccgagaagagccccctgtacggcctgcagagcagagtggaggagctggtggaggcccccagagcccagggcgacagaggccccagagccgtgttcctgctgaccagatggagaaagttctggggcgcccccgtgaccgtgttcctgggcaacgtggtgatgtacttcgccttcctgttcctgttcacctacgtgctgctggtggacttcagaccccccccccagggccccagcggccccgaggtgaccctgtacttctgggtgttcaccctggtgctggaggagatcagacagggcttcttcaccgacgaggacacccacctggtgaagaagttcaccctgtacgtgggcgacaactggaacaagtgcgacatggtggccatcttcctgttcatcgtgggcgtgacctgcagaatgctgcccagcgccttcgaggccggcagaaccgtgctggccatggacttcatggtgttcaccctgagactgatccacatcttcgccatccacaagcagctgggccccaagatcatcgtggtggagagaatgatgaaggacgtgttcttcttcctgttcttcctgagcgtgtggctggtggcctacggcgtgaccacccaggccctgctgcacccccacgacggcagactggagtggatcttcagaagagtgctgtacagaccctacctgcagatcttcggccagatccccctggacgagatcgacgaggccagagtgaactgcagcacccaccccctgctgctggaggacagccccagctgccccagcctgtacgccaactggctggtgatcctgctgctggtgaccttcctgctggtgaccaacgtgctgctgatgaacctgctgatcgccatgttcagctacaccttccaggtggtgcagggcaacgccgacatgttctggaagttccagagatacaacctgatcgtggagtaccacgagagacccgccctggccccccccttcatcctgctgagccacctgagcctgaccctgagaagagtgttcaagaaggaggccgagcacaagagagagcacctggagagagacctgcccgaccccctggaccagaaggtggtgacctgggagaccgtgcagaaggagaacttcctgagcaagatggagaagagaagaagagacagcgagggcgaggtgctgagaaagaccgcccacagagtggacttcatcgccaagtacctgggcggcctgagagagcaggagaagagaatcaagtgcctggagagccagatcaactactgcagcgtgctggtgagcagcgtggccgacgtgctggcccagggcggcggccccagaagcagccagcactgcggcgagggcagccagctggtggccgccgaccacagaggcggcctggacggctgggagcagcccggcgccggccagccccccagcgacacctag

SEQ ID NO: 103034 - DNA, 3480 bp, synthetic construct
  misc_feature 1..3480: note = Description of Artificial Sequence: Synthetic coding sequence
  source 1..3480: mol_type = other DNA
cccggcagccccggcgacgccgaggacagaagagagctgggcctgcacagaggcgaggtgaacttcggcggcagcggcaagaagagaggcaagttcgtgagagtgcccagcggcgtggcccccagcgtgctgttcgacctgctgctggccgagtggcacctgcccgcccccaacctggtggtgagcctggtgggcgaggagcagcccttcgccatgaagagctggctgagagacgtgctgagaaagggcctggtgaaggccgcccagagcaccggcgcctggatcctgaccagcgccctgagagtgggcctggccagacacgtgggccaggccgtgagagaccacagcctggccagcaccagcaccaaggtgagagtggtggccgtgggcatggccagcctgggcagagtgctgcacagaagaatcctggaggaggcccaggtgcacgaggacttccccgtgcactaccccgaggacgacggcggcagccagggccccctgtgcagcctggacagcaacctgagccacttcatcctggtggagcccggcccccccggcaagggcgacggcctgaccgagctgagactgagactggagaagcacatcagcgagcagagagccggctacggcggcaccggcagcatcgagatccccgtgctgtgcctgctggtgaacggcgaccccaacaccctggagagaatcagcagagccgtggagcaggccgccccctggctgatcctggtgggcagcggcggcatcgccgacgtgctggccgccctggtgaaccagccccacctgctggtgcccaaggtggccgagaagcagttcaaggagaagttccccagcaagcacttcagctgggaggacatcgtgagatggaccaagctgctgcagaacatcaccagccaccagcacctgctgaccgtgtacgacttcgagcaggagggcagcgaggagctggacaccgtgatcctgaaggccctggtgaaggcctgcaagagccacagccaggagccccaggactacctggacgagctgaagctggccgtggcctgggacagagtggacatcgccaagagcgagatcttcaacggcgacgtggagtggaagagctgcgacctggaggaggtgatggtggacgccctggtgagcaacaagcccgagttcgtgagactgttcgtggacaacggcgccgacgtggccgacttcctgacctacggcagactgcaggagctgtacagaagcgtgagcagaaagagcctgctgttcgacctgctgcagagaaagcaggaggaggccagactgaccctggccggcctgggcacccagcaggccagagagccccccgccggcccccccgccttcagcctgcacgaggtgagcagagtgctgaaggacttcctgcaggacgcctgcagaggcttctaccaggacggcagacccggcgacagaagaagagccgagaagggccccgccaagagacccaccggccagaagtggctgctggacctgaaccagaagagcgagaacccctggagagacctgttcctgtgggccgtgctgcagaacagacacgagatggccacctacttctgggccatgggccaggagggcgtggccgccgccctggccgcctgcaagatcctgaaggagatgagccacctggagaccgaggccgaggccgccagagccaccagagaggccaagtacgagagactggccctggacctgttcagcgagtgctacagcaacagcgaggccagagccttcgccctgctggtgagaagaaacagatgctggagcaagaccacctgcctgcacctggccaccgaggccgacgccaaggccttcttcgcccacgacggcgtgcaggccttcctgaccagaatctggtggggcgacatggccgccggcacccccatcctgagactgctgggcgccttcctgtgccccgccctggtgtacaccaacctgatcaccttcagcgaggaggcccccctgagaaccggcctggaggacctgcaggacctggacagcctggacaccgagaagagccccctgtacggcctgcagagcagagtggaggagctggtggaggcccccagagcccagggcgacagaggccccagagccgtgttcctgctgaccagatggagaaagttctggggcgcccccgtgaccgtgttcctgggcaacgtggtgatgtacttcgccttcctgttcctgttcacctacgtgctgctggtggacttcagaccccccccccagggccccagcggccccgaggtgaccctgtacttctgggtgttcaccctggtgctggaggagatcagacagggcttcttcaccgacgaggacacccacctggtgaagaagttcaccctgtacgtgggcgacaactggaacaagtgcgacatggtggccatcttcctgttcatcgtgggcgtgacctgcagaatgctgcccagcgccttcgaggccggcagaaccgtgctggccatggacttcatggtgttcaccctgagactgatccacatcttcgccatccacaagcagctgggccccaagatcatcgtggtggagagaatgatgaaggacgtgttcttcttcctgttcttcctgagcgtgtggctggtggcctacggcgtgaccacccaggccctgctgcacccccacgacggcagactggagtggatcttcagaagagtgctgtacagaccctacctgcagatcttcggccagatccccctggacgagatcgacgaggccagagtgaactgcagcacccaccccctgctgctggaggacagccccagctgccccagcctgtacgccaactggctggtgatcctgctgctggtgaccttcctgctggtgaccaacgtgctgctgatgaacctgctgatcgccatgttcagctacaccttccaggtggtgcagggcaacgccgacatgttctggaagttccagagatacaacctgatcgtggagtaccacgagagacccgccctggccccccccttcatcctgctgagccacctgagcctgaccctgagaagagtgttcaagaaggaggccgagcacaagagagagcacctggagagagacctgcccgaccccctggaccagaaggtggtgacctgggagaccgtgcagaaggagaacttcctgagcaagatggagaagagaagaagagacagcgagggcgaggtgctgagaaagaccgcccacagagtggacttcatcgccaagtacctgggcggcctgagagagcaggagaagagaatcaagtgcctggagagccagatcaactactgcagcgtgctggtgagcagcgtggccgacgtgctggcccagggcggcggccccagaagcagccagcactgcggcgagggcagccagctggtggccgccgaccacagaggcggcctggacggctgggagcagcccggcgccggccagccccccagcgacacctag

SEQ ID NO: 103035 - DNA, 3402 bp, synthetic construct
  misc_feature 1..3402: note = Description of Artificial Sequence: Synthetic coding sequence
  source 1..3402: mol_type = other DNA
atgctgagaccccaggtgaaggaggagatcatctgcatgatccagaacaccttcaacttcagcctgaagcagagcaagcacctgttccagatcctgatggagtgcatggtgcacagagactgcatcaccatcttcgacgccgacagcgaggagcagcaggacctggacctggccatcctgaccgccctgctgaagggcaccaacctgagcgccagcgagcagctgaacctggccatggcctgggacagagtggacatcgccaagaagcacatcctgatctacgagcagcactggaagcccgacgccctggagcaggccatgagcgacgccctggtgatggacagagtggacttcgtgaagctgctgatcgagtacggcgtgaacctgcacagattcctgaccatccccagactggaggagctgtacaacaccaagcagggccccaccaacaccctgctgcaccacctggtgcaggacgtgaagcagcacaccctgctgagcggctacagaatcaccctgatcgacatcggcctggtggtggagtacctgatcggcagagcctacagaagcaactacaccagaaagcacttcagagccctgtacaacaacctgtacagaaagtacaagcaccagagacacagcagcggcaacagaaacgagagcgccgagagcaccctgcacagccagttcatcagaaccgcccagccctacaagttcaaggagaagagcatcgtgctgcacaagagcagaaagaagagcaaggagcagaacgtgagcgacgaccccgagagcaccggcttcctgtacccctacaacgacctgctggtgtgggccgtgctgatgaagagacagaagatggccatgttcttctggcagcacggcgaggaggccaccgtgaaggccgtgatcgcctgcatcctgtacagagccatggcccacgaggccaaggagagccacatggtggacgacgccagcgaggagctgaagaactacagcaagcagttcggccagctggccctggacctgctggagaaggccttcaagcagaacgagagaatggccatgaccctgctgacctacgagctgagaaactggagcaacagcacctgcctgaagctggccgtgagcggcggcctgagacccttcgtgagccacacctgcacccagatgctgctgaccgacatgtggatgggcagactgaagatgagaaagaacagctggctgaagatcatcatcagcatcatcctgccccccaccatcctgaccctggagttcaagagcaaggccgagatgagccacgtgccccagagccaggacttccagttcatgtggtactacagcgaccagaacgccagcagcagcaaggagagcgccagcgtgaaggagtacgacctggagagaggccacgacgagaagctggacgagaaccagcacttcggcctggagagcggccaccagcacctgccctggaccagaaaggtgtacgagttctacagcgcccccatcgtgaagttctggttctacaccatggcctacctggccttcctgatgctgttcacctacaccgtgctggtggagatgcagccccagcccagcgtgcaggagtggctggtgagcatctacatcttcaccaacgccatcgaggtggtgagagagatctgcatcagcgagcccggcaagttcacccagaaggtgaaggtgtggatcagcgagtactggaacctgaccgagaccgtggccatcggcctgttcagcgccggcttcgtgctgagatggggcgacccccccttccacaccgccggcagactgatctactgcatcgacatcatcttctggttcagcagactgctggacttcttcgccgtgaaccagcacgccggcccctacgtgaccatgatcgccaagatgaccgccaacatgttctacatcgtgatcatcatggccatcgtgctgctgagcttcggcgtggccagaaaggccatcctgagccccaaggagccccccagctggagcctggccagagacatcgtgttcgagccctactggatgatctacggcgaggtgtacgccggcgagatcgacgtgtgcagcagccagcccagctgcccccccggcagcttcctgacccccttcctgcaggccgtgtacctgttcgtgcagtacatcatcatggtgaacctgctgatcgccttcttcaacaacgtgtacctggacatggagagcatcagcaacaacctgtggaagtacaacagatacagatacatcatgacctaccacgagaagccctggctgcccccccccctgatcctgctgagccacgtgggcctgctgctgagaagactgtgctgccacagagccccccacgaccaggaggagggcgacgtgggcctgaagctgtacctgagcaaggaggacctgaagaagctgcacgacttcgaggagcagtgcgtggagaagtacttccacgagaagatggaggacgtgaactgcagctgcgaggagagaatcagagtgaccagcgagagagtgaccgagatgtacttccagctgaaggagatgaacgagaaggtgagcttcatcaaggacagcctgctgagcctggacagccaggtgggccacctgcaggacctgagcgccctgaccgtggacaccctgaaggtgctgagcgccgtggacaccctgcaggaggacgaggccctgctggccaagagaaagcacagcacctgcaagaagctgccccacagctggagcaacgtgatctgcgccgaggtgctgggcagcatggagatcgccggcgagaagaagtaccagtactacagcatgcccagcagcctgctgagaagcctggccggcggcagacacccccccagagtgcagagaggcgccctgctggagatcaccaacagcaagagagaggccaccaacgtgagaaacgaccaggagagacaggagacccagagcagcatcgtggtgagcggcgtgagccccaacagacaggcccacagcaagtacggccagttcctgctggtgcccagcaacctgaagagagtgcccttcagcgccgagaccgtgctgcccctgagcagacccagcgtgcccgacgtgctggccaccgagcaggacatccagaccgaggtgctggtgcacctgaccggccagacccccgtggtgagcgactgggccagcgtggacgagcccaaggagaagcacgagcccatcgcccacctgctggacggccaggacaaggccgagcaggtgctgcccaccctgagctgcacccccgagcccatgaccatgagcagccccctgagaagatacagacccttcgccagaagccacagcttcagattccacaaggaggagaagctgatgaagatctgcaagatcaagagcaaggagtag

SEQ ID NO: 103036 - DNA, 912 bp, synthetic construct
  misc_feature 1..912: note = Description of Artificial Sequence: Synthetic coding sequence
  source 1..912: mol_type = other DNA
atgaaggagcagcccgtgctggagagactgcagagccagaagagctggatcaagggcgtgttcgacaagagagagtgcagcaccatcatccccagcagcaagaacccccacagatgcacccccgtgtgccaggtgtgccagaacctgatcagatgctactgcggcagactgatcggcgaccacgccggcatcgactacagctggaccatcagcgccgccaagggcaaggagagcgagcagtggagcgtggagaagcacaccaccaagagccccaccgacaccttcggcaccatcaacttccaggacggcgagcacacccaccacgccaagtacatcagaaccagctacgacaccaagctggaccacctgctgcacctgatgctgaaggagtggaagatggagctgcccaagctggtgatcagcgtgcacggcggcatccagaacttcaccatgcccagcaagttcaaggagatcttcagccagggcctggtgaaggccgccgagaccaccggcgcctggatcatcaccgagggcatcaacaccggcgtgagcaagcacgtgggcgacgccctgaagagccacagcagccacagcctgagaaagatctggaccgtgggcatccccccctggggcgtgatcgagaaccagagagacctgatcggcaaggacgtggtgtgcctgtaccagaccctggacaaccccctgagcaagctgaccaccctgaacagcatgcacagccacttcatcctgagcgacgacggcaccgtgggcaagtacggcaacgagatgaagctgagaagaaacctggagaagtacctgagcctgcagaagatccactgcagagagtaccacagaggcagcgtgacccagagcggctgcagacccgccgaggtgttccacggcctgccctag

SEQ ID NO: 103037 - DNA, 6069 bp, synthetic construct
  misc_feature 1..6069: note = Description of Artificial Sequence: Synthetic coding sequence
  source 1..6069: mol_type = other DNA
atgaaggagcagcccgtgctggagagactgcagagccagaagagctggatcaagggcgtgttcgacaagagagagtgcagcaccatcatccccagcagcaagaacccccacagatgcacccccgtgtgccaggtgtgccagaacctgatcagatgctactgcggcagactgatcggcgaccacgccggcatcgactacagctggaccatcagcgccgccaagggcaaggagagcgagcagtggagcgtggagaagcacaccaccaagagccccaccgacaccttcggcaccatcaacttccaggacggcgagcacacccaccacgccaagtacatcagaaccagctacgacaccaagctggaccacctgctgcacctgatgctgaaggagtggaagatggagctgcccaagctggtgatcagcgtgcacggcggcatccagaacttcaccatgcccagcaagttcaaggagatcttcagccagggcctggtgaaggccgccgagaccaccggcgcctggatcatcaccgagggcatcaacaccggcgtgagcaagcacgtgggcgacgccctgaagagccacagcagccacagcctgagaaagatctggaccgtgggcatccccccctggggcgtgatcgagaaccagagagacctgatcggcaaggacgtggtgtgcctgtaccagaccctggacaaccccctgagcaagctgaccaccctgaacagcatgcacagccacttcatcctgagcgacgacggcaccgtgggcaagtacggcaacgagatgaagctgagaagaaacctggagaagtacctgagcctgcagaagatccactgcagaagcagacagggcgtgcccgtggtgggcctggtggtggagggcggccccaacgtgatcctgagcgtgtgggagaccgtgaaggacaaggaccccgtggtggtgtgcgagggcaccggcagagccgccgacctgctggccttcacccacaagcacctggccgacgagggcatgctgagaccccaggtgaaggaggagatcatctgcatgatccagaacaccttcaacttcagcctgaagcagagcaagcacctgttccagatcctgatggagtgcatggtgcacagagactgcatcaccatcttcgacgccgacagcgaggagcagcaggacctggacctggccatcctgaccgccctgctgaagggcaccaacctgagcgccagcgagcagctgaacctggccatggcctgggacagagtggacatcgccaagaagcacatcctgatctacgagcagcactggaagcccgacgccctggagcaggccatgagcgacgccctggtgatggacagagtggacttcgtgaagctgctgatcgagtacggcgtgaacctgcacagattcctgaccatccccagactggaggagctgtacaacaccaagcagggccccaccaacaccctgctgcaccacctggtgcaggacgtgaagcagcacaccctgctgagcggctacagaatcaccctgatcgacatcggcctggtggtggagtacctgatcggcagagcctacagaagcaactacaccagaaagcacttcagagccctgtacaacaacctgtacagaaagtacaagcaccagagacacagcagcggcaacagaaacgagagcgccgagagcaccctgcacagccagttcatcagaaccgcccagccctacaagttcaaggagaagagcatcgtgctgcacaagagcagaaagaagagcaaggagcagaacgtgagcgacgaccccgagagcaccggcttcctgtacccctacaacgacctgctggtgtgggccgtgctgatgaagagacagaagatggccatgttcttctggcagcacggcgaggaggccaccgtgaaggccgtgatcgcctgcatcctgtacagagccatggcccacgaggccaaggagagccacatggtggacgacgccagcgaggagctgaagaactacagcaagcagttcggccagctggccctggacctgctggagaaggccttcaagcagaacgagagaatggccatgaccctgctgacctacgagctgagaaactggagcaacagcacctgcctgaagctggccgtgagcggcggcctgagacccttcgtgagccacacctgcacccagatgctgctgaccgacatgtggatgggcagactgaagatgagaaagaacagctggctgaagatcatcatcagcatcatcctgccccccaccatcctgaccctggagttcaagagcaaggccgagatgagccacgtgccccagagccaggacttccagttcatgtggtactacagcgaccagaacgccagcagcagcaaggagagcgccagcgtgaaggagtacgacctggagagaggccacgacgagaagctggacgagaaccagcacttcggcctggagagcggccaccagcacctgccctggaccagaaaggtgtacgagttctacagcgcccccatcgtgaagttctggttctacaccatggcctacctggccttcctgatgctgttcacctacaccgtgctggtggagatgcagccccagcccagcgtgcaggagtggctggtgagcatctacatcttcaccaacgccatcgaggtggtgagagagatctgcatcagcgagcccggcaagttcacccagaaggtgaaggtgtggatcagcgagtactggaacctgaccgagaccgtggccatcggcctgttcagcgccggcttcgtgctgagatggggcgacccccccttccacaccgccggcagactgatctactgcatcgacatcatcttctggttcagcagactgctggacttcttcgccgtgaaccagcacgccggcccctacgtgaccatgatcgccaagatgaccgccaacatgttctacatcgtgatcatcatggccatcgtgctgctgagcttcggcgtggccagaaaggccatcctgagccccaaggagccccccagctggagcctggccagagacatcgtgttcgagccctactggatgatctacggcgaggtgtacgccggcgagatcgacgtgtgcagcagccagcccagctgcccccccggcagcttcctgacccccttcctgcaggccgtgtacctgttcgtgcagtacatcatcatggtgaacctgctgatcgccttcttcaacaacgtgtacctggacatggagagcatcagcaacaacctgtggaagtacaacagatacagatacatcatgacctaccacgagaagccctggctgcccccccccctgatcctgctgagccacgtgggcctgctgctgagaagactgtgctgccacagagccccccacgaccaggaggagggcgacgtgggcctgaagctgtacctgagcaaggaggacctgaagaagctgcacgacttcgaggagcagtgcgtggagaagtacttccacgagaagatggaggacgtgaactgcagctgcgaggagagaatcagagtgaccagcgagagagtgaccgagatgtacttccagctgaaggagatgaacgagaaggtgagcttcatcaaggacagcctgctgagcctggacagccaggtgggccacctgcaggacctgagcgccctgaccgtggacaccctgaaggtgctgagcgccgtggacaccctgcaggaggacgaggccctgctggccaagagaaagcacagcacctgcaagaagctgccccacagctggagcaacgtgatctgcgccgaggtgctgggcagcatggagatcgccggcgagaagaagtaccagtactacagcatgcccagcagcctgctgagaagcctggccggcggcagacacccccccagagtgcagagaggcgccctgctggagatcaccaacagcaagagagaggccaccaacgtgagaaacgaccaggagagacaggagacccagagcagcatcgtggtgagcggcgtgagccccaacagacaggcccacagcaagtacggccagttcctgctggtgcccagcaacctgaagagagtgcccttcagcgccgagaccgtgctgcccctgagcagacccagcgtgcccgacgtgctggccaccgagcaggacatccagaccgaggtgctggtgcacctgaccggccagacccccgtggtgagcgactgggccagcgtggacgagcccaaggagaagcacgagcccatcgcccacctgctggacggccaggacaaggccgagcaggtgctgcccaccctgagctgcacccccgagcccatgaccatgagcagccccctgagccaggccaagatcatgcagaccggcggcggctacgtgaactgggccttcagcgagggcgacgagaccggcgtgttcagcatcaagaagaagtggcagacctgcctgcccagcacctgcgacagcgacagcagcagaagcgagcagcaccagaagcaggcccaggacagcagcctgagcgacaacagcaccagaagcgcccagagcagcgagtgcagcgaggtgggcccctggctgcagcccaacaccagcttctggatcaaccccctgagaagatacagacccttcgccagaagccacagcttcagattccacaaggaggagaagctgatgaagatctgcaagatcaagaacctgagcggcagcagcgagatcggccagggcgcctgggtgaaggccaagatgctgaccaaggacagaagactgagcaagaagaagaagaacacccagggcctgcaggtgcccatcatcaccgtgaacgcctgcagccagagcgaccagctgaaccccgagcccggcgagaacagcatcagcgaggaggagtacagcaagaactggttcaccgtgagcaagttcagccacaccggcgtggagccctacatccaccagaagatgaagaccaaggagatcggccagtgcgccatccagatcagcgactacctgaagcagagccaggaggacctgagcaagaacagcctgtggaacagcagaagcaccaacctgaacagaaacagcctgctgaagagcagcatcggcgtggacaagatcagcgccagcctgaagagcccccaggagccccaccaccactacagcgccatcgagagaaacaacctgatgagactgagccagaccatccccttcacccccgtgcagctgttcgccggcgaggagatcaccgtgtacagactggaggagagcagccccctgaacctggacaagagcatgagcagctggagccagagaggcagagccgccatgatccaggtgctgagcagagaggagatggacggcggcctgagaaaggccatgagagtggtgagcacctggagcgaggacgacatcctgaagcccggccaggtgttcatcgtgaagagcttcctgcccgaggtggtgagaacctggcacaagatcttccaggagagcaccgtgctgcacctgtgcctgagagagatccagcagcagagagccgcccagaagctgatctacaccttcaaccaggtgaagccccagaccatcccctacacccccagattcctggaggtgttcctgatctactgccacagcgccaaccagtggctgaccatcgagaagtacatgaccggcgagttcagaaagtacaacaacaacaacggcgacgagatcacccccaccaacaccctggaggagctgatgctggccttcagccactggacctacgagtacaccagaggcgagctgctggtgctggacctgcagggcgtgggcgagaacctgaccgaccccagcgtgatcaagcccgaggtgaagcagagcagaggcatggtgttcggccccgccaacctgggcgaggacgccatcagaaacttcatcgccaagcaccactgcaacagctgctgcagaaagctgaagctgcccgacctgaagagaaacgactacagccccgagagaatcaacagcaccttcggcctggagatcaagatcgagagcgccgaggagccccccgccagagagaccggcagaaacagccccgaggacgacatgcagctgtag

SEQ ID NO: 103038 - DNA, 6054 bp, synthetic construct
  misc_feature 1..6054: note = Description of Artificial Sequence: Synthetic coding sequence
  source 1..6054: mol_type = other DNA
atgaccgcccccgtgaccagccagaagagctggatcaagggcgtgttcgacaagagagagtgcagcaccatcatccccagcagcaagaacccccacagatgcacccccgtgtgccaggtgtgccagaacctgatcagatgctactgcggcagactgatcggcgaccacgccggcatcgactacagctggaccatcagcgccgccaagggcaaggagagcgagcagtggagcgtggagaagcacaccaccaagagccccaccgacaccttcggcaccatcaacttccaggacggcgagcacacccaccacgccaagtacatcagaaccagctacgacaccaagctggaccacctgctgcacctgatgctgaaggagtggaagatggagctgcccaagctggtgatcagcgtgcacggcggcatccagaacttcaccatgcccagcaagttcaaggagatcttcagccagggcctggtgaaggccgccgagaccaccggcgcctggatcatcaccgagggcatcaacaccggcgtgagcaagcacgtgggcgacgccctgaagagccacagcagccacagcctgagaaagatctggaccgtgggcatccccccctggggcgtgatcgagaaccagagagacctgatcggcaaggacgtggtgtgcctgtaccagaccctggacaaccccctgagcaagctgaccaccctgaacagcatgcacagccacttcatcctgagcgacgacggcaccgtgggcaagtacggcaacgagatgaagctgagaagaaacctggagaagtacctgagcctgcagaagatccactgcagaagcagacagggcgtgcccgtggtgggcctggtggtggagggcggccccaacgtgatcctgagcgtgtgggagaccgtgaaggacaaggaccccgtggtggtgtgcgagggcaccggcagagccgccgacctgctggccttcacccacaagcacctggccgacgagggcatgctgagaccccaggtgaaggaggagatcatctgcatgatccagaacaccttcaacttcagcctgaagcagagcaagcacctgttccagatcctgatggagtgcatggtgcacagagactgcatcaccatcttcgacgccgacagcgaggagcagcaggacctggacctggccatcctgaccgccctgctgaagggcaccaacctgagcgccagcgagcagctgaacctggccatggcctgggacagagtggacatcgccaagaagcacatcctgatctacgagcagcactggaagcccgacgccctggagcaggccatgagcgacgccctggtgatggacagagtggacttcgtgaagctgctgatcgagtacggcgtgaacctgcacagattcctgaccatccccagactggaggagctgtacaacaccaagcagggccccaccaacaccctgctgcaccacctggtgcaggacgtgaagcagcacaccctgctgagcggctacagaatcaccctgatcgacatcggcctggtggtggagtacctgatcggcagagcctacagaagcaactacaccagaaagcacttcagagccctgtacaacaacctgtacagaaagtacaagcaccagagacacagcagcggcaacagaaacgagagcgccgagagcaccctgcacagccagttcatcagaaccgcccagccctacaagttcaaggagaagagcatcgtgctgcacaagagcagaaagaagagcaaggagcagaacgtgagcgacgaccccgagagcaccggcttcctgtacccctacaacgacctgctggtgtgggccgtgctgatgaagagacagaagatggccatgttcttctggcagcacggcgaggaggccaccgtgaaggccgtgatcgcctgcatcctgtacagagccatggcccacgaggccaaggagagccacatggtggacgacgccagcgaggagctgaagaactacagcaagcagttcggccagctggccctggacctgctggagaaggccttcaagcagaacgagagaatggccatgaccctgctgacctacgagctgagaaactggagcaacagcacctgcctgaagctggccgtgagcggcggcctgagacccttcgtgagccacacctgcacccagatgctgctgaccgacatgtggatgggcagactgaagatgagaaagaacagctggctgaagatcatcatcagcatcatcctgccccccaccatcctgaccctggagttcaagagcaaggccgagatgagccacgtgccccagagccaggacttccagttcatgtggtactacagcgaccagaacgccagcagcagcaaggagagcgccagcgtgaaggagtacgacctggagagaggccacgacgagaagctggacgagaaccagcacttcggcctggagagcggccaccagcacctgccctggaccagaaaggtgtacgagttctacagcgcccccatcgtgaagttctggttctacaccatggcctacctggccttcctgatgctgttcacctacaccgtgctggtggagatgcagccccagcccagcgtgcaggagtggctggtgagcatctacatcttcaccaacgccatcgaggtggtgagagagatctgcatcagcgagcccggcaagttcacccagaaggtgaaggtgtggatcagcgagtactggaacctgaccgagaccgtggccatcggcctgttcagcgccggcttcgtgctgagatggggcgacccccccttccacaccgccggcagactgatctactgcatcgacatcatcttctggttcagcagactgctggacttcttcgccgtgaaccagcacgccggcccctacgtgaccatgatcgccaagatgaccgccaacatgttctacatcgtgatcatcatggccatcgtgctgctgagcttcggcgtggccagaaaggccatcctgagccccaaggagccccccagctggagcctggccagagacatcgtgttcgagccctactggatgatctacggcgaggtgtacgccggcgagatcgacgtgtgcagcagccagcccagctgcccccccggcagcttcctgacccccttcctgcaggccgtgtacctgttcgtgcagtacatcatcatggtgaacctgctgatcgccttcttcaacaacgtgtacctggacatggagagcatcagcaacaacctgtggaagtacaacagatacagatacatcatgacctaccacgagaagccctggctgcccccccccctgatcctgctgagccacgtgggcctgctgctgagaagactgtgctgccacagagccccccacgaccaggaggagggcgacgtgggcctgaagctgtacctgagcaaggaggacctgaagaagctgcacgacttcgaggagcagtgcgtggagaagtacttccacgagaagatggaggacgtgaactgcagctgcgaggagagaatcagagtgaccagcgagagagtgaccgagatgtacttccagctgaaggagatgaacgagaaggtgagcttcatcaaggacagcctgctgagcctggacagccaggtgggccacctgcaggacctgagcgccctgaccgtggacaccctgaaggtgctgagcgccgtggacaccctgcaggaggacgaggccctgctggccaagagaaagcacagcacctgcaagaagctgccccacagctggagcaacgtgatctgcgccgaggtgctgggcagcatggagatcgccggcgagaagaagtaccagtactacagcatgcccagcagcctgctgagaagcctggccggcggcagacacccccccagagtgcagagaggcgccctgctggagatcaccaacagcaagagagaggccaccaacgtgagaaacgaccaggagagacaggagacccagagcagcatcgtggtgagcggcgtgagccccaacagacaggcccacagcaagtacggccagttcctgctggtgcccagcaacctgaagagagtgcccttcagcgccgagaccgtgctgcccctgagcagacccagcgtgcccgacgtgctggccaccgagcaggacatccagaccgaggtgctggtgcacctgaccggccagacccccgtggtgagcgactgggccagcgtggacgagcccaaggagaagcacgagcccatcgcccacctgctggacggccaggacaaggccgagcaggtgctgcccaccctgagctgcacccccgagcccatgaccatgagcagccccctgagccaggccaagatcatgcagaccggcggcggctacgtgaactgggccttcagcgagggcgacgagaccggcgtgttcagcatcaagaagaagtggcagacctgcctgcccagcacctgcgacagcgacagcagcagaagcgagcagcaccagaagcaggcccaggacagcagcctgagcgacaacagcaccagaagcgcccagagcagcgagtgcagcgaggtgggcccctggctgcagcccaacaccagcttctggatcaaccccctgagaagatacagacccttcgccagaagccacagcttcagattccacaaggaggagaagctgatgaagatctgcaagatcaagaacctgagcggcagcagcgagatcggccagggcgcctgggtgaaggccaagatgctgaccaaggacagaagactgagcaagaagaagaagaacacccagggcctgcaggtgcccatcatcaccgtgaacgcctgcagccagagcgaccagctgaaccccgagcccggcgagaacagcatcagcgaggaggagtacagcaagaactggttcaccgtgagcaagttcagccacaccggcgtggagccctacatccaccagaagatgaagaccaaggagatcggccagtgcgccatccagatcagcgactacctgaagcagagccaggaggacctgagcaagaacagcctgtggaacagcagaagcaccaacctgaacagaaacagcctgctgaagagcagcatcggcgtggacaagatcagcgccagcctgaagagcccccaggagccccaccaccactacagcgccatcgagagaaacaacctgatgagactgagccagaccatccccttcacccccgtgcagctgttcgccggcgaggagatcaccgtgtacagactggaggagagcagccccctgaacctggacaagagcatgagcagctggagccagagaggcagagccgccatgatccaggtgctgagcagagaggagatggacggcggcctgagaaaggccatgagagtggtgagcacctggagcgaggacgacatcctgaagcccggccaggtgttcatcgtgaagagcttcctgcccgaggtggtgagaacctggcacaagatcttccaggagagcaccgtgctgcacctgtgcctgagagagatccagcagcagagagccgcccagaagctgatctacaccttcaaccaggtgaagccccagaccatcccctacacccccagattcctggaggtgttcctgatctactgccacagcgccaaccagtggctgaccatcgagaagtacatgaccggcgagttcagaaagtacaacaacaacaacggcgacgagatcacccccaccaacaccctggaggagctgatgctggccttcagccactggacctacgagtacaccagaggcgagctgctggtgctggacctgcagggcgtgggcgagaacctgaccgaccccagcgtgatcaagcccgaggtgaagcagagcagaggcatggtgttcggccccgccaacctgggcgaggacgccatcagaaacttcatcgccaagcaccactgcaacagctgctgcagaaagctgaagctgcccgacctgaagagaaacgactacagccccgagagaatcaacagcaccttcggcctggagatcaagatcgagagcgccgaggagccccccgccagagagaccggcagaaacagccccgaggacgacatgcagctgtag

SEQ ID NO: 103039 - DNA, 5844 bp, synthetic construct
  misc_feature 1..5844: note = Description of Artificial Sequence: Synthetic coding sequence
  source 1..5844: mol_type = other DNA
atgaaggagcagcccgtgctggagagactgcagagccagaagagctggatcaagggcgtgttcgacaagagagagtgcagcaccatcatccccagcagcaagaacccccacagatgcacccccgtgtgccaggtgtgccagaacctgatcagatgctactgcggcagactgatcggcgaccacgccggcatcgactacagctggaccatcagcgccgccaagggcaaggagagcgagcagtggagcgtggagaagcacaccaccaagagccccaccgacaccttcggcaccatcaacttccaggacggcgagcacacccaccacgccaagtacatcagaaccagctacgacaccaagctggaccacctgctgcacctgatgctgaaggagtggaagatggagctgcccaagctggtgatcagcgtgcacggcggcatccagaacttcaccatgcccagcaagttcaaggagatcttcagccagggcctggtgaaggccgccgagaccaccggcgcctggatcatcaccgagggcatcaacaccggcgtgagcaagcacgtgggcgacgccctgaagagccacagcagccacagcctgagaaagatctggaccgtgggcatccccccctggggcgtgatcgagaaccagagagacctgatcggcaaggacgtggtgtgcctgtaccagaccctggacaaccccctgagcaagctgaccaccctgaacagcatgcacagccacttcatcctgagcgacgacggcaccgtgggcaagtacggcaacgagatgaagctgagaagaaacctggagaagtacctgagcctgcagaagatccactgcagaagcagacagggcgtgcccgtggtgggcctggtggtggagggcggccccaacgtgatcctgagcgtgtgggagaccgtgaaggacaaggaccccgtggtggtgtgcgagggcaccggcagagccgccgacctgctggccttcacccacaagcacctggccgacgagggcatgctgagaccccaggtgaaggaggagatcatctgcatgatccagaacaccttcaacttcagcctgaagcagagcaagcacctgttccagatcctgatggagtgcatggtgcacagagactgcatcaccatcttcgacgccgacagcgaggagcagcaggacctggacctggccatcctgaccgccctgctgaagggcaccaacctgagcgccagcgagcagctgaacctggccatggcctgggacagagtggacatcgccaagaagcacatcctgatctacgagcagcactggaagcccgacgccctggagcaggccatgagcgacgccctggtgatggacagagtggacttcgtgaagctgctgatcgagtacggcgtgaacctgcacagattcctgaccatccccagactggaggagctgtacaacaccaagcagggccccaccaacaccctgctgcaccacctggtgcaggacgtgaagcagcacaccctgctgagcggctacagaatcaccctgatcgacatcggcctggtggtggagtacctgatcggcagagcctacagaagcaactacaccagaaagcacttcagagccctgtacaacaacctgtacagaaagtacaagcaccagagacacagcagcggcaacagaaacgagagcgccgagagcaccctgcacagccagttcatcagaaccgcccagccctacaagttcaaggagaagagcatcgtgctgcacaagagcagaaagaagagcaaggagcagaacgtgagcgacgaccccgagagcaccggcttcctgtacccctacaacgacctgctggtgtgggccgtgctgatgaagagacagaagatggccatgttcttctggcagcacggcgaggaggccaccgtgaaggccgtgatcgcctgcatcctgtacagagccatggcccacgaggccaaggagagccacatggtggacgacgccagcgaggagctgaagaactacagcaagcagttcggccagctggccctggacctgctggagaaggccttcaagcagaacgagagaatggccatgaccctgctgacctacgagctgagaaactggagcaacagcacctgcctgaagctggccgtgagcggcggcctgagacccttcgtgagccacacctgcacccagatgctgctgaccgacatgtggatgggcagactgaagatgagaaagaacagctggctgaagatcatcatcagcatcatcctgccccccaccatcctgaccctggagttcaagagcaaggccgagatgagccacgtgccccagagccaggacttccagttcatgtggtactacagcgaccagaacgccagcagcagcaaggagagcgccagcgtgaaggagtacgacctggagagaggccacgacgagaagctggacgagaaccagcacttcggcctggagagcggccaccagcacctgccctggaccagaaaggtgtacgagttctacagcgcccccatcgtgaagttctggttctacaccatggcctacctggccttcctgatgctgttcacctacaccgtgctggtggagatgcagccccagcccagcgtgcaggagtggctggtgagcatctacatcttcaccaacgccatcgaggtggtgagagagatctgcatcagcgagcccggcaagttcacccagaaggtgaaggtgtggatcagcgagtactggaacctgaccgagaccgtggccatcggcctgttcagcgccggcttcgtgctgagatggggcgacccccccttccacaccgccggcagactgatctactgcatcgacatcatcttctggttcagcagactgctggacttcttcgccgtgaaccagcacgccggcccctacgtgaccatgatcgccaagatgaccgccaacatgttctacatcgtgatcatcatggccatcgtgctgctgagcttcggcgtggccagaaaggccatcctgagccccaaggagccccccagctggagcctggccagagacatcgtgttcgagccctactggatgatctacggcgaggtgtacgccggcgagatcgacgtgtgcagcagccagcccagctgcccccccggcagcttcctgacccccttcctgcaggccgtgtacctgttcgtgcagtacatcatcatggtgaacctgctgatcgccttcttcaacaacgtgtacctggacatggagagcatcagcaacaacctgtggaagtacaacagatacagatacatcatgacctaccacgagaagccctggctgcccccccccctgatcctgctgagccacgtgggcctgctgctgagaagactgtgctgccacagagccccccacgaccaggaggagggcgacgtgggcctgaagctgtacctgagcaaggaggacctgaagaagctgcacgacttcgaggagcagtgcgtggagaagtacttccacgagaagatggaggacgtgaactgcagctgcgaggagagaatcagagtgaccagcgagagagtgaccgagatgtacttccagctgaaggagatgaacgagaaggtgagcttcatcaaggacagcctgctgagcctggacagccaggtgggccacctgcaggacctgagcgccctgaccgtggacaccctgaaggtgctgagcgccgtggacaccctgcaggaggacgaggccctgctggccaagagaaagcacagcacctgcaagaagctgccccacagctggagcaacgtgatctgcgccgaggtgctgggcagcatggagatcgccggcgagaagaagtaccagtactacagcatgcccagcagcctgctgagaagcctggccggcggcagacacccccccagagtgcagagaggcgccctgctggagatcaccaacagcaagagagaggccaccaacgtgagaaacgaccaggagagacaggagacccagagcagcatcgtggtgagcggcgtgagccccaacagacaggcccacagcaagtacggccagttcctgctggtgcccagcaacctgaagagagtgcccttcagcgccgagaccgtgctgcccctgagcagacccagcgtgcccgacgtgctggccaccgagcaggacatccagaccgaggtgctggtgcacctgaccggccagacccccgtggtgagcgactgggccagcgtggacgagcccaaggagaagcacgagcccatcgcccacctgctggacggccaggacaaggccgagcaggtgctgcccaccctgagctgcacccccgagcccatgaccatgagcagccccctgagccaggccaagatcatgcagaccggcggcggctacgtgaactgggccttcagcgagggcgacgagaccggcgtgttcagcatcaagaagaagtggcagacctgcctgcccagcacctgcgacagcgacagcagcagaagcgagcagcaccagaagcaggcccaggacagcagcctgagcgacaacagcaccagaagcgcccagagcagcgagtgcagcgaggtgggcccctggctgcagcccaacaccagcttctggatcaaccccctgagaagatacagacccttcgccagaagccacagcttcagattccacaaggaggagaagctgatgaagatctgcaagatcaagaacctgagcggcagcagcgagatcggccagggcgcctgggtgaaggccaagatgctgaccaaggacagaagactgagcaagaagaagaagaacacccagggcctgcaggtgcccatcatcaccgtgaacgcctgcagccagagcgaccagctgaaccccgagcccggcgagaacagcatcagcgaggaggagtacagcaagaactggttcaccgtgagcaagttcagccacaccggcgtggagccctacatccaccagaagatgaagaccaaggagatcggccagtgcgccatccagatcagcgactacctgaagcagagccaggaggacctgagcaagaacagcctgtggaacagcagaagcaccaacctgaacagaaacagcctgcacgtgatcaagatgcccatcagcagcctgatcagcgagatcagcgccagcctgaagagcccccaggagccccaccaccactacagcgccatcgagagaaacaacctgatgagactgagccagaccatccccttcacccccgtgcagctgttcgccggcgaggagatcaccgtgtacagactggaggagagcagccccctgaacctggacaagagcatgagcagctggagccagagaggcagagccgccatgatccaggtgctgagcagagaggagatggacggcggcctgagaaaggccatgagagtggtgagcacctggagcgaggacgacatcctgaagcccggccaggtgttcatcgtgaagagcttcctgcccgaggtggtgagaacctggcacaagatcttccaggagagcaccgtgctgcacctgtgcctgagagagatccagcagcagagagccgcccagaagctgatctacaccttcaaccaggtgaagccccagaccatcccctacacccccagattcctggaggtgttcctgatctactgccacagcgccaaccagtggctgaccatcgagaagtacatgaccggcgagttcagaaagtacaacaacaacaacggcgacgagatcacccccaccaacaccctggaggagctgatgctggccttcagccactggacctacgagtacaccagaggcgagctgctggtgctggacctgcaggccctgtggttctgggacagcatgctgaaggccagactgggcggctggagaatgtag

SEQ ID NO: 103040 - DNA, 1707 bp, synthetic construct
  misc_feature 1..1707: note = Description of Artificial Sequence: Synthetic coding sequence
  source 1..1707: mol_type = other DNA
agagagagcccccaccccgccctgctgcagagccagaagagctggatcaagggcgtgttcgacaagagagagtgcagcaccatcatccccagcagcaagaacccccacagatgcacccccgtgtgccaggtgtgccagaacctgatcagatgctactgcggcagactgatcggcgaccacgccggcatcgactacagctggaccatcagcgccgccaagggcaaggagagcgagcagtggagcgtggagaagcacaccaccaagagccccaccgacaccttcggcaccatcaacttccaggacggcgagcacacccaccacgccaagtacatcagaaccagctacgacaccaagctggaccacctgctgcacctgatgctgaaggagtggaagatggagctgcccaagctggtgatcagcgtgcacggcggcatccagaacttcaccatgcccagcaagttcaaggagatcttcagccagggcctggtgaaggccgccgagaccaccggcgcctggatcatcaccgagggcatcaacaccggcgtgagcaagcacgtgggcgacgccctgaagagccacagcagccacagcctgagaaagatctggaccgtgggcatccccccctggggcgtgatcgagaaccagagagacctgatcggcaaggacgtggtgtgcctgtaccagaccctggacaaccccctgagcaagctgaccaccctgaacagcatgcacagccacttcatcctgagcgacgacggcaccgtgggcaagtacggcaacgagatgaagctgagaagaaacctggagaagtacctgagcctgcagaagatccactgccccggcgaggagatcaccgtgtacagactggaggagagcagccccctgaacctggacaagagcatgagcagctggagccagagaggcagagccgccatgatccaggtgctgagcagagaggagatggacggcggcctgagaaaggccatgagagtggtgagcacctggagcgaggacgacatcctgaagcccggccaggtgttcatcgtgaagagcttcctgcccgaggtggtgagaacctggcacaagatcttccaggagagcaccgtgctgcacctgtgcctgagagagatccagcagcagagagccgcccagaagctgatctacaccttcaaccaggtgaagccccagaccatcccctacacccccagattcctggaggtgttcctgatctactgccacagcgccaaccagtggctgaccatcgagaagtacatgaccggcgagttcagaaagtacaacaacaacaacggcgacgagatcacccccaccaacaccctggaggagctgatgctggccttcagccactggacctacgagtacaccagaggcgagctgctggtgctggacctgcagggcgtgggcgagaacctgaccgaccccagcgtgatcaagcccgaggtgaagcagagcagaggcatggtgttcggccccgccaacctgggcgaggacgccatcagaaacttcatcgccaagcaccactgcaacagctgctgcagaaagctgaagctgcccgacctgaagagaaacgactacagccccgagagaatcaacagcaccttcggcctggagatcaagatcgagagcgccgaggagccccccgccagagagaccggcagaaacagccccgaggacgacatgcagctgtag

SEQ ID NO: 103041 - DNA, 2580 bp, synthetic construct
  misc_feature 1..2580: note = Description of Artificial Sequence: Synthetic coding sequence
  source 1..2580: mol_type = other DNA
atgaaggagcagcccgtgctggagagactgcagagccagaagagctggatcaagggcgtgttcgacaagagagagtgcagcaccatcatccccagcagcaagaacccccacagatgcacccccgtgtgccaggtgtgccagaacctgatcagatgctactgcggcagactgatcggcgaccacgccggcatcgactacagctggaccatcagcgccgccaagggcaaggagagcgagcagtggagcgtggagaagcacaccaccaagagccccaccgacaccttcggcaccatcaacttccaggacggcgagcacacccaccacgccaagtacatcagaaccagctacgacaccaagctggaccacctgctgcacctgatgctgaaggagtggaagatggagctgcccaagctggtgatcagcgtgcacggcggcatccagaacttcaccatgcccagcaagttcaaggagatcttcagccagggcctggtgaaggccgccgagaccaccggcgcctggatcatcaccgagggcatcaacaccggcgtgagcaagcacgtgggcgacgccctgaagagccacagcagccacagcctgagaaagatctggaccgtgggcatccccccctggggcgtgatcgagaaccagagagacctgatcggcaaggacgtggtgtgcctgtaccagaccctggacaaccccctgagcaagctgaccaccctgaacagcatgcacagccacttcatcctgagcgacgacggcaccgtgggcaagtacggcaacgagatgaagctgagaagaaacctggagaagtacctgagcctgcagaagatccactgcagaagcagacagggcgtgcccgtggtgggcctggtggtggagggcggccccaacgtgatcctgagcgtgtgggagaccgtgaaggacaaggaccccgtggtggtgtgcgagggcaccggcagagccgccgacctgctggccttcacccacaagcacctggccgacgagggcatgctgagaccccaggtgaaggaggagatcatctgcatgatccagaacaccttcaacttcagcctgaagcagagcaagcacctgttccagatcctgatggagtgcatggtgcacagagactgcatcaccatcttcgacgccgacagcgaggagcagcaggacctggacctggccatcctgaccgccctgctgaagggcaccaacctgagcgccagcgagcagctgaacctggccatggcctgggacagagtggacatcgccaagaagcacatcctgatctacgagcagcactggaagcccgacgccctggagcaggccatgagcgacgccctggtgatggacagagtggacttcgtgaagctgctgatcgagtacggcgtgaacctgcacagattcctgaccatccccagactggaggagctgtacaacaccaagcagggccccaccaacaccctgctgcaccacctggtgcaggacgtgaagcaggacctgagcaagaacagcctgtggaacagcagaagcaccaacctgaacagaaacagcctgcacgtgatcaagatgcccatcagcagcctgatcagcgagatcagcgccagcctgaagagcccccaggagccccaccaccactacagcgccatcgagagaaacaacctgatgagactgagccagaccatccccttcacccccgtgcagctgttcgccggcgaggagatcaccgtgtacagactggaggagagcagccccctgaacctggacaagagcatgagcagctggagccagagaggcagagccgccatgatccaggtgctgagcagagaggagatggacggcggcctgagaaaggccatgagagtggtgagcacctggagcgaggacgacatcctgaagcccggccaggtgttcatcgtgaagagcttcctgcccgaggtggtgagaacctggcacaagatcttccaggagagcaccgtgctgcacctgtgcctgagagagatccagcagcagagagccgcccagaagctgatctacaccttcaaccaggtgaagccccagaccatcccctacacccccagattcctggaggtgttcctgatctactgccacagcgccaaccagtggctgaccatcgagaagtacatgaccggcgagttcagaaagtacaacaacaacaacggcgacgagatcacccccaccaacaccctggaggagctgatgctggccttcagccactggacctacgagtacaccagaggcgagctgctggtgctggacctgcagggcgtgggcgagaacctgaccgaccccagcgtgatcaagcccgaggtgaagcagagcagaggcatggtgttcggccccgccaacctgggcgaggacgccatcagaaacttcatcgccaagcaccactgcaacagctgctgcagaaagctgaagctgcccgacctgaagagaaacgactacagccccgagagaatcaacagcaccttcggcctggagatcaagatcgagagcgccgaggagccccccgccagagagaccggcagaaacagccccgaggacgacatgcagctgtag

SEQ ID NO: 103042 - DNA, 2934 bp, synthetic construct
  misc_feature 1..2934: note = Description of Artificial Sequence: Synthetic coding sequence
  source 1..2934: mol_type = other DNA
atgaaggagcagcccgtgctggagagactgcagagccagaagagctggatcaagggcgtgttcgacaagagagagtgcagcaccatcatccccagcagcaagaacccccacagatgcacccccgtgtgccaggtgtgccagaacctgatcagatgctactgcggcagactgatcggcgaccacgccggcatcgactacagctggaccatcagcgccgccaagggcaaggagagcgagcagtggagcgtggagaagcacaccaccaagagccccaccgacaccttcggcaccatcaacttccaggacggcgagcacacccaccacgccaagtacatcagaaccagctacgacaccaagctggaccacctgctgcacctgatgctgaaggagtggaagatggagctgcccaagctggtgatcagcgtgcacggcggcatccagaacttcaccatgcccagcaagttcaaggagatcttcagccagggcctggtgaaggccgccgagaccaccggcgcctggatcatcaccgagggcatcaacaccggcgtgagcaagcacgtgggcgacgccctgaagagccacagcagccacagcctgagaaagatctggaccgtgggcatccccccctggggcgtgatcgagaaccagagagacctgatcggcaaggacgtggtgtgcctgtaccagaccctggacaaccccctgagcaagctgaccaccctgaacagcatgcacagccacttcatcctgagcgacgacggcaccgtgggcaagtacggcaacgagatgaagctgagaagaaacctggagaagtacctgagcctgcagaagatccactgcagaagcagacagggcgtgcccgtggtgggcctggtggtggagggcggccccaacgtgatcctgagcgtgtgggagaccgtgaaggacaaggaccccgtggtggtgtgcgagggcaccggcagagccgccgacctgctggccttcacccacaagcacctggccgacgagggcatgctgagaccccaggtgaaggaggagatcatctgcatgatccagaacaccttcaacttcagcctgaagcagagcaagcacctgttccagatcctgatggagtgcatggtgcacagagactgcatcaccatcttcgacgccgacagcgaggagcagcaggacctggacctggccatcctgaccgccctgctgaagggcaccaacctgagcgccagcgagcagctgaacctggccatggcctgggacagagtggacatcgccaagaagcacatcctgatctacgagcagcactggaagcccgacgccctggagcaggccatgagcgacgccctggtgatggacagagtggacttcgtgaagctgctgatcgagtacggcgtgaacctgcacagattcctgaccatccccagactggaggagctgtacaacaccaagcagggccccaccaacaccctgctgcaccacctggtgcaggacgtgaagcagcacaccctgctgagcggctacagaatcaccctgatcgacatcggcctggtggtggagtacctgatcggcagagcctacagaagcaactacaccagaaagcacttcagagccctgtacaacaacctgtacagaaagtacaagatcatcaccgtgaacgcctgcagccagagcgaccagctgaaccccgagcccggcgagaacagcatcagcgaggaggagtacagcaagaactggttcaccgtgagcaagttcagccacaccggcgtggagccctacatccaccagaagatgaagaccaaggagatcggccagtgcgccatccagatcagcgactacctgaagcagagccaggaggacctgagcaagaacagcctgtggaacagcagaagcaccaacctgaacagaaacagcctgcacgtgatcaagatgcccatcagcagcctgatcagcgagatcagcgccagcctgaagagcccccaggagccccaccaccactacagcgccatcgagagaaacaacctgatgagactgagccagaccatccccttcacccccgtgcagctgttcgccggcgaggagatcaccgtgtacagactggaggagagcagccccctgaacctggacaagagcatgagcagctggagccagagaggcagagccgccatgatccaggtgctgagcagagaggagatggacggcggcctgagaaaggccatgagagtggtgagcacctggagcgaggacgacatcctgaagcccggccaggtgttcatcgtgaagagcttcctgcccgaggtggtgagaacctggcacaagatcttccaggagagcaccgtgctgcacctgtgcctgagagagatccagcagcagagagccgcccagaagctgatctacaccttcaaccaggtgaagccccagaccatcccctacacccccagattcctggaggtgttcctgatctactgccacagcgccaaccagtggctgaccatcgagaagtacatgaccggcgagttcagaaagtacaacaacaacaacggcgacgagatcacccccaccaacaccctggaggagctgatgctggccttcagccactggacctacgagtacaccagaggcgagctgctggtgctggacctgcagggcgtgggcgagaacctgaccgaccccagcgtgatcaagcccgaggtgaagcagagcagaggcatggtgttcggccccgccaacctgggcgaggacgccatcagaaacttcatcgccaagcaccactgcaacagctgctgcagaaagctgaagctgcccgacctgaagagaaacgactacagccccgagagaatcaacagcaccttcggcctggagatcaagatcgagagcgccgaggagccccccgccagagagaccggcagaaacagccccgaggacgacatgcagctgtag

SEQ ID NO: 103043 - DNA, 3402 bp, synthetic construct
  misc_feature 1..3402: note = Description of Artificial Sequence: Synthetic coding sequence
  source 1..3402: mol_type = other DNA
atgctgagaccccaggtgaaggaggagatcatctgcatgatccagaacaccttcaacttcagcctgaagcagagcaagcacctgttccagatcctgatggagtgcatggtgcacagagactgcatcaccatcttcgacgccgacagcgaggagcagcaggacctggacctggccatcctgaccgccctgctgaagggcaccaacctgagcgccagcgagcagctgaacctggccatggcctgggacagagtggacatcgccaagaagcacatcctgatctacgagcagcactggaagcccgacgccctggagcaggccatgagcgacgccctggtgatggacagagtggacttcgtgaagctgctgatcgagtacggcgtgaacctgcacagattcctgaccatccccagactggaggagctgtacaacaccaagcagggccccaccaacaccctgctgcaccacctggtgcaggacgtgaagcagcacaccctgctgagcggctacagaatcaccctgatcgacatcggcctggtggtggagtacctgatcggcagagcctacagaagcaactacaccagaaagcacttcagagccctgtacaacaacctgtacagaaagtacaagcaccagagacacagcagcggcaacagaaacgagagcgccgagagcaccctgcacagccagttcatcagaaccgcccagccctacaagttcaaggagaagagcatcgtgctgcacaagagcagaaagaagagcaaggagcagaacgtgagcgacgaccccgagagcaccggcttcctgtacccctacaacgacctgctggtgtgggccgtgctgatgaagagacagaagatggccatgttcttctggcagcacggcgaggaggccaccgtgaaggccgtgatcgcctgcatcctgtacagagccatggcccacgaggccaaggagagccacatggtggacgacgccagcgaggagctgaagaactacagcaagcagttcggccagctggccctggacctgctggagaaggccttcaagcagaacgagagaatggccatgaccctgctgacctacgagctgagaaactggagcaacagcacctgcctgaagctggccgtgagcggcggcctgagacccttcgtgagccacacctgcacccagatgctgctgaccgacatgtggatgggcagactgaagatgagaaagaacagctggctgaagatcatcatcagcatcatcctgccccccaccatcctgaccctggagttcaagagcaaggccgagatgagccacgtgccccagagccaggacttccagttcatgtggtactacagcgaccagaacgccagcagcagcaaggagagcgccagcgtgaaggagtacgacctggagagaggccacgacgagaagctggacgagaaccagcacttcggcctggagagcggccaccagcacctgccctggaccagaaaggtgtacgagttctacagcgcccccatcgtgaagttctggttctacaccatggcctacctggccttcctgatgctgttcacctacaccgtgctggtggagatgcagccccagcccagcgtgcaggagtggctggtgagcatctacatcttcaccaacgccatcgaggtggtgagagagatctgcatcagcgagcccggcaagttcacccagaaggtgaaggtgtggatcagcgagtactggaacctgaccgagaccgtggccatcggcctgttcagcgccggcttcgtgctgagatggggcgacccccccttccacaccgccggcagactgatctactgcatcgacatcatcttctggttcagcagactgctggacttcttcgccgtgaaccagcacgccggcccctacgtgaccatgatcgccaagatgaccgccaacatgttctacatcgtgatcatcatggccatcgtgctgctgagcttcggcgtggccagaaaggccatcctgagccccaaggagccccccagctggagcctggccagagacatcgtgttcgagccctactggatgatctacggcgaggtgtacgccggcgagatcgacgtgtgcagcagccagcccagctgcccccccggcagcttcctgacccccttcctgcaggccgtgtacctgttcgtgcagtacatcatcatggtgaacctgctgatcgccttcttcaacaacgtgtacctggacatggagagcatcagcaacaacctgtggaagtacaacagatacagatacatcatgacctaccacgagaagccctggctgcccccccccctgatcctgctgagccacgtgggcctgctgctgagaagactgtgctgccacagagccccccacgaccaggaggagggcgacgtgggcctgaagctgtacctgagcaaggaggacctgaagaagctgcacgacttcgaggagcagtgcgtggagaagtacttccacgagaagatggaggacgtgaactgcagctgcgaggagagaatcagagtgaccagcgagagagtgaccgagatgtacttccagctgaaggagatgaacgagaaggtgagcttcatcaaggacagcctgctgagcctggacagccaggtgggccacctgcaggacctgagcgccctgaccgtggacaccctgaaggtgctgagcgccgtggacaccctgcaggaggacgaggccctgctggccaagagaaagcacagcacctgcaagaagctgccccacagctggagcaacgtgatctgcgccgaggtgctgggcagcatggagatcgccggcgagaagaagtaccagtactacagcatgcccagcagcctgctgagaagcctggccggcggcagacacccccccagagtgcagagaggcgccctgctggagatcaccaacagcaagagagaggccaccaacgtgagaaacgaccaggagagacaggagacccagagcagcatcgtggtgagcggcgtgagccccaacagacaggcccacagcaagtacggccagttcctgctggtgcccagcaacctgaagagagtgcccttcagcgccgagaccgtgctgcccctgagcagacccagcgtgcccgacgtgctggccaccgagcaggacatccagaccgaggtgctggtgcacctgaccggccagacccccgtggtgagcgactgggccagcgtggacgagcccaaggagaagcacgagcccatcgcccacctgctggacggccaggacaaggccgagcaggtgctgcccaccctgagctgcacccccgagcccatgaccatgagcagccccctgagcagatacagacccttcgccagaagccacagcttcagattccacaaggaggagaagctgatgaagatctgcaagatcaagagcaaggagtag

SEQ ID NO: 103044 - DNA, 6054 bp, synthetic construct
  misc_feature 1..6054: note = Description of Artificial Sequence: Synthetic coding sequence
  source 1..6054: mol_type = other DNA
atgatcatcctgagcaagagccagaagagctggatcaagggcgtgttcgacaagagagagtgcagcaccatcatccccagcagcaagaacccccacagatgcacccccgtgtgccaggtgtgccagaacctgatcagatgctactgcggcagactgatcggcgaccacgccggcatcgactacagctggaccatcagcgccgccaagggcaaggagagcgagcagtggagcgtggagaagcacaccaccaagagccccaccgacaccttcggcaccatcaacttccaggacggcgagcacacccaccacgccaagtacatcagaaccagctacgacaccaagctggaccacctgctgcacctgatgctgaaggagtggaagatggagctgcccaagctggtgatcagcgtgcacggcggcatccagaacttcaccatgcccagcaagttcaaggagatcttcagccagggcctggtgaaggccgccgagaccaccggcgcctggatcatcaccgagggcatcaacaccggcgtgagcaagcacgtgggcgacgccctgaagagccacagcagccacagcctgagaaagatctggaccgtgggcatccccccctggggcgtgatcgagaaccagagagacctgatcggcaaggacgtggtgtgcctgtaccagaccctggacaaccccctgagcaagctgaccaccctgaacagcatgcacagccacttcatcctgagcgacgacggcaccgtgggcaagtacggcaacgagatgaagctgagaagaaacctggagaagtacctgagcctgcagaagatccactgcagaagcagacagggcgtgcccgtggtgggcctggtggtggagggcggccccaacgtgatcctgagcgtgtgggagaccgtgaaggacaaggaccccgtggtggtgtgcgagggcaccggcagagccgccgacctgctggccttcacccacaagcacctggccgacgagggcatgctgagaccccaggtgaaggaggagatcatctgcatgatccagaacaccttcaacttcagcctgaagcagagcaagcacctgttccagatcctgatggagtgcatggtgcacagagactgcatcaccatcttcgacgccgacagcgaggagcagcaggacctggacctggccatcctgaccgccctgctgaagggcaccaacctgagcgccagcgagcagctgaacctggccatggcctgggacagagtggacatcgccaagaagcacatcctgatctacgagcagcactggaagcccgacgccctggagcaggccatgagcgacgccctggtgatggacagagtggacttcgtgaagctgctgatcgagtacggcgtgaacctgcacagattcctgaccatccccagactggaggagctgtacaacaccaagcagggccccaccaacaccctgctgcaccacctggtgcaggacgtgaagcagcacaccctgctgagcggctacagaatcaccctgatcgacatcggcctggtggtggagtacctgatcggcagagcctacagaagcaactacaccagaaagcacttcagagccctgtacaacaacctgtacagaaagtacaagcaccagagacacagcagcggcaacagaaacgagagcgccgagagcaccctgcacagccagttcatcagaaccgcccagccctacaagttcaaggagaagagcatcgtgctgcacaagagcagaaagaagagcaaggagcagaacgtgagcgacgaccccgagagcaccggcttcctgtacccctacaacgacctgctggtgtgggccgtgctgatgaagagacagaagatggccatgttcttctggcagcacggcgaggaggccaccgtgaaggccgtgatcgcctgcatcctgtacagagccatggcccacgaggccaaggagagccacatggtggacgacgccagcgaggagctgaagaactacagcaagcagttcggccagctggccctggacctgctggagaaggccttcaagcagaacgagagaatggccatgaccctgctgacctacgagctgagaaactggagcaacagcacctgcctgaagctggccgtgagcggcggcctgagacccttcgtgagccacacctgcacccagatgctgctgaccgacatgtggatgggcagactgaagatgagaaagaacagctggctgaagatcatcatcagcatcatcctgccccccaccatcctgaccctggagttcaagagcaaggccgagatgagccacgtgccccagagccaggacttccagttcatgtggtactacagcgaccagaacgccagcagcagcaaggagagcgccagcgtgaaggagtacgacctggagagaggccacgacgagaagctggacgagaaccagcacttcggcctggagagcggccaccagcacctgccctggaccagaaaggtgtacgagttctacagcgcccccatcgtgaagttctggttctacaccatggcctacctggccttcctgatgctgttcacctacaccgtgctggtggagatgcagccccagcccagcgtgcaggagtggctggtgagcatctacatcttcaccaacgccatcgaggtggtgagagagatctgcatcagcgagcccggcaagttcacccagaaggtgaaggtgtggatcagcgagtactggaacctgaccgagaccgtggccatcggcctgttcagcgccggcttcgtgctgagatggggcgacccccccttccacaccgccggcagactgatctactgcatcgacatcatcttctggttcagcagactgctggacttcttcgccgtgaaccagcacgccggcccctacgtgaccatgatcgccaagatgaccgccaacatgttctacatcgtgatcatcatggccatcgtgctgctgagcttcggcgtggccagaaaggccatcctgagccccaaggagccccccagctggagcctggccagagacatcgtgttcgagccctactggatgatctacggcgaggtgtacgccggcgagatcgacgtgtgcagcagccagcccagctgcccccccggcagcttcctgacccccttcctgcaggccgtgtacctgttcgtgcagtacatcatcatggtgaacctgctgatcgccttcttcaacaacgtgtacctggacatggagagcatcagcaacaacctgtggaagtacaacagatacagatacatcatgacctaccacgagaagccctggctgcccccccccctgatcctgctgagccacgtgggcctgctgctgagaagactgtgctgccacagagccccccacgaccaggaggagggcgacgtgggcctgaagctgtacctgagcaaggaggacctgaagaagctgcacgacttcgaggagcagtgcgtggagaagtacttccacgagaagatggaggacgtgaactgcagctgcgaggagagaatcagagtgaccagcgagagagtgaccgagatgtacttccagctgaaggagatgaacgagaaggtgagcttcatcaaggacagcctgctgagcctggacagccaggtgggccacctgcaggacctgagcgccctgaccgtggacaccctgaaggtgctgagcgccgtggacaccctgcaggaggacgaggccctgctggccaagagaaagcacagcacctgcaagaagctgccccacagctggagcaacgtgatctgcgccgaggtgctgggcagcatggagatcgccggcgagaagaagtaccagtactacagcatgcccagcagcctgctgagaagcctggccggcggcagacacccccccagagtgcagagaggcgccctgctggagatcaccaacagcaagagagaggccaccaacgtgagaaacgaccaggagagacaggagacccagagcagcatcgtggtgagcggcgtgagccccaacagacaggcccacagcaagtacggccagttcctgctggtgcccagcaacctgaagagagtgcccttcagcgccgagaccgtgctgcccctgagcagacccagcgtgcccgacgtgctggccaccgagcaggacatccagaccgaggtgctggtgcacctgaccggccagacccccgtggtgagcgactgggccagcgtggacgagcccaaggagaagcacgagcccatcgcccacctgctggacggccaggacaaggccgagcaggtgctgcccaccctgagctgcacccccgagcccatgaccatgagcagccccctgagccaggccaagatcatgcagaccggcggcggctacgtgaactgggccttcagcgagggcgacgagaccggcgtgttcagcatcaagaagaagtggcagacctgcctgcccagcacctgcgacagcgacagcagcagaagcgagcagcaccagaagcaggcccaggacagcagcctgagcgacaacagcaccagaagcgcccagagcagcgagtgcagcgaggtgggcccctggctgcagcccaacaccagcttctggatcaaccccctgagaagatacagacccttcgccagaagccacagcttcagattccacaaggaggagaagctgatgaagatctgcaagatcaagaacctgagcggcagcagcgagatcggccagggcgcctgggtgaaggccaagatgctgaccaaggacagaagactgagcaagaagaagaagaacacccagggcctgcaggtgcccatcatcaccgtgaacgcctgcagccagagcgaccagctgaaccccgagcccggcgagaacagcatcagcgaggaggagtacagcaagaactggttcaccgtgagcaagttcagccacaccggcgtggagccctacatccaccagaagatgaagaccaaggagatcggccagtgcgccatccagatcagcgactacctgaagcagagccaggaggacctgagcaagaacagcctgtggaacagcagaagcaccaacctgaacagaaacagcctgctgaagagcagcatcggcgtggacaagatcagcgccagcctgaagagcccccaggagccccaccaccactacagcgccatcgagagaaacaacctgatgagactgagccagaccatccccttcacccccgtgcagctgttcgccggcgaggagatcaccgtgtacagactggaggagagcagccccctgaacctggacaagagcatgagcagctggagccagagaggcagagccgccatgatccaggtgctgagcagagaggagatggacggcggcctgagaaaggccatgagagtggtgagcacctggagcgaggacgacatcctgaagcccggccaggtgttcatcgtgaagagcttcctgcccgaggtggtgagaacctggcacaagatcttccaggagagcaccgtgctgcacctgtgcctgagagagatccagcagcagagagccgcccagaagctgatctacaccttcaaccaggtgaagccccagaccatcccctacacccccagattcctggaggtgttcctgatctactgccacagcgccaaccagtggctgaccatcgagaagtacatgaccggcgagttcagaaagtacaacaacaacaacggcgacgagatcacccccaccaacaccctggaggagctgatgctggccttcagccactggacctacgagtacaccagaggcgagctgctggtgctggacctgcagggcgtgggcgagaacctgaccgaccccagcgtgatcaagcccgaggtgaagcagagcagaggcatggtgttcggccccgccaacctgggcgaggacgccatcagaaacttcatcgccaagcaccactgcaacagctgctgcagaaagctgaagctgcccgacctgaagagaaacgactacagccccgagagaatcaacagcaccttcggcctggagatcaagatcgagagcgccgaggagccccccgccagagagaccggcagaaacagccccgaggacgacatgcagctgtag

SEQ ID NO: 103045 - DNA, 6081 bp, synthetic construct
  misc_feature 1..6081: note = Description of Artificial Sequence: Synthetic coding sequence
  source 1..6081: mol_type = other DNA
atgaaggagcagcccgtgctggagagactgcagagccagaagagctggatcaagggcgtgttcgacaagagagagtgcagcaccatcatccccagcagcaagaacccccacagatgcacccccgtgtgccaggtgtgccagaacctgatcagatgctactgcggcagactgatcggcgaccacgccggcatcgactacagctggaccatcagcgccgccaagggcaaggagagcgagcagtggagcgtggagaagcacaccaccaagagccccaccgacaccttcggcaccatcaacttccaggacggcgagcacacccaccacgccaagtacatcagaaccagctacgacaccaagctggaccacctgctgcacctgatgctgaaggagtggaagatggagctgcccaagctggtgatcagcgtgcacggcggcatccagaacttcaccatgcccagcaagttcaaggagatcttcagccagggcctggtgaaggccgccgagaccaccggcgcctggatcatcaccgagggcatcaacaccggcgtgagcaagcacgtgggcgacgccctgaagagccacagcagccacagcctgagaaagatctggaccgtgggcatccccccctggggcgtgatcgagaaccagagagacctgatcggcaaggacgtggtgtgcctgtaccagaccctggacaaccccctgagcaagctgaccaccctgaacagcatgcacagccacttcatcctgagcgacgacggcaccgtgggcaagtacggcaacgagatgaagctgagaagaaacctggagaagtacctgagcctgcagaagatccactgcagaagcagacagggcgtgcccgtggtgggcctggtggtggagggcggccccaacgtgatcctgagcgtgtgggagaccgtgaaggacaaggaccccgtggtggtgtgcgagggcaccggcagagccgccgacctgctggccttcacccacaagcacctggccgacgagggcatgctgagaccccaggtgaaggaggagatcatctgcatgatccagaacaccttcaacttcagcctgaagcagagcaagcacctgttccagatcctgatggagtgcatggtgcacagagactgcatcaccatcttcgacgccgacagcgaggagcagcaggacctggacctggccatcctgaccgccctgctgaagggcaccaacctgagcgccagcgagcagctgaacctggccatggcctgggacagagtggacatcgccaagaagcacatcctgatctacgagcagcactggaagcccgacgccctggagcaggccatgagcgacgccctggtgatggacagagtggacttcgtgaagctgctgatcgagtacggcgtgaacctgcacagattcctgaccatccccagactggaggagctgtacaacaccaagcagggccccaccaacaccctgctgcaccacctggtgcaggacgtgaagcagcacaccctgctgagcggctacagaatcaccctgatcgacatcggcctggtggtggagtacctgatcggcagagcctacagaagcaactacaccagaaagcacttcagagccctgtacaacaacctgtacagaaagtacaagcaccagagacacagcagcggcaacagaaacgagagcgccgagagcaccctgcacagccagttcatcagaaccgcccagccctacaagttcaaggagaagagcatcgtgctgcacaagagcagaaagaagagcaaggagcagaacgtgagcgacgaccccgagagcaccggcttcctgtacccctacaacgacctgctggtgtgggccgtgctgatgaagagacagaagatggccatgttcttctggcagcacggcgaggaggccaccgtgaaggccgtgatcgcctgcatcctgtacagagccatggcccacgaggccaaggagagccacatggtggacgacgccagcgaggagctgaagaactacagcaagcagttcggccagctggccctggacctgctggagaaggccttcaagcagaacgagagaatggccatgaccctgctgacctacgagctgagaaactggagcaacagcacctgcctgaagctggccgtgagcggcggcctgagacccttcgtgagccacacctgcacccagatgctgctgaccgacatgtggatgggcagactgaagatgagaaagaacagctggctgaagatcatcatcagcatcatcctgccccccaccatcctgaccctggagttcaagagcaaggccgagatgagccacgtgccccagagccaggacttccagttcatgtggtactacagcgaccagaacgccagcagcagcaaggagagcgccagcgtgaaggagtacgacctggagagaggccacgacgagaagctggacgagaaccagcacttcggcctggagagcggccaccagcacctgccctggaccagaaaggtgtacgagttctacagcgcccccatcgtgaagttctggttctacaccatggcctacctggccttcctgatgctgttcacctacaccgtgctggtggagatgcagccccagcccagcgtgcaggagtggctggtgagcatctacatcttcaccaacgccatcgaggtggtgagagagatctgcatcagcgagcccggcaagttcacccagaaggtgaaggtgtggatcagcgagtactggaacctgaccgagaccgtggccatcggcctgttcagcgccggcttcgtgctgagatggggcgacccccccttccacaccgccggcagactgatctactgcatcgacatcatcttctggttcagcagactgctggacttcttcgccgtgaaccagcacgccggcccctacgtgaccatgatcgccaagatgaccgccaacatgttctacatcgtgatcatcatggccatcgtgctgctgagcttcggcgtggccagaaaggccatcctgagccccaaggagccccccagctggagcctggccagagacatcgtgttcgagccctactggatgatctacggcgaggtgtacgccggcgagatcgacgtgtgcagcagccagcccagctgcccccccggcagcttcctgacccccttcctgcaggccgtgtacctgttcgtgcagtacatcatcatggtgaacctgctgatcgccttcttcaacaacgtgtacctggacatggagagcatcagcaacaacctgtggaagtacaacagatacagatacatcatgacctaccacgagaagccctggctgcccccccccctgatcctgctgagccacgtgggcctgctgctgagaagactgtgctgccacagagccccccacgaccaggaggagggcgacgtgggcctgaagctgtacctgagcaaggaggacctgaagaagctgcacgacttcgaggagcagtgcgtggagaagtacttccacgagaagatggaggacgtgaactgcagctgcgaggagagaatcagagtgaccagcgagagagtgaccgagatgtacttccagctgaaggagatgaacgagaaggtgagcttcatcaaggacagcctgctgagcctggacagccaggtgggccacctgcaggacctgagcgccctgaccgtggacaccctgaaggtgctgagcgccgtggacaccctgcaggaggacgaggccctgctggccaagagaaagcacagcacctgcaagaagctgccccacagctggagcaacgtgatctgcgccgaggtgctgggcagcatggagatcgccggcgagaagaagtaccagtactacagcatgcccagcagcctgctgagaagcctggccggcggcagacacccccccagagtgcagagaggcgccctgctggagatcaccaacagcaagagagaggccaccaacgtgagaaacgaccaggagagacaggagacccagagcagcatcgtggtgagcggcgtgagccccaacagacaggcccacagcaagtacggccagttcctgctggtgcccagcaacctgaagagagtgcccttcagcgccgagaccgtgctgcccctgagcagacccagcgtgcccgacgtgctggccaccgagcaggacatccagaccgaggtgctggtgcacctgaccggccagacccccgtggtgagcgactgggccagcgtggacgagcccaaggagaagcacgagcccatcgcccacctgctggacggccaggacaaggccgagcaggtgctgcccaccctgagctgcacccccgagcccatgaccatgagcagccccctgagccaggccaagatcatgcagaccggcggcggctacgtgaactgggccttcagcgagggcgacgagaccggcgtgttcagcatcaagaagaagtggcagacctgcctgcccagcacctgcgacagcgacagcagcagaagcgagcagcaccagaagcaggcccaggacagcagcctgagcgacaacagcaccagaagcgcccagagcagcgagtgcagcgaggtgggcccctggctgcagcccaacaccagcttctggatcaaccccctgagaagatacagacccttcgccagaagccacagcttcagattccacaaggaggagaagctgatgaagatctgcaagatcaagaacctgagcggcagcagcgagatcggccagggcgcctgggtgaaggccaagatgctgaccaaggacagaagactgagcaagaagaagaagaacacccagggcctgcaggtgcccatcatcaccgtgaacgcctgcagccagagcgaccagctgaaccccgagcccggcgagaacagcatcagcgaggaggagtacagcaagaactggttcaccgtgagcaagttcagccacaccggcgtggagccctacatccaccagaagatgaagaccaaggagatcggccagtgcgccatccagatcagcgactacctgaagcagagccaggaggacctgagcaagaacagcctgtggaacagcagaagcaccaacctgaacagaaacagcctgcacgtgatcaagatgcccatcagcagcctgatcagcgagatcagcgccagcctgaagagcccccaggagccccaccaccactacagcgccatcgagagaaacaacctgatgagactgagccagaccatccccttcacccccgtgcagctgttcgccggcgaggagatcaccgtgtacagactggaggagagcagccccctgaacctggacaagagcatgagcagctggagccagagaggcagagccgccatgatccaggtgctgagcagagaggagatggacggcggcctgagaaaggccatgagagtggtgagcacctggagcgaggacgacatcctgaagcccggccaggtgttcatcgtgaagagcttcctgcccgaggtggtgagaacctggcacaagatcttccaggagagcaccgtgctgcacctgtgcctgagagagatccagcagcagagagccgcccagaagctgatctacaccttcaaccaggtgaagccccagaccatcccctacacccccagattcctggaggtgttcctgatctactgccacagcgccaaccagtggctgaccatcgagaagtacatgaccggcgagttcagaaagtacaacaacaacaacggcgacgagatcacccccaccaacaccctggaggagctgatgctggccttcagccactggacctacgagtacaccagaggcgagctgctggtgctggacctgcagggcgtgggcgagaacctgaccgaccccagcgtgatcaagcccgaggtgaagcagagcagaggcatggtgttcggccccgccaacctgggcgaggacgccatcagaaacttcatcgccaagcaccactgcaacagctgctgcagaaagctgaagctgcccgacctgaagagaaacgactacagccccgagagaatcaacagcaccttcggcctggagatcaagatcgagagcgccgaggagccccccgccagagagaccggcagaaacagccccgaggacgacatgcagctgtag

SEQ ID NO: 103046 - DNA, 5598 bp, synthetic construct
  misc_feature 1..5598: note = Description of Artificial Sequence: Synthetic coding sequence
  source 1..5598: mol_type = other DNA
atgagccagaagagctggatcgagagcaccctgaccaagagagagtgcgtgtacatcatccccagcagcaaggacccccacagatgcctgcccggctgccagatctgccagcagctggtgagatgcttctgcggcagactggtgaagcagcacgcctgcttcaccgccagcctggccatgaagtacagcgacgtgaagctgggcgaccacttcaaccaggccatcgaggagtggagcgtggagaagcacaccgagcagagccccaccgacgcctacggcgtgatcaacttccagggcggcagccacagctacagagccaagtacgtgagactgagctacgacaccaagcccgaggtgatcctgcagctgctgctgaaggagtggcagatggagctgcccaagctggtgatcagcgtgcacggcggcatgcagaagttcgagctgcaccccagaatcaagcagctgctgggcaagggcctgatcaaggccgccgtgaccaccggcgcctggatcctgaccggcggcgtgaacaccggcgtggccaagcacgtgggcgacgccctgaaggagcacgccagcagaagcagcagaaagatctgcaccatcggcatcgccccctggggcgtgatcgagaacagaaacgacctggtgggcagagacgtggtggccccctaccagaccctgctgaaccccctgagcaagctgaacgtgctgaacaacctgcacagccacttcatcctggtggacgacggcaccgtgggcaagtacggcgccgaggtgagactgagaagagagctggagaagaccatcaaccagcagagaatccacgccagaatcggccagggcgtgcccgtggtggccctgatcttcgagggcggccccaacgtgatcctgaccgtgctggagtacctgcaggagagcccccccgtgcccgtggtggtgtgcgagggcaccggcagagccgccgacctgctggcctacatccacaagcagaccgaggagggcggcaacctgcccgacgccgccgagcccgacatcatcagcaccatcaagaagaccttcaacttcggccagaacgaggccctgcacctgttccagaccctgatggagtgcatgaagagaaaggagctgatcaccgtgttccacatcggcagcgacgagcaccaggacatcgacgtggccatcctgaccgccctgctgaagggcaccaacgccagcgccttcgaccagctgatcctgaccctggcctgggacagagtggacatcgccaagaaccacgtgttcgtgtacggccagcagtggctggtgggcagcctggagcaggccatgctggacgccctggtgatggacagagtggccttcgtgaagctgctgatcgagaacggcgtgagcatgcacaagttcctgaccatccccagactggaggagctgtacaacaccaagcagggccccaccaaccccatgctgttccacctggtgagagacgtgaagcagggcaacctgccccccggctacaagatcaccctgatcgacatcggcctggtgatcgagtacctgatgggcggcacctacagatgcacctacaccagaaagagattcagactgatctacaacagcctgggcggcaacaacagaagaagcggcagaaacaccagcagcagcaccccccagctgagaaagagccacgagagcttcggcaacagagccgacaagaaggagaagatgagacacaaccacttcatcaagaccgcccagccctacagacccaagatcgacaccgtgatggaggagggcaagaagaagagaaccaaggacgagatcgtggacatcgacgaccccgagaccaagagattcccctaccccctgaacgagctgctgatctgggcctgcctgatgaagagacaggtgatggccagattcctgtggcagcacggcgaggagagcatggccaaggccctggtggcctgcaagatctacagaagcatggcctacgaggccaagcagagcgacctggtggacgacaccagcgaggagctgaagcagtacagcaacgacttcggccagctggccgtggagctgctggagcagagcttcagacaggacgagaccatggccatgaagctgctgacctacgagctgaagaactggagcaacagcacctgcctgaagctggccgtgagcagcagactgagacccttcgtggcccacacctgcacccagatgctgctgagcgacatgtggatgggcagactgaacatgagaaagaacagctggtacaaggtgatcctgagcatcctggtgccccccgccatcctgctgctggagtacaagaccaaggccgagatgagccacatcccccagagccaggacgcccaccagatgaccatggacgacagcgagaacaacttccagaacatcaccgaggagatccccatggaggtgttcaaggaggtgagaatcctggacagcaacgagggcaagaacgagatggagatccagatgaagagcaagaagctgcccatcaccagaaagttctacgccttctaccacgcccccatcgtgaagttctggttcaacaccctggcctacctgggcttcctgatgctgtacaccttcgtggtgctggtgcagatggagcagctgcccagcgtgcaggagtggatcgtgatcgcctacatcttcacctacgccatcgagaaggtgagagagatcttcatgagcgaggccggcaaggtgaaccagaagatcaaggtgtggttcagcgactacttcaacatcagcgacaccatcgccatcatcagcttcttcatcggcttcggcctgagattcggcgccaagtggaacttcgccaacgcctacgacaaccacgtgttcgtggccggcagactgatctactgcctgaacatcatcttctggtacgtgagactgctggacttcctggccgtgaaccagcaggccggcccctacgtgatgatgatcggcaagatggtggccaacatgttctacatcgtggtgatcatggccctggtgctgctgagcttcggcgtgcccagaaaggccatcctgtacccccacgaggcccccagctggaccctggccaaggacatcgtgttccacccctactggatgatcttcggcgaggtgtacgcctacgagatcgacgtgtgcgccaacgacagcgtgatcccccagatctgcggccccggcacctggctgacccccttcctgcaggccgtgtacctgttcgtgcagtacatcatcatggtgaacctgctgatcgccttcttcaacaacgtgtacctgcaggtgaaggccatcagcaacatcgtgtggaagtaccagagataccacttcatcatggcctaccacgagaagcccgtgctgcccccccccctgatcatcctgagccacatcgtgagcctgttctgctgcatctgcaagagaagaaagaaggacaagaccagcgacggccccaagctgttcctgaccgaggaggaccagaagaagctgcacgacttcgaggagcagtgcgtggagatgtacttcaacgagaaggacgacaagttccacagcggcagcgaggagagaatcagagtgaccttcgagagagtggagcagatgtgcatccagatcaaggaggtgggcgacagagtgaactacatcaagagaagcctgcagagcctggacagccagatcggccacctgcaggacctgagcgccctgaccgtggacaccctgaagaccctgaccgcccagaaggccagcgaggccagcaaggtgcacaacgagatcaccagagagctgagcatcagcaagcacctggcccagaacctgatcgacgacggccccgtgagacccagcgtgtggaagaagcacggcgtggtgaacaccctgagcagcagcctgccccagggcgacctggagagcaacaaccccttccactgcaacatcctgatgaaggacgacaaggacccccagtgcaacatcttcggccaggacctgcccgccgtgccccagagaaaggagttcaacttccccgaggccggcagcagcagcggcgccctgttccccagcgccgtgagcccccccgagctgagacagagactgcacggcgtggagctgctgaagatcttcaacaagaaccagaagctgggcagcagcagcaccagcatcccccacctgagcagcccccccaccaagttcttcgtgagcacccccagccagcccagctgcaagagccacctggagaccggcaccaaggaccaggagaccgtgtgcagcaaggccaccgagggcgacaacaccgagttcggcgccttcgtgggccacagagacagcatggacctgcagagattcaaggagaccagcaacaagatcaagatcctgagcaacaacaacaccagcgagaacaccctgaagagagtgagcagcctggccggcttcaccgactgccacagaaccagcatccccgtgcacagcaagcaggccgagaagatcagcagaagacccagcaccgaggacacccacgaggtggacagcaaggccgccctgatccccgactggctgcaggacagacccagcaacagagagatgcccagcgaggagggcaccctgaacggcctgaccagccccttcaagcccgccatggacaccaactactactacagcgccgtggagagaaacaacctgatgagactgagccagagcatccccttcacccccgtgccccccagaggcgagcccgtgaccgtgtacagactggaggagagcagccccaacatcctgaacaacagcatgagcagctggagccagctgggcctgtgcgccaagatcgagttcctgagcaaggaggagatgggcggcggcctgagaagagccgtgaaggtgcagtgcacctggagcgagcacgacatcctgaagagcggccacctgtacatcatcaagagcttcctgcccgaggtggtgaacacctggagcagcatctacaaggaggacaccgtgctgcacctgtgcctgagagagatccagcagcagagagccgcccagaagctgaccttcgccttcaaccagatgaagcccaagagcatcccctacagccccagattcctggaggtgttcctgctgtactgccacagcgccggccagtggttcgccgtggaggagtgcatgaccggcgagttcagaaagtacaacaacaacaacggcgacgagatcatccccaccaacaccctggaggagatcatgctggccttcagccactggacctacgagtacaccagaggcgagctgctggtgctggacctgcagggcgtgggcgagaacctgaccgaccccagcgtgatcaaggccgaggagaagagaagctgcgacatggtgttcggccccgccaacctgggcgaggacgccatcaagaacttcagagccaagcaccactgcaacagctgctgcagaaagctgaagctgcccgacctgaagagaaacgactacacccccgacaagatcatcttcccccaggacgagcccagcgacctgaacctgcagcccggcaacagcaccaaggagagcgagagcaccaacagcgtgagactgatgctgtag

SEQ ID NO: 103047 - DNA, 3315 bp, synthetic construct
  misc_feature 1..3315: note = Description of Artificial Sequence: Synthetic coding sequence
  source 1..3315: mol_type = other DNA
atgagcttcagagccgccagactgagcatgagaaacagaagaaacgacaccctggacagcaccagaaccctgtacagcagcgccagcagaagcaccgacctgagctacagcgagagcgacctggtgaacttcatccaggccaacttcaagaagagagagtgcgtgttcttcaccaaggacagcaaggccaccgagaacgtgtgcaagtgcggctacgcccagagccagcacatggagggcacccagatcaaccagagcgagaagtggaactacaagaagcacaccaaggagttccccaccgacgccttcggcgacatccagttcgagaccctgggcaagaagggcaagtacatcagactgagctgcgacaccgacgccgagatcctgtacgagctgctgacccagcactggcacctgaagacccccaacctggtgatcagcgtgaccggcggcgccaagaacttcgccctgaagcccagaatgagaaagatcttcagcagactgatctacatcgcccagagcaagggcgcctggatcctgaccggcggcacccactacggcctgatgaagtacatcggcgaggtggtgagagacaacaccatcagcagaagcagcgaggagaacatcgtggccatcggcatcgccgcctggggcatggtgagcaacagagacaccctgatcagaaactgcgacgccgagggctacttcctggcccagtacctgatggacgacttcaccagagaccccctgtacatcctggacaacaaccacacccacctgctgctggtggacaacggctgccacggccaccccaccgtggaggccaagctgagaaaccagctggagaagtacatcagcgagagaaccatccaggacagcaactacggcggcaagatccccatcgtgtgcttcgcccagggcggcggcaaggagaccctgaaggccatcaacaccagcatcaagaacaagatcccctgcgtggtggtggagggcagcggccagatcgccgacgtgatcgccagcctggtggaggtggaggacgccctgaccagcagcgccgtgaaggagaagctggtgagattcctgcccagaaccgtgagcagactgcccgaggaggagaccgagagctggatcaagtggctgaaggagatcctggagtgcagccacctgctgaccgtgatcaagatggaggaggccggcgacgagatcgtgagcaacgccatcagctacgccctgtacaaggccttcagcaccagcgagcaggacaaggacaactggaacggccagctgaagctgctgctggagtggaaccagctggacctggccaacgacgagatcttcaccaacgacagaagatgggagagcgccgacctgcaggaggtgatgttcaccgccctgatcaaggacagacccaagttcgtgagactgttcctggagaacggcctgaacctgagaaagttcctgacccacgacgtgctgaccgagctgttcagcaaccacttcagcaccctggtgtacagaaacctgcagatcgccaagaacagctacaacgacgccctgctgaccttcgtgtggaagctggtggccaacttcagaagaggcttcagaaaggaggacagaaacggcagagacgagatggacatcgagctgcacgacgtgagccccatcaccagacaccccctgcaggccctgttcatctgggccatcctgcagaacaagaaggagctgagcaaggtgatctgggagcagaccagaggctgcaccctggccgccctgggcgccagcaagctgctgaagaccctggccaaggtgaagaacgacatcaacgccgccggcgagagcgaggagctggccaacgagtacgagaccagagccgtggagctgttcaccgagtgctacagcagcgacgaggacctggccgagcagctgctggtgtacagctgcgaggcctggggcggcagcaactgcctggagctggccgtggaggccaccgaccagcacttcatcgcccagcccggcgtgcagaacttcctgagcaagcagtggtacggcgagatcagcagagacaccaagaactggaagatcatcctgtgcctgttcatcatccccctggtgggctgcggcttcgtgagcttcagaaagaagcccgtggacaagcacaagaagctgctgtggtactacgtggccttcttcaccagccccttcgtggtgttcagctggaacgtggtgttctacatcgccttcctgctgctgttcgcctacgtgctgctgatggacttccacagcgtgccccacccccccgagctggtgctgtacagcctggtgttcgtgctgttctgcgacgaggtgagacagtggtacgtgaacggcgtgaactacttcaccgacctgtggaacgtgatggacaccctgggcctgttctacttcatcgccggcatcgtgttcagactgcacagcagcaacaagagcagcctgtacagcggcagagtgatcttctgcctggactacatcatcttcaccctgagactgatccacatcttcaccgtgagcagaaacctgggccccaagatcatcatgctgcagagaatgctgatcgacgtgttcttcttcctgttcctgttcgccgtgtggatggtggccttcggcgtggccagacagggcatcctgagacagaacgagcagagatggagatggatcttcagaagcgtgatctacgagccctacctggccatgttcggccaggtgcccagcgacgtggacggcaccacctacgacttcgcccactgcaccttcaccggcaacgagagcaagcccctgtgcgtggagctggacgagcacaacctgcccagattccccgagtggatcaccatccccctggtgtgcatctacatgctgagcaccaacatcctgctggtgaacctgctggtggccatgttcggctacaccgtgggcaccgtgcaggagaacaacgaccaggtgtggaagttccagagatacttcctggtgcaggagtactgcagcagactgaacatccccttccccttcatcgtgttcgcctacttctacatggtggtgaagaagtgcttcaagtgctgctgcaaggagaagaacatggagagcagcgtgtgctgcttcaagaacgaggacaacgagaccctggcctgggagggcgtgatgaaggagaactacctggtgaagatcaacaccaaggccaacgacaccagcgaggagatgagacacagattcagacagctggacaccaagctgaacgacctgaagggcctgctgaaggagatcgccaacaagatcaagtag

SEQ ID NO: 103048 - DNA, 579 bp, synthetic construct
  misc_feature 1..579: note = Description of Artificial Sequence: Synthetic coding sequence
  source 1..579: mol_type = other DNA
atgaagagcttcctgcccgtgcacaccatcgtgctgatcagagagaacgtgtgcaagtgcggctacgcccagagccagcacatggagggcacccagatcaaccagagcgagaagtggaactacaagaagcacaccaaggagttccccaccgacgccttcggcgacatccagttcgagaccctgggcaagaagggcaagtacatcagactgagctgcgacaccgacgccgagatcctgtacgagctgctgacccagcactggcacctgaagacccccaacctggtgatcagcgtgaccggcggcgccaagaacttcgccctgaagcccagaatgagaaagatcttcagcagactgatctacatcgcccagagcaagggcgcctggatcctgaccggcggcacccactacggcctgatgaagtacatcggcgaggtggtgagagacaacaccatcagcagaagcagcgaggagaacatcgtggccatcggcatcgccgcctggggcatggtgagcaacagagacaccctgatcagaaactgcgacgccgaggtgcccgtgggccaggaggaggtgtgctag

SEQ ID NO: 103049 - DNA, 498 bp, synthetic construct
  misc_feature 1..498: note = Description of Artificial Sequence: Synthetic coding sequence
  source 1..498: mol_type = other DNA
atggagggcacccagatcaaccagagcgagaagtggaactacaagaagcacaccaaggagttccccaccgacgccttcggcgacatccagttcgagaccctgggcaagaagggcaagtacatcagactgagctgcgacaccgacgccgagatcctgtacgagctgctgacccagcactggcacctgaagacccccaacctggtgatcagcgtgaccggcggcgccaagaacttcgccctgaagcccagaatgagaaagatcttcagcagactgatctacatcgcccagagcaagggcgcctggatcctgaccggcggcacccactacggcctgatgaagtacatcggcgaggtggtgagagacaacaccatcagcagaagcagcgaggagaacatcgtggccatcggcatcgccgcctggggcatggtgagcaacagagacaccctgatcagaaactgcgacgccgaggtgcccgtgggccaggaggaggtgtgctag

SEQ ID NO: 103050 - DNA, 2049 bp, synthetic construct
  misc_feature 1..2049: note = Description of Artificial Sequence: Synthetic coding sequence
  source 1..2049: mol_type = other DNA
atgcaggccatcaacaccagcatcaagaacaagatcccctgcgtggtggtggagggcagcggccagatcgccgacgtgatcgccagcctggtggaggtggaggacgccctgaccagcagcgccgtgaaggagaagctggtgagattcctgcccagaaccgtgagcagactgcccgaggaggagaccgagagctggatcaagtggctgaaggagatcctggagtgcagccacctgctgaccgtgatcaagatggaggaggccggcgacgagatcgtgagcaacgccatcagctacgccctgtacaaggccttcagcaccagcgagcaggacaaggacaactggaacggccagctgaagctgctgctggagtggaaccagctggacctggccaacgacgagatcttcaccaacgacagaagatgggagagcgccgacctgcaggaggtgatgttcaccgccctgatcaaggacagacccaagttcgtgagactgttcctggagaacggcctgaacctgagaaagttcctgacccacgacgtgctgaccgagctgttcagcaaccacttcagcaccctggtgtacagaaacctgcagatcgccaagaacagctacaacgacgccctgctgaccttcgtgtggaagctggtggccaacttcagaagaggcttcagaaaggaggacagaaacggcagagacgagatggacatcgagctgcacgacgtgagccccatcaccagacaccccctgcaggccctgttcatctgggccatcctgcagaacaagaaggagctgagcaaggtgatctgggagcagaccagaggctgcaccctggccgccctgggcgccagcaagctgctgaagaccctggccaaggtgaagaacgacatcaacgccgccggcgagagcgaggagctggccaacgagtacgagaccagagccgtggagctgttcaccgagtgctacagcagcgacgaggacctggccgagcagctgctggtgtacagctgcgaggcctggggcggcagcaactgcctggagctggccgtggaggccaccgaccagcacttcatcgcccagcccggcgtgcagtggtacgtgaacggcgtgaactacttcaccgacctgtggaacgtgatggacaccctgggcctgttctacttcatcgccggcatcgtgttcagactgcacagcagcaacaagagcagcctgtacagcggcagagtgatcttctgcctggactacatcatcttcaccctgagactgatccacatcttcaccgtgagcagaaacctgggccccaagatcatcatgctgcagagaatgctgatcgacgtgttcttcttcctgttcctgttcgccgtgtggatggtggccttcggcgtggccagacagggcatcctgagacagaacgagcagagatggagatggatcttcagaagcgtgatctacgagccctacctggccatgttcggccaggtgcccagcgacgtggacggcaccacctacgacttcgcccactgcaccttcaccggcaacgagagcaagcccctgtgcgtggagctggacgagcacaacctgcccagattccccgagtggatcaccatccccctggtgtgcatctacatgctgagcaccaacatcctgctggtgaacctgctggtggccatgttcggctacaccgtgggcaccgtgcaggagaacaacgaccaggtgtggaagttccagagatacttcctggtgcaggagtactgcagcagactgaacatccccttccccttcatcgtgttcgcctacttctacatggtggtgaagaagtgcttcaagtgctgctgcaaggagaagaacatggagagcagcgtgtgctgcttcaagaacgaggacaacgagaccctggcctgggagggcgtgatgaaggagaactacctggtgaagatcaacaccaaggccaacgacaccagcgaggagatgagacacagattcagacagctggacaccaagctgaacgacctgaagggcctgctgaaggagatcgccaacaagatcaagtag

SEQ ID NO: 103051 - DNA, 2514 bp, synthetic construct
  misc_feature 1..2514: note = Description of Artificial Sequence: Synthetic coding sequence
  source 1..2514: mol_type = other DNA
atggagaccctgacccccggccacctgcagcccagccccagcagccccagacccagagccgcccccggcagcctgggcagagtgaccagaagaagactgagcagatggatcgccctgaccagaaaggtgagctggacccccgccagacccagccagagcgccctgctgagccccagcagaggccaggagaccgccccccccgtgcccggctgctgccccagaaccctgagcccccccgcccccagaagacccagcggcagcatgatcgccggcgtgagcctgaagcccctgctgagaatcaccgccagaatctggagagcctgctgcagcagctgcagaagagccagaagcaccagccagaccaccagcagcaaggtggcccccgccctgggcagcggcagagcccccgccctggcctgccccgacccccccctgtgcctgagcgaccccgagaccggcaagacctgcctgctgaaggccatgctgaacctgcacgacggccagaacaccaccatccccctgctgctggagatcgccagacagaccgacagcctgaaggagctggtgaacgccagctacaccgacagctactacaagggccagaccgccctgcacatcgccatcgagagaagaaacatggccctggtgaccctgctggtggagaacggcgccgacgtgcaggccgccgcccacggcgacttcttcaagaagaccaagggcagacccggcttctacttcggcgagctgcccctgagcctggccgcctgcaccaaccagctgggcatcgtgaagttcctgctgcagaacagctggcagaccgccgacatcagcgccagagacagcgtgggcaacaccgtgctgcacgccctggtggaggtggccgacaacaccgccgacaacaccaagttcgtgaccagcatgtacaacgagatcctgatgctgggcgccaagctgcaccccaccctgaagctggaggagctgaccaacaagaagggcatgacccccctggccctggccgccggcaccggcaagatcggcgtgctggcctacatcctgcagagagagatccaggagcccgagtgcagacacctgagcagaaagttcaccgagtgggcctacggccccgtgcacagcagcctgtacgacctgagctgcatcgacacctgcgagaagaacagcgtgctggaggtgatcgcctacagcagcagcgagacccccaacagacacgacatgctgctggtggagcccctgaacagactgctgcaggacaagtgggacagattcgtgaagagaatcttctacttcaacttcctggtgtactgcctgtacatgatcatcttcaccatggccgcctactacagacccgtggacggcctgccccccttcaagatggagaagaccggcgactacttcagagtgaccggcgagatcctgagcgtgctgggcggcgtgtacttcttcttcagaggcatccagtacttcctgcagagaagacccagcatgaagaccctgttcgtggacagctacagcgagatgctgttcttcctgcagagcctgttcatgctggccaccgtggtgctgtacttcagccacctgaaggagtacgtggccagcatggtgttcagcctggccctgggctggaccaacatgctgtactacaccagaggcttccagcagatgggcatctacgccgtgatgatcgagaagatgatcctgagagacctgtgcagattcatgttcgtgtacatcgtgttcctgttcggcttcagcaccgccgtggtgaccctgatcgaggacggcaagaacgacagcctgcccagcgagagcaccagccacagatggagaggccccgcctgcagaccccccgacagcagctacaacagcctgtacagcacctgcctggagctgttcaagttcaccatcggcatgggcgacctggagttcaccgagaactacgacttcaaggccgtgttcatcatcctgctgctggcctacgtgatcctgacctacatcctgctgctgaacatgctgatcgccctgatgggcgagaccgtgaacaagatcgcccaggagagcaagaacatctggaagctgcagagagccatcaccatcctggacaccgagaagagcttcctgaagtgcatgagaaaggccttcagaagcggcaagctgctgcaggtgggctacacccccgacggcaaggacgactacagatggtgcttcagagtggacgaggtgaactggaccacctggaacaccaacgtgggcatcatcaacgaggaccccggcaactgcgagggcgtgaagagaaccctgagcttcagcctgagaagcagcagagtgagcggcagacactggaagaacttcgccctggtgcccctgctgagagaggccagcgccagagacagacagagcgcccagcccgaggaggtgtacctgagacagttcagcggcagcctgaagcccgaggacgccgaggtgttcaagagccccgccgccagcggcgagaagtag

SEQ ID NO: 103052 - DNA, 2340 bp, synthetic construct
  misc_feature 1..2340: note = Description of Artificial Sequence: Synthetic coding sequence
  source 1..2340: mol_type = other DNA
atgaagaagtggagcagcaccgacctgggcgccgccgccgaccccctgcagaaggacacctgccccgaccccctggacggcgaccccaacagcagacccccccccgccaagccccagctgagcaccgccaagagcagaaccagactgttcggcaagggcgacagcgaggaggccttccccgtggactgcccccacgaggagggcgagctggacagctgccccaccatcaccgtgagccccgtgatcaccatccagagacccggcgacggccccaccggcgccagactgctgagccaggacagcgtggccgccagcaccgagaagaccctgagactgtacgacagaagaagcatcttcgaggccgtggcccagaacaactgccaggacctggagagcctgctgctgttcctgcagaagagcaagaagcacctgaccgacaacgagttcaaggaccccgagaccggcaagacctgcctgctgaaggccatgctgaacctgcacgacggccagaacaccaccatccccctgctgctggagatcgccagacagaccgacagcctgaaggagctggtgaacgccagctacaccgacagctactacaagggccagaccgccctgcacatcgccatcgagagaagaaacatggccctggtgaccctgctggtggagaacggcgccgacgtgcaggccgccgcccacggcgacttcttcaagaagaccaagggcagacccggcttctacttcggcgagctgcccctgagcctggccgcctgcaccaaccagctgggcatcgtgaagttcctgctgcagaacagctggcagaccgccgacatcagcgccagagacagcgtgggcaacaccgtgctgcacgccctggtggaggtggccgacaacaccgccgacaacaccaagttcgtgaccagcatgtacaacgagatcctgatgctgggcgccaagctgcaccccaccctgaagctggaggagctgaccaacaagaagggcatgacccccctggccctggccgccggcaccggcaagatcggcaacagacacgacatgctgctggtggagcccctgaacagactgctgcaggacaagtgggacagattcgtgaagagaatcttctacttcaacttcctggtgtactgcctgtacatgatcatcttcaccatggccgcctactacagacccgtggacggcctgccccccttcaagatggagaagaccggcgactacttcagagtgaccggcgagatcctgagcgtgctgggcggcgtgtacttcttcttcagaggcatccagtacttcctgcagagaagacccagcatgaagaccctgttcgtggacagctacagcgagatgctgttcttcctgcagagcctgttcatgctggccaccgtggtgctgtacttcagccacctgaaggagtacgtggccagcatggtgttcagcctggccctgggctggaccaacatgctgtactacaccagaggcttccagcagatgggcatctacgccgtgatgatcgagaagatgatcctgagagacctgtgcagattcatgttcgtgtacatcgtgttcctgttcggcttcagcaccgccgtggtgaccctgatcgaggacggcaagaacgacagcctgcccagcgagagcaccagccacagatggagaggccccgcctgcagaccccccgacagcagctacaacagcctgtacagcacctgcctggagctgttcaagttcaccatcggcatgggcgacctggagttcaccgagaactacgacttcaaggccgtgttcatcatcctgctgctggcctacgtgatcctgacctacatcctgctgctgaacatgctgatcgccctgatgggcgagaccgtgaacaagatcgcccaggagagcaagaacatctggaagctgcagagagccatcaccatcctggacaccgagaagagcttcctgaagtgcatgagaaaggccttcagaagcggcaagctgctgcaggtgggctacacccccgacggcaaggacgactacagatggtgcttcagagtggacgaggtgaactggaccacctggaacaccaacgtgggcatcatcaacgaggaccccggcaactgcgagggcgtgaagagaaccctgagcttcagcctgagaagcagcagagtgagcggcagacactggaagaacttcgccctggtgcccctgctgagagaggccagcgccagagacagacagagcgcccagcccgaggaggtgtacctgagacagttcagcggcagcctgaagcccgaggacgccgaggtgttcaagagccccgccgccagcggcgagaagtag

SEQ ID NO: 103053 - DNA, 2520 bp, synthetic construct; identical to SEQ ID NO: 102983
  misc_feature 1..2520: note = Description of Artificial Sequence: Synthetic coding sequence
  source 1..2520: mol_type = other DNA

SEQ ID NO: 103054 - DNA, 2520 bp, synthetic construct; identical to SEQ ID NO: 102983
  misc_feature 1..2520: note = Description of Artificial Sequence: Synthetic coding sequence
  source 1..2520: mol_type = other DNA

SEQ ID NO: 103055 - DNA, 2553 bp, synthetic construct
  misc_feature 1..2553: note = Description of Artificial Sequence: Synthetic coding sequence
  source 1..2553: mol_type = other DNA
atgaagaagtggagcagcaccgacctgggcgccgccgccgaccccctgcagaaggacacctgccccgaccccctggacggcgaccccaacagcagacccccccccgccaagccccagctgagcaccgccaagagcagaaccagactgttcggcaagggcgacagcgaggaggccttccccgtggactgcccccacgaggagggcgagctggacagctgccccaccatcaccgtgagccccgtgatcaccatccagagacccggcgacggccccaccggcgccagactgctgagccaggacagcgtggccgccagcaccgagaagaccctgagactgtacgacagaagaagcatcttcgaggccgtggcccagaacaactgccaggacctggagagcctgctgctgttcctgcagaagagcaagaagcacctgaccgacaacgagttcaaggaccccgagaccggcaagacctgcctgctgaaggccatgctgaacctgcacgacggccagaacaccaccatccccctgctgctggagatcgccagacagaccgacagcctgaaggagctggtgaacgccagctacaccgacagctactacaagggccagaccgccctgcacatcgccatcgagagaagaaacatggccctggtgaccctgctggtggagaacggcgccgacgtgcaggccgccgcccacggcgacttcttcaagaagaccaagggcagacccggcttctacttcggcgagctgcccctgagcctggccgcctgcaccaaccagctgggcatcgtgaagttcctgctgcagaacagctggcagaccgccgacatcagcgccagagacagcgtgggcaacaccgtgctgcacgccctggtggaggtggccgacaacaccgccgacaacaccaagttcgtgaccagcatgtacaacgagatcctgatgctgggcgccaagctgcaccccaccctgaagctggaggagctgaccaacaagaagggcatgacccccctggccctggccgccggcaccggcaagatcggcgtgatcgagaacggcccccccctgagcttcatggtgctggcctacatcctgcagagagagatccaggagcccgagtgcagacacctgagcagaaagttcaccgagtgggcctacggccccgtgcacagcagcctgtacgacctgagctgcatcgacacctgcgagaagaacagcgtgctggaggtgatcgcctacagcagcagcgagacccccaacagacacgacatgctgctggtggagcccctgaacagactgctgcaggacaagtgggacagattcgtgaagagaatcttctacttcaacttcctggtgtactgcctgtacatgatcatcttcaccatggccgcctactacagacccgtggacggcctgccccccttcaagatggagaagaccggcgactacttcagagtgaccggcgagatcctgagcgtgctgggcggcgtgtacttcttcttcagaggcatccagtacttcctgcagagaagacccagcatgaagaccctgttcgtggacagctacagcgagatgctgttcttcctgcagagcctgttcatgctggccaccgtggtgctgtacttcagccacctgaaggagtacgtggccagcatggtgttcagcctggccctgggctggaccaacatgctgtactacaccagaggcttccagcagatgggcatctacgccgtgatgatcgagaagatgatcctgagagacctgtgcagattcatgttcgtgtacatcgtgttcctgttcggcttcagcaccgccgtggtgaccctgatcgaggacggcaagaacgacagcctgcccagcgagagcaccagccacagatggagaggccccgcctgcagaccccccgacagcagctacaacagcctgtacagcacctgcctggagctgttcaagttcaccatcggcatgggcgacctggagttcaccgagaactacgacttcaaggccgtgttcatcatcctgctgctggcctacgtgatcctgacctacatcctgctgctgaacatgctgatcgccctgatgggcgagaccgtgaacaagatcgcccaggagagcaagaacatctggaagctgcagagagccatcaccatcctggacaccgagaagagcttcctgaagtgcatgagaaaggccttcagaagcggcaagctgctgcaggtgggctacacccccgacggcaaggacgactacagatggtgcttcagagtggacgaggtgaactggaccacctggaacaccaacgtgggcatcatcaacgaggaccccggcaactgcgagggcgtgaagagaaccctgagcttcagcctgagaagcagcagagtgagcggcagacactggaagaacttcgccctggtgcccctgctgagagaggccagcgccagagacagacagagcgcccagcccgaggaggtgtacctgagacagttcagcggcagcctgaagcccgaggacgccgaggtgttcaagagccccgccgccagcggcgagaagtag

SEQ ID NO: 103056 - DNA, 2295 bp, synthetic construct
  misc_feature 1..2295: note = Description of Artificial Sequence: Synthetic coding sequence
  source 1..2295: mol_type = other DNA
atgaccagccccagcagcagccccgtgttcagactggagaccctggacggcggccaggaggacggcagcgaggccgacagaggcaagctggacttcggcagcggcctgccccccatggagagccagttccagggcgaggacagaaagttcgccccccagatcagagtgaacctgaactacagaaagggcaccggcgccagccagcccgaccccaacagattcgacagagacagactgttcaacgccgtgagcagaggcgtgcccgaggacctggccggcctgcccgagtacctgagcaagaccagcaagtacctgaccgacagcgagtacaccgagggcagcaccggcaagacctgcctgatgaaggccgtgctgaacctgaaggacggcgtgaacgcctgcatcctgcccctgctgcagatcgacagagacagcggcaacccccagcccctggtgaacgcccagtgcaccgacgactactacagaggccacagcgccctgcacatcgccatcgagaagagaagcctgcagtgcgtgaagctgctggtggagaacggcgccaacgtgcacgccagagcctgcggcagattcttccagaagggccagggcacctgcttctacttcggcgagctgcccctgagcctggccgcctgcaccaagcagtgggacgtggtgagctacctgctggagaacccccaccagcccgccagcctgcaggccaccgacagccagggcaacaccgtgctgcacgccctggtgatgatcagcgacaacagcgccgagaacatcgccctggtgaccagcatgtacgacggcctgctgcaggccggcgccagactgtgccccaccgtgcagctggaggacatcagaaacctgcaggacctgacccccctgaagctggccgccaaggagggcaagatcgagatcttcagacacatcctgcagagagagttcagcggcctgagccacctgagcagaaagttcaccgagtggtgctacggccccgtgagagtgagcctgtacgacctggccagcgtggacagctgcgaggagaacagcgtgctggagatcatcgccttccactgcaagagcccccacagacacagaatggtggtgctggagcccctgaacaagctgctgcaggccaagtgggacctgctgatccccaagttcttcctgaacttcctgtgcaacctgatctacatgttcatcttcaccgccgtggcctaccaccagcccaccctgaagaagcaggccgccccccacctgaaggccgaggtgggcaacagcatgctgctgaccggccacatcctgatcctgctgggcggcatctacctgctggtgggccagctgtggtacttctggagaagacacgtgttcatctggatcagcttcatcgacagctacttcgagatcctgttcctgttccaggccctgctgaccgtggtgagccaggtgctgtgcttcctggccatcgagtggtacctgcccctgctggtgagcgccctggtgctgggctggctgaacctgctgtactacaccagaggcttccagcacaccggcatctacagcgtgatgatccagaaggtgatcctgagagacctgctgagattcctgctgatctacctggtgttcctgttcggcttcgccgtggccctggtgagcctgagccaggaggcctggagacccgaggcccccaccggccccaacgccaccgagagcgtgcagcccatggagggccaggaggacgagggcaacggcgcccagtacagaggcatcctggaggccagcctggagctgttcaagttcaccatcggcatgggcgagctggccttccaggagcagctgcacttcagaggcatggtgctgctgctgctgctggcctacgtgctgctgacctacatcctgctgctgaacatgctgatcgccctgatgagcgagaccgtgaacagcgtggccaccgacagctggagcatctggaagctgcagaaggccatcagcgtgctggagatggagaacggctactggtggtgcagaaagaagcagagagccggcgtgatgctgaccgtgggcaccaagcccgacggcagccccgacgagagatggtgcttcagagtggaggaggtgaactgggccagctgggagcagaccctgcccaccctgtgcgaggaccccagcggcgccggcgtgcccagaaccctggagaaccccgtgctggccagcccccccaaggaggacgaggacggcgccagcgaggagaactacgtgcccgtgcagctgctgcagagcaactag

SEQ ID NO: 103057 - DNA, 801 bp, synthetic construct
  misc_feature 1..801: note = Description of Artificial Sequence: Synthetic coding sequence
  source 1..801: mol_type = other DNA
tgagacttcagcctgggcgtgcccagctggtggtgcctgatctgcttcaacatcggccccagcgtgggccccagccagcccgaccccaacagattcgacagagacagactgttcaacgccgtgagcagaggcgtgcccgaggacctggccggcctgcccgagtacctgagcaagaccagcaagtacctgaccgacagcgagtacaccgagggcagcaccggcaagacctgcctgatgaaggccgtgctgaacctgaaggacggcgtgaacgcctgcatcctgcccctgctgcagatcgacagagacagcggcaacccccagcccctggtgaacgcccagtgcaccgacgactactacagaggccacagcgccctgcacatcgccatcgagaagagaagcctgcagtgcgtgaagctgctggtggagaacggcgccaacgtgcacgccagagcctgcggcagattcttccagaagggccagggcacctgcttctacttcggcgagctgcccctgagcctggccgcctgcaccaagcagtgggacgtggtgagctacctgctggagaacccccaccagcccgccagcctgcaggccaccgacagccagggcaacaccgtgctgcacgccctggtgatgatcagcgacaacagcgccgagaacatcgccctggtgaccagcatgtacgacggcctgctgcaggccggcgccagactgtgccccaccgtgcagctggaggacatcagaaacctgcaggacctgacccccctgaagctggccgccaaggagggcaagatcgagtag

SEQ ID NO: 103058 - DNA, 2373 bp, synthetic construct; identical to SEQ ID NO: 102984
  misc_feature 1..2373: note = Description of Artificial Sequence: Synthetic coding sequence
  source 1..2373: mol_type = other DNA

SEQ ID NO: 103059 - DNA, 2376 bp, synthetic construct
  misc_feature 1..2376: note = Description of Artificial Sequence: Synthetic coding sequence
  source 1..2376: mol_type = other DNA
atgaaggcccaccccaaggagatggtgcccctgatgggcaagagagtggccgcccccagcggcaaccccgccatcctgcccgagaagagacccgccgagatcacccccaccaagaagagcgcccacttcttcctggagatcgagggcttcgagcccaaccccaccgtggccaagaccagcccccccgtgttcagcaagcccatggacagcaacatcagacagtgcatcagcggcaactgcgacgacatggacagcccccagagcccccaggacgacgtgaccgagacccccagcaaccccaacagccccagcgcccagctggccaaggaggagcagagaagaaagaagagaagactgaagaagagaatcttcgccgccgtgagcgagggctgcgtggaggagctggtggagctgctggtggagctgcaggagctgtgcagaagaagacacgacgaggacgtgcccgacttcctgatgcacaagctgaccgccagcgacaccggcaagacctgcctgatgaaggccctgctgaacatcaaccccaacaccaaggagatcgtgagaatcctgctggccttcgccgaggagaacgacatcctgggcagattcatcaacgccgagtacaccgaggaggcctacgagggccagaccgccctgaacatcgccatcgagagaagacagggcgacatcgccgccctgctgatcgccgccggcgccgacgtgaacgcccacgccaagggcgccttcttcaaccccaagtaccagcacgagggcttctacttcggcgagacccccctggccctggccgcctgcaccaaccagcccgagatcgtgcagctgctgatggagcacgagcagaccgacatcaccagcagagacagcagaggcaacaacatcctgcacgccctggtgaccgtggccgaggacttcaagacccagaacgacttcgtgaagagaatgtacgacatgatcctgctgagaagcggcaactgggagctggagaccaccagaaacaacgacggcctgacccccctgcagctggccgccaagatgggcaaggccgagatcctgaagtacatcctgagcagagagatcaaggagaagagactgagaagcctgagcagaaagttcaccgactgggcctacggccccgtgagcagcagcctgtacgacctgaccaacgtggacaccaccaccgacaacagcgtgctggagatcaccgtgtacaacaccaacatcgacaacagacacgagatgctgaccctggagcccctgcacaccctgctgcacatgaagtggaagaagttcgccaagcacatgttcttcctgagcttctgcttctacttcttctacaacatcaccctgaccctggtgagctactacagacccagagaggaggaggccatcccccaccccctggccctgacccacaagatgggctggctgcagctgctgggcagaatgttcgtgctgatctgggccatgtgcatcagcgtgaaggagggcatcgccatcttcctgctgagacccagcgacctgcagagcatcctgagcgacgcctggttccacttcgtgttcttcatccaggccgtgctggtgatcctgagcgtgttcctgtacctgttcgcctacaaggagtacctggcctgcctggtgctggccatggccctgggctgggccaacatgctgtactacaccagaggcttccagagcatgggcatgtacagcgtgatgatccagaaggtgatcctgcacgacgtgctgaagttcctgttcgtgtacatcgtgttcctgctgggcttcggcgtggccctggccagcctgatcgagaagtgccccaaggacaacaaggactgcagcagctacggcagcttcagcgacgccgtgctggagctgttcaagctgaccatcggcctgggcgacctgaacatccagcagaacagcaagtaccccatcctgttcctgttcctgctgatcacctacgtgatcctgaccttcgtgctgctgctgaacatgctgatcgccctgatgggcgagaccgtggagaacgtgagcaaggagagcgagagaatctggagactgcagagagccagaaccatcctggagttcgagaagatgctgcccgagtggctgagaagcagattcagaatgggcgagctgtgcaaggtggccgaggacgacttcagactgtgcctgagaatcaacgaggtgaagtggaccgagtggaagacccacgtgagcttcctgaacgaggaccccggccccgtgagaagaaccgccgacttcaacaagatccaggacagcagcagaaacaacagcaagaccaccctgaacgccttcgaggaggtggaggagttccccgagaccagcgtgtag

SEQ ID NO: 103060 - DNA, 2328 bp, synthetic construct
  misc_feature 1..2328: note = Description of Artificial Sequence: Synthetic coding sequence
  source 1..2328: mol_type = other DNA
atgagccaccacacctggcccagccccgccctgaacctggacttcgccacctacctgctgagagacctgggcgcccacttcttcctggagatcgagggcttcgagcccaaccccaccgtggccaagaccagcccccccgtgttcagcaagcccatggacagcaacatcagacagtgcatcagcggcaactgcgacgacatggacagcccccagagcccccaggacgacgtgaccgagacccccagcaaccccaacagccccagcgcccagctggccaaggaggagcagagaagaaagaagagaagactgaagaagagaatcttcgccgccgtgagcgagggctgcgtggaggagctggtggagctgctggtggagctgcaggagctgtgcagaagaagacacgacgaggacgtgcccgacttcctgatgcacaagctgaccgccagcgacaccggcaagacctgcctgatgaaggccctgctgaacatcaaccccaacaccaaggagatcgtgagaatcctgctggccttcgccgaggagaacgacatcctgggcagattcatcaacgccgagtacaccgaggaggcctacgagggccagaccgccctgaacatcgccatcgagagaagacagggcgacatcgccgccctgctgatcgccgccggcgccgacgtgaacgcccacgccaagggcgccttcttcaaccccaagtaccagcacgagggcttctacttcggcgagacccccctggccctggccgcctgcaccaaccagcccgagatcgtgcagctgctgatggagcacgagcagaccgacatcaccagcagagacagcagaggcaacaacatcctgcacgccctggtgaccgtggccgaggacttcaagacccagaacgacttcgtgaagagaatgtacgacatgatcctgctgagaagcggcaactgggagctggagaccaccagaaacaacgacggcctgacccccctgcagctggccgccaagatgggcaaggccgagatcctgaagtacatcctgagcagagagatcaaggagaagagactgagaagcctgagcagaaagttcaccgactgggcctacggccccgtgagcagcagcctgtacgacctgaccaacgtggacaccaccaccgacaacagcgtgctggagatcaccgtgtacaacaccaacatcgacaacagacacgagatgctgaccctggagcccctgcacaccctgctgcacatgaagtggaagaagttcgccaagcacatgttcttcctgagcttctgcttctacttcttctacaacatcaccctgaccctggtgagctactacagacccagagaggaggaggccatcccccaccccctggccctgacccacaagatgggctggctgcagctgctgggcagaatgttcgtgctgatctgggccatgtgcatcagcgtgaaggagggcatcgccatcttcctgctgagacccagcgacctgcagagcatcctgagcgacgcctggttccacttcgtgttcttcatccaggccgtgctggtgatcctgagcgtgttcctgtacctgttcgcctacaaggagtacctggcctgcctggtgctggccatggccctgggctgggccaacatgctgtactacaccagaggcttccagagcatgggcatgtacagcgtgatgatccagaaggtgatcctgcacgacgtgctgaagttcctgttcgtgtacatcgtgttcctgctgggcttcggcgtggccctggccagcctgatcgagaagtgccccaaggacaacaaggactgcagcagctacggcagcttcagcgacgccgtgctggagctgttcaagctgaccatcggcctgggcgacctgaacatccagcagaacagcaagtaccccatcctgttcctgttcctgctgatcacctacgtgatcctgaccttcgtgctgctgctgaacatgctgatcgccctgatgggcgagaccgtggagaacgtgagcaaggagagcgagagaatctggagactgcagagagccagaaccatcctggagttcgagaagatgctgcccgagtggctgagaagcagattcagaatgggcgagctgtgcaaggtggccgaggacgacttcagactgtgcctgagaatcaacgaggtgaagtggaccgagtggaagacccacgtgagcttcctgaacgaggaccccggccccgtgagaagaaccgccgacttcaacaagatccaggacagcagcagaaacaacagcaagaccaccctgaacgccttcgaggaggtggaggagttccccgagaccagcgtgtag

SEQ ID NO: 103061 - DNA, 2616 bp, synthetic construct
  misc_feature 1..2616: note = Description of Artificial Sequence: Synthetic coding sequence
  source 1..2616: mol_type = other DNA
atggccgacagcagcgagggccccagagccggccccggcgaggtggccgagctgcccggcgacgagagcggcacccccggcggcgaggccttccccctgagcagcctggccaacctgttcgagggcgaggacggcagcctgagccccagccccgccgacgccagcagacccgccggccccggcgacggcagacccaacctgagaatgaagttccagggcgccttcagaaagggcgtgcccaaccccatcgacctgctggagagcaccctgtacgagagcagcgtggtgcccggccccaagaaggcccccatggacagcctgttcgactacggcacctacagacaccacagcagcgacaacaagagatggagaaagaagatcatcgagaagcagccccagagccccaaggcccccgccccccagcccccccccatcctgaaggtgttcaacagacccatcctgttcgacatcgtgagcagaggcagcaccgccgacctggacggcctgctgcccttcctgctgacccacaagaagagactgaccgacgaggagttcagagagcccagcaccggcaagacctgcctgcccaaggccctgctgaacctgagcaacggcagaaacgacaccatccccgtgctgctggacatcgccgagagaaccggcaacatgagagagttcatcaacagccccttcagagacatctactacagaggccagaccgccctgcacatcgccatcgagagaagatgcaagcactacgtggagctgctggtggcccagggcgccgacgtgcacgcccaggccagaggcagattcttccagcccaaggacgagggcggctacttctacttcggcgagctgcccctgagcctggccgcctgcaccaaccagccccacatcgtgaactacctgaccgagaacccccacaagaaggccgacatgagaagacaggacagcagaggcaacaccgtgctgcacgccctggtggccatcgccgacaacaccagagagaacaccaagttcgtgaccaagatgtacgacctgctgctgctgaagtgcgccagactgttccccgacagcaacctggaggccgtgctgaacaacgacggcctgagccccctgatgatggccgccaagaccggcaagatcggcatcttccagcacatcatcagaagagaggtgaccgacgaggacaccagacacctgagcagaaagttcaaggactgggcctacggccccgtgtacagcagcctgtacgacctgagcagcctggacacctgcggcgaggaggccagcgtgctggagatcctggtgtacaacagcaagatcgagaacagacacgagatgctggccgtggagcccatcaacgagctgctgagagacaagtggagaaagttcggcgccgtgagcttctacatcaacgtggtgagctacctgtgcgccatggtgatcttcaccctgaccgcctactaccagcccctggagggcacccccccctacccctacagaaccaccgtggactacctgagactggccggcgaggtgatcaccctgttcaccggcgtgctgttcttcttcaccaacatcaaggacctgttcatgaagaagtgccccggcgtgaacagcctgttcatcgacggcagcttccagctgctgtacttcatctacagcgtgctggtgatcgtgagcgccgccctgtacctggccggcatcgaggcctacctggccgtgatggtgttcgccctggtgctgggctggatgaacgccctgtacttcaccagaggcctgaagctgaccggcacctacagcatcatgatccagaagatcctgttcaaggacctgttcagattcctgctggtgtacctgctgttcatgatcggctacgccagcgccctggtgagcctgctgaacccctgcgccaacatgaaggtgtgcaacgaggaccagaccaactgcaccgtgcccacctaccccagctgcagagacagcgagaccttcagcaccttcctgctggacctgttcaagctgaccatcggcatgggcgacctggagatgctgagcagcaccaagtaccccgtggtgttcatcatcctgctggtgacctacatcatcctgaccttcgtgctgctgctgaacatgctgatcgccctgatgggcgagaccgtgggccaggtgagcaaggagagcaagcacatctggaagctgcagtgggccaccaccatcctggacatcgagagaagcttccccgtgttcctgagaaaggccttcagaagcggcgagatggtgaccgtgggcaagagcagcgacggcacccccgacagaagatggtgcttcagagtggacgaggtgaactggagccactggaaccagaacctgggcatcatcaacgaggaccccggcaagaacgagacctaccagtactacggcttcagccacaccgtgggcagactgagaagagacagatggagcagcgtggtgcccagagtggtggagctgaacaagaacagcaaccccgacgaggtggtggtgcccctggacagcatgggcaaccccagatgcgacggccaccagcagggctaccccagaaagtggagaaccgacgacgcccccctgtag

SEQ ID NO: 103062 - DNA, 2436 bp, synthetic construct
  misc_feature 1..2436: note = Description of Artificial Sequence: Synthetic coding sequence
  source 1..2436: mol_type = other DNA
atggccgacagcagcgagggccccagagccggccccggcgaggtggccgagctgcccggcgacgagagcggcacccccggcggcgaggccttccccctgagcagcctggccaacctgttcgagggcgaggacggcagcctgagccccagccccgccgacgccagcagacccgccggccccggcgacggcagacccaacctgagaatgaagttccagggcgccttcagaaagggcgtgcccaaccccatcgacctgctggagagcaccctgtacgagagcagcgtggtgcccggccccaagaaggcccccatggacagcctgttcgactacggcacctacagacaccacagcagcgacaacaagagatggagaaagaagatcatcgagaagcagccccagagccccaaggcccccgccccccagcccccccccatcctgaaggtgttcaacagacccatcctgttcgacatcgtgagcagaggcagcaccgccgacctggacggcctgctgcccttcctgctgacccacaagaagagactgaccgacgaggagttcagagagcccagcaccggcaagacctgcctgcccaaggccctgctgaacctgagcaacggcagaaacgacaccatccccgtgctgctggacatcgccgagagaaccggcaacatgagagagttcatcaacagccccttcagagacatctactacagaggccagaccgccctgcacatcgccatcgagagaagatgcaagcactacgtggagctgctggtggcccagggcgccgacgtgcacgcccaggccagaggcagattcttccagcccaaggacgagggcggctacttctacttcggcgagctgcccctgagcctggccgcctgcaccaaccagccccacatcgtgaactacctgaccgagaacccccacaagaaggccgacatgagaagacaggacagcagaggcaacaccgtgctgcacgccctggtggccatcgccgacaacaccagagagaacaccaagttcgtgaccaagatgtacgacctgctgctgctgaagtgcgccagactgttccccgacagcaacctggaggccgtgctgaacaacgacggcctgagccccctgatgatggccgccaagaccggcaagatcggcaacagacacgagatgctggccgtggagcccatcaacgagctgctgagagacaagtggagaaagttcggcgccgtgagcttctacatcaacgtggtgagctacctgtgcgccatggtgatcttcaccctgaccgcctactaccagcccctggagggcacccccccctacccctacagaaccaccgtggactacctgagactggccggcgaggtgatcaccctgttcaccggcgtgctgttcttcttcaccaacatcaaggacctgttcatgaagaagtgccccggcgtgaacagcctgttcatcgacggcagcttccagctgctgtacttcatctacagcgtgctggtgatcgtgagcgccgccctgtacctggccggcatcgaggcctacctggccgtgatggtgttcgccctggtgctgggctggatgaacgccctgtacttcaccagaggcctgaagctgaccggcacctacagcatcatgatccagaagatcctgttcaaggacctgttcagattcctgctggtgtacctgctgttcatgatcggctacgccagcgccctggtgagcctgctgaacccctgcgccaacatgaaggtgtgcaacgaggaccagaccaactgcaccgtgcccacctaccccagctgcagagacagcgagaccttcagcaccttcctgctggacctgttcaagctgaccatcggcatgggcgacctggagatgctgagcagcaccaagtaccccgtggtgttcatcatcctgctggtgacctacatcatcctgaccttcgtgctgctgctgaacatgctgatcgccctgatgggcgagaccgtgggccaggtgagcaaggagagcaagcacatctggaagctgcagtgggccaccaccatcctggacatcgagagaagcttccccgtgttcctgagaaaggccttcagaagcggcgagatggtgaccgtgggcaagagcagcgacggcacccccgacagaagatggtgcttcagagtggacgaggtgaactggagccactggaaccagaacctgggcatcatcaacgaggaccccggcaagaacgagacctaccagtactacggcttcagccacaccgtgggcagactgagaagagacagatggagcagcgtggtgcccagagtggtggagctgaacaagaacagcaaccccgacgaggtggtggtgcccctggacagcatgggcaaccccagatgcgacggccaccagcagggctaccccagaaagtggagaaccgacgacgcccccctgtag

SEQ ID NO: 103063 - DNA, 2475 bp, synthetic construct
  misc_feature 1..2475: note = Description of Artificial Sequence: Synthetic coding sequence
  source 1..2475: mol_type = other DNA
atggccgacagcagcgagggccccagagccggccccggcgaggtggccgagctgcccggcgacgagagcggcacccccggcggcgaggccttccccctgagcagcctggccaacctgttcgagggcgaggacggcagcctgagccccagccccgccgacgccagcagacccgccggccccggcgacggcagacccaacctgagaatgaagttccagggcgccttcagaaagggcgtgcccaaccccatcgacctgctggagagcaccctgtacgagagcagcgtggtgcccggccccaagaaggcccccatggacagcctgttcgactacggcacctacagacaccacagcagcgacaacaagagatggagaaagaagatcatcgagaagcagccccagagccccaaggcccccgccccccagcccccccccatcctgaaggtgttcaacagacccatcctgttcgacatcgtgagcagaggcagcaccgccgacctggacggcctgctgcccttcctgctgacccacaagaagagactgaccgacgaggagttcagagagcccagcaccggcaagacctgcctgcccaaggccctgctgaacctgagcaacggcagaaacgacaccatccccgtgctgctggacatcgccgagagaaccggcaacatgagagagttcatcaacagccccttcagagacatctactacagaggcgagctgcccctgagcctggccgcctgcaccaaccagccccacatcgtgaactacctgaccgagaacccccacaagaaggccgacatgagaagacaggacagcagaggcaacaccgtgctgcacgccctggtggccatcgccgacaacaccagagagaacaccaagttcgtgaccaagatgtacgacctgctgctgctgaagtgcgccagactgttccccgacagcaacctggaggccgtgctgaacaacgacggcctgagccccctgatgatggccgccaagaccggcaagatcggcatcttccagcacatcatcagaagagaggtgaccgacgaggacaccagacacctgagcagaaagttcaaggactgggcctacggccccgtgtacagcagcctgtacgacctgagcagcctggacacctgcggcgaggaggccagcgtgctggagatcctggtgtacaacagcaagatcgagaacagacacgagatgctggccgtggagcccatcaacgagctgctgagagacaagtggagaaagttcggcgccgtgagcttctacatcaacgtggtgagctacctgtgcgccatggtgatcttcaccctgaccgcctactaccagcccctggagggcacccccccctacccctacagaaccaccgtggactacctgagactggccggcgaggtgatcaccctgttcaccggcgtgctgttcttcttcaccaacatcaaggacctgttcatgaagaagtgccccggcgtgaacagcctgttcatcgacggcagcttccagctgctgtacttcatctacagcgtgctggtgatcgtgagcgccgccctgtacctggccggcatcgaggcctacctggccgtgatggtgttcgccctggtgctgggctggatgaacgccctgtacttcaccagaggcctgaagctgaccggcacctacagcatcatgatccagaagatcctgttcaaggacctgttcagattcctgctggtgtacctgctgttcatgatcggctacgccagcgccctggtgagcctgctgaacccctgcgccaacatgaaggtgtgcaacgaggaccagaccaactgcaccgtgcccacctaccccagctgcagagacagcgagaccttcagcaccttcctgctggacctgttcaagctgaccatcggcatgggcgacctggagatgctgagcagcaccaagtaccccgtggtgttcatcatcctgctggtgacctacatcatcctgaccttcgtgctgctgctgaacatgctgatcgccctgatgggcgagaccgtgggccaggtgagcaaggagagcaagcacatctggaagctgcagtgggccaccaccatcctggacatcgagagaagcttccccgtgttcctgagaaaggccttcagaagcggcgagatggtgaccgtgggcaagagcagcgacggcacccccgacagaagatggtgcttcagagtggacgaggtgaactggagccactggaaccagaacctgggcatcatcaacgaggaccccggcaagaacgagacctaccagtactacggcttcagccacaccgtgggcagactgagaagagacagatggagcagcgtggtgcccagagtggtggagctgaacaagaacagcaaccccgacgaggtggtggtgcccctggacagcatgggcaaccccagatgcgacggccaccagcagggctaccccagaaagtggagaaccgacgacgcccccctgtag

SEQ ID NO: 103064 - DNA, 2616 bp, synthetic construct; identical to SEQ ID NO: 103061
  misc_feature 1..2616: note = Description of Artificial Sequence: Synthetic coding sequence
  source 1..2616: mol_type = other DNA

SEQ ID NO: 103065 - DNA, 2514 bp, synthetic construct
  misc_feature 1..2514: note = Description of Artificial Sequence: Synthetic coding sequence
  source 1..2514: mol_type = other DNA
atggccgacagcagcgagggccccagagccggccccggcgaggtggccgagctgcccggcgacgagagcggcacccccggcgacggcagacccaacctgagaatgaagttccagggcgccttcagaaagggcgtgcccaaccccatcgacctgctggagagcaccctgtacgagagcagcgtggtgcccggccccaagaaggcccccatggacagcctgttcgactacggcacctacagacaccacagcagcgacaacaagagatggagaaagaagatcatcgagaagcagccccagagccccaaggcccccgccccccagcccccccccatcctgaaggtgttcaacagacccatcctgttcgacatcgtgagcagaggcagcaccgccgacctggacggcctgctgcccttcctgctgacccacaagaagagactgaccgacgaggagttcagagagcccagcaccggcaagacctgcctgcccaaggccctgctgaacctgagcaacggcagaaacgacaccatccccgtgctgctggacatcgccgagagaaccggcaacatgagagagttcatcaacagccccttcagagacatctactacagaggccagaccgccctgcacatcgccatcgagagaagatgcaagcactacgtggagctgctggtggcccagggcgccgacgtgcacgcccaggccagaggcagattcttccagcccaaggacgagggcggctacttctacttcggcgagctgcccctgagcctggccgcctgcaccaaccagccccacatcgtgaactacctgaccgagaacccccacaagaaggccgacatgagaagacaggacagcagaggcaacaccgtgctgcacgccctggtggccatcgccgacaacaccagagagaacaccaagttcgtgaccaagatgtacgacctgctgctgctgaagtgcgccagactgttccccgacagcaacctggaggccgtgctgaacaacgacggcctgagccccctgatgatggccgccaagaccggcaagatcggcatcttccagcacatcatcagaagagaggtgaccgacgaggacaccagacacctgagcagaaagttcaaggactgggcctacggccccgtgtacagcagcctgtacgacctgagcagcctggacacctgcggcgaggaggccagcgtgctggagatcctggtgtacaacagcaagatcgagaacagacacgagatgctggccgtggagcccatcaacgagctgctgagagacaagtggagaaagttcggcgccgtgagcttctacatcaacgtggtgagctacctgtgcgccatggtgatcttcaccctgaccgcctactaccagcccctggagggcacccccccctacccctacagaaccaccgtggactacctgagactggccggcgaggtgatcaccctgttcaccggcgtgctgttcttcttcaccaacatcaaggacctgttcatgaagaagtgccccggcgtgaacagcctgttcatcgacggcagcttccagctgctgtacttcatctacagcgtgctggtgatcgtgagcgccgccctgtacctggccggcatcgaggcctacctggccgtgatggtgttcgccctggtgctgggctggatgaacgccctgtacttcaccagaggcctgaagctgaccggcacctacagcatcatgatccagaagatcctgttcaaggacctgttcagattcctgctggtgtacctgctgttcatgatcggctacgccagcgccctggtgagcctgctgaacccctgcgccaacatgaaggtgtgcaacgaggaccagaccaactgcaccgtgcccacctaccccagctgcagagacagcgagaccttcagcaccttcctgctggacctgttcaagctgaccatcggcatgggcgacctggagatgctgagcagcaccaagtaccccgtggtgttcatcatcctgctggtgacctacatcatcctgaccttcgtgctgctgctgaacatgctgatcgccctgatgggcgagaccgtgggccaggtgagcaaggagagcaagcacatctggaagctgcagtgggccaccaccatcctggacatcgagagaagcttccccgtgttcctgagaaaggccttcagaagcggcgagatggtgaccgtgggcaagagcagcgacggcacccccgacagaagatggtgcttcagagtggacgaggtgaactggagccactggaaccagaacctgggcatcatcaacgaggaccccggcaagaacgagacctaccagtactacggcttcagccacaccgtgggcagactgagaagagacagatggagcagcgtggtgcccagagtggtggagctgaacaagaacagcaaccccgacgaggtggtggtgcccctggacagcatgggcaaccccagatgcgacggccaccagcagggctaccccagaaagtggagaaccgacgacgcccccctgtag

SEQ ID NO: 103066 - DNA, 2436 bp, synthetic construct; identical to SEQ ID NO: 103062
  misc_feature 1..2436: note = Description of Artificial Sequence: Synthetic coding sequence
  source 1..2436: mol_type = other DNA

SEQ ID NO: 103067 - DNA, 2475 bp, synthetic construct; identical to SEQ ID NO: 103063
  misc_feature 1..2475: note = Description of Artificial Sequence: Synthetic coding sequence
  source 1..2475: mol_type = other DNA

SEQ ID NO: 103068 - DNA, 2295 bp, synthetic construct
  misc_feature 1..2295: note = Description of Artificial Sequence: Synthetic coding sequence
  source 1..2295: mol_type = other DNA
atggccgacagcagcgagggccccagagccggccccggcgaggtggccgagctgcccggcgacgagagcggcacccccggcggcgaggccttccccctgagcagcctggccaacctgttcgagggcgaggacggcagcctgagccccagccccgccgacgccagcagacccgccggccccggcgacggcagacccaacctgagaatgaagttccagggcgccttcagaaagggcgtgcccaaccccatcgacctgctggagagcaccctgtacgagagcagcgtggtgcccggccccaagaaggcccccatggacagcctgttcgactacggcacctacagacaccacagcagcgacaacaagagatggagaaagaagatcatcgagaagcagccccagagccccaaggcccccgccccccagcccccccccatcctgaaggtgttcaacagacccatcctgttcgacatcgtgagcagaggcagcaccgccgacctggacggcctgctgcccttcctgctgacccacaagaagagactgaccgacgaggagttcagagagcccagcaccggcaagacctgcctgcccaaggccctgctgaacctgagcaacggcagaaacgacaccatccccgtgctgctggacatcgccgagagaaccggcaacatgagagagttcatcaacagccccttcagagacatctactacagaggcgagctgcccctgagcctggccgcctgcaccaaccagccccacatcgtgaactacctgaccgagaacccccacaagaaggccgacatgagaagacaggacagcagaggcaacaccgtgctgcacgccctggtggccatcgccgacaacaccagagagaacaccaagttcgtgaccaagatgtacgacctgctgctgctgaagtgcgccagactgttccccgacagcaacctggaggccgtgctgaacaacgacggcctgagccccctgatgatggccgccaagaccggcaagatcggcaacagacacgagatgctggccgtggagcccatcaacgagctgctgagagacaagtggagaaagttcggcgccgtgagcttctacatcaacgtggtgagctacctgtgcgccatggtgatcttcaccctgaccgcctactaccagcccctggagggcacccccccctacccctacagaaccaccgtggactacctgagactggccggcgaggtgatcaccctgttcaccggcgtgctgttcttcttcaccaacatcaaggacctgttcatgaagaagtgccccggcgtgaacagcctgttcatcgacggcagcttccagctgctgtacttcatctacagcgtgctggtgatcgtgagcgccgccctgtacctggccggcatcgaggcctacctggccgtgatggtgttcgccctggtgctgggctggatgaacgccctgtacttcaccagaggcctgaagctgaccggcacctacagcatcatgatccagaagatcctgttcaaggacctgttcagattcctgctggtgtacctgctgttcatgatcggctacgccagcgccctggtgagcctgctgaacccctgcgccaacatgaaggtgtgcaacgaggaccagaccaactgcaccgtgcccacctaccccagctgcagagacagcgagaccttcagcaccttcctgctggacctgttcaagctgaccatcggcatgggcgacctggagatgctgagcagcaccaagtaccccgtggtgttcatcatcctgctggtgacctacatcatcctgaccttcgtgctgctgctgaacatgctgatcgccctgatgggcgagaccgtgggccaggtgagcaaggagagcaagcacatctggaagctgcagtgggccaccaccatcctggacatcgagagaagcttccccgtgttcctgagaaaggccttcagaagcggcgagatggtgaccgtgggcaagagcagcgacggcacccccgacagaagatggtgcttcagagtggacgaggtgaactggagccactggaaccagaacctgggcatcatcaacgaggaccccggcaagaacgagacctaccagtactacggcttcagccacaccgtgggcagactgagaagagacagatggagcagcgtggtgcccagagtggtggagctgaacaagaacagcaaccccgacgaggtggtggtgcccctggacagcatgggcaaccccagatgcgacggccaccagcagggctaccccagaaagtggagaaccgacgacgcccccctgtag

SEQ ID NO: 103069 - DNA, 2190 bp, synthetic construct
  misc_feature 1..2190: note = Description of Artificial Sequence: Synthetic coding sequence
  source 1..2190: mol_type = other DNA
atgggcggcttcctgcccaaggccgagggccccggcagccagctgcagaagctgctgcccagcttcctggtgagagagcaggactgggaccagcacctggacaagctgcacatgctgcagcagaagagaatcctggagagccccctgctgagagccagcaaggagaacgacctgagcgtgctgagacagctgctgctggactgcacctgcgacgtgagacagagaggcgccctgggcgagaccgccctgcacatcgccgccctgtacgacaacctggaggccgccctggtgctgatggaggccgcccccgagctggtgttcgagcccaccacctgcgaggccttcgccggccagaccgccctgcacatcgccgtggtgaaccagaacgtgaacctggtgagagccctgctgaccagaagagccagcgtgagcgccagagccaccggcaccgccttcagaagaagccccagaaacctgatctacttcggcgagcaccccctgagcttcgccgcctgcgtgaacagcgaggagatcgtgagactgctgatcgagcacggcgccgacatcagagcccaggacagcctgggcaacaccgtgctgcacatcctgatcctgcagcccaacaagaccttcgcctgccagatgtacaacctgctgctgagctacgacggccacggcgaccacctgcagcccctggacctggtgcccaaccaccagggcctgacccccttcaagctggccggcgtggagggcaacaccgtgatgttccagcacctgatgcagaagagaagacacatccagtggacctacggccccctgaccagcatcctgtacgacctgaccgagatcgacagctggggcgaggagctgagcttcctggagctggtggtgagcagcgacaagagagaggccagacagatcctggagcagacccccgtgaaggagctggtgagcttcaagtggaacaagtacggcagaccctacttctgcatcctggccgccctgtacctgctgtacatgatctgcttcaccacctgctgcgtgtacagacccctgaagttcagaggcggcaacagaacccacagcagagacatcaccatcctgcagcagaagctgctgcaggaggcctacgagaccagagaggacatcatcagactggtgggcgagctggtgagcatcgtgggcgccgtgatcatcctgctgctggagatccccgacatcttcagagtgggcgccagcagatacttcggcaagaccatcctgggcggccccttccacgtgatcatcatcacctacgccagcctggtgctggtgaccatggtgatgagactgaccaacaccaacggcgaggtggtgcccatgagcttcgccctggtgctgggctggtgcagcgtgatgtacttcaccagaggcttccagatgctgggccccttcaccatcatgatccagaagatgatcttcggcgacctgatgagattctgctggctgatggccgtggtgatcctgggcttcgccagcgccttctacatcatcttccagaccgaggaccccaccagcctgggccagttctacgactaccccatggccctgttcaccaccttcgagctgttcctgaccgtgatcgacgcccccgccaactacgacgtggacctgcccttcatgttcagcatcgtgaacttcgccttcgccatcatcgccaccctgctgatgctgaacctgttcatcgccatgatgggcgacacccactggagagtggcccaggagagagacgagctgtggagagcccaggtggtggccaccaccgtgatgctggagagaaagctgcccagatgcctgtggcccagaagcggcatctgcggctgcgagttcggcctgggcgacagatggttcctgagagtggagaaccacaacgaccagaaccccctgagagtgctgagatacgtggaggtgttcaagaacagcgacaaggaggacgaccaggagcaccccagcgagaagcagcccagcggcgccgagagcggcaccctggccagagccagcctggccctgcccaccagcagcctgagcagaaccgccagccagagcagcagccacagaggctgggagatcctgagacagaacaccctgggccacctgaacctgggcctgaacctgagcgagggcgacggcgaggaggtgtaccacttctag

SEQ ID NO: 103070 - DNA, 1146 bp, synthetic construct
  misc_feature 1..1146: note = Description of Artificial Sequence: Synthetic coding sequence
  source 1..1146: mol_type = other DNA
atgggcggcttcctgcccaaggccgagggccccggcagccagctgcagaagctgctgcccagcttcctggtgagagagcaggactgggaccagcacctggacaagctgcacatgctgcagcagaagagaatcctggagagccccctgctgagagccagcaaggagaacgacctgagcgtgctgagacagctgctgctggactgcacctgcgacgtgagacagagaggcgccctgggcgagaccgccctgcacatcgccgccctgtacgacaacctggaggccgccctggtgctgatggaggccgcccccgagctggtgttcgagcccaccacctgcgaggccttcgccggccagaccgccctgcacatcgccgtggtgaaccagaacgtgaacctggtgagagccctgctgaccagaagagccagcgtgagcgccagagccaccggcaccgccttcagaagaagccccagaaacctgatctacttcggcgagcaccccctgagcttcgccgcctgcgtgaacagcgaggagatcgtgagactgctgatcgagcacggcgccgacatcagagcccaggacagcctgggcaacaccgtgctgcacatcctgatcctgcagcccaacaagaccttcgcctgccagatgtacaacctgctgctgagctacgacggccacggcgaccacctgcagcccctggacctggtgcccaaccaccagggcctgacccccttcaagctggccggcgtggagggcaacaccgtgatgttccagcacctgatgcagaagagaagacacatccagtggacctacggccccctgaccagcatcctgtacgacctgaccgagatcgacagctggggcgaggagctgagcttcctggagctggtggtgagcagcgacaagagagaggccagacagatcctggagcagacccccgtgaaggagctggtgagcttcaagtggaacaagtacggcagaccctacttctgcatcctggccgccctgtacctgctgtacatgatctgcttcaccacctgctgcgtgtacagacccctgaagttcagaggcggcaacagaacccacagcagagacatcaccatcctgcagcagaagctgctgcaggtgatcctgctgagaagaggctag

SEQ ID NO: 103071 - DNA, 1674 bp, synthetic construct
  misc_feature 1..1674: note = Description of Artificial Sequence: Synthetic coding sequence
  source 1..1674: mol_type = other DNA
atgggcctgagcctgcccaaggagaagggcctgatcctgtgcctgtggagcaagttctgcagatggttccaggacagcctgggcaacaccgtgctgcacatcctgatcctgcagcccaacaagaccttcgcctgccagatgtacaacctgctgctgagctacgacagacacggcgaccacctgcagcccctggacctggtgcccaaccaccagggcctgacccccttcaagctggccggcgtggagggcaacaccgtgatgttccagcacctgatgcagaagagaaagcacacccagtggacctacggccccctgaccagcaccctgtacgacctgaccgagatcgacagcagcggcgacgagcagagcctgctggagctgatcatcaccaccaagaagagagaggccagacagatcctggaccagacccccgtgaaggagctggtgagcctgaagtggaagagatacggcagaccctacttctgcatgctgggcgccatctacctgctgtacatcatctgcttcaccatgtgctgcatctacagacccctgaagcccagaaccaacaacagaaccagccccagagacaacaccctgctgcagcagaagctgctgcaggaggcctacatgacccccaaggacgacatcagactggtgggcgagctggtgaccgtgatcggcgccatcatcatcctgctggtggaggtgcccgacatcttcagaatgggcgtgaccagattcttcggccagaccatcctgggcggccccttccacgtgctgatcatcacctacgccttcatggtgctggtgaccatggtgatgagactgatcagcgccagcggcgaggtggtgcccatgagcttcgccctggtgctgggctggtgcaacgtgatgtacttcgccagaggcttccagatgctgggccccttcaccatcatgatccagaagatgatcttcggcgacctgatgagattctgctggctgatggccgtggtgatcctgggcttcgccagcgccttctacatcatcttccagaccgaggaccccgaggagctgggccacttctacgactaccccatggccctgttcagcaccttcgagctgttcctgaccatcatcgacggccccgccaactacaacgtggacctgcccttcatgtacagcatcacctacgccgccttcgccatcatcgccaccctgctgatgctgaacctgctgatcgccatgatgggcgacacccactggagagtggcccacgagagagacgagctgtggagagcccagatcgtggccaccaccgtgatgctggagagaaagctgcccagatgcctgtggcccagaagcggcatctgcggcagagagtacggcctgggcgacagatggttcctgagagtggaggacagacaggacctgaacagacagagaatccagagatacgcccaggccttccacaccagaggcagcgaggacctggacaaggacagcgtggagaagctggagctgggctgccccttcagcccccacctgagcctgcccatgcccagcgtgagcagaagcaccagcagaagcagcgccaactgggagagactgagacagggcaccctgagaagagacctgagaggcatcatcaacagaggcctggaggacggcgagagctgggagtaccagatctag

SEQ ID NO: 103072 - DNA, 2178 bp, synthetic construct
  misc_feature 1..2178: note = Description of Artificial Sequence: Synthetic coding sequence
  source 1..2178: mol_type = other DNA
atgggcctgagcctgcccaaggagaagggcctgatcctgtgcctgtggagcaagttctgcagatggttccagagaagagagagctgggcccagagcagagacgagcagaacctgctgcagcagaagagaatctgggagagccccctgctgctggccgccaaggacaacgacgtgcaggccctgaacaagctgctgaagtacgaggactgcaaggtgcaccagagaggcgccatgggcgagaccgccctgcacatcgccgccctgtacgacaacctggaggccgccatggtgctgatggaggccgcccccgagctggtgttcgagcccatgaccagcgagctgtacgagggccagaccgccctgcacatcgccgtggtgaaccagaacatgaacctggtgagagccctgctggccagaagagccagcgtgagcgccagagccaccggcaccgccttcagaagaagcccctgcaacctgatctacttcggcgagcaccccctgagcttcgccgcctgcgtgaacagcgaggagatcgtgagactgctgatcgagcacggcgccgacatcagagcccaggacagcctgggcaacaccgtgctgcacatcctgatcctgcagcccaacaagaccttcgcctgccagatgtacaacctgctgctgagctacgacagacacggcgaccacctgcagcccctggacctggtgcccaaccaccagggcctgacccccttcaagctggccggcgtggagggcaacaccgtgatgttccagcacctgatgcagaagagaaagcacacccagtggacctacggccccctgaccagcaccctgtacgacctgaccgagatcgacagcagcggcgacgagcagagcctgctggagctgatcatcaccaccaagaagagagaggccagacagatcctggaccagacccccgtgaaggagctggtgagcctgaagtggaagagatacggcagaccctacttctgcatgctgggcgccatctacctgctgtacatcatctgcttcaccatgtgctgcatctacagacccctgaagcccagaaccaacaacagaaccagccccagagacaacaccctgctgcagcagaagctgctgcaggaggcctacatgacccccaaggacgacatcagactggtgggcgagctggtgaccgtgatcggcgccatcatcatcctgctggtggaggtgcccgacatcttcagaatgggcgtgaccagattcttcggccagaccatcctgggcggccccttccacgtgctgatcatcacctacgccttcatggtgctggtgaccatggtgatgagactgatcagcgccagcggcgaggtggtgcccatgagcttcgccctggtgctgggctggtgcaacgtgatgtacttcgccagaggcttccagatgctgggccccttcaccatcatgatccagaagatgatcttcggcgacctgatgagattctgctggctgatggccgtggtgatcctgggcttcgccagcgccttctacatcatcttccagaccgaggaccccgaggagctgggccacttctacgactaccccatggccctgttcagcaccttcgagctgttcctgaccatcatcgacggccccgccaactacaacgtggacctgcccttcatgtacagcatcacctacgccgccttcgccatcatcgccaccctgctgatgctgaacctgctgatcgccatgatgggcgacacccactggagagtggcccacgagagagacgagctgtggagagcccagatcgtggccaccaccgtgatgctggagagaaagctgcccagatgcctgtggcccagaagcggcatctgcggcagagagtacggcctgggcgacagatggttcctgagagtggaggacagacaggacctgaacagacagagaatccagagatacgcccaggccttccacaccagaggcagcgaggacctggacaaggacagcgtggagaagctggagctgggctgccccttcagcccccacctgagcctgcccatgcccagcgtgagcagaagcaccagcagaagcagcgccaactgggagagactgagacagggcaccctgagaagagacctgagaggcatcatcaacagaggcctggaggacggcgagagctgggagtaccagatctag

SEQ ID NO: 103073 - DNA, 168 bp, synthetic construct
  misc_feature 1..168: note = Description of Artificial Sequence: Synthetic coding sequence
  source 1..168: mol_type = other DNA
atgagcaccagcagaaagctgaagagccacggcatgagaagaagcaagagcagaagcccccacaagggcgtgaagagaggcggcagcaagagaaagtacagaaagggcaacctgaagagcagaaagagaggcgacgacgccaacagaaactacagaagccacctgtag

SEQ ID NO: 103074 - DNA, 417 bp, synthetic construct
  misc_feature 1..417: note = Description of Artificial Sequence: Synthetic coding sequence
  source 1..417: mol_type = other DNA
atggacacccagacccacagcctgcccatcacccacacccagctgcacagcaacagccagccccagagcagaacctgcaccagacactgccagaccttcagccagagctgcagacagagccacagaggcagcagaagccagagcagcagccagagccccgccagccacagaaaccccaccggcgcccacagcagcagcggccaccagagccagagccccaacaccagccccccccccaagagacacaagaagaccatgaacagccaccacagccccatgagacccaccatcctgcactgcagatgccccaagaacagaaagaacctggagggcaagctgaagaagaagaagatggccaagagaatccagcaggtgtacaagaccaagaccagaagcagcggctggaagagcaactag

SEQ ID NO: 103075 - DNA, 1731 bp, synthetic construct
  misc_feature 1..1731: note = Description of Artificial Sequence: Synthetic coding sequence
  source 1..1731: mol_type = other DNA
atggccgtgctgttcttccacaccatgagatacaagagccaggaccccagaaacccccacaacgacagattcgtgctgagcaagggccacgccgcccccatcctgtacgccgtgtgggccgaggccggcttcctggccgaggccgagctgctgaacctgagaaagatcagcagcgacctggacggccaccccgtgcccaagcaggccttcaccgacgtggccaccggcagcctgggccagggcctgggcgccgcctgcggcatggcctacaccggcaagtacttcgacaaggccagctacagagtgtactgcctgctgggcgacggcgagctgagcgagggcagcgtgtgggaggccatggccttcgccagcatctacaagctggacaacctggtggccatcctggacatcaacagactgggccagagcgaccccgcccccctgcagcaccagatggacatctaccagaagagatgcgaggccttcggctggcacgccatcatcgtggacggccacagcgtggaggagctgtgcaaggccttcggccaggccaagcaccagcccaccgccatcatcgccaagaccttcaagggcagaggcatcaccggcgtggaggacaaggagagctggcacggcaagcccctgcccaagaacatggccgagcagatcatccaggagatctacagccagatccagagcaagaagaagatcctggccacccccccccaggaggacgcccccagcgtggacatcgccaacatcagaatgcccagcctgcccagctacaaggtgggcgacaagatcgccaccagaaaggcctacggccaggccctggccaagctgggccacgccagcgacagaatcatcgccctggacggcgacaccaagaacagcaccttcagcgagatcttcaagaaggagcaccccgacagattcatcgagtgctacatcgccgagcagaacatggtgagcatcgccgtgggctgcgccaccagaaacagaaccgtgcccttctgcagcaccttcgccgccttcttcaccagagccttcgaccagatcagaatggccgccatcagcgagagcaacatcaacctgtgcggcagccactgcggcgtgagcatcggcgaggacggccccagccagatggccctggaggacctggccatgttcagaagcgtgcccaccagcaccgtgttctaccccagcgacggcgtggccaccgagaaggccgtggagctggccgccaacaccaagggcatctgcttcatcagaaccagcagacccgagaacgccatcatctacaacaacaacgaggacttccaggtgggccaggccaaggtggtgctgaagagcaaggacgaccaggtgaccgtgatcggcgccggcgtgaccctgcacgaggccctggccgccgccgagctgctgaagaaggagaagatcaacatcagagtgctggaccccttcaccatcaagcccctggacagaaagctgatcctggacagcgccagagccaccaagggcagaatcctgaccgtggaggaccactactacgagggcggcatcggcgaggccgtgagcagcgccgtggtgggcgagcccggcatcaccgtgacccacctggccgtgaacagagtgcccagaagcggcaagcccgccgagctgctgaagatgttcggcatcgacagagacgccatcgcccaggccgtgagaggcctgatcaccaaggcctag

SEQ ID NO: 103076 - DNA, 1374 bp, synthetic construct
  misc_feature 1..1374: note = Description of Artificial Sequence: Synthetic coding sequence
  source 1..1374: mol_type = other DNA
atggccttcgccagcatctacaagctggacaacctggtggccatcctggacatcaacagactgggccagagcgaccccgcccccctgcagcaccagatggacatctaccagaagagatgcgaggccttcggctggcacgccatcatcgtggacggccacagcgtggaggagctgtgcaaggccttcggccaggccaagcaccagcccaccgccatcatcgccaagaccttcaagggcagaggcatcaccggcgtggaggacaaggagagctggcacggcaagcccctgcccaagaacatggccgagcagatcatccaggagatctacagccagatccagagcaagaagaagatcctggccacccccccccaggaggacgcccccagcgtggacatcgccaacatcagaatgcccagcctgcccagctacaaggtgggcgacaagatcgccaccagaaaggcctacggccaggccctggccaagctgggccacgccagcgacagaatcatcgccctggacggcgacaccaagaacagcaccttcagcgagatcttcaagaaggagcaccccgacagattcatcgagtgctacatcgccgagcagaacatggtgagcatcgccgtgggctgcgccaccagaaacagaaccgtgcccttctgcagcaccttcgccgccttcttcaccagagccttcgaccagatcagaatggccgccatcagcgagagcaacatcaacctgtgcggcagccactgcggcgtgagcatcggcgaggacggccccagccagatggccctggaggacctggccatgttcagaagcgtgcccaccagcaccgtgttctaccccagcgacggcgtggccaccgagaaggccgtggagctggccgccaacaccaagggcatctgcttcatcagaaccagcagacccgagaacgccatcatctacaacaacaacgaggacttccaggtgggccaggccaaggtggtgctgaagagcaaggacgaccaggtgaccgtgatcggcgccggcgtgaccctgcacgaggccctggccgccgccgagctgctgaagaaggagaagatcaacatcagagtgctggaccccttcaccatcaagcccctggacagaaagctgatcctggacagcgccagagccaccaagggcagaatcctgaccgtggaggaccactactacgagggcggcatcggcgaggccgtgagcagcgccgtggtgggcgagcccggcatcaccgtgacccacctggccgtgaacagagtgcccagaagcggcaagcccgccgagctgctgaagatgttcggcatcgacagagacgccatcgcccaggccgtgagaggcctgatcaccaaggcctag

SEQ ID NO: 103077 - DNA, 1872 bp, synthetic construct
  misc_feature 1..1872: note = Description of Artificial Sequence: Synthetic coding sequence
  source 1..1872: mol_type = other DNA
atggagagctaccacaagcccgaccagcagaagctgcaggccctgaaggacaccgccaacagactgagaatcagcagcatccaggccaccaccgccgccggcagcggccaccccaccagctgctgcagcgccgccgagatcatggccgtgctgttcttccacaccatgagatacaagagccaggaccccagaaacccccacaacgacagattcgtgctgagcaagggccacgccgcccccatcctgtacgccgtgtgggccgaggccggcttcctggccgaggccgagctgctgaacctgagaaagatcagcagcgacctggacggccaccccgtgcccaagcaggccttcaccgacgtggccaccggcagcctgggccagggcctgggcgccgcctgcggcatggcctacaccggcaagtacttcgacaaggccagctacagagtgtactgcctgctgggcgacggcgagctgagcgagggcagcgtgtgggaggccatggccttcgccagcatctacaagctggacaacctggtggccatcctggacatcaacagactgggccagagcgaccccgcccccctgcagcaccagatggacatctaccagaagagatgcgaggccttcggctggcacgccatcatcgtggacggccacagcgtggaggagctgtgcaaggccttcggccaggccaagcaccagcccaccgccatcatcgccaagaccttcaagggcagaggcatcaccggcgtggaggacaaggagagctggcacggcaagcccctgcccaagaacatggccgagcagatcatccaggagatctacagccagatccagagcaagaagaagatcctggccacccccccccaggaggacgcccccagcgtggacatcgccaacatcagaatgcccagcctgcccagctacaaggtgggcgacaagatcgccaccagaaaggcctacggccaggccctggccaagctgggccacgccagcgacagaatcatcgccctggacggcgacaccaagaacagcaccttcagcgagatcttcaagaaggagcaccccgacagattcatcgagtgctacatcgccgagcagaacatggtgagcatcgccgtgggctgcgccaccagaaacagaaccgtgcccttctgcagcaccttcgccgccttcttcaccagagccttcgaccagatcagaatggccgccatcagcgagagcaacatcaacctgtgcggcagccactgcggcgtgagcatcggcgaggacggccccagccagatggccctggaggacctggccatgttcagaagcgtgcccaccagcaccgtgttctaccccagcgacggcgtggccaccgagaaggccgtggagctggccgccaacaccaagggcatctgcttcatcagaaccagcagacccgagaacgccatcatctacaacaacaacgaggacttccaggtgggccaggccaaggtggtgctgaagagcaaggacgaccaggtgaccgtgatcggcgccggcgtgaccctgcacgaggccctggccgccgccgagctgctgaagaaggagaagatcaacatcagagtgctggaccccttcaccatcaagcccctggacagaaagctgatcctggacagcgccagagccaccaagggcagaatcctgaccgtggaggaccactactacgagggcggcatcggcgaggccgtgagcagcgccgtggtgggcgagcccggcatcaccgtgacccacctggccgtgaacagagtgcccagaagcggcaagcccgccgagctgctgaagatgttcggcatcgacagagacgccatcgcccaggccgtgagaggcctgatcaccaaggcctag

SEQ ID NO: 103078 - DNA, 1872 bp, synthetic construct; identical to SEQ ID NO: 103077
  misc_feature 1..1872: note = Description of Artificial Sequence: Synthetic coding sequence
  source 1..1872: mol_type = other DNA

SEQ ID NO: 103079 - DNA, 1896 bp, synthetic construct
  misc_feature 1..1896: note = Description of Artificial Sequence: Synthetic coding sequence
  source 1..1896: mol_type = other DNA
atggagagctaccacaagcccgaccagcagaagctgcaggccctgaaggacaccgccaacagactgagaatcagcagcatccaggccaccaccgccgccggcagcggccaccccaccagctgctgcagcgccgccgagatcatggccgtgctgttcttccacaccatgagatacaagagccaggaccccagaaacccccacaacgacagattcgtgctgagcaagggccacgccgcccccatcctgtacgccgtgtgggccgaggccggcttcctggccgaggccgagctgctgaacctgagaaagatcagcagcgacctggacggccaccccgtgcccaagcaggccttcaccgacgtggccaccggcagcctgggccagggcctgggcgccgcctgcggcatggcctacaccggcaagtacttcgacaaggccagcctgcccagcagctgggactacagctacagagtgtactgcctgctgggcgacggcgagctgagcgagggcagcgtgtgggaggccatggccttcgccagcatctacaagctggacaacctggtggccatcctggacatcaacagactgggccagagcgaccccgcccccctgcagcaccagatggacatctaccagaagagatgcgaggccttcggctggcacgccatcatcgtggacggccacagcgtggaggagctgtgcaaggccttcggccaggccaagcaccagcccaccgccatcatcgccaagaccttcaagggcagaggcatcaccggcgtggaggacaaggagagctggcacggcaagcccctgcccaagaacatggccgagcagatcatccaggagatctacagccagatccagagcaagaagaagatcctggccacccccccccaggaggacgcccccagcgtggacatcgccaacatcagaatgcccagcctgcccagctacaaggtgggcgacaagatcgccaccagaaaggcctacggccaggccctggccaagctgggccacgccagcgacagaatcatcgccctggacggcgacaccaagaacagcaccttcagcgagatcttcaagaaggagcaccccgacagattcatcgagtgctacatcgccgagcagaacatggtgagcatcgccgtgggctgcgccaccagaaacagaaccgtgcccttctgcagcaccttcgccgccttcttcaccagagccttcgaccagatcagaatggccgccatcagcgagagcaacatcaacctgtgcggcagccactgcggcgtgagcatcggcgaggacggccccagccagatggccctggaggacctggccatgttcagaagcgtgcccaccagcaccgtgttctaccccagcgacggcgtggccaccgagaaggccgtggagctggccgccaacaccaagggcatctgcttcatcagaaccagcagacccgagaacgccatcatctacaacaacaacgaggacttccaggtgggccaggccaaggtggtgctgaagagcaaggacgaccaggtgaccgtgatcggcgccggcgtgaccctgcacgaggccctggccgccgccgagctgctgaagaaggagaagatcaacatcagagtgctggaccccttcaccatcaagcccctggacagaaagctgatcctggacagcgccagagccaccaagggcagaatcctgaccgtggaggaccactactacgagggcggcatcggcgaggccgtgagcagcgccgtggtgggcgagcccggcatcaccgtgacccacctggccgtgaacagagtgcccagaagcggcaagcccgccgagctgctgaagatgttcggcatcgacagagacgccatcgcccaggccgtgagaggcctgatcaccaaggcctag

SEQ ID NO: 103080 - DNA, 1182 bp, synthetic construct
  misc_feature 1..1182: note = Description of Artificial Sequence: Synthetic coding sequence
  source 1..1182: mol_type = other DNA
atggccctgaaggtggccaccgtggccggcagcgccgccaaggccgtgctgggccccgccctgctgtgcagaccctgggaggtgctgggcgcccacgaggtgcccagcagaaacatcttcagcgagcagaccatcccccccagcgccaagtacggcggcagacacaccgtgaccatgatccccggcgacggcatcggccccgagctgatgctgcacgtgaagagcgtgttcagacacgcctgcgtgcccgtggacttcgaggaggtgcacgtgagcagcaacgccgacgaggaggacatcagaaacgccatcatggccatcagaagaaacagagtggccctgaagggcaacatcgagaccaaccacaacctgccccccagccacaagagcagaaacaacatcctgagaaccagcctggacctgtacgccaacgtgatccactgcaagagcctgcccggcgtggtgaccagacacaaggacatcgacatcctgatcgtgagagagaacaccgagggcgagtacagcagcctggagcacgagagcgtggccggcgtggtggagagcctgaagatcatcaccaaggccaagagcctgagaatcgccgagtacgccttcaagctggcccaggagagcggcagaaagaaggtgaccgccgtgcacaaggccaacatcatgaagctgggcgacggcctgttcctgcagtgctgcagagaggtggccgccagatacccccagatcaccttcgagaacatgatcgtggacaacaccaccatgcagctggtgagcagaccccagcagttcgacgtgatggtgatgcccaacctgtacggcaacatcgtgaacaacgtgtgcgccggcctggtgggcggccccggcctggtggccggcgccaactacggccacgtgtacgccgtgttcgagaccgccaccagaaacaccggcaagagcatcgccaacaagaacatcgccaaccccaccgccaccctgctggccagctgcatgatgctggaccacctgaagctgcacagctacgccaccagcatcagaaaggccgtgctggccagcatggacaacgagaacatgcacacccccgacatcggcggccagggcaccaccagcgaggccatccaggacgtgatcagacacatcagagtgatcaacggcagagccgtggaggcctag

SEQ ID NO: 103081 - DNA, 1791 bp, synthetic construct
  misc_feature 1..1791: note = Description of Artificial Sequence: Synthetic coding sequence
  source 1..1791: mol_type = other DNA
atggccgacgccgaggccagagccgagttccccgaggaggccagacccgacagaggcaccctgcaggtgctgcaggacatggccagcagactgagaatccacagcatcagagccacctgcagcaccagcagcggccaccccaccagctgcagcagcagcagcgagatcatgagcgtgctgttcttctacatcatgagatacaagcagagcgaccccgagaaccccgacaacgacagattcgtgctggccaagagactgagcttcgtggacgtggccaccggctggctgggccagggcctgggcgtggcctgcggcatggcctacaccggcaagtacttcgacagagccagctacagagtgttctgcctgatgagcgacggcgagagcagcgagggcagcgtgtgggaggccatggccttcgccagctactacagcctggacaacctggtggccatcttcgacgtgaacagactgggccacagcggcgccctgcccgccgagcactgcatcaacatctaccagagaagatgcgaggccttcggctggaacacctacgtggtggacggcagagacgtggaggccctgtgccaggtgttctggcaggccagccaggtgaagcacaagcccaccgccgtggtggccaagaccttcaagggcagaggcacccccagcatcgaggacgccgagagctggcacgccaagcccatgcccagagagagagccgacgccatcatcaagctgatcgagagccagatccagaccagcagaaacctggacccccagccccccatcgaggacagccccgaggtgaacatcaccgacgtgagaatgaccagcccccccgactacagagtgggcgacaagatcgccaccagaaaggcctgcggcctggccctggccaagctgggctacgccaacaacagagtggtggtgctggacggcgacaccagatacagcaccttcagcgagatcttcaacaaggagtaccccgagagattcatcgagtgcttcatggccgagcagaacatggtgagcgtggccctgggctgcgccagcagaggcagaaccatcgccttcgccagcaccttcgccgccttcctgaccagagccttcgaccacatcagaatcggcggcctggccgagagcaacatcaacatcatcggcagccactgcggcgtgagcgtgggcgacgacggcgccagccagatggccctggaggacatcgccatgttcagaaccatccccaagtgcaccatcttctaccccaccgacgccgtgagcaccgagcacgccgtggccctggccgccaacgccaagggcatgtgcttcatcagaaccaccagacccgagaccatggtgatctacaccccccaggagagattcgagatcggccaggccaaggtgctgagacactgcgtgagcgacaaggtgaccgtgatcggcgccggcatcaccgtgtacgaggccctggccgccgccgacgagctgagcaagcaggacatcttcatcagagtgatcgacctgttcaccatcaagcccctggacgtggccaccatcgtgagcagcgccaaggccaccgagggcagaatcatcaccgtggaggaccactacccccagggcggcatcggcgaggccgtgtgcgccgccgtgagcatggaccccgacatccaggtgcacagcctggccgtgagcggcgtgccccagagcggcaagagcgaggagctgctggacatgtacggcatcagcgccagacacatcatcgtggccgtgaagtgcatgctgctgaactag

SEQ ID NO: 103082 - DNA, 1674 bp, synthetic construct
  misc_feature 1..1674: note = Description of Artificial Sequence: Synthetic coding sequence
  source 1..1674: mol_type = other DNA
atgagcgtgctgttcttctacatcatgagatacaagcagagcgaccccgagaaccccgacaacgacagattcgtgctggccaagagactgagcttcgtggacgtggccaccggctggctgggccagggcctgggcgtggcctgcggcatggcctacaccggcaagtacttcgacagagccagctacagagtgttctgcctgatgagcgacggcgagagcagcgagggcagcgtgtgggaggccatggccttcgccagctactacagcctggacaacctggtggccatcttcgacgtgaacagactgggccacagcggcgccctgcccgccgagcactgcatcaacatctaccagagaagatgcgaggccttcggctggaacacctacgtggtggacggcagagacgtggaggccctgtgccaggtgttctggcaggccagccaggtgaagcacaagcccaccgccgtggtggccaagaccttcaagggcagaggcacccccagcatcgaggacgccgagagctggcacgccaagcccatgcccagagagagagccgacgccatcatcaagctgatcgagagccagatccagaccagcagaaacctggacccccagccccccatcgaggacagccccgaggtgaacatcaccgacgtgagaatgaccagcccccccgactacagagtgggcgacaagatcgccaccagaaaggcctgcggcctggccctggccaagctgggctacgccaacaacagagtggtggtgctggacggcgacaccagatacagcaccttcagcgagatcttcaacaaggagtaccccgagagattcatcgagtgcttcatggccgagcagaacatggtgagcgtggccctgggctgcgccagcagaggcagaaccatcgccttcgccagcaccttcgccgccttcctgaccagagccttcgaccacatcagaatcggcggcctggccgagagcaacatcaacatcatcggcagccactgcggcgtgagcgtgggcgacgacggcgccagccagatggccctggaggacatcgccatgttcagaaccatccccaagtgcaccatcttctaccccaccgacgccgtgagcaccgagcacgccgtggccctggccgccaacgccaagggcatgtgcttcatcagaaccaccagacccgagaccatggtgatctacaccccccaggagagattcgagatcggccaggccaagggcgtgagcatgctgcaggacagctggagcagcgtgatcagctaccagaaggtgctgagacactgcgtgagcgacaaggtgaccgtgatcggcgccggcatcaccgtgtacgaggccctggccgccgccgacgagctgagcaagcaggacatcttcatcagagtgatcgacctgttcaccatcaagcccctggacgtggccaccatcgtgagcagcgccaaggccaccgagggcagaatcatcaccgtggaggaccactacccccagggcggcatcggcgaggccgtgtgcgccgccgtgagcatggaccccgacatccaggtgcacagcctggccgtgagcggcgtgccccagagcggcaagagcgaggagctgctggacatgtacggcatcagcgccagacacatcatcgtggccgtgaagtgcatgctgctgaactag

SEQ ID NO: 103083 - DNA, 1623 bp, synthetic construct
  misc_feature 1..1623: note = Description of Artificial Sequence: Synthetic coding sequence
  source 1..1623: mol_type = other DNA
atgagcgtgctgttcttctacatcatgagatacaagcagagcgaccccgagaaccccgacaacgacagattcgtgctggccaagagactgagcttcgtggacgtggccaccggctggctgggccagggcctgggcgtggcctgcggcatggcctacaccggcaagtacttcgacagagccagctacagagtgttctgcctgatgagcgacggcgagagcagcgagggcagcgtgtgggaggccatggccttcgccagctactacagcctggacaacctggtggccatcttcgacgtgaacagactgggccacagcggcgccctgcccgccgagcactgcatcaacatctaccagagaagatgcgaggccttcggctggaacacctacgtggtggacggcagagacgtggaggccctgtgccaggtgttctggcaggccagccaggtgaagcacaagcccaccgccgtggtggccaagaccttcaagggcagaggcacccccagcatcgaggacgccgagagctggcacgccaagcccatgcccagagagagagccgacgccatcatcaagctgatcgagagccagatccagaccagcagaaacctggacccccagccccccatcgaggacagccccgaggtgaacatcaccgacgtgagaatgaccagcccccccgactacagagtgggcgacaagatcgccaccagaaaggcctgcggcctggccctggccaagctgggctacgccaacaacagagtggtggtgctggacggcgacaccagatacagcaccttcagcgagatcttcaacaaggagtaccccgagagattcatcgagtgcttcatggccgagcagaacatggtgagcgtggccctgggctgcgccagcagaggcagaaccatcgccttcgccagcaccttcgccgccttcctgaccagagccttcgaccacatcagaatcggcggcctggccgagagcaacatcaacatcatcggcagccactgcggcgtgagcgtgggcgacgacggcgccagccagatggccctggaggacatcgccatgttcagaaccatccccaagtgcaccatcttctaccccaccgacgccgtgagcaccgagcacgccgtggccctggccgccaacgccaagggcatgtgcttcatcagaaccaccagacccgagaccatggtgatctacaccccccaggagagattcgagatcggccaggccaaggtgctgagacactgcgtgagcgacaaggtgaccgtgatcggcgccggcatcaccgtgtacgaggccctggccgccgccgacgagctgagcaagcaggacatcttcatcagagtgatcgacctgttcaccatcaagcccctggacgtggccaccatcgtgagcagcgccaaggccaccgagggcagaatcatcaccgtggaggaccactacccccagggcggcatcggcgaggccgtgtgcgccgccgtgagcatggaccccgacatccaggtgcacagcctggccgtgagcggcgtgccccagagcggcaagagcgaggagctgctggacatgtacggcatcagcgccagacacatcatcgtggccgtgaagtgcatgctgctgaactag

SEQ ID NO: 103084 - DNA, 894 bp, synthetic construct
  misc_feature 1..894: note = Description of Artificial Sequence: Synthetic coding sequence
  source 1..894: mol_type = other DNA
atgagcgcctgggccgccgccagcctgagcagagccgccgccagatgcctgctggccagaggccccggcgtgagagccgccccccccagagaccccagacccagccaccccgagcccagaggctgcggcgccgcccccggcagaaccctgcacttcaccgccgccgtgcccgccggccacaacaagtggagcaaggtgagacacatcaagggccccaaggacgtggagagaagcagaatcttcagcaagctgtgcctgaacatcagactggccgtgaaggagggcggccccaaccccgagcacaacagcaacctggccaacatcctggaggtgtgcagaagcaagcacatgcccaagagcaccatcgagaccgccctgaagatggagaagagcaaggacacctacctgctgtacgagggcagaggccccggcggcagcagcctgctgatcgaggccctgagcaacagcagccacaagtgccaggccgacatcagacacatcctgaacaagaacggcggcgtgatggccgtgggcgccagacacagcttcgacaagaagggcgtgatcgtggtggaggtggaggacagagagaagaaggccgtgaacctggagagagccctggagatggccatcgaggccggcgccgaggacgtgaaggagaccgaggacgaggaggagagaaacgtgttcaagttcatctgcgacgccagcagcctgcaccaggtgagaaagaagctggacagcctgggcctgtgcagcgtgagctgcgccctggagttcatccccaacagcaaggtgcagctggccgagcccgacctggagcaggccgcccacctgatccaggccctgagcaaccacgaggacgtgatccacgtgtacgacaacatcgagtag

SEQ ID NO: 103085 - DNA, 687 bp, synthetic construct
  misc_feature 1..687: note = Description of Artificial Sequence: Synthetic coding sequence
  source 1..687: mol_type = other DNA
atgagcgtgagcgagatcttcgtggagctgcagggcttcctggccgccgagcaggacatcagagaggagatcagaaaggtggtgcagagcctggagcagaccgccagagagatcctgaccctgctgcagggcgtgcaccagggcgccggcttccaggacatccccaagagatgcctgaaggccagagagcacttcggcaccgtgaagacccacctgaccagcctgaagaccaagttccccgccgagcagtactacagattccacgagcactggagattcgtgctgcagagactggtgttcctggccgccttcgtggtgtacctggagaccgagaccctggtgaccagagaggccgtgaccgagatcctgggcatcgagcccgacagagagaagggcttccacctggacgtggaggactacctgagcggcgtgctgatcctggccagcgagctgagcagactgagcgtgaacagcgtgaccgccggcgactacagcagacccctgcacatcagcaccttcatcaacgagctggacagcggcttcagactgctgaacctgaagaacgacagcctgagaaagagatacgacggcctgaagtacgacgtgaagaaggtggaggaggtggtgtacgacctgagcatcagaggcttcaacaaggagaccgccgccgcctgcgtggagaagtag

SEQ ID NO: 103086 - DNA, 585 bp, synthetic construct
  misc_feature 1..585: note = Description of Artificial Sequence: Synthetic coding sequence
  source 1..585: mol_type = other DNA
atgagcgtgagcgagatcttcgtggagctgcagggcttcctggccgccgagcaggacatccccaagagatgcctgaaggccagagagcacttcggcaccgtgaagacccacctgaccagcctgaagaccaagttccccgccgagcagtactacagattccacgagcactggagattcgtgctgcagagactggtgttcctggccgccttcgtggtgtacctggagaccgagaccctggtgaccagagaggccgtgaccgagatcctgggcatcgagcccgacagagagaagggcttccacctggacgtggaggactacctgagcggcgtgctgatcctggccagcgagctgagcagactgagcgtgaacagcgtgaccgccggcgactacagcagacccctgcacatcagcaccttcatcaacgagctggacagcggcttcagactgctgaacctgaagaacgacagcctgagaaagagatacgacggcctgaagtacgacgtgaagaaggtggaggaggtggtgtacgacctgagcatcagaggcttcaacaaggagaccgccgccgcctgcgtggagaagtag

SEQ ID NO: 103087 - DNA, 447 bp, synthetic construct
  misc_feature 1..447: note = Description of Artificial Sequence: Synthetic coding sequence
  source 1..447: mol_type = other DNA
atgagcgtgagcgagatcttcgtggagctgcagggcttcctggccgccgagcaggacatcagagaggagatcagaaaggtggtgcagagcctggagcagaccgccagagagatcctgaccctgctgcagggcgtgcaccagggcgccggcttccaggacatccccaagagatgcctgaaggccagagagcacttcggcaccgtgaagacccacctgaccagcctgaagaccaagttccccgccgagcagtactacagattccacgagcactggagattcgtgctgcagagactggtgttcctggccgccttcgtggtgtacctggagaccgagaccctggtgaccagagaggccgtgaccgagatcctgggcatcgaggccgtgtgccagcagagagactgctggagactgctgcccacccccccccacctgcacctgcaccagtag

SEQ ID NO: 103088 - DNA, 873 bp, synthetic construct
  misc_feature 1..873: note = Description of Artificial Sequence: Synthetic coding sequence
  source 1..873: mol_type = other DNA
atgagcaacaaggagggcagcggcggcttcagaaagagaaagcacgacaacttcccccacaaccagagaagagagggcaaggacgtgaacagcagcagccccgtgatgctggccttcaagagcttccagcaggagctggacgccagacacgacaagtacgagagactggtgaagctgagcagagacatcaccgtggagagcaagagaaccatcttcctgctgcacagaatcaccagcgcccccgacatggaggacatcctgaccgagagcgagatcaagctggacggcgtgagacagaagatcttccaggtggcccaggagctgagcggcgaggacatgcaccagttccacagagccatcaccaccggcctgcaggagtacgtggaggccgtgagcttccagcacttcatcaagaccagaagcctgatcagcatggacgagatcaacaagcagctgatcttcaccaccgaggacaacggcaaggagaacaagacccccagcagcgacgcccaggacaagcagttcggcacctggagactgagagtgacccccgtggactacctgctgggcgtggccgacctgaccggcgagctgatgagaatgtgcatcaacagcgtgggcaacggcgacatcgacacccccttcgaggtgagccagttcctgagacaggtgtacgacggcttcagcttcatcggcaacaccggcccctacgaggtgagcaagaagctgtacaccctgaagcagagcctggccaaggtggagaacgcctgctacgccctgaaggtgagaggcagcgagatccccaagcacatgctggccgacgtgttcagcgtgaagaccgagatgatcgaccaggaggagggcatcagctag

SEQ ID NO: 103089 - DNA, 492 bp, synthetic construct
  misc_feature 1..492: note = Description of Artificial Sequence: Synthetic coding sequence
  source 1..492: mol_type = other DNA
atgagcaacaaggagggcagcggcggcttcagaaagagaaagcacgacaacttcccccacaaccagagaagagagggcaaggacgtgaacagcagcagccccgtgatgctggccttcaagagcttccagcaggagctggacgccagacacgacaagtacgagagactggtgaagctgagcagagacatcaccgtggagagcaagagaaccatcttcctgctgcacagaatcaccagcagccagtacctggaccacagcgcccccgacatggaggacatcctgaccgagagcgagatcaagctggacggcgtgagacagaagatcttccaggtggcccaggagctgagcggcgaggacatgcaccagttccacagagccatcaccaccggcctgcaggagtacgtggaggccgtgagcttccagcacttcatcaagaccagaagcctgatcagcatggacgagatcaacaagcagctgatcttcaccacctag

SEQ ID NO: 103090 - DNA, 273 bp, synthetic construct
  misc_feature 1..273: note = Description of Artificial Sequence: Synthetic coding sequence
  source 1..273: mol_type = other DNA
atggaccccctgagagcccagcagctggccgccgagctggaggtggagatgatggccgacatgtacaacagaatgaccagcgcctgccacagaaagtgcgtgcccccccactacaaggaggccgagctgagcaagggcgagagcgtgtgcctggacagatgcgtgagcaagtacctggacatccacgagagaatgggcaagaagctgaccgagctgagcatgcaggacgaggagctgatgaagagagtgcagcagagcagcggccccgcctag

SEQ ID NO: 103091 - DNA, 273 bp, synthetic construct; identical to SEQ ID NO: 103090
  misc_feature 1..273: note = Description of Artificial Sequence: Synthetic coding sequence
  source 1..273: mol_type = other DNA

SEQ ID NO: 103092 - DNA, 273 bp, synthetic construct; identical to SEQ ID NO: 103090
  misc_feature 1..273: note = Description of Artificial Sequence: Synthetic coding sequence
  source 1..273: mol_type = other DNA

SEQ ID NO: 103093 - DNA, 927 bp, synthetic construct
  misc_feature 1..927: note = Description of Artificial Sequence: Synthetic coding sequence
  source 1..927: mol_type = other DNA
atgaagcactacgaggtggagatcctggacgccaagaccagagagaagctgtgcttcctggacaaggtggagccccacgccaccatcgccgagatcaagaacctgttcaccaagacccacccccagtggtaccccgccagacagagcctgagactggaccccaagggcaagagcctgaaggacgaggacgtgctgcagaagctgcccgtgggcaccaccgccaccctgtacttcagagacctgggcgcccagatcagctgggtgaccgtgttcctgaccgagtacgccggccccctgttcatctacctgctgttctacttcagagtgcccttcatctacggccacaagtacgacttcaccagcagcagacacaccgtggtgcacctggcctgcatctgccacagcttccactacatcaagagactgctggagaccctgttcgtgcacagattcagccacggcaccatgcccctgagaaacatcttcaagaactgcacctactactggggcttcgccgcctggatggcctactacatcaaccaccccctgtacaccccccccacctacggcgcccagcaggtgaagctggccctggccatcttcgtgatctgccagctgggcaacttcagcatccacatggccctgagagacctgagacccgccggcagcaagaccagaaagatcccctaccccaccaagaaccccttcacctggctgttcctgctggtgagctgccccaactacacctacgaggtgggcagctggatcggcttcgccatcatgacccagtgcctgcccgtggccctgttcagcctggtgggcttcacccagatgaccatctgggccaagggcaagcacagaagctacctgaaggagttcagagactacccccccctgagaatgcccatcatccccttcctgctgtag

SEQ ID NO: 103094 - DNA, 516 bp, synthetic construct
  misc_feature 1..516: note = Description of Artificial Sequence: Synthetic coding sequence
  source 1..516: mol_type = other DNA
atggaggagtacgccagagagccctgcccctggagaatcgtggacgactgcggcggcgccttcaccatgggcaccatcggcggcggcatcttccaggccatcaagggcttcagaaacagccccgtgggcgtgaaccacagactgagaggcagcctgaccgccatcaagaccagagccccccagctgggcggcagcttcgccgtgtggggcggcctgttcagcatgatcgactgcagcatggtgcaggtgagaggcaaggaggacccctggaacagcatcaccagcggcgccctgaccggcgccatcctggccgccagaaacggccccgtggccatggtgggcagcgccgccatgggcggcatcctgctggccctgatcgagggcgccggcatcctgctgaccagattcgccagcgcccagttccccaacggcccccagttcgccgaggaccccagccagctgcccagcacccagctgcccagcagccccttcggcgactacagacagtaccagtag

SEQ ID NO: 103095 - DNA, 519 bp, synthetic construct
  misc_feature 1..519: note = Description of Artificial Sequence: Synthetic coding sequence
  source 1..519: mol_type = other DNA
atggaggagtacgccagagagccctgcccctggagaatcgtggacgactgcggcggcgccttcaccatgggcgtgatcggcggcggcgtgttccaggccatcaagggcttcagaaacgcccccgtgggcatcagacacagactgagaggcagcgccaacgccgtgagaatcagagccccccagatcggcggcagcttcgccgtgtggggcggcctgttcagcaccatcgactgcggcctggtgagactgagaggcaaggaggacccctggaacagcatcaccagcggcgccctgaccggcgccgtgctggccgccagaagcggccccctggccatggtgggcagcgccatgatgggcggcatcctgctggccctgatcgagggcgtgggcatcctgctgaccagatacaccgcccagcagttcagaaacgccccccccttcctggaggaccccagccagctgccccccaaggacggcacccccgcccccggctaccccagctaccagcagtaccactag

SEQ ID NO: 103096 - DNA, 669 bp, synthetic construct
  misc_feature 1..669: note = Description of Artificial Sequence: Synthetic coding sequence
  source 1..669: mol_type = other DNA
atggaggagtacgccagagagccctgcccctggagaatcgtggacgactgcggcggcgccttcaccatgggcgtgatcggcggcggcgtgttccaggccatcaagggcttcagaaacgcccccgtgtgcagactgctgagcgaggcccccctgttcatctacagctgcagcagaagcgtgagccccaccgtgaacgtgagcagcgagagagccgagagcagacccaccctgttcatggccgtgagcctgcacatggcctggtgcctggcccacatcggcatcagacacagactgagaggcagcgccaacgccgtgagaatcagagccccccagatcggcggcagcttcgccgtgtggggcggcctgttcagcaccatcgactgcggcctggtgagactgagaggcaaggaggacccctggaacagcatcaccagcggcgccctgaccggcgccgtgctggccgccagaagcggccccctggccatggtgggcagcgccatgatgggcggcatcctgctggccctgatcgagggcgtgggcatcctgctgaccagatacaccgcccagcagttcagaaacgccccccccttcctggaggaccccagccagctgccccccaaggacggcacccccgcccccggctaccccagctaccagcagtaccactag

SEQ ID NO: 103097 - DNA, 585 bp, synthetic construct
  misc_feature 1..585: note = Description of Artificial Sequence: Synthetic coding sequence
  source 1..585: mol_type = other DNA
atggccgccgccgcccccaacgccggcggcagcgcccccgagaccgccggcagcgccgaggcccccctgcagtacagcctgctgctgcagtacctggtgggcgacaagagacagcccagactgctggagcccggcagcctgggcggcatccccagccccgccaagagcgaggagcagaagatgatcgagaaggccatggagagctgcgccttcaaggccgccctggcctgcgtgggcggcttcgtgctgggcggcgccttcggcgtgttcaccgccggcatcgacaccaacgtgggcttcgaccccaaggacccctacagaacccccaccgccaaggaggtgctgaaggacatgggccagagaggcatgagctacgccaagaacttcgccatcgtgggcgccatgttcagctgcaccgagtgcctgatcgagagctacagaggcaccagcgactggaagaacagcgtgatcagcggctgcatcaccggcggcgccatcggcttcagagccggcctgaaggccggcgccatcggctgcggcggcttcgccgccttcagcgccgccatcgactactacctgagatag

SEQ ID NO: 103098 - DNA, 630 bp, synthetic construct
  misc_feature 1..630: note = Description of Artificial Sequence: Synthetic coding sequence
  source 1..630: mol_type = other DNA
atggagggcggcggcggcagcggcaacaagaccaccggcggcctggccggcttcttcggcgccggcggcgccggctacagccacgccgacctggccggcgtgcccctgaccggcatgaaccccctgagcccctacctgaacgtggaccccagatacctggtgcaggacaccgacgagttcatcctgcccaccggcgccaacaagaccagaggcagattcgagctggccttcttcaccatcggcggctgctgcatgaccggcgccgccttcggcgccatgaacggcctgagactgggcctgaaggagacccagaacatggcctggagcaagcccagaaacgtgcagatcctgaacatggtgaccagacagggcgccctgtgggccaacaccctgggcagcctggccctgctgtacagcgccttcggcgtgatcatcgagaagaccagaggcgccgaggacgacctgaacaccgtggccgccggcaccatgaccggcatgctgtacaagtgcaccggcggcctgagaggcatcgccagaggcggcctgaccggcctgaccctgaccagcctgtacgccctgtacaacaactgggagcacatgaagggcagcctgctgcagcagagcctgtag

SEQ ID NO: 103099 - DNA, 486 bp, synthetic construct
  misc_feature 1..486: note = Description of Artificial Sequence: Synthetic coding sequence
  source 1..486: mol_type = other DNA
atggagggcggcggcggcagcggcaacaagaccaccggcggcctggccggcttcttcggcgccggcggcgccggctacagccacgccgacctggccggcgtgcccctgaccggcatgaaccccctgagcccctacctgaacgtggaccccagatacctggtgcaggacaccgacgagttcatcctgcccaccggcgccaacaagaccagaggcagattcgagctggccttcttcaccatcggcggctgctgcatgaccgccctgctgtacagcgccttcggcgtgatcatcgagaagaccagaggcgccgaggacgacctgaacaccgtggccgccggcaccatgaccggcatgctgtacaagtgcaccggcggcctgagaggcatcgccagaggcggcctgaccggcctgaccctgaccagcctgtacgccctgtacaacaactgggagcacatgaagggcagcctgctgcagcagagcctgtag

SEQ ID NO: 103100 - DNA, 519 bp, synthetic construct
  misc_feature 1..519: note = Description of Artificial Sequence: Synthetic coding sequence
  source 1..519: mol_type = other DNA
atggagggcggcggcggcagcggcaacaagaccaccggcggcctggccggcttcttcggcgccggcggcgccggctacagccacgccgacctggccggcgtgcccctgaccggcatgaaccccctgagcccctacctgaacgtggaccccagatacctggtgcaggacaccgacgagttcatcctgcccaccggcgccaacaagaccagaggcagattcgagctggccttcttcaccatcggcggctgctgcatgaccggcgccctgtgggccaacaccctgggcagcctggccctgctgtacagcgccttcggcgtgatcatcgagaagaccagaggcgccgaggacgacctgaacaccgtggccgccggcaccatgaccggcatgctgtacaagtgcaccggcggcctgagaggcatcgccagaggcggcctgaccggcctgaccctgaccagcctgtacgccctgtacaacaactgggagcacatgaagggcagcctgctgcagcagagcctgtag

SEQ ID NO: 103101 - DNA, 381 bp, synthetic construct
  misc_feature 1..381: note = Description of Artificial Sequence: Synthetic coding sequence
  source 1..381: mol_type = other DNA
atgaccggcgccgccttcggcgccatgaacggcctgagactgggcctgaaggagacccagaacatggcctggagcaagcccagaaacgtgcagatcctgaacatggtgaccagacagggcgccctgtgggccaacaccctgggcagcctggccctgctgtacagcgccttcggcgtgatcatcgagaagaccagaggcgccgaggacgacctgaacaccgtggccgccggcaccatgaccggcatgctgtacaagtgcaccgccagcgccagccagagcgccagaatcgccgacggcctgatcttcaccgagttctgcagcgtggccagactgcagggcagcggcaccatcctggcccactacaacctgcacctgccctag

SEQ ID NO: 103102 - DNA, 324 bp, synthetic construct
  misc_feature 1..324: note = Description of Artificial Sequence: Synthetic coding sequence
  source 1..324: mol_type = other DNA
tgaggcggcagcggcaacaagaccaccggcggcctggccggcttcttcggcgccggcggcgccggctacagccacgccgacctggccggcgtgccccccctgctgtacagcgccttcggcgtgatcatcgagaagaccagaggcgccgaggacgacctgaacaccgtggccgccggcaccatgaccggcatgctgtacaagtgcaccggcggcctgagaggcatcgccagaggcggcctgaccggcctgaccctgaccagcctgtacgccctgtacaacaactgggagcacatgaagggcagcctgctgcagcagagcctgtag

SEQ ID NO: 103103 - DNA, 1359 bp, synthetic construct
  misc_feature 1..1359: note = Description of Artificial Sequence: Synthetic coding sequence
  source 1..1359: mol_type = other DNA
atggccgccgccgccctgagaagcggctggtgcagatgccccagaagatgcctgggcagcggcatccagttcctgagcagccacaacctgccccacggcagcacctaccagatgagaagacccggcggcgagctgcccctgagcaagagctacagcagcggcaacagaaagggcttcctgagcggcctgctggacaacgtgaagcaggagctggccaagaacaaggagatgaaggagagcatcaagaagttcagagacgaggccagaagactggaggagagcgacgtgctgcaggaggccagaagaaagtacaagaccatcgagagcgagaccgtgagaaccagcgaggtgctgagaaagaagctgggcgagctgaccggcaccgtgaaggagagcctgcacgaggtgagcaagagcgacctgggcagaaagatcaaggagggcgtggaggaggccgccaagaccgccaagcagagcgccgagagcgtgagcaagggcggcgagaagctgggcagaaccgccgccttcagagccctgagccagggcgtggagagcgtgaagaaggagatcgacgacagcgtgctgggccagaccggcccctacagaagaccccagagactgagaaagagaaccgagttcgccggcgacaagttcaaggaggagaaggtgttcgagcccaacgaggaggccctgggcgtggtgctgcacaaggacagcaagtggtaccagcagtggaaggacttcaaggagaacaacgtggtgttcaacagattcttcgagatgaagatgaagtacgacgagagcgacaacgccttcatcagagccagcagagccctgaccgacaaggtgaccgacctgctgggcggcctgttcagcaagaccgagatgagcgaggtgctgaccgagatcctgagagtggaccccgccttcgacaaggacagattcctgaagcagtgcgagaacgacatcatccccaacgtgctggaggccatgatcagcggcgagctggacatcctgaaggactggtgctacgaggccacctacagccagctggcccaccccatccagcaggccaaggccctgggcctgcagttccacagcagaatcctggacatcgacaacgtggacctggccatgggcaagatgatggagcagggccccgtgctgatcatcaccttccaggcccagctggtgatggtggtgagaaaccccaagggcgaggtggtggagggcgaccccgacaaggtgctgagaatgctgtacgtgtgggccctgtgcagagaccaggacgagctgaacccctacgccgcctggagactgctggacatcagcgccagcagcaccgagcagatcctgtag

SEQ ID NO: 103104 - DNA, 294 bp, synthetic construct
  misc_feature 1..294: note = Description of Artificial Sequence: Synthetic coding sequence
  source 1..294: mol_type = other DNA
atggacagcagcagcagcagcagcgccgccggcctgggcgccgtggacccccagctgcagcacttcatcgaggtggagacccagaagcagagattccagcagctggtgcaccagatgaccgagctgtgctgggagaagtgcatggacaagcccggccccaagctggacagcagagccgaggcctgcttcgtgaactgcgtggagagattcatcgacaccagccagttcatcctgaacagactggagcagacccagaagagcaagcccgtgttcagcgagagcctgagcgactag

SEQ ID NO: 103105 - DNA, 270 bp, synthetic construct
  misc_feature 1..270: note = Description of Artificial Sequence: Synthetic coding sequence
  source 1..270: mol_type = other DNA
atggccgcccagatccccgagagcgaccagatcaagcagttcaaggagttcctgggcacctacaacaagctgaccgagacctgcttcctggactgcgtgaaggacttcaccaccagagaggtgaagcccgaggagaccacctgcagcgagcactgcctgcagaagtacctgaagatgacccagagaatcagcatgagattccaggagtaccacatccagcagaacgaggccctggccgccaaggccggcctgctgggccagcccagatag

SEQ ID NO: 103106 - DNA, 270 bp, synthetic construct; identical to SEQ ID NO: 103105
  misc_feature 1..270: note = Description of Artificial Sequence: Synthetic coding sequence
  source 1..270: mol_type = other DNA

SEQ ID NO: 103107 - DNA, 135 bp, synthetic construct
  misc_feature 1..135: note = Description of Artificial Sequence: Synthetic coding sequence
  source 1..135: mol_type = other DNA
atggccgcccagatccccgagagcgaccagatcaagcagttcaaggagttcctgggcacctacaacaagctgaccgagacctgcttcctggactgcgtgaaggacttcaccaccagagaggtgaagcccgagtag

SEQ ID NO: 103108 - DNA, 270 bp, synthetic construct; identical to SEQ ID NO: 103105
  misc_feature 1..270: note = Description of Artificial Sequence: Synthetic coding sequence
  source 1..270: mol_type = other DNA

SEQ ID NO: 103109 - DNA, 270 bp, synthetic construct; identical to SEQ ID NO: 103105
  misc_feature 1..270: note = Description of Artificial Sequence: Synthetic coding sequence
  source 1..270: mol_type = other DNA

SEQ ID NO: 103110 - DNA, 381 bp, synthetic construct
  misc_feature 1..381: note = Description of Artificial Sequence: Synthetic coding sequence
  source 1..381: mol_type = other DNA
atgcccttcttcggcaacaccttcagccccaagaagaccccccccagaaagagcgccagcctgagcaacctgcacagcctggacagaagcaccagagaggtggagctgggcctggagtacggcagccccaccatgaacctggccggccagagcctgaagttcgagaacggccagtggatcgccgagaccggcgtgagcggcggcgtggacagaagagaggtgcagagactgagaagaagaaaccagcagctggaggaggagaacaacctgctgagactgaaggtggacatcctgctggacatgctgagcgagagcaccgccgagagccacctgatggagaaggagctggacgagctgagaatcagcagaaagagaaagtag

SEQ ID NO: 103111 - DNA, 1086 bp, synthetic construct
  misc_feature 1..1086: note = Description of Artificial Sequence: Synthetic coding sequence
  source 1..1086: mol_type = other DNA
atgggcaacgtgctggccgccagcagcccccccgccggccccccccccccccccgcccccgccctggtgggcctgcccccccccccccccagcccccccggcttcaccctgccccccctgggcggcagcctgggcgccggcaccagcaccagcagaagcagcgagagaacccccggcgccgccaccgccagcgccagcggcgccgccgaggacggcgcctgcggctgcctgcccaaccccggcaccttcgaggagtgccacagaaagtgcaaggagctgttccccatccagatggagggcgtgaagctgaccgtgaacaagggcctgagcaaccacttccaggtgaaccacaccgtggccctgagcaccatcggcgagagcaactaccacttcggcgtgacctacgtgggcaccaagcagctgagccccaccgaggccttccccgtgctggtgggcgacatggacaacagcggcagcctgaacgcccaggtgatccaccagctgggccccggcctgagaagcaagatggccatccagacccagcagagcaagttcgtgaactggcaggtggacggcgagtacagaggcagcgacttcaccgccgccgtgaccctgggcaaccccgacgtgctggtgggcagcggcatcctggtggcccactacctgcagagcatcaccccctgcctggccctgggcggcgagctggtgtaccacagaagacccggcgaggagggcaccgtgatgagcctggccggcaagtacaccctgaacaactggctggccaccgtgaccctgggccaggccggcatgcacgccacctactaccacaaggccagcgaccagctgcaggtgggcgtggagttcgaggccagcaccagaatgcaggacaccagcgtgagcttcggctaccagctggacctgcccaaggccaacctgctgttcaagggcagcgtggacagcaactggatcgtgggcgccaccctggagaagaagctgccccccctgcccctgaccctggccctgggcgccttcctgaaccacagaaagaacaagttccagtgcggcttcggcctgaccatcggctag

SEQ ID NO: 103112 - DNA, 1086 bp, synthetic construct; identical to SEQ ID NO: 103111
  misc_feature 1..1086: note = Description of Artificial Sequence: Synthetic coding sequence
  source 1..1086: mol_type = other DNA

SEQ ID NO: 103113 - DNA, 1086 bp, synthetic construct; identical to SEQ ID NO: 103111
  misc_feature 1..1086: note = Description of Artificial Sequence: Synthetic coding sequence
  source 1..1086: mol_type = other DNA

SEQ ID NO: 103114 - DNA, 453 bp, synthetic construct
  misc_feature 1..453: note = Description of Artificial Sequence: Synthetic coding sequence
  source 1..453: mol_type = other DNA
atgcccagcagcggcagcgtgagcagaagcagacagagaggcagaagcatggccagcagaggcttcgacggcagcagaagaggcagcctgagaagagccggcgccagagagccccccagcgaggtgatcgaggccgccgcccaggccagcggcagctgctggagcagccccttcttcagcgccagcacccccagcgccgccgccaccggcgtgcccggccccaccgacatggccgccgtgctgcagcaggtgctggagagaaccgagctgaacaagctgcccaagagcgtgcagaacaagctggagaagttcctggccgaccagcagagcgagatcgacggcctgaagggcagacacgagaagttcaaggtggagagcgagcagcagtacttcgagatcgagaagagactgagccacagccaggagagactggtgaacgagaccagagagtag

SEQ ID NO: 103115 - DNA, 7092 bp, synthetic construct
  misc_feature 1..7092: note = Description of Artificial Sequence: Synthetic coding sequence
  source 1..7092: mol_type = other DNA
atggccgccgtgctgcagcaggtgctggagagaaccgagctgaacaagctgcccaagagcgtgcagaacaagctggagaagttcctggccgaccagcagagcgagatcgacggcctgaagggcagacacgagaagttcaaggtggagagcgagcagcagtacttcgagatcgagaagagactgagccacagccaggagagactggtgaacgagaccagagagtgccagagcctgagactggagctggagaagctgaacaaccagctgaaggccctgaccgagaagaacaaggagctggagatcgcccaggacagaaacatcgccatccagagccagttcaccagaaccaaggaggagctggaggccgagaagagagacctgatcagaaccaacgagagactgagccaggagctggagtacctgaccgaggacgtgaagagactgaacgagaagctgaaggagagcaacaccaccaagggcgagctgcagctgaagctggacgagctgcaggccagcgacgtgagcgtgaagtacagagagaagagactggagcaggagaaggagctgctgcacagccagaacacctggctgaacaccgagctgaagaccaagaccgacgagctgctggccctgggcagagagaagggcaacgagatcctggagctgaagtgcaacctggagaacaagaaggaggaggtgagcagactggaggagcagatgaacggcctgaagaccagcaacgagcacctgcagaagcacgtggaggacctgctgaccaagctgaaggaggccaaggagcagcaggccagcatggaggagaagttccacaacgagctgaacgcccacatcaagctgagcaacctgtacaagagcgccgccgacgacagcgaggccaagagcaacgagctgaccagagccgtggaggagctgcacaagctgctgaaggaggccggcgaggccaacaaggccatccaggaccacctgctggaggtggagcagagcaaggaccagatggagaaggagatgctggagaagatcggcagactggagaaggagctggagaacgccaacgacctgctgagcgccaccaagagaaagggcgccatcctgagcgaggaggagctggccgccatgagccccaccgccgccgccgtggccaagatcgtgaagcccggcatgaagctgaccgagctgtacaacgcctacgtggagacccaggaccagctgctgctggagaagctggagaacaagagaatcaacaagtacctggacgagatcgtgaaggaggtggaggccaaggcccccatcctgaagagacagagagaggagtacgagagagcccagaaggccgtggccagcctgagcgtgaagctggagcaggccatgaaggagatccagagactgcaggaggacaccgacaaggccaacaagcagagcagcgtgctggagagagacaacagaagaatggagatccaggtgaaggacctgagccagcagatcagagtgctgctgatggagctggaggaggccagaggcaaccacgtgatcagagacgaggaggtgagcagcgccgacatcagcagcagcagcgaggtgatcagccagcacctggtgagctacagaaacatcgaggagctgcagcagcagaaccagagactgctggtggccctgagagagctgggcgagaccagagagagagaggagcaggagaccaccagcagcaagatcaccgagctgcagctgaagctggagagcgccctgaccgagctggagcagctgagaaagagcagacagcaccagatgcagctggtggacagcatcgtgagacagagagacatgtacagaatcctgctgagccagaccaccggcgtggccatccccctgcacgccagcagcctggacgacgtgagcctggccagcacccccaagagacccagcaccagccagaccgtgagcacccccgcccccgtgcccgtgatcgagagcaccgaggccatcgaggccaaggccgccctgaagcagctgcaggagatcttcgagaactacaagaaggagaaggccgagaacgagaagatccagaacgagcagctggagaagctgcaggagcaggtgaccgacctgagaagccagaacaccaagatcagcacccagctggacttcgccagcaagagatacgagatgctgcaggacaacgtggagggctacagaagagagatcaccagcctgcacgagagaaaccagaagctgaccgccaccacccagaagcaggagcagatcatcaacaccatgacccaggacctgagaggcgccaacgagaagctggccgtggccgaggtgagagccgagaacctgaagaaggagaaggagatgctgaagctgagcgaggtgagactgagccagcagagagagagcctgctggccgagcagagaggccagaacctgctgctgaccaacctgcagaccatccagggcatcctggagagaagcgagaccgagaccaagcagagactgagcagccagatcgagaagctggagcacgagatcagccacctgaagaagaagctggagaacgaggtggagcagagacacaccctgaccagaaacctggacgtgcagctgctggacaccaagagacagctggacaccgagaccaacctgcacctgaacaccaaggagctgctgaagaacgcccagaaggagatcgccaccctgaagcagcacctgagcaacatggaggtgcaggtggccagccagagcagccagagaaccggcaagggccagcccagcaacaaggaggacgtggacgacctggtgagccagctgagacagaccgaggagcaggtgaacgacctgaaggagagactgaagaccagcaccagcaacgtggagcagtaccaggccatggtgaccagcctggaggagagcctgaacaaggagaagcaggtgaccgaggaggtgagaaagaacatcgaggtgagactgaaggagagcgccgagttccagacccagctggagaagaagctgatggaggtggagaaggagaagcaggagctgcaggacgacaagagaagagccatcgagagcatggagcagcagctgagcgagctgaagaagaccctgagcagcgtgcagaacgaggtgcaggaggccctgcagagagccagcaccgccctgagcaacgagcagcaggccagaagagactgccaggagcaggccaagatcgccgtggaggcccagaacaagtacgagagagagctgatgctgcacgccgccgacgtggaggccctgcaggccgccaaggagcaggtgagcaagatggccagcgtgagacagcacctggaggagaccacccagaaggccgagagccagctgctggagtgcaaggccagctgggaggagagagagagaatgctgaaggacgaggtgagcaagtgcgtgtgcagatgcgaggacctggagaagcagaacagactgctgcacgaccagatcgagaagctgagcgacaaggtggtggccagcgtgaaggagggcgtgcagggccccctgaacgtgagcctgagcgaggagggcaagagccaggagcagatcctggagatcctgagattcatcagaagagagaaggagatcgccgagaccagattcgaggtggcccaggtggagagcctgagatacagacagagagtggagctgctggagagagagctgcaggagctgcaggacagcctgaacgccgagagagagaaggtgcaggtgaccgccaagaccatggcccagcacgaggagctgatgaagaagaccgagaccatgaacgtggtgatggagaccaacaagatgctgagagaggagaaggagagactggagcaggacctgcagcagatgcaggccaaggtgagaaagctggagctggacatcctgcccctgcaggaggccaacgccgagctgagcgagaagagcggcatgctgcaggccgagaagaagctgctggaggaggacgtgaagagatggaaggccagaaaccagcacctggtgagccagcagaaggaccccgacaccgaggagtacagaaagctgctgagcgagaaggaggtgcacaccaagagaatccagcagctgaccgaggagatcggcagactgaaggccgagatcgccagaagcaacgccagcctgaccaacaaccagaacctgatccagagcctgaaggaggacctgaacaaggtgagaaccgagaaggagaccatccagaaggacctggacgccaagatcatcgacatccaggagaaggtgaagaccatcacccaggtgaagaagatcggcagaagatacaagacccagtacgaggagctgaaggcccagcaggacaaggtgatggagaccagcgcccagagcagcggcgaccaccaggagcagcacgtgagcgtgcaggagatgcaggagctgaaggagaccctgaaccaggccgagaccaagagcaagagcctggagagccaggtggagaacctgcagaagaccctgagcgagaaggagaccgaggccagaaacctgcaggagcagaccgtgcagctgcagagcgagctgagcagactgagacaggacctgcaggacagaaccacccaggaggagcagctgagacagcagatcaccgagaaggaggagaagaccagaaaggccatcgtggccgccaagagcaagatcgcccacctggccggcgtgaaggaccagctgaccaaggagaacgaggagctgaagcagagaaacggcgccctggaccagcagaaggacgagctggacgtgagaatcaccgccctgaagagccagtacgagggcagaatcagcagactggagagagagctgagagagcaccaggagagacacctggagcagagagacgagccccaggagcccagcaacaaggtgcccgagcagcagagacagatcaccctgaagaccacccccgccagcggcgagagaggcatcgccagcaccagcgacccccccaccgccaacatcaagcccacccccgtggtgagcacccccagcaaggtgaccgccgccgccatggccggcaacaagagcacccccagagccagcatcagacccatggtgacccccgccaccgtgaccaaccccaccaccacccccaccgccaccgtgatgcccaccacccaggtggagagccaggaggccatgcagagcgagggccccgtggagcacgtgcccgtgttcggcagcaccagcggcagcgtgagaagcaccagccccaacgtgcagcccagcatcagccagcccatcctgaccgtgcagcagcagacccaggccaccgccttcgtgcagcccacccagcagagccacccccagatcgagcccgccaaccaggagctgagcagcaacatcgtggaggtggtgcagagcagccccgtggagagacccagcaccagcaccgccgtgttcggcaccgtgagcgccacccccagcagcagcctgcccaagagaaccagagaggaggaggaggacagcaccatcgaggccagcgaccaggtgagcgacgacaccgtggagatgcccctgcccaagaagctgaagagcgtgacccccgtgggcaccgaggaggaggtgatggccgaggagagcaccgacggcgaggtggagacccaggtgtacaaccaggacagccaggacagcatcggcgagggcgtgacccagggcgactacacccccatggaggacagcgaggagaccagccagagcctgcagatcgacctgggccccctgcagagcgaccagcagaccaccaccagcagccaggacggccagggcaagggcgacgacgtgatcgtgatcgacagcgacgacgaggaggaggacgacgacgagaacgacggcgagcacgaggactacgaggaggacgaggaggacgacgacgacgacgaggacgacaccggcatgggcgacgagggcgaggacagcaacgagggcaccggcagcgccgacggcaacgacggctacgaggccgacgacgccgagggcggcgacggcaccgaccccggcaccgagaccgaggagagcatgggcggcggcgagggcaaccacagagccgccgacagccagaacagcggcgagggcaacaccggcgccgccgagagcagcttcagccaggaggtgagcagagagcagcagcccagcagcgccagcgagagacaggcccccagagccccccagagccccagaagacccccccaccccctgccccccagactgaccatccacgcccccccccaggagctgggcccccccgtgcagagaatccagatgaccagaagacagagcgtgggcagaggcctgcagctgacccccggcatcggcggcatgcagcagcacttcttcgacgacgaggacagaaccgtgcccagcacccccaccctggtggtgccccacagaaccgacggcttcgccgaggccatccacagcccccaggtggccggcgtgcccagattcagattcggcccccccgaggacatgccccagaccagcagcagccacagcgacctgggccagctggccagccagggcggcctgggcatgtacgagacccccctgttcctggcccacgaggaggagagcggcggcagaagcgtgcccaccacccccctgcaggtggccgcccccgtgaccgtgttcaccgagagcaccaccagcgacgccagcgagcacgccagccagagcgtgcccatggtgaccaccagcaccggcaccctgagcaccaccaacgagaccgccaccggcgacgacggcgacgaggtgttcgtggaggccgagagcgagggcatcagcagcgaggccggcctggagatcgacagccagcaggaggaggagcccgtgcaggccagcgacgagagcgacctgcccagcaccagccaggacccccccagcagcagcagcgtggacaccagcagcagccagcccaagcccttcagaagagtgagactgcagaccaccctgagacagggcgtgagaggcagacagttcaacagacagagaggcgtgagccacgccatgggcggcagaggcggcatcaacagaggcaacatcaactag

SEQ ID NO: 103116 - DNA, 453 bp, synthetic construct; identical to SEQ ID NO: 103114
  misc_feature 1..453: note = Description of Artificial Sequence: Synthetic coding sequence
  source 1..453: mol_type = other DNA

SEQ ID NO: 103117 - DNA, 510 bp, synthetic construct
  misc_feature 1..510: note = Description of Artificial Sequence: Synthetic coding sequence
  source 1..510: mol_type = other DNA
atggcccccccctgggtgcccgccatgggcttcaccctggcccccagcctgggctgcttcgtgggcagcagattcgtgcacggcgagggcctgagatggtacgccggcctgcagaagcccagctggcaccccccccactgggtgctgggccccgtgtggggcaccctgtacagcgccatgggctacggcagctacctggtgtggaaggagctgggcggcttcaccgagaaggccgtggtgcccctgggcctgtacaccggccagctggccctgaactgggcctggccccccatcttcttcggcgccagacagatgggctgggccctggtggacctgctgctggtgagcggcgccgccgccgccaccaccgtggcctggtaccaggtgagccccctggccgccagactgctgtacccctacctggcctggctggccttcaccaccaccctgaactactgcgtgtggagagacaaccacggctggagaggcggcagaagactgcccgagtag

SEQ ID NO: 103118 - DNA, 510 bp, synthetic construct; identical to SEQ ID NO: 103117
  misc_feature 1..510: note = Description of Artificial Sequence: Synthetic coding sequence
  source 1..510: mol_type = other DNA

SEQ ID NO: 103119 - DNA, 309 bp, synthetic construct
  misc_feature 1..309: note = Description of Artificial Sequence: Synthetic coding sequence
  source 1..309: mol_type = other DNA
atggccccccacctgctgtggtgccccaccaacggcctgggcctgggcggcagccccgccggccagtggggcggcggcagccactacagaggcctggtgcccggcgagcccgccggcagaccccccgccctgcccctgcccggcctggccggcctgcacgaccacacccagctgctgagaatggccggccagccctggctggcctggggcaccgccgccgccagagtgagcgccagacccaccagagactgcagctgcaccagcagatgccaccacgcctgcgacgtggtggccgtgaccctgagctag

SEQ ID NO: 103120 - DNA, 324 bp, synthetic construct
  misc_feature 1..324: note = Description of Artificial Sequence: Synthetic coding sequence
  source 1..324: mol_type = other DNA
atggcccccccctgggtgcccgccatgggcttcaccctggcccccagcctgggctgcttcgtgggcagcagattcgtgcacggcgagggcctgagatggtacgccggcctgcagaagcccagctggcaccccccccactgggtgctgggccccgtgtggggcaccctgtacagcgccatgggctacggcagctacctggtgtggaaggagctgggcggcttcaccgagaaggccgtggtgcccctgggcctgtacaccggccagctggccctgaactgggcctggccccccatcttcttcggcgccagacagatgggctggtag

SEQ ID NO: 103121 - DNA, 609 bp, synthetic construct
  misc_feature 1..609: note = Description of Artificial Sequence: Synthetic coding sequence
  source 1..609: mol_type = other DNA
atgtgctacggcaagtgcgccagatgcatcggccacagcctggtgggcctggccctgctgtgcatcgccgccaacatcctgctgtacttccccaacggcgagaccaagtacgccagcgagaaccacctgagcagattcgtgtggttcttcagcggcatcgtgggcggcggcctgctgatgctgctgcccgccttcgtgttcatcggcctggagcaggacgactgctgcggctgctgcggccacgagaactgcggcaagagatgcgccatgctgagcagcgtgctggccgccctgatcggcatcgccggcagcggctactgcgtgatcgtggccgccctgggcctggccgagggccccctgtgcctggacagcctgggccagtggaactacaccttcgccagcaccgagggccagtacctgctggacaccagcacctggagcgagtgcaccgagcccaagcacatcgtggagtggaacgtgagcctgttcagcatcctgctggccctgggcggcatcgagttcatcctgtgcctgatccaggtgatcaacggcgtgctgggcggcatctgcggcttctgctgcagccaccagcagcagtacgactgctag

SEQ ID NO: 103122 - DNA, 699 bp, synthetic construct
  misc_feature 1..699: note = Description of Artificial Sequence: Synthetic coding sequence
  source 1..699: mol_type = other DNA
atgtgctacggcaagtgcgccagatgcatcggccacagcctggtgggcctggccctgctgtgcatcgccgccaacatcctgctgtacttccccaacggcgagaccaagtacgccagcgagaaccacctgagcagattcgtgtggttcttcagcggcatcgtgggcggcggcctgctgatgctgctgcccgccttcgtgttcatcggcctggagcaggacgactgctgcggctgctgcggccacgagaactgcggcaagagatgcgccatgctgagcagcgtgctggccgccctgatcggcatcgccggcagcggctactgcgtgatcgtggccgccctgggcctggccgagggccccctgtgcctggacagcctgggccagtggaactacaccttcgccagcaccgagggccagtacctgctggacaccagcacctggagcgagtgcaccgagcccaagcacatcgtggagtggaacgtgagcctgttcagcatcctgctggccctgggcggcatcgagttcatcctgtgcctgatccaggtgatcaacggcgtgctgggcggcatctgcggcttctgctgcagccaccagcagcagatgaccgccaagagaaccaaccccggccagagccacaacctgcccctgttccactgcaacctgtacatcagcctggtgttcatctgcaagaccctgtactag

SEQ ID NO: 103123 - DNA, 609 bp, synthetic construct
  misc_feature 1..609: note = Description of Artificial Sequence: Synthetic coding sequence
  source 1..609: mol_type = other DNA
atgtgcaccggcggctgcgccagatgcctgggcggcaccctgatccccctggccttcttcggcttcctggccaacatcctgctgttcttccccggcggcaaggtgatcgacgacaacgaccacctgagccaggagatctggttcttcggcggcatcctgggcagcggcgtgctgatgatcttccccgccctggtgttcctgggcctgaagaacaacgactgctgcggctgctgcggcaacgagggctgcggcaagagattcgccatgttcaccagcaccatcttcgccgtggtgggcttcctgggcgccggctacagcttcatcatcagcgccatcagcatcaacaagggccccaagtgcctgatggccaacagcacctggggctaccccttccacgacggcgactacctgaacgacgaggccctgtggaacaagtgcagagagcccctgaacgtggtgccctggaacctgaccctgttcagcatcctgctggtggtgggcggcatccagatggtgctgtgcgccatccaggtggtgaacggcctgctgggcaccctgtgcggcgactgccagtgctgcggctgctgcggcggcgacggccccgtgtag

SEQ ID NO: 103124 - DNA, 594 bp, synthetic construct
  misc_feature 1..594: note = Description of Artificial Sequence: Synthetic coding sequence
  source 1..594: mol_type = other DNA
atgtgcaccggcaagtgcgccagatgcgtgggcctgagcctgatcaccctgtgcctggtgtgcatcgtggccaacgccctgctgctggtgcccaacggcgagaccagctggaccaacaccaaccacctgagcctgcaggtgtggctgatgggcggcttcatcggcggcggcctgatggtgctgtgccccggcatcgccgccgtgagagccggcggcaagggctgctgcggcgccggctgctgcggcaacagatgcagaatgctgagaagcgtgttcagcagcgccttcggcgtgctgggcgccatctactgcctgagcgtgagcggcgccggcctgagaaacggccccagatgcctgatgaacggcgagtggggctaccacttcgaggacaccgccggcgcctacctgctgaacagaaccctgtgggacagatgcgaggccccccccagagtggtgccctggaacgtgaccctgttcagcctgctggtggccgccagctgcctggagatcgtgctgtgcggcatccagctggtgaacgccaccatcggcgtgttctgcggcgactgcagaaagaagcaggacaccccccactag

SEQ ID NO: 103125 - DNA, 438 bp, synthetic construct
  misc_feature 1..438: note = Description of Artificial Sequence: Synthetic coding sequence
  source 1..438: mol_type = other DNA
atgagcgccagcgccgccaccggcgtgttcgtgctgagcctgagcgccatccccgtgacctacgtgttcaaccacctggccgcccagcacgacagctggaccatcgtgggcgtggccgccctgatcctgttcctggtggccctgctggccagagtgctggtgaagagaaagccccccagagaccccctgttctacgtgtacgccgtgttcggcttcaccagcgtggtgaacctgatcatcggcctggagcaggacggcatcatcgacggcttcatgacccactacctgagagagggcgagccctacctgaacaccgcctacggccacatgatctgctactgggacggcagcgcccactacctgatgtacctggtgatggtggccgccatcgcctgggagtgctggcacatctgcagcatcctgttcctgaccctgtag

SEQ ID NO: 103126 - DNA, 1113 bp, synthetic construct
  misc_feature 1..1113: note = Description of Artificial Sequence: Synthetic coding sequence
  source 1..1113: mol_type = other DNA
atgagcgccagcgccgccaccggcgtgttcgtgctgagcctgagcgccatccccgtgacctacgtgttcaaccacctggccgcccagcacgacagctggaccatcgtgggcgtggccgccctgatcctgttcctggtggccctgctggccagagtgctggtgaagagaaagccccccagagaccccctgttctacgtgtacgccgtgttcggcttcaccagcgtggtgaacctgatcatcggcctggagcaggacggcatcatcgacggcttcatgacccactacctgagagagggcgagccctacctgaacaccgcctacggccacatgatctgctactgggacggcagcgcccactacctgatgtacctggtgatggtggccgccatcgcctgggaggagacctacagaaccatcggcctgtactgggtgggcagcatcatcatgagcgtggtggtgttcgtgcccggcaacatcgtgggcaagtacggcaccagaatctgccccgccttcttcctgagcatcccctacacctgcctgcccgtgtgggccggcttcagaatctacaaccagcccagcgagaactacaactaccccagcaaggtgatccaggaggcccaggccaaggacctgctgagaagacccttcgacctgatgctggtggtgtgcctgctgctggccaccggcttctgcctgttcagaggcctgatcgccctggactgccccagcgagctgtgcagactgtacacccagttccaggagccctacctgaaggaccccgccgcctaccccaagatccagatgctggcctacatgttctacagcgtgccctacttcgtgaccgccctgtacggcctggtggtgcccggctgcagctggatgcccgacatcaccctgatccacgccggcggcctggcccaggcccagttcagccacatcggcgccagcctgcacgccagaaccgcctacgtgtacagagtgcccgaggaggccaagatcctgttcctggccctgaacatcgcctacggcgtgctgccccagctgctggcctacagatgcatctacaagcccgagttcttcatcaagaccaaggccgaggagaaggtggagtag

SEQ ID NO: 103127 - DNA, 1020 bp, synthetic construct
  misc_feature 1..1020: note = Description of Artificial Sequence: Synthetic coding sequence
  source 1..1020: mol_type = other DNA
atgagcgccagcgccgccaccggcgtgttcgtgctgagcctgagcgccatccccgtgacctacgtgttcaaccacctggccgcccagcacgacagctggaccatcgtgggcgtggccgccctgatcctgttcctggtggccctgctggccagagtgctggtgaagagaaagccccccagagaccccctgttctacgtgtacgccgtgttcggcttcaccagcgtggtgaacctgatcatcggcctggagcaggacggcatcatcgacggcttcatgacccactacctgagagagggcgagccctacctgaacaccgcctacggccacatgatctgctactgggacggcagcgcccactacctgatgtacctggtgatggtggccgccatcgcctgggaggagacctacagaaccatcggcctgtactgggtgggcagcatcatcatgagcgtggtggtgttcgtgcccggcaacatcgtgggcaagtacggcaccagaatctgccccgccttcttcctgagcatcccctacacctgcctgcccgtgtgggccggcttcagaatctacaaccagcccagcgagaactacaactaccccagcaaggtgatccaggaggcccaggccaaggacctgctgagaagacccttcgacctgatgctggtggtgtgcctgctgctggccaccggcttctgcctgttcagaggcctgatgctggcctacatgttctacagcgtgccctacttcgtgaccgccctgtacggcctggtggtgcccggctgcagctggatgcccgacatcaccctgatccacgccggcggcctggcccaggcccagttcagccacatcggcgccagcctgcacgccagaaccgcctacgtgtacagagtgcccgaggaggccaagatcctgttcctggccctgaacatcgcctacggcgtgctgccccagctgctggcctacagatgcatctacaagcccgagttcttcatcaagaccaaggccgaggagaaggtggagtag

SEQ ID NO: 103128 - DNA, 1122 bp, synthetic construct
  misc_feature 1..1122: note = Description of Artificial Sequence: Synthetic coding sequence
  source 1..1122: mol_type = other DNA
atgagcgccagcgccgccaccggcgtgttcgtgctgagcctgagcgccatccccgtgacctacgtgttcaaccacctggccgcccagcacgacagctggaccatcgtgggcgtggccgccctgatcctgttcctggtggccctgctggccagagtgctggtgaagagaaagccccccagagaccccctgttctacgtgtacgccgtgttcggcttcaccagcgtggtgaacctgatcatcggcctggagcaggacggcatcatcgacggcttcatgacccactacctgagagagggcgagccctacctgaacaccgcctacggccacatgatctgctactgggacggcagcgcccactacctgatgtacctggtgatggtggccgccatcgcctgggactgctacagagagacctacagaaccatcggcctgtactgggtgggcagcatcatcatgagcgtggtggtgttcgtgcccggcaacatcatcggcaagtacggcaccagaatctgccccgccttcttcctgagcatcccctacacctgcctgcccgtgtgggccggcttcagaatctacaaccagcccagcgagaactacaactaccccagcaaggtgatccaggaggcccaggccaaggacctgctgagaagacccttcgacctgatgctggtggtgtgcctgctgctggccaccggcttctgcctgttcagaggcctgatcgccctggactgccccagcgagctgtgcagactgtacacccagttccaggagccctacctgaaggaccccgccgcctaccccaagatccagatgctggcctacatgttctacagcgtgccctacttcgtgaccgccctgtacggcctggtggtgcccggctgcagctggatgcccgacatcaccctgatccacgccggcggcctggcccaggcccagttcagccacatcggcgccagcctgcacgccagaaccgcctacgtgtacagagtgcccgaggaggccaagatcctgttcctggccctgaacatcgcctacggcgtgctgccccagctgctggcctacagatgcatctacaagcccgagttcttcatcaagaccaaggccgaggagaaggtggagtag

SEQ ID NO: 103129 - DNA, 567 bp, synthetic construct
  misc_feature 1..567: note = Description of Artificial Sequence: Synthetic coding sequence
  source 1..567: mol_type = other DNA
atgagcgccagcgccgccaccggcgtgttcgtgctgagcctgagcgccatccccgtgacctacgtgttcaaccacctggccgcccagcacgacagctggaccatcgtgggcgtggccgccctgatcctgttcctggtggccctgctggccagagtgctggtgaagagaaagccccccagagaccccctgttctacgtgtacgccgtgttcggcttcaccagcgtggtgaacctgatcatcggcctggagcaggacggcatcatcgacggcttcatgacccactacctgagagagggcgagccctacctgaacaccgcctacggccacatgatctgctactgggacggcagcgcccactacctgatgtacctggtgatggtggccgccatcgcctgggaggagacctacagaaccatcggcctgtactgggtgggcagcatcatcatgagcgtggtggtgttcgtgcccggcaacatcgtggacgccggcatctacgtgctgttctgcagcctgctgtgcgactgcaccgtgtggctgagcggcagctggatgttcctggacgcctag

SEQ ID NO: 103130 - DNA, 1020 bp, synthetic construct; identical to SEQ ID NO: 103127
  misc_feature 1..1020: note = Description of Artificial Sequence: Synthetic coding sequence
  source 1..1020: mol_type = other DNA

SEQ ID NO: 103131 - DNA, 1056 bp, synthetic construct
  misc_feature 1..1056: note = Description of Artificial Sequence: Synthetic coding sequence
  source 1..1056: mol_type = other DNA
atggacatcccccccctggccggcaagatcgccgccctgagcctgagcgccctgcccgtgagctacgccctgaaccacgtgagcgccctgagccaccccctgtgggtggccctgatgagcgccctgatcctgggcctgctgttcgtggccgtgtacagcctgagccacggcgaggtgagctacgaccccctgtacgccgtgttcgccgtgttcgccttcaccagcgtggtggacctgatcatcgccctgcaggaggacagctacgtggtgggcttcatggagttctacaccaaggagggcgagccctacctgagaaccgcccacggcgtgttcatctgctactgggacggcaccgtgcactacctgctgtacctggccatggccggcgccatctgcagaagaaagagatacagaaacttcggcctgtactggctgggcagcttcgccatgagcatcctggtgttcctgaccggcaacatcctgggcaagtacagcagcgagatcagacccgccttcttcctgaccatcccctacctgctggtgccctgctgggccggcatgaaggtgttcagccagcccagagccctgaccagatgcaccgccaacatggtgcaggaggagcagagaaagggcctgctgcagagacccgccgacctggccctggtgatctacctgatcctggccggcttcttcaccctgttcagaggcctggtggtgctggactgccccaccgacgcctgcttcgtgtacatctaccagtacgagccctacctgagagaccccgtggcctaccccaaggtgcagatgctgatgtacatgttctacgtgctgcccttctgcggcctggccgcctacgccctgaccttccccggctgcagctggctgcccgactgggccctggtgttcgccggcggcatcggccaggcccagttcagccacatgggcgccagcatgcacctgagaacccccttcacctacagatgcctgcagtggcccgccttcttccaccagcccccccccagcgaccccctggccctgcacaagaagcagcactag

SEQ ID NO: 103132 - DNA, 1134 bp, synthetic construct
  misc_feature 1..1134: note = Description of Artificial Sequence: Synthetic coding sequence
  source 1..1134: mol_type = other DNA
atggacatcccccccctggccggcaagatcgccgccctgagcctgagcgccctgcccgtgagctacgccctgaaccacgtgagcgccctgagccaccccctgtgggtggccctgatgagcgccctgatcctgggcctgctgttcgtggccgtgtacagcctgagccacggcgaggtgagctacgaccccctgtacgccgtgttcgccgtgttcgccttcaccagcgtggtggacctgatcatcgccctgcaggaggacagctacgtggtgggcttcatggagttctacaccaaggagggcgagccctacctgagaaccgcccacggcgtgttcatctgctactgggacggcaccgtgcactacctgctgtacctggccatggccggcgccatctgcagaagaaagagatacagaaacttcggcctgtactggctgggcagcttcgccatgagcatcctggtgttcctgaccggcaacatcctgggcaagtacagcagcgagatcagacccgccttcttcctgaccatcccctacctgctggtgccctgctgggccggcatgaaggtgttcagccagcccagagccctgaccagatgcaccgccaacatggtgcaggaggagcagagaaagggcctgctgcagagacccgccgacctggccctggtgatctacctgatcctggccggcttcttcaccctgttcagaggcctggtggtgctggactgccccaccgacgcctgcttcgtgtacatctaccagtacgagccctacctgagagaccccgtggcctaccccaaggtgcagatgctgatgtacatgttctacgtgctgcccttctgcggcctggccgcctacgccctgaccttccccggctgcagctggctgcccgactgggccctggtgttcgccggcggcatcggccaggcccagttcagccacatgggcgccagcatgcacctgagaacccccttcacctacagagtgcccgaggacacctggggctgcttcttcgtgtgcaacctgctgtacgccctgggcccccacctgctggcctacagatgcctgcagtggcccgccttcttccaccagcccccccccagcgaccccctggccctgcacaagaagcagcactag

SEQ ID NO: 103133 - DNA, 642 bp, synthetic construct
  misc_feature 1..642: note = Description of Artificial Sequence: Synthetic coding sequence
  source 1..642: mol_type = other DNA
atggacatcccccccctggccggcaagatcgccgccctgagcctgagcgccctgcccgtgagctacgccctgaaccacgtgagcgccctgagccaccccctgtgggtggccctgatgagcgccctgatcctgggcctgctgttcgtggccgtgtacagcctgagccacggcgaggtgagctacgaccccctgtacgccgtgttcgccgtgttcgccttcaccagcgtggtggacctgatcatcgccctgcaggaggacagctacgtggtgggcttcatggagttctacaccaaggaggtgctgggcggcagacccggcagccccctgccccactgccccagcgagagccccacctgcccccacagagagagccacacctgcgcccagagaaccgagagcagcagcgccaccggcatggccctgttcaccaccagcagcacctggccctggcccgcccccagcgccgagggcgccggcggcagagagagagtggcccccgaccccggcagagaggtggccagcagcgacggcgtgcccggccagggcggcgccagaagcgtgtgcagaagaaaccaggacgccagcctgggcctgcagcccggcgtggccagaagaagattccagggcaccagccaggtgtag

SEQ ID NO: 103134 - DNA, 1257 bp, synthetic construct
  misc_feature 1..1257: note = Description of Artificial Sequence: Synthetic coding sequence
  source 1..1257: mol_type = other DNA
atggcccccacccagggccccagagcccccctggagttcggcggccccctgggcgccgccgccctgctgctgctgctgcccgccaccatgttccacctgctgctggccgccagaagcggccccgccagactgctgggcccccccgccagcctgcccggcctggaggtgctgtggagccccagagccctgctgctgtggctggcctggctgggcctgcaggccgccctgtacctgctgcccgccagaaaggtggccgagggccaggagctgaaggacaagagcagactgagataccccatcaacggcttccaggccctggtgctgaccgccctgctggtgggcctgggcatgagcgccggcctgcccctgggcgccctgcccgagatgctgctgcccctggccttcgtggccaccctgaccgccttcatcttcagcctgttcctgtacatgaaggcccaggtggcccccgtgagcgccctggcccccggcggcaacagcggcaaccccatctacgacttcttcctgggcagagagctgaaccccagaatctgcttcttcgacttcaagtacttctgcgagctgagacccggcctgatcggctgggtgctgatcaacctggccctgctgatgaaggaggccgagctgagaggcagccccagcctggccatgtggctggtgaacggcttccagctgctgtacgtgggcgacgccctgtggcacgaggaggccgtgctgaccaccatggacatcacccacgacggcttcggcttcatgctggccttcggcgacatggcctgggtgcccttcacctacagcctgcaggcccagttcctgctgcaccacccccagcccctgggcctgcccatggccagcgtgatctgcctgatcaacgccaccggctactacatcttcagaggcgccaacagccagaagaacaccttcagaaagaaccccagcgaccccagagtggccggcctggagaccatcagcaccgccaccggcagaaagctgctggtgagcggctggtggggcatggtgagacaccccaactacctgggcgacctgatcatggccctggcctggagcctgccctgcggcgtgagccacctgctgccctacttctacctgctgtacttcaccgccctgctggtgcacagagaggccagagacgagagacagtgcctgcagaagtacggcctggcctggcaggagtactgcagaagagtgccctacagaatcatgccctacatctactag

SEQ ID NO: 103135 - DNA, 1176 bp, synthetic construct
  misc_feature 1..1176: note = Description of Artificial Sequence: Synthetic coding sequence
  source 1..1176: mol_type = other DNA
atggcccccacccagggccccagagcccccctggagttcggcggccccctgggcgccgccgccctgctgctgctgctgcccgccaccatgttccacctgctgctggccgccagaagcggccccgccagactgctgggcccccccgccagcctgcccggcctggaggtgctgtggagccccagagccctgctgctgtggctggcctggctgggcctgcaggccgccctgtacctgctgcccgccagaaaggtggccgagggccaggagctgaaggacaagagcagactgagataccccatcaacggcttccaggccctggtgctgaccgccctgctggtgggcctgggcatgagcgccggcctgcccctgggcgccctgcccgagatgctgctgcccctggccttcgtggccaccctgaccgccttcatcttcagcctgttcctgtacatgaaggcccaggtggcccccgtgagcgccctggcccccggcggcaacagcggcaaccccatctacgacttcttcctgggcagagagctgaaccccagaatctgcttcttcgacttcaagtacttctgcgagctgagacccggcctgatcggctgggtgctgatcaacctggccctgctgatgaaggaggccgagctgagaggcagccccagcctggccatgtggctggtgaacggcttccagctgctgtacgtgggcgacgccctgtggcacgaggaggccgtgctgaccaccatggacatcacccacgacggcttcggcttcatgctggccttcggcgacatggcctgggtgcccttcacctacagcctgcaggcccagttcctgctgcaccacccccagcccctgggcctgcccatggccagcgtgatctgcctgatcaacggcctggagaccatcagcaccgccaccggcagaaagctgctggtgagcggctggtggggcatggtgagacaccccaactacctgggcgacctgatcatggccctggcctggagcctgccctgcggcgtgagccacctgctgccctacttctacctgctgtacttcaccgccctgctggtgcacagagaggccagagacgagagacagtgcctgcagaagtacggcctggcctggcaggagtactgcagaagagtgccctacagaatcatgccctacatctactag

SEQ ID NO: 103136 - DNA, 909 bp, synthetic construct
  misc_feature 1..909: note = Description of Artificial Sequence: Synthetic coding sequence
  source 1..909: mol_type = other DNA
atgagcgccggcctgcccctgggcgccctgcccgagatgctgctgcccctggccttcgtggccaccctgaccgccttcatcttcagcctgttcctgtacatgaaggcccaggtggcccccgtgagcgccctggcccccggcggcaacagcggcaaccccatctacgacttcttcctgggcagagagctgaaccccagaatctgcttcttcgacttcaagtacttctgcgagctgagacccggcctgatcggctgggtgctgatcaacctggccctgctgatgaaggaggccgagctgagaggcagccccagcctggccatgtggctggtgaacggcttccagctgctgtacgtgggcgacgccctgtggcacgaggaggccgtgctgaccaccatggacatcacccacgacggcttcggcttcatgctggccttcggcgacatggcctgggtgcccttcacctacagcctgcaggcccagttcctgctgcaccacccccagcccctgggcctgcccatggccagcgtgatctgcctgatcaacgccaccggctactacatcttcagaggcgccaacagccagaagaacaccttcagaaagaaccccagcgaccccagagtggccggcctggagaccatcagcaccgccaccggcagaaagctgctggtgagcggctggtggggcatggtgagacaccccaactacctgggcgacctgatcatggccctggcctggagcctgccctgcggcgtgagccacctgctgccctacttctacctgctgtacttcaccgccctgctggtgcacagagaggccagagacgagagacagtgcctgcagaagtacggcctggcctggcaggagtactgcagaagagtgccctacagaatcatgccctacatctactag

SEQ ID NO: 103137 - DNA, 1713 bp, synthetic construct
  misc_feature 1..1713: note = Description of Artificial Sequence: Synthetic coding sequence
  source 1..1713: mol_type = other DNA
atgggcttcctgcagctgctggtggtggccgtgctggccagcgagcacagagtggccggcgccgccgaggtgttcggcaacagcagcgagggcctgatcgagttcagcgtgggcaagttcagatacttcgagctgaacagacccttccccgaggaggccatcctgcacgacatcagcagcaacgtgaccttcctgatcttccagatccacagccagtaccagaacaccaccgtgagcttcagccccaccctgctgagcaacagcagcgagaccggcaccgccagcggcctggtgttcatcctgagacccgagcagagcacctgcacctggtacctgggcaccagcggcatccagcccgtgcagaacatggccatcctgctgagctacagcgagagagaccccgtgcccggcggctgcaacctggagttcgacctggacatcgaccccaacatctacctggagtacaacttcttcgagaccaccatcaagttcgcccccgccaacctgggctacgccagaggcgtggacccccccccctgcgacgccggcaccgaccaggacagcagatggagactgcagtacgacgtgtaccagtacttcctgcccgagaacgacctgaccgaggagatgctgctgaagcacctgcagagaatggtgagcgtgccccaggtgaaggccagcgccctgaaggtggtgaccctgaccgccaacgacaagaccagcgtgagcttcagcagcctgcccggccagggcgtgatctacaacgtgatcgtgtgggaccccttcctgaacaccagcgccgcctacatccccgcccacacctacgcctgcagcttcgaggccggcgagggcagctgcgccagcctgggcagagtgagcagcaaggtgttcttcaccctgttcgccctgctgggcttcttcatctgcttcttcggccacagattctggaagaccgagctgttcttcatcggcttcatcatcatgggcttcttcttctacatcctgatcaccagactgacccccatcaagtacgacgtgaacctgatcctgaccgccgtgaccggcagcgtgggcggcatgttcctggtggccgtgtggtggagattcggcatcctgagcatctgcatgctgtgcgtgggcctggtgctgggcttcctgatcagcagcgtgaccttcttcacccccctgggcaacctgaagatcttccacgacgacggcgtgttctgggtgaccttcagctgcatcgccatcctgatccccgtggtgttcatgggctgcctgagaatcctgaacatcctgacctgcggcgtgatcggcagctacagcgtggtgctggccatcgacagctactggagcaccagcctgagctacatcaccctgaacgtgctgaagagagccctgaacaaggacttccacagagccttcaccaacgtgcccttccagaccaacgacttcatcatcctggccgtgtggggcatgctggccgtgagcggcatcaccctgcagatcagaagagagagaggcagacccttcttccccccccacccctacaagctgtggaagcaggagagagagagaagagtgaccaacatcctggaccccagctaccacatcccccccctgagagagagactgtacggcagactgacccagatcaagggcctgttccagaaggagcagcccgccggcgagagaacccccctgctgctgtag

SEQ ID NO: 103138 - DNA, 351 bp, synthetic construct
  misc_feature 1..351: note = Description of Artificial Sequence: Synthetic coding sequence
  source 1..351: mol_type = other DNA
atgggcttcctgcagctgctggtggtggccgtgctggccagcgagcacagagtggccggcgccgccgaggtgttcggcaacagcagcgaggtgtacctggtggtgggcctgatcgagttcagcgtgggcaagttcagatacttcgagctgaacagacccttccccgaggaggccatcctgcacgacatcagcagcaacgtgaccttcctgatcttccagatccacagccagtaccagaacaccaccgtgagcttcagccccaccctgctgagcaacagcagcgagaccggcaccgccagcggcctggtgttcatcctgagacccgagcagagcacctgcacctggtactag

SEQ ID NO: 103139 - DNA, 1413 bp, synthetic construct
  misc_feature 1..1413: note = Description of Artificial Sequence: Synthetic coding sequence
  source 1..1413: mol_type = other DNA
atgggcatctggaccagcggcaccgacatcttcctgagcctgtgggagatctacgtgagccccagaagccccggctggatggacttcatccagcacctgggcgtgtgctgcctggtggccctgatcagcgtgggcctgctgagcgtggccgcctgctggttcctgcccagcatcatcgccgccgccgccagctggatcatcacctgcgtgctgctgtgctgcagcaagcacgccagatgcttcatcctgctggtgttcctgagctgcggcctgagagagggcagaaacgccctgatcgccgccggcaccggcatcgtgatcctgggccacgtggagaacatcttccacaacttcaagggcctgctggacggcatgacctgcaacctgagagccaagagcttcagcatccacttccccctgctgaagaagtacatcgaggccatccagtggatctacggcctggccacccccctgagcgtgttcgacgacctggtgagctggaaccagaccctggccgtgagcctgttcagccccagccacgtgctggaggcccagctgaacgacagcaagggcgaggtgctgagcgtgctgtaccagatggccaccaccaccgaggtgctgagcagcctgggccagaagctgctggccttcgccggcctgagcctggtgctgctgggcaccggcctgttcatgaagagattcctgggcccctgcggctggaagtacgagaacatctacatcaccagacagttcgtgcagttcgacgagagagagagacaccagcagagaccctgcgtgctgcccctgaacaaggaggagagaagaaagtacgtgatcatccccaccttctggcccacccccaaggagagaaagaacctgggcctgttcttcctgcccatcctgatccacctgtgcatctgggtgctgttcgccgccgtggactacctgctgtacagactgatcttcagcgtgagcaagcagttccagagcctgcccggcttcgaggtgcacctgaagctgcacggcgagaagcagggcacccaggacatcatccacgacagcagcttcaacatcagcgtgttcgagcccaactgcatccccaagcccaagttcctgctgagcgagacctgggtgcccctgagcgtgatcctgctgatcctggtgatgctgggcctgctgagcagcatcctgatgcagctgaagatcctggtgagcgccagcttctaccccagcgtggagagaaagagaatccagtacctgcacgccaagctgctgaagaagagaagcaagcagcccctgggcgaggtgaagagaagactgagcctgtacctgaccaagatccacttctggctgcccgtgctgaagatgatcagaaagaagcagatggacatggccagcgccgacaagagctag

SEQ ID NO: 103140 - DNA, 567 bp, synthetic construct
  misc_feature 1..567: note = Description of Artificial Sequence: Synthetic coding sequence
  source 1..567: mol_type = other DNA
atgagcaccatgttcgccgacaccctgctgatcgtgttcatcagcgtgtgcaccgccctgctggccgagggcatcacctgggtgctggtgtacagaaccgacaagtacaagagactgaaggccgaggtggagaagcagagcaagaagctggagaagaagaaggagaccatcaccgagagcgccggcagacagcagaagaagaagatcgagagacaggaggagaagctgaagaacaacaacagagacctgagcatggtgagaatgaagagcatgttcgccatcggcttctgcttcaccgccctgatgggcatgttcaacagcatcttcgacggcagagtggtggccaagctgcccttcacccccctgagctacatccagggcctgagccacagaaacctgctgggcgacgacaccaccgactgcagcttcatcttcctgtacatcctgtgcaccatgagcatcagacagaacatccagaagatcctgggcctggcccccagcagagccgccaccaagcaggccggcggcttcctgggcccccccccccccagcggcaagttcagctag

SEQ ID NO: 103141 - DNA, 510 bp, synthetic construct
  misc_feature 1..510: note = Description of Artificial Sequence: Synthetic coding sequence
  source 1..510: mol_type = other DNA
atgagcaccatgttcgccgacaccctgctgatcgtgttcatcagcgtgtgcaccgccctgctggccgagggcatcacctgggtgctggtgtacagaaccgacaagtacaagagactgaaggccgaggtggagaagcagagcaagaagctggagaagaagaaggagaccatcaccgagagcgccggcagacagcagaaggtgagaatgaagagcatgttcgccatcggcttctgcttcaccgccctgatgggcatgttcaacagcatcttcgacggcagagtggtggccaagctgcccttcacccccctgagctacatccagggcctgagccacagaaacctgctgggcgacgacaccaccgactgcagcttcatcttcctgtacatcctgtgcaccatgagcatcagacagaacatccagaagatcctgggcctggcccccagcagagccgccaccaagcaggccggcggcttcctgggcccccccccccccagcggcaagttcagctag

SEQ ID NO: 103142 - DNA, 603 bp, synthetic construct
  misc_feature 1..603: note = Description of Artificial Sequence: Synthetic coding sequence
  source 1..603: mol_type = other DNA
atgatgcactacgtggactacagcatgatgtaccacctgatcagaggccagagcgtgatcaagctgtacatcatctacaacatgctggaggtggccgacagactgttcagcagcttcggccaggacatcctggacgccctgtactggaccgccaccgagcccaaggagagaaagagagcccacatcggcttcgtggagatcaagggcagcgtgttcaagaagttcgagaagaacaacctgttccagatgagcaacagcgacatcaaggagagattcaccaactacgtgctgctgctgatcgtgtgcctgagaaacatggagcagttcagctggaaccccgaccacctgtgggtgctgttccccgacgtgtgcatggtgatcgccagcgagatcgccgtggacatcgtgaagcacgccttcatcaccaagttcaacgacatcaccgccgacgtgtacagcgagtacagagccagcctggccttcgacctggtgagcagcagacagaagaacgcctacaccgactacagcgacagcgtggccagaagaatgggcttcatccccctgcccctggccgtgctggtggacatccccgagagcacctag

SEQ ID NO: 103143 - DNA, 1371 bp, synthetic construct
  misc_feature 1..1371: note = Description of Artificial Sequence: Synthetic coding sequence
  source 1..1371: mol_type = other DNA
atggtgttcggcatcttcctgtgcctggacgccttcctgtacgtgttcaccctgctgcccctgagagtgttcctggccctgttcagactgctgaccctgccctgctacggcctgagagacagaagactgctgcagcccgcccaggtgtgcgacatcctgaagggcgtgatcctggtgatctgctacttcatgatgcactacgtggactacagcatgatgtaccacctgatcagaggccagagcgtgatcaagctgtacatcatctacaacatgctggaggtggccgacagactgttcagcagcttcggccaggacatcctggacgccctgtactggaccgccaccgagcccaaggagagaaagagagcccacatcggcgtgatcccccacttcttcatggccgtgctgtacgtgttcctgcacgccatcctgatcatggtgcaggccaccaccctgaacgtggccttcaacagccacaacaagagcctgctgaccatcatgatgagcaacaacttcgtggagatcaagggcagcgtgttcaagaagttcgagaagaacaacctgttccagatgagcaacagcgacatcaaggagagattcaccaactacgtgctgctgctgatcgtgtgcctgagaaacatggagcagttcagctggaaccccgaccacctgtgggtgctgttccccgacgtgtgcatggtgatcgccagcgagatcgccgtggacatcgtgaagcacgccttcatcaccaagttcaacgacatcaccgccgacgtgtacagcgagtacagagccagcctggccttcgacctggtgagcagcagacagaagaacgcctacaccgactacagcgacagcgtggccagaagaatgggcttcatccccctgcccctggccgtgctgctgatcagagtggtgaccagcagcatcaaggtgcagggcatcctgagctacgcctgcgtgatcctgttctacttcggcctgatcagcctgaaggtgctgaacagcatcgtgctgctgggcaagagctgccagtacgtgaaggaggccaagatggaggagaagctgagcaacccccccgccacctgcacccccggcaagcccagcagcaagagccagaacaagtgcaagcccagccagggcctgagcaccgaggagaacctgagcgccagcatcaccaagcagcccatccaccagaaggagaacatcatccccctgctggtgaccagcaacagcgaccagttcctgaccacccccgacggcgacgagaaggacatcacccaggacaacagcgagctgaagcacagaagcagcaagaaggacctgctggagatcgacagattcaccatctgcggcaacagaatcgactag

SEQ ID NO: 103144 - DNA, 1704 bp, synthetic construct
  misc_feature 1..1704: note = Description of Artificial Sequence: Synthetic coding sequence
  source 1..1704: mol_type = other DNA
atggccggcgtgggcgacgccgccgcccccggcgagggcggcggcggcggcgtggacggcccccagagagacggcagaggcgaggccgagcagcccggcggcagcggcggccagggccccccccccgccccccagctgaccgagaccctgggcttctacgagagcgacagaagaagagagagaagaagaggcagaaccgagctgagcctgctgagattcctgagcgccgagctgaccagaggctacttcctggagcacaacgaggccaagtacaccgagagaagagagagagtgtacacctgcctgagaatccccagagagctggagaagctgatggtgttcggcatcttcctgtgcctggacgccttcctgtacgtgttcaccctgctgcccctgagagtgttcctggccctgttcagactgctgaccctgccctgctacggcctgagagacagaagactgctgcagcccgcccaggtgtgcgacatcctgaagggcgtgatcctggtgatctgctacttcatgatgcactacgtggactacagcatgatgtaccacctgatcagaggccagagcgtgatcaagctgtacatcatctacaacatgctggaggtggccgacagactgttcagcagcttcggccaggacatcctggacgccctgtactggaccgccaccgagcccaaggagagaaagagagcccacatcggcgtgatcccccacttcttcatggccgtgctgtacgtgttcctgcacgccatcctgatcatggtgcaggccaccaccctgaacgtggccttcaacagccacaacaagagcctgctgaccatcatgatgagcaacaacttcgtggagatcaagggcagcgtgttcaagaagttcgagaagaacaacctgttccagatgagcaacagcgacatcaaggagagattcaccaactacgtgctgctgctgatcgtgtgcctgagaaacatggagcagttcagctggaaccccgaccacctgtgggtgctgttccccgacgtgtgcatggtgatcgccagcgagatcgccgtggacatcgtgaagcacgccttcatcaccaagttcaacgacatcaccgccgacgtgtacagcgagtacagagccagcctggccttcgacctggtgagcagcagacagaagaacgcctacaccgactacagcgacagcgtggccagaagaatgggcttcatccccctgcccctggccgtgctgctgatcagagtggtgaccagcagcatcaaggtgcagggcatcctgagctacgcctgcgtgatcctgttctacttcggcctgatcagcctgaaggtgctgaacagcatcgtgctgctgggcaagagctgccagtacgtgaaggaggccaagatggaggagaagctgagcaacccccccgccacctgcacccccggcaagcccagcagcaagagccagaacaagtgcaagcccagccagggcctgagcaccgaggagaacctgagcgccagcatcaccaagcagcccatccaccagaaggagaacatcatccccctgctggtgaccagcaacagcgaccagttcctgaccacccccgacggcgacgagaaggacatcacccaggacaacagcgagctgaagcacagaagcagcaagaaggacctgctggagatcgacagattcaccatctgcggcaacagaatcgactag

SEQ ID NO: 103145 - DNA, 1689 bp, synthetic construct
  misc_feature 1..1689: note = Description of Artificial Sequence: Synthetic coding sequence
  source 1..1689: mol_type = other DNA
atggccggcgtgggcgacgccgccgcccccggcgagggcggcggcggcggcgtggacggcccccagagagacggcagaggcgaggccgagcagcccggcggcagcggcggccagggccccccccccgccccccagctgaccgagaccctgggcttctacgagagcgacagaagaagagagagaagaagaggcagaaccgagctgagcctgctgagattcctgagcgccgagctgaccagaggctacttcctggagcacaacgaggccaagtacaccgagagaagagagagagtgtacacctgcctgagaatccccagagagctggagaagctgatggtgttcggcatcttcctgtgcctggacgccttcctgtacgtgttcaccctgctgcccctgagagtgttcctggccctgttcagactgctgaccctgccctgctacggcctgagagacagaagactgctgcagcccgcccaggtgtgcgacatcctgaagggcgtgatcctggtgatctgctacttcatgatgcactacgtggactacagcatgatgtaccacctgatcagaggccagagcgtgatcaagctgtacatcatctacaacatgctggaggtggccgacagactgttcagcagcttcggccaggacatcctggacgccctgtactggaccgccaccgagcccaaggagagaaagagagcccacatcggcgtgatcccccacttcttcatggccgtgctgtacgtgttcctgcacgccatcctgatcatggtgcaggccaccaccctgaacgtggccttcaacagccacaacaagagcctgctgaccatcatgatgagcaacaacttcgtggagatcaagggcagcgtgttcaagaagttcgagaagaacaacctgttccagatgagcaacagcgacatcaaggagagattcaccaactacgtgctgctgctgatcgtgtgcctgagaaacatggagcagttcagctggaaccccgaccacctgtgggtgctgttccccgacgtgtgcatggtgatcgccagcgagatcgccgtggacatcgtgaagcacgccttcatcaccaagttcaacgacatcaccgccgacgtgtacagcgagtacagagccagcctggccttcgacctggtgagcagcagacagaagaacgcctacaccgactacagcgacagcgtggccagaagaatgggcttcatccccctgcccctggccgtgctgctgatcagagtggtgaccagcagcatcaaggtgcagggcatcctgagctacgcctgcgtgatcctgttctacttcggcctgatcagcctgaaggtgctgaacagcatcgtgctgctgggcaagagctgccagtacgtgaaggaggccaagatggaggagaagctgagcaacccccccgccacctgcacccccggcaagcccagcagcaagagccagaacaagtgcaagcccagccagggcctgagcaccgaggagaacctgagcgccagcatcaccaagcagcccatccaccagaaggagaacatcatccccctgctggtgaccagcaacagcgaccagttcctgaccacccccgacggcgacgagaaggacatcacccaggacaacagcgagctgaagcacagaagcagcaagagcgtgctgctgtgccagagcggcctgcccgagtgctag

SEQ ID NO: 103146 - DNA, 2283 bp, synthetic construct
  misc_feature 1..2283: note = Description of Artificial Sequence: Synthetic coding sequence
  source 1..2283: mol_type = other DNA
atgagccccaagaaggtgcagatcaaggtggaggagaaggaggacgagaccgaggagagcagcagcgaggaggaggaggaggtggaggacaagctgcccagaagagagagcctgagacccaagagaaagagaaccagagacgtgatcaacgaggacgaccccgagcccgagcccgaggacgaggagaccagaaaggccagagagaaggagagaagaagaagactgaagagaggcgccgaggaggaggagatcgacgaggaggagctggagagactgaaggccgagctggacgagaagagacagatcatcgccaccgtgaagtgcaagccctggaagatggagaagaagatcgaggtgctgaaggaggccaagaagttcgtgagcgagaacgagggcgccctgggcaagggcaagggcaagagatggttcgccttcaagatgatgatggccaagaagtgggccaagttcctgagagacttcgagaacttcaaggccgcctgcgtgccctgggagaacaagatcaaggccatcgagagccagttcggcagcagcgtggccagctacttcctgttcctgagatggatgtacggcgtgaacatggtgctgttcatcctgaccttcagcctgatcatgctgcccgagtacctgtggggcctgccctacggcagcctgcccagaaagaccgtgcccagagccgaggaggccagcgccgccaacttcggcgtgctgtacgacttcaacggcctggcccagtacagcgtgctgttctacggctactacgacaacaagagaaccatcggctggatgaacttcagactgcccctgagctacttcctggtgggcatcatgtgcatcggctacagcttcctggtggtgctgaaggccatgaccaagaacatcggcgacgacggcggcggcgacgacaacaccttcaacttcagctggaaggtgttcaccagctgggactacctgatcggcaaccccgagaccgccgacaacaagttcaacagcatcaccatgaacttcaaggaggccatcaccgaggagaaggccgcccaggtggaggagaacgtgcacctgatcagattcctgagattcctggccaacttcttcgtgttcctgaccctgggcggcagcggctacctgatcttctgggccgtgaagagaagccaggagttcgcccagcaggaccccgacaccctgggctggtgggagaagaacgagatgaacatggtgatgagcctgctgggcatgttctgccccaccctgttcgacctgttcgccgagctggaggactaccaccccctgatcgccctgaagtggctgctgggcagaatcttcgccctgctgctgggcaacctgtacgtgttcatcctggccctgatggacgagatcaacaacaagatcgaggaggagaagctggtgaaggccaacatcaccctgtgggaggccaacatgatcaaggcctacaacgccagcttcagcgagaacagcaccggcccccccttcttcgtgcaccccgccgacgtgcccagaggcccctgctgggagaccatggtgggccaggagttcgtgagactgaccgtgagcgacgtgctgaccacctacgtgaccatcctgatcggcgacttcctgagagcctgcttcgtgagattctgcaactactgctggtgctgggacctggagtacggctaccccagctacaccgagttcgacatcagcggcaacgtgctggccctgatcttcaaccagggcatgatctggatgggcagcttcttcgcccccagcctgcccggcatcaacatcctgagactgcacaccagcatgtacttccagtgctgggccgtgatgtgctgcaacgtgcccgaggccagagtgttcaaggccagcagaagcaacaacttctacctgggcatgctgctgctgatcctgttcctgagcaccatgcccgtgctgtacatgatcgtgagcctgccccccagcttcgactgcggccccttcagcggcaagaacagaatgttcgaggtgatcggcgagaccctggagcacgacttccccagctggatggccaagatcctgagacagctgagcaaccccggcctggtgatcgccgtgatcctggtgatggtgctggccatctactacctgaacgccaccgccaagggccagaaggccgccaacctggacctgaagaagaagatgaagatgcaggccctggagaacaagatgagaaacaagaagatggccgccgccagagccgccgccgccgccggcagacagtag

SEQ ID NO: 103147 - DNA, 2283 bp, synthetic construct; identical to SEQ ID NO: 103146
  misc_feature 1..2283: note = Description of Artificial Sequence: Synthetic coding sequence
  source 1..2283: mol_type = other DNA

SEQ ID NO: 103148 - DNA, 2223 bp, synthetic construct
  misc_feature 1..2223: note = Description of Artificial Sequence: Synthetic coding sequence
  source 1..2223: mol_type = other DNA
gtggagtggagcggcgagtgcctgagaagctgcagaagagaggtgcagatcaaggtggaggagaaggaggacgagaccgaggagagcagcagcgaggaggaggaggaggtggaggacaagctgcccagaagagagagcctgagacccaagagaaagagaaccagagacgtgatcaacgaggacgaccccgagcccgagcccgaggacgaggagaccagaaaggccagagagaaggagagaagaagaagactgaagagaggcgccgaggccaagaagttcgtgagcgagaacgagggcgccctgggcaagggcaagggcaagagatggttcgccttcaagatgatgatggccaagaagtgggccaagttcctgagagacttcgagaacttcaaggccgcctgcgtgccctgggagaacaagatcaaggccatcgagagccagttcggcagcagcgtggccagctacttcctgttcctgagatggatgtacggcgtgaacatggtgctgttcatcctgaccttcagcctgatcatgctgcccgagtacctgtggggcctgccctacggcagcctgcccagaaagaccgtgcccagagccgaggaggccagcgccgccaacttcggcgtgctgtacgacttcaacggcctggcccagtacagcgtgctgttctacggctactacgacaacaagagaaccatcggctggatgaacttcagactgcccctgagctacttcctggtgggcatcatgtgcatcggctacagcttcctggtggtgctgaaggccatgaccaagaacatcggcgacgacggcggcggcgacgacaacaccttcaacttcagctggaaggtgttcaccagctgggactacctgatcggcaaccccgagaccgccgacaacaagttcaacagcatcaccatgaacttcaaggaggccatcaccgaggagaaggccgcccaggtggaggagaacgtgcacctgatcagattcctgagattcctggccaacttcttcgtgttcctgaccctgggcggcagcggctacctgatcttctgggccgtgaagagaagccaggagttcgcccagcaggaccccgacaccctgggctggtgggagaagaacgagatgaacatggtgatgagcctgctgggcatgttctgccccaccctgttcgacctgttcgccgagctggaggactaccaccccctgatcgccctgaagtggctgctgggcagaatcttcgccctgctgctgggcaacctgtacgtgttcatcctggccctgatggacgagatcaacaacaagatcgaggaggagaagctggtgaaggccaacatcaccctgtgggaggccaacatgatcaaggcctacaacgccagcttcagcgagaacagcaccggcccccccttcttcgtgcaccccgccgacgtgcccagaggcccctgctgggagaccatggtgggccaggagttcgtgagactgaccgtgagcgacgtgctgaccacctacgtgaccatcctgatcggcgacttcctgagagcctgcttcgtgagattctgcaactactgctggtgctgggacctggagtacggctaccccagctacaccgagttcgacatcagcggcaacgtgctggccctgatcttcaaccagggcatgatctggatgggcagcttcttcgcccccagcctgcccggcatcaacatcctgagactgcacaccagcatgtacttccagtgctgggccgtgatgtgctgcaacgtgcccgaggccagagtgttcaaggccagcagaagcaacaacttctacctgggcatgctgctgctgatcctgttcctgagcaccatgcccgtgctgtacatgatcgtgagcctgccccccagcttcgactgcggccccttcagcggcaagaacagaatgttcgaggtgatcggcgagaccctggagcacgacttccccagctggatggccaagatcctgagacagctgagcaaccccggcctggtgatcgccgtgatcctggtgatggtgctggccatctactacctgaacgccaccgccaagggccagaaggccgccaacctggacctgaagaagaagatgaagatgctgcagctgctggtggccagcaacaagtaccccgagagccccgagaaggtgcacttcgccctgctgttcaagagcaacgccatctgcgagagacccgagaacaagcactgctag

SEQ ID NO: 103149 - DNA, 2283 bp, synthetic construct; identical to SEQ ID NO: 103146
  misc_feature 1..2283: note = Description of Artificial Sequence: Synthetic coding sequence
  source 1..2283: mol_type = other DNA

SEQ ID NO: 103150 - DNA, 2184 bp, synthetic construct
  misc_feature 1..2184: note = Description of Artificial Sequence: Synthetic coding sequence
  source 1..2184: mol_type = other DNA
gtggagtggagcggcgagtgcctgagaagctgcagaagagaggtgcagatcaaggtggaggagaaggaggacgagaccgaggagagcagcagcgaggaggaggaggaggtggaggacaagctgcccagaagagagagcctgagacccaagagaaagagaaccagagacgtgatcaacgaggacgaccccgagcccgagcccgaggacgaggagaccagaaaggccagagagaaggagagaagaagaagactgaagagaggcgccgaggccaagaagttcgtgagcgagaacgagggcgccctgggcaagggcaagggcaagagatggttcgccttcaagatgatgatggccaagaagtgggccaagttcctgagagacttcgagaacttcaaggccgcctgcgtgccctgggagaacaagatcaaggccatcgagagccagttcggcagcagcgtggccagctacttcctgttcctgagatggatgtacggcgtgaacatggtgctgttcatcctgaccttcagcctgatcatgctgcccgagtacctgtggggcctgccctacggcagcctgcccagaaagaccgtgcccagagccgaggaggccagcgccgccaacttcggcgtgctgtacgacttcaacggcctggcccagtacagcgtgctgttctacggctactacgacaacaagagaaccatcggctggatgaacttcagactgcccctgagctacttcctggtgggcatcatgtgcatcggctacagcttcctggtggtgctgaaggccatgaccaagaacatcggcgacgacggcggcggcgacgacaacaccttcaacttcagctggaaggtgttcaccagctgggactacctgatcggcaaccccgagaccgccgacaacaagttcaacagcatcaccatgaacttcaaggaggccatcaccgaggagaaggccgcccaggtggaggagaacgtgcacctgatcagattcctgagattcctggccaacttcttcgtgttcctgaccctgggcggcagcggctacctgatcttctgggccgtgaagagaagccaggagttcgcccagcaggaccccgacaccctgggctggtgggagaagaacgagatgaacatggtgatgagcctgctgggcatgttctgccccaccctgttcgacctgttcgccgagctggaggactaccaccccctgatcgccctgaagtggctgctgggcagaatcttcgccctgctgctgggcaacctgtacgtgttcatcctggccctgatggacgagatcaacaacaagatcgaggaggagaagctggtgaaggccaacatcaccctgtgggaggccaacatgatcaaggcctacaacgccagcttcagcgagaacagcaccggcccccccttcttcgtgcaccccgccgacgtgcccagaggcccctgctgggagaccatggtgggccaggagttcgtgagactgaccgtgagcgacgtgctgaccacctacgtgaccatcctgatcggcgacttcctgagagcctgcttcgtgagattctgcaactactgctggtgctgggacctggagtacggctaccccagctacaccgagttcgacatcagcggcaacgtgctggccctgatcttcaaccagggcatgatctggatgggcagcttcttcgcccccagcctgcccggcatcaacatcctgagactgcacaccagcatgtacttccagtgctgggccgtgatgtgctgcaacgtgcccgaggccagagtgttcaaggccagcagaagcaacaacttctacctgggcatgctgctgctgatcctgttcctgagcaccatgcccgtgctgtacatgatcgtgagcctgccccccagcttcgactgcggccccttcagcggcaagaacagaatgttcgaggtgatcggcgagaccctggagcacgacttccccagctggatggccaagatcctgagacagctgagcaaccccggcctggtgatcgccgtgatcctggtgatggtgctggccatctactacctgaacgccaccgccaagggccagaaggccgccaacctggacctgaagaagaagatgaagatgcaggccctggagaacaagatgagaaacaagaagatggccgccgccagagccgccgccgccgccggcagacagtag

SEQ ID NO: 103151 - DNA, 1665 bp, synthetic construct
  misc_feature 1..1665: note = Description of Artificial Sequence: Synthetic coding sequence
  source 1..1665: mol_type = other DNA
gtggagtggagcggcgagtgcctgagaagctgcagaagagaggtgcagatcaaggtggaggagaaggaggacgagaccgaggagagcagcagcgaggaggaggaggaggtggaggacaagctgcccagaagagagagcctgagacccaagagaaagagaaccagagacgtgatcaacgaggacgaccccgagcccgagcccgaggacgaggagaccagaaaggccagagagaaggagagaagaagaagactgaagagaggcgccgaggccaagaagttcgtgagcgagaacgagggcgccctgggcaagggcaagggcaagagatggttcgccttcaagatgatgatggccaagaagtgggccaagttcctgagagacttcgagaacttcaaggccgcctgcgtgccctgggagaacaagatcaaggccatcgagagccagttcggcagcagcgtggccagctacttcctgttcctgagatggatgtacggcgtgaacatggtgctgttcatcctgaccttcagcctgatcatgctgcccgagtacctgtggggcctgccctacggcagcctgcccagaaagaccgtgcccagagccgaggaggccagcgccgccaacttcggcgtgctgtacgacttcaacggcctggcccagtacagcgtgctgttctacggctactacgacaacaagagaaccatcggctggatgaacttcagactgcccctgagctacttcctggtgggcatcatgtgcatcggctacagcttcctggtggtgctgaaggccatgaccaagaacatcggcgacgacggcggcggcgacgacaacaccttcaacttcagctggaaggtgttcaccagctgggactacctgatcggcaaccccgagaccgccgacaacaagttcaacagcatcaccatgaacttcaaggaggccatcaccgaggagaaggccgcccaggtggaggagaacgtgcacctgatcagattcctgagattcctggccaacttcttcgtgttcctgaccctgggcggcagcggctacctgatcttctgggccgtgaagagaagccaggagttcgcccagcaggaccccgacaccctgggctggtgggagaagaacgagatgaacatggtgatgagcctgctgggcatgttctgccccaccctgttcgacctgttcgccgagctggaggactaccaccccctgatcgccctgaagtggctgctgggcagaatcttcgccctgctgctgggcaacctgtacgtgttcatcctggccctgatggacgagatcaacaacaagatcgaggaggagaagctggtgaaggccaacatcaccctgtgggaggccaacatgatcaaggcctacaacgccagcttcagcgagaacagcaccggcccccccttcttcgtgcaccccgccgacgtgcccagaggcccctgctgggagaccatggtgggccaggagttcgtgagactgaccgtgagcgacgtgctgaccacctacgtgaccatcctgatcggcgacttcctgagagcctgcttcgtgagattctgcaactactgctggtgctgggacctggagtacggctaccccagctacaccgagttcgacatcagcggcaacgtgctggccctgatcttcaaccagggcatgatctag

SEQ ID NO: 103152 - DNA, 2265 bp, synthetic construct
  misc_feature 1..2265: note = Description of Artificial Sequence: Synthetic coding sequence
  source 1..2265: mol_type = other DNA
cagatcaaggtggaggagaaggaggacgagaccgaggagagcagcagcgaggaggaggaggaggtggaggacaagctgcccagaagagagagcctgagacccaagagaaagagaaccagagacgtgatcaacgaggacgaccccgagcccgagcccgaggacgaggagaccagaaaggccagagagaaggagagaagaagaagactgaagagaggcgccgaggaggaggagatcgacgaggaggagctggagagactgaaggccgagctggacgagaagagacagatcatcgccaccgtgaagtgcaagccctggaagatggagaagaagatcgaggtgctgaaggaggccaagaagttcgtgagcgagaacgagggcgccctgggcaagggcaagggcaagagatggttcgccttcaagatgatgatggccaagaagtgggccaagttcctgagagacttcgagaacttcaaggccgcctgcgtgccctgggagaacaagatcaaggccatcgagagccagttcggcagcagcgtggccagctacttcctgttcctgagatggatgtacggcgtgaacatggtgctgttcatcctgaccttcagcctgatcatgctgcccgagtacctgtggggcctgccctacggcagcctgcccagaaagaccgtgcccagagccgaggaggccagcgccgccaacttcggcgtgctgtacgacttcaacggcctggcccagtacagcgtgctgttctacggctactacgacaacaagagaaccatcggctggatgaacttcagactgcccctgagctacttcctggtgggcatcatgtgcatcggctacagcttcctggtggtgctgaaggccatgaccaagaacatcggcgacgacggcggcggcgacgacaacaccttcaacttcagctggaaggtgttcaccagctgggactacctgatcggcaaccccgagaccgccgacaacaagttcaacagcatcaccatgaacttcaaggaggccatcaccgaggagaaggccgcccaggtggaggagaacgtgcacctgatcagattcctgagattcctggccaacttcttcgtgttcctgaccctgggcggcagcggctacctgatcttctgggccgtgaagagaagccaggagttcgcccagcaggaccccgacaccctgggctggtgggagaagaacgagatgaacatggtgatgagcctgctgggcatgttctgccccaccctgttcgacctgttcgccgagctggaggactaccaccccctgatcgccctgaagtggctgctgggcagaatcttcgccctgctgctgggcaacctgtacgtgttcatcctggccctgatggacgagatcaacaacaagatcgaggaggagaagctggtgaaggccaacatcaccctgtgggaggccaacatgatcaaggcctacaacgccagcttcagcgagaacagcaccggcccccccttcttcgtgcaccccgccgacgtgcccagaggcccctgctgggagaccatggtgggccaggagttcgtgagactgaccgtgagcgacgtgctgaccacctacgtgaccatcctgatcggcgacttcctgagagcctgcttcgtgagattctgcaactactgctggtgctgggacctggagtacggctaccccagctacaccgagttcgacatcagcggcaacgtgctggccctgatcttcaaccagggcatgatctggatgggcagcttcttcgcccccagcctgcccggcatcaacatcctgagactgcacaccagcatgtacttccagtgctgggccgtgatgtgctgcaacgtgcccgaggccagagtgttcaaggccagcagaagcaacaacttctacctgggcatgctgctgctgatcctgttcctgagcaccatgcccgtgctgtacatgatcgtgagcctgccccccagcttcgactgcggccccttcagcggcaagaacagaatgttcgaggtgatcggcgagaccctggagcacgacttccccagctggatggccaagatcctgagacagctgagcaaccccggcctggtgatcgccgtgatcctggtgatggtgctggccatctactacctgaacgccaccgccaagggccagaaggccgccaacctggacctgaagaagaagatgaagatgcaggccctggagaacaagatgagaaacaagaagatggccgccgccagagccgacggcgccgccggcagagcctag

SEQ ID NO: 103153 - DNA, 2721 bp, synthetic construct
  misc_feature 1..2721: note = Description of Artificial Sequence: Synthetic coding sequence
  source 1..2721: mol_type = other DNA
atgagccaccaggtgaagggcctgaaggaggaggccagaggcggcgtgaagggcagagtgaagagcggcagcccccacaccggcgacagactgggcagaagaagcagcagcaagagagccctgaaggccgagggcacccccggcagaagaggcgcccagagaagccagaaggagagagccggcggcagccccagccccggcagccccagaagaaagcagaccggcagaagaagacacagagaggagctgggcgagcaggagagaggcgaggccgagagaacctgcgagggcagaagaaagagagacgagagagccagcttccaggagagaaccgccgcccccaagagagagaaggagatccccagaagagaggagaagagcaagagacagaagaagcccagaagcagcagcctggccagcagcgccagcggcggcgagagcctgagcgaggaggagctggcccagatcctggagcaggtggaggagaagaagaagctgatcgccaccatgagaagcaagccctggcccatggccaagaagctgaccgagctgagagaggcccaggagttcgtggagaagtacgagggcgccctgggcaagggcaagggcaagcagctgtacgcctacaagatgctgatggccaagaagtgggtgaagttcaagagagacttcgacaacttcaagacccagtgcatcccctgggagatgaagatcaaggacatcgagagccacttcggcagcagcgtggccagctacttcatcttcctgagatggatgtacggcgtgaacctggtgctgttcggcctgatcttcggcctggtgatcatccccgaggtgctgatgggcatgccctacggcagcatccccagaaagaccgtgcccagagccgaggaggagaaggccatggacttcagcgtgctgtgggacttcgagggctacatcaagtacagcgccctgttctacggctactacaacaaccagagaaccatcggctggctgagatacagactgcccatggcctacttcatggtgggcgtgagcgtgttcggctacagcctgatcatcgtgatcagaagcatggccagcaacacccagggcagcaccggcgagggcgagagcgacaacttcaccttcagcttcaagatgttcaccagctgggactacctgatcggcaacagcgagaccgccgacaacaagtacgccagcatcaccaccagcttcaaggagagcatcgtggacgagcaggagagcaacaaggaggagaacatccacctgaccagattcctgagagtgctggccaacttcctgatcatctgctgcctgtgcggcagcggctacctgatctacttcgtggtgaagagaagccagcagttcagcaagatgcagaacgtgagctggtacgagagaaacgaggtggagatcgtgatgagcctgctgggcatgttctgcccccccctgttcgagaccatcgccgccctggagaactaccaccccagaaccggcctgaagtggcagctgggcagaatcttcgccctgttcctgggcaacctgtacaccttcctgctggccctgatggacgacgtgcacctgaagctggccaacgaggagaccatcaagaacatcacccactggaccctgttcaactactacaacagcagcggctggaacgagagcgtgcccagaccccccctgcaccccgccgacgtgcccagaggcagctgctgggagaccgccgtgggcatcgagttcatgagactgaccgtgagcgacatgctggtgacctacatcaccatcctgctgggcgacttcctgagagcctgcttcgtgagattcatgaactactgctggtgctgggacctggaggccggcttccccagctacgccgagttcgacatcagcggcaacgtgctgggcctgatcttcaaccagggcatgatctggatgggcagcttctacgcccccggcctggtgggcatcaacgtgctgagactgctgaccagcatgtacttccagtgctgggccgtgatgagcagcaacgtgccccacgagagagtgttcaaggccagcagaagcaacaacttctacatgggcctgctgctgctggtgctgttcctgagcctgctgcccgtggcctacaccatcatgagcctgccccccagcttcgactgcggccccttcagcggcaagaacagaatgtacgacgtgctgcaggagaccatcgagaacgacttccccaccttcctgggcaagatcttcgccttcctggccaaccccggcctgatcatccccgccatcctgctgatgttcctggccatctactacctgaacagcgtgagcaagagcctgagcagagccaacgcccagctgagaaagaagatccaggtgctgagagaggtggagaagagccacaagagcgtgaagggcaaggccaccgccagagacagcgaggacacccccaagagcagcagcaagaacgccacccagctgcagctgaccaaggaggagaccaccccccccagcgccagccagagccaggccatggacaagaaggcccagggccccggcaccagcaacagcgccagcagaaccaccctgcccgccagcggccacctgcccatcagcagaccccccggcatcggccccgacagcggccacgcccccagccagacccacccctggagaagcgccagcggcaagagcgcccagagacccccccactag

SEQ ID NO: 103154 - DNA, 1365 bp, synthetic construct
  misc_feature 1..1365: note = Description of Artificial Sequence: Synthetic coding sequence
  source 1..1365: mol_type = other DNA
atggcccagcccctggccttcatcctggacgtgcccgagacccccggcgaccagggccagggccccagcccctacgacgagagcgaggtgcacgacagcttccagcagctgatccaggagcagagccagtgcaccgcccaggagggcctggagctgcagcagagagagagagaggtgaccggcagcagccagcagaccctgtggagacccgagggcacccagagcaccgccaccctgagaatcctggccagcatgcccagcagaaccatcggcagaagcagaggcgccatcatcagccagtactacaacagaaccgtgcagctgagatgcagaagcagcagacccctgctgggcaacttcgtgagaagcgcctggcccagcctgagactgtacgacctggagctggaccccaccgccctggaggaggaggagaagcagagcctgctggtgaaggagctgcagagcctggccgtggcccagagagaccacatgctgagaggcatgcccctgagcctggccgagaagagaagcctgagagagaagagcagaacccccagaggcaagtggagaggccagcccggcagcggcggcgtgtgcagctgctgcggcagactgagatacgcctgcgtgctggccctgcacagcctgggcctggccctgctgagcgccctgcaggccctgatgccctggagatacgccctgaagagaatcggcggccagttcggcagcagcgtgctgagctacttcctgttcctgaagaccctgctggccttcaacgccctgctgctgctgctgctggtggccttcatcatgggcccccaggtggccttcccccccgccctgcccggccccgcccccgtgtgcaccggcctggagctgctgaccggcgccggctgcttcacccacaccgtgatgtactacggccactacagcaacgccaccctgaaccagccctgcggcagccccctggacggcagccagtgcacccccagagtgggcggcctgccctacaacatgcccctggcctacctgagcaccgtgggcgtgagcttcttcatcacctgcatcaccctggtgtacagcatggcccacagcttcggcgagagctacagagtgggcagcaccagcggcatccacgccatcaccgtgttctgcagctgggactacaaggtgacccagaagagagccagcagactgcagcaggacaacatcagaaccagactgaagggcgaggacaagatcttcctgatcaacaagctgcacagcatctacgagagaaaggagagagaggagagaagcagagtgggcaccaccgaggaggccgccgccccccccgccctgctgaccgacgagcaggacgcctag

SEQ ID NO: 103155 - DNA, 2418 bp, synthetic construct
  misc_feature 1..2418: note = Description of Artificial Sequence: Synthetic coding sequence
  source 1..2418: mol_type = other DNA
atggcccagcccctggccttcatcctggacgtgcccgagacccccggcgaccagggccagggccccagcccctacgacgagagcgaggtgcacgacagcttccagcagctgatccaggagcagagccagtgcaccgcccaggagggcctggagctgcagcagagagagagagaggtgaccggcagcagccagcagaccctgtggagacccgagggcacccagagcaccgccaccctgagaatcctggccagcatgcccagcagaaccatcggcagaagcagaggcgccatcatcagccagtactacaacagaaccgtgcagctgagatgcagaagcagcagacccctgctgggcaacttcgtgagaagcgcctggcccagcctgagactgtacgacctggagctggaccccaccgccctggaggaggaggagaagcagagcctgctggtgaaggagctgcagagcctggccgtggcccagagagaccacatgctgagaggcatgcccctgagcctggccgagaagagaagcctgagagagaagagcagaacccccagaggcaagtggagaggccagcccggcagcggcggcgtgtgcagctgctgcggcagactgagatacgcctgcgtgctggccctgcacagcctgggcctggccctgctgagcgccctgcaggccctgatgccctggagatacgccctgaagagaatcggcggccagttcggcagcagcgtgctgagctacttcctgttcctgaagaccctgctggccttcaacgccctgctgctgctgctgctggtggccttcatcatgggcccccaggtggccttcccccccgccctgcccggccccgcccccgtgtgcaccggcctggagctgctgaccggcgccggctgcttcacccacaccgtgatgtactacggccactacagcaacgccaccctgaaccagccctgcggcagccccctggacggcagccagtgcacccccagagtgggcggcctgccctacaacatgcccctggcctacctgagcaccgtgggcgtgagcttcttcatcacctgcatcaccctggtgtacagcatggcccacagcttcggcgagagctacagagtgggcagcaccagcggcatccacgccatcaccgtgttctgcagctgggactacaaggtgacccagaagagagccagcagactgcagcaggacaacatcagaaccagactgaaggagctgctggccgagtggcagctgagacacagccccagaagcgtgtgcggcagactgagacaggccgccgtgctgggcctggtgtggctgctgtgcctgggcaccgccctgggctgcgccgtggccgtgcacgtgttcagcgagttcatgatccagagccccgaggccgccggccaggaggccgtgctgctggtgctgcccctggtggtgggcctgctgaacctgggcgccccctacctgtgcagagtgctggccgccctggagccccacgacagccccgtgctggaggtgtacgtggccatctgcagaaacctgatcctgaagctggccatcctgggcaccctgtgctaccactggctgggcagaagagtgggcgtgctgcagggccagtgctgggaggacttcgtgggccaggagctgtacagattcctggtgatggacttcgtgctgatgctgctggacaccctgttcggcgagctggtgtggagaatcatcagcgagaagaagctgaagagaagaagaaagcccgagttcgacatcgccagaaacgtgctggagctgatctacggccagaccctgacctggctgggcgtgctgttcagccccctgctgcccgccgtgcagatcatcaagctgctgctggtgttctacgtgaagaagaccagcctgctggccaactgccaggcccccagaagaccctggctggccagccacatgagcaccgtgttcctgaccctgctgtgcttccccgccttcctgggcgccgccgtgttcctgtgctacgccgtgtggcaggtgaagcccagcagcacctgcggccccttcagaaccctggacaccatgtacgaggccggcagagtgtgggtgagacacctggaggccgccggccccagagtgagctggctgccctgggtgcacagatacctgatggagaacaccttcttcgtgttcctggtgagcgccctgctgctggccgtgatctacctgaacatccaggtggtgagaggccagagaaaggtgatctgcctgctgaaggagcagatcagcaacgagggcgaggacaagatcttcctgatcaacaagctgcacagcatctacgagagaaaggagagagaggagagaagcagagtgggcaccaccgaggaggccgccgccccccccgccctgctgaccgacgagcaggacgcctag

SEQ ID NO: 103156 - DNA, 1155 bp, synthetic construct
  misc_feature 1..1155: note = Description of Artificial Sequence: Synthetic coding sequence
  source 1..1155: mol_type = other DNA
atggcccacagcttcggcgagagctacagagtgggcagcaccagcggcatccacgccatcaccgtgttctgcagctgggactacaaggtgacccagaagagagccagcagactgcagcaggacaacatcagaaccagactgaaggagctgctggccgagtggcagctgagacacagccccagaagcgtgtgcggcagactgagacaggccgccgtgctgggcctggtgtggctgctgtgcctgggcaccgccctgggctgcgccgtggccgtgcacgtgttcagcgagttcatgatccagagccccgaggccgccggccaggaggccgtgctgctggtgctgcccctggtggtgggcctgctgaacctgggcgccccctacctgtgcagagtgctggccgccctggagccccacgacagccccgtgctggaggtgtacgtggccatctgcagaatcatcagcgagaagaagctgaagagaagaagaaagcccgagttcgacatcgccagaaacgtgctggagctgatctacggccagaccctgacctggctgggcgtgctgttcagccccctgctgcccgccgtgcagatcatcaagctgctgctggtgttctacgtgaagaagaccagcctgctggccaactgccaggcccccagaagaccctggctggccagccacatgagcaccgtgttcctgaccctgctgtgcttccccgccttcctgggcgccgccgtgttcctgtgctacgccgtgtggcaggtgaagcccagcagcacctgcggccccttcagaaccctggacaccatgtacgaggccggcagagtgtgggtgagacacctggaggccgccggccccagagtgagctggctgccctgggtgcacagatacctgatggagaacaccttcttcgtgttcctggtgagcgccctgctgctggccgtgatctacctgaacatccaggtggtgagaggccagagaaaggtgatctgcctgctgaaggagcagatcagcaacgagggcgaggacaagatcttcctgatcaacaagctgcacagcatctacgagagaaaggagagagaggagagaagcagagtgggcaccaccgaggaggccgccgccccccccgccctgctgaccgacgagcaggacgcctag

SEQ ID NO: 103157 - DNA, 417 bp, synthetic construct
  misc_feature 1..417: note = Description of Artificial Sequence: Synthetic coding sequence
  source 1..417: mol_type = other DNA
cagtgctgggaggacttcgtgggccaggagctgtacagattcctggtgatggacttcgtgctgatgctgctggacaccctgttcggcgagctggagaacagattccagagcgacgtgttcagcagcagaatctgggcctggtggagaaagcccgagttcgacatcgccagaaacgtgctggagctgatctacggccagaccctgacctggctgggcgtgctgttcagccccctgctgcccgccgtgcagatcatcaagctgctgctggtgttctacgtgaagaagaccagcctgctggccaactgccaggcccccagaagaccctggctggccagccacatgagcaccgtgttcctgaccctgctgtgcttccccgccttcctgggcgccgccgtgttcctgtgctacgccgtgtag

SEQ ID NO: 103158 - DNA, 2418 bp, synthetic construct; identical to SEQ ID NO: 103155
  misc_feature 1..2418: note = Description of Artificial Sequence: Synthetic coding sequence
  source 1..2418: mol_type = other DNA

SEQ ID NO: 103159 - DNA, 1098 bp, synthetic construct
  misc_feature 1..1098: note = Description of Artificial Sequence: Synthetic coding sequence
  source 1..1098: mol_type = other DNA
atgaacatcatggacttcaacgtgaagaagctggccgccgacgccggcaccttcctgagcagagccgtgcagttcaccgaggagaagctgggccaggccgagaagaccgagctggacgcccacctggagaacctgctgagcaaggccgagtgcaccaagatctggaccgagaagatcatgaagcagaccgaggtgctgctgcagcccaaccccaacgccagaatcgaggagttcgtgtacgagaagctggacagaaaggcccccagcagaatcaacaaccccgagctgctgggccagtacatgatcgacgccggcaccgagttcggccccggcaccgcctacggcaacgccctgatcaagtgcggcgagacccagaagagaatcggcaccgccgacagagagctgatccagaccagcgccctgaacttcctgacccccctgagaaacttcatcgagggcgactacaagaccatcgccaaggagagaaagctgctgcagaacaagagactggacctggacgccgccaagaccagactgaagaaggccaaggccgccgagaccagaaacagcagcgagcaggagctgagaatcacccagagcgagttcgacagacaggccgagatcaccagactgctgctggagggcatcagcagcacccacgcccaccacctgagatgcctgaacgacttcgtggaggcccagatgacctactacgcccagtgctaccagtacatgctggacctgcagaagcagctgggcagcttccccagcaactacctgagcaacaacaaccagaccagcgtgacccccgtgcccagcgtgctgcccaacgccatcggcagcagcgccatggccagcaccagcggcctggtgatcaccagccccagcaacctgagcgacctgaaggagtgcagcggcagcagaaaggccagagtgctgtacgactacgacgccgccaacagcaccgagctgagcctgctggccgacgaggtgatcaccgtgttcagcgtggtgggcatggacagcgactggctgatgggcgagagaggcaaccagaagggcaaggtgcccatcacctacctggagctgctgaactag

SEQ ID NO: 103160 - DNA, 636 bp, synthetic construct
  misc_feature 1..636: note = Description of Artificial Sequence: Synthetic coding sequence
  source 1..636: mol_type = other DNA
atggccggcgtgggcgccggccccctgagagccatgggcagacaggccctgctgctgctggccctgtgcgccaccggcgcccagggcctgtacttccacatcggcgagaccgagaagagatgcttcatcgaggagatccccgacgagaccatggtgatcggcaactacagaacccagggcatgcacgtggaggtgaaggaccccgacggcaaggtggtgctgagcagacagtacggcagcgagggcagattcaccttcaccagccacacccccggcgaccaccagatctgcctgcacagcaacagcaccagaatggccctgttcgccggcggcaagctgagagtgcacctggacatccaggtgggcgagcacgccaacaactaccccgagatcgccgccaaggacaagctgaccgagctgcagctgagagccagacagctgctggaccaggtggagcagatccagaaggagcaggactaccagagatacagagaggagagattcagactgaccagcgagagcaccaaccagagagtgctgtggtggagcatcgcccagaccgtgatcctgatcctgaccggcatctggcagatgagacacctgaagagcttcttcgaggccaagaagctggtgtag

SEQ ID NO: 103161 - DNA, 684 bp, synthetic construct
  misc_feature 1..684: note = Description of Artificial Sequence: Synthetic coding sequence
  source 1..684: mol_type = other DNA
atggccggcgtgggcgccggccccctgagagccatgggcagacaggccctgctgctgctggccctgtgcgccaccggcgcccagggcctgtacttccacatcggcgagaccgagaagagatgcttcatcgaggagatccccgacgagaccatggtgatcggcaactacagaacccagatgtgggacaagcagaaggaggtgttcctgcccagcacccccggcctgggcatgcacgtggaggtgaaggaccccgacggcaaggtggtgctgagcagacagtacggcagcgagggcagattcaccttcaccagccacacccccggcgaccaccagatctgcctgcacagcaacagcaccagaatggccctgttcgccggcggcaagctgagagtgcacctggacatccaggtgggcgagcacgccaacaactaccccgagatcgccgccaaggacaagctgaccgagctgcagctgagagccagacagctgctggaccaggtggagcagatccagaaggagcaggactaccagagatacagagaggagagattcagactgaccagcgagagcaccaaccagagagtgctgtggtggagcatcgcccagaccgtgatcctgatcctgaccggcatctggcagatgagacacctgaagagcttcttcgaggccaagaagctggtgtag

SEQ ID NO: 103162 - DNA, 660 bp, synthetic construct
  misc_feature 1..660: note = Description of Artificial Sequence: Synthetic coding sequence
  source 1..660: mol_type = other DNA
atgagcggcctgagcggcccccccgccagaagaggccccttccccctggccctgctgctgctgttcctgctgggccccagactggtgctggccatcagcttccacctgcccatcaacagcagaaagtgcctgagagaggagatccacaaggacctgctggtgaccggcgcctacgagatcagcgaccagagcggcggcgccggcggcctgagaagccacctgaagatcaccgacagcgccggccacatcctgtacagcaaggaggacgccaccaagggcaagttcgccttcaccaccgaggactacgacatgttcgaggtgtgcttcgagagcaagggcaccggcagaatccccgaccagctggtgatcctggacatgaagcacggcgtggaggccaagaactacgaggagatcgccaaggtggagaagctgaagcccctggaggtggagctgagaagactggaggacctgagcgagagcatcgtgaacgacttcgcctacatgaagaagagagaggaggagatgagagacaccaacgagagcaccaacaccagagtgctgtacttcagcatcttcagcatgttctgcctgatcggcctggccacctggcaggtgttctacctgagaagattcttcaaggccaagaagctgatcgagtag

SEQ ID NO: 103163 - DNA, 471 bp, synthetic construct
  misc_feature 1..471: note = Description of Artificial Sequence: Synthetic coding sequence
  source 1..471: mol_type = other DNA
atggccggctggcccggcgccggccccctgtgcgtgctgggcggcgccgccctgggcgtgtgcctggccggcgtggccggccagctggtggagcccagcaccgccccccccaagcccaagcccccccccctgaccaaggagaccgtggtgttctgggacatgagactgtggcacgtggtgggcatcttcagcctgttcgtgctgagcatcatcatcaccctgtgctgcgtgttcaactgcagagtgcccagaaccagaaaggagatcgaggccagatacctgcagagaaaggccgccaagatgtacaccgacaagctggagaccgtgccccccctgaacgagctgaccgaggtgcccggcgaggacaagaagaagaagaagaagaagaagaaggacagcgtggacaccgtggccatcaaggtggaggaggacgagaagaacgaggccaagaagaagaagggcgagaagtag

SEQ ID NO: 103164 - DNA, 1602 bp, synthetic construct
  misc_feature 1..1602: note = Description of Artificial Sequence: Synthetic coding sequence
  source 1..1602: mol_type = other DNA
atgaacgagagccccgaccccaccgacctggccggcgtgatcatcgagctgggccccaacgacagcccccagaccagcgagttcaagggcgccaccgaggaggcccccgccaaggagagcgtgctggccagactgagcaagttcgaggtggaggacgccgagaacgtggccagctacgacagcaagatcaagaagatcgtgcacagcatcgtgagcagcttcgccttcggcctgttcggcgtgttcctggtgctgctggacgtgaccctgatcctggccgacctgatcttcaccgacagcaagctgtacatccccctggagtacagaagcatcagcctggccatcgccctgttcttcctgatggacgtgctgctgagagtgttcgtggagagaagacagcagtacttcagcgacctgttcaacatcctggacaccgccatcatcgtgatcctgctgctggtggacgtggtgtacatcttcttcgacatcaagctgctgagaaacatccccagatggacccacctgctgagactgctgagactgatcatcctgctgagaatcttccacctgttccaccagaagagacagctggagaagctgatcagaagaagagtgagcgagaacaagagaagatacaccagagacggcttcgacctggacctgacctacgtgaccgagagaatcatcgccatgagcttccccagcagcggcagacagagcttctacagaaaccccatcaaggaggtggtgagattcctggacaagaagcacagaaaccactacagagtgtacaacctgtgcagcgagagagcctacgaccccaagcacttccacaacagagtggtgagaatcatgatcgacgaccacaacgtgcccaccctgcaccagatggtggtgttcaccaaggaggtgaacgagtggatggcccaggacctggagaacatcgtggccatccactgcaagggcggcaccgacagaaccggcaccatggtgtgcgccttcctgatcgccagcgagatctgcagcaccgccaaggagagcctgtactacttcggcgagagaagaaccgacaagacccacagcgagaagttccagggcgtgaagacccccagccagaagagatacgtggcctacttcgcccaggtgaagcacctgtacaactggaacctgccccccagaagaatcctgttcatcaagcacttcatcatctacagcatccccagatacgtgagagacctgaagatccagatcgagatggagaagaaggtggtgttcagcaccatcagcctgggcaagtgcagcgtgctggacaacatcaccaccgacaagatcctgatcgacgtgttcgacggcctgcccctgtacgacgacgtgaaggtgcagttcttctacagcaacctgcccacctactacgacaactgcagcttctacttctggctgcacaccagcttcatcgagaacaacagactgtacctgcccaagaacgagctggacaacctgcacaagcagaaggccagaagaatctaccccagcgacttcgccgtggagatcctgttcggcgagaagatgaccagcagcgacgtggtggccggcagcgactag

SEQ ID NO: 103165 - DNA, 1542 bp, synthetic construct
  misc_feature 1..1542: note = Description of Artificial Sequence: Synthetic coding sequence
  source 1..1542: mol_type = other DNA
atgaacgagagccccgaccccaccgacctggccggcgtgatcatcgagctgggccccaacgacagcccccagaccagcgagttcaagggcgccaccgaggaggcccccgccaaggagagcagcaagatcaagaagatcgtgcacagcatcgtgagcagcttcgccttcggcctgttcggcgtgttcctggtgctgctggacgtgaccctgatcctggccgacctgatcttcaccgacagcaagctgtacatccccctggagtacagaagcatcagcctggccatcgccctgttcttcctgatggacgtgctgctgagagtgttcgtggagagaagacagcagtacttcagcgacctgttcaacatcctggacaccgccatcatcgtgatcctgctgctggtggacgtggtgtacatcttcttcgacatcaagctgctgagaaacatccccagatggacccacctgctgagactgctgagactgatcatcctgctgagaatcttccacctgttccaccagaagagacagctggagaagctgatcagaagaagagtgagcgagaacaagagaagatacaccagagacggcttcgacctggacctgacctacgtgaccgagagaatcatcgccatgagcttccccagcagcggcagacagagcttctacagaaaccccatcaaggaggtggtgagattcctggacaagaagcacagaaaccactacagagtgtacaacctgtgcagcgagagagcctacgaccccaagcacttccacaacagagtggtgagaatcatgatcgacgaccacaacgtgcccaccctgcaccagatggtggtgttcaccaaggaggtgaacgagtggatggcccaggacctggagaacatcgtggccatccactgcaagggcggcaccgacagaaccggcaccatggtgtgcgccttcctgatcgccagcgagatctgcagcaccgccaaggagagcctgtactacttcggcgagagaagaaccgacaagacccacagcgagaagttccagggcgtgaagacccccagccagaagagatacgtggcctacttcgcccaggtgaagcacctgtacaactggaacctgccccccagaagaatcctgttcatcaagcacttcatcatctacagcatccccagatacgtgagagacctgaagatccagatcgagatggagaagaaggtggtgttcagcaccatcagcctgggcaagtgcagcgtgctggacaacatcaccaccgacaagatcctgatcgacgtgttcgacggcctgcccctgtacgacgacgtgaaggtgcagttcttctacagcaacctgcccacctactacgacaactgcagcttctacttctggctgcacaccagcttcatcgagaacaacagactgtacctgcccaagaacgagctggacaacctgcacaagcagaaggccagaagaatctaccccagcgacttcgccgtggagatcctgttcggcgagaagatgaccagcagcgacgtggtggccggcagcgactag

SEQ ID NO: 103166 - DNA, 1656 bp, synthetic construct
  misc_feature 1..1656: note = Description of Artificial Sequence: Synthetic coding sequence
  source 1..1656: mol_type = other DNA
atgaacgagagccccgaccccaccgacctggccggcgtgatcatcgagctgggccccaacgacagcccccagaccagcgagttcaagggcgccaccgaggaggcccccgccaaggagagcccccacaccagcgagttcaagggcgccgccagagtgagccccatcagcgagagcgtgctggccagactgagcaagttcgaggtggaggacgccgagaacgtggccagctacgacagcaagatcaagaagatcgtgcacagcatcgtgagcagcttcgccttcggcctgttcggcgtgttcctggtgctgctggacgtgaccctgatcctggccgacctgatcttcaccgacagcaagctgtacatccccctggagtacagaagcatcagcctggccatcgccctgttcttcctgatggacgtgctgctgagagtgttcgtggagagaagacagcagtacttcagcgacctgttcaacatcctggacaccgccatcatcgtgatcctgctgctggtggacgtggtgtacatcttcttcgacatcaagctgctgagaaacatccccagatggacccacctgctgagactgctgagactgatcatcctgctgagaatcttccacctgttccaccagaagagacagctggagaagctgatcagaagaagagtgagcgagaacaagagaagatacaccagagacggcttcgacctggacctgacctacgtgaccgagagaatcatcgccatgagcttccccagcagcggcagacagagcttctacagaaaccccatcaaggaggtggtgagattcctggacaagaagcacagaaaccactacagagtgtacaacctgtgcagcgagagagcctacgaccccaagcacttccacaacagagtggtgagaatcatgatcgacgaccacaacgtgcccaccctgcaccagatggtggtgttcaccaaggaggtgaacgagtggatggcccaggacctggagaacatcgtggccatccactgcaagggcggcaccgacagaaccggcaccatggtgtgcgccttcctgatcgccagcgagatctgcagcaccgccaaggagagcctgtactacttcggcgagagaagaaccgacaagacccacagcgagaagttccagggcgtgaagacccccagccagaagagatacgtggcctacttcgcccaggtgaagcacctgtacaactggaacctgccccccagaagaatcctgttcatcaagcacttcatcatctacagcatccccagatacgtgagagacctgaagatccagatcgagatggagaagaaggtggtgttcagcaccatcagcctgggcaagtgcagcgtgctggacaacatcaccaccgacaagatcctgatcgacgtgttcgacggcctgcccctgtacgacgacgtgaaggtgcagttcttctacagcaacctgcccacctactacgacaactgcagcttctacttctggctgcacaccagcttcatcgagaacaacagactgtacctgcccaagaacgagctggacaacctgcacaagcagaaggccagaagaatctaccccagcgacttcgccgtggagatcctgttcggcgagaagatgaccagcagcgacgtggtggccggcagcgactag

SEQ ID NO: 103167 - DNA, 1692 bp, synthetic construct
  misc_feature 1..1692: note = Description of Artificial Sequence: Synthetic coding sequence
  source 1..1692: mol_type = other DNA
atggagagagacagccacggcaacgccagccccgccagaacccccagcgccggcgccagccccgcccaggccagccccgccggcaccccccccggcagagccagccccgcccaggccagccccgcccaggccagccccgccggcaccccccccggcagagccagccccgcccaggccagccccgccggcaccccccccggcagagccagccccggcagagccagccccgcccaggccagccccgcccaggccagccccgccagagccagccccgccctggccagcctgagcagaagcagcagcggcagaagcagcagcgccagaagcgccagcgtgaccaccagccccaccagagtgtacctggtgagagccacccccgtgggcgccgtgcccatcagaagcagccccgccagaagcgcccccgccaccagagccaccagagagagccccggcaccagcctgcccaagttcacctggagagagggccagaagcagctgcccctgatcggctgcgtgctgctgctgatcgccctggtggtgagcctgatcatcctgttccagttctggcagggccacaccggcatcagatacaaggagcagagagagagctgccccaagcacgccgtgagatgcgacggcgtggtggactgcaagctgaagagcgacgagctgggctgcgtgagattcgactgggacaagagcctgctgaagatctacagcggcagcagccaccagtggctgcccatctgcagcagcaactggaacgacagctacagcgagaagacctgccagcagctgggcttcgagagcgcccacagaaccaccgaggtggcccacagagacttcgccaacagcttcagcatcctgagatacaacagcaccatccaggagagcctgcacagaagcgagtgccccagccagagatacatcagcctgcagtgcagccactgcggcctgagagccatgaccggcagaatcgtgggcggcgccctggccagcgacagcaagtggccctggcaggtgagcctgcacttcggcaccacccacatctgcggcggcaccctgatcgacgcccagtgggtgctgaccgccgcccactgcttcttcgtgaccagagagaaggtgctggagggctggaaggtgtacgccggcaccagcaacctgcaccagctgcccgaggccgccagcatcgccgagatcatcatcaacagcaactacaccgacgaggaggacgactacgacatcgccctgatgagactgagcaagcccctgaccctgagcgcccacatccaccccgcctgcctgcccatgcacggccagaccttcagcctgaacgagacctgctggatcaccggcttcggcaagaccagagagaccgacgacaagaccagccccttcctgagagaggtgcaggtgaacctgatcgacttcaagaagtgcaacgactacctggtgtacgacagctacctgacccccagaatgatgtgcgccggcgacctgagaggcggcagagacagctgccagggcgacagcggcggccccctggtgtgcgagcagaacaacagatggtacctggccggcgtgaccagctggggcaccggctgcggccagagaaacaagcccggcgtgtacaccaaggtgaccgaggtgctgccctggatctacagcaagatggagagcagcgccggctag

SEQ ID NO: 103168 - DNA, 1194 bp, synthetic construct
  misc_feature 1..1194: note = Description of Artificial Sequence: Synthetic coding sequence
  source 1..1194: mol_type = other DNA
atggaccccgacagcgaccagcccctgaacagcctggtgaaggtgatcctggacaagtactacttcctgtgcggccagcccctgcacttcatccccagaaagcagctgtgcgacggcgagctggactgccccctgggcgaggacgaggagcactgcgtgaagagcttccccgagggccccgccgtggccgtgagactgagcaaggacagaagcaccctgcaggtgctggacagcgccaccggcaactggttcagcgcctgcttcgacaacttcaccgaggccctggccgagaccgcctgcagacagatgggctacagcagcaagcccaccttcagagccgtggagatcggccccgaccaggacctggacgtggtggagatcaccgagaacagccaggagctgagaatgagaaacagcagcggcccctgcctgagcggcagcctggtgagcctgcactgcctggcctgcggcaagagcctgaagacccccagagtggtgggcgtggaggaggccagcgtggacagctggccctggcaggtgagcatccagtacgacaagcagcacgtgtgcggcggcagcatcctggacccccactgggtgctgaccgccgcccactgcttcagaaagcacaccgacgtgttcaactggaaggtgagagccggcagcgacaagctgggcagcttccccagcctggccgtggccaagatcatcatcatcgagttcaaccccatgtaccccaaggacaacgacatcgccctgatgaagctgcagttccccctgaccttcagcggcaccgtgagacccatctgcctgcccttcttcgacgaggagctgacccccgccacccccctgtggatcatcggctggggcttcaccaagcagaacggcggcaagatgagcgacatcctgctgcaggccagcgtgcaggtgatcgacagcaccagatgcaacgccgacgacgcctaccagggcgaggtgaccgagaagatgatgtgcgccggcatccccgagggcggcgtggacacctgccagggcgacagcggcggccccctgatgtaccagagcgaccagtggcacgtggtgggcatcgtgagctggggctacggctgcggcggccccagcacccccggcgtgtacaccaaggtgagcgcctacctgaactggatctacaacgtgtggaaggccgagctgtag

SEQ ID NO: 103169 - DNA, 1266 bp, synthetic construct
  misc_feature 1..1266: note = Description of Artificial Sequence: Synthetic coding sequence
  source 1..1266: mol_type = other DNA
atgatgtacagaaccgtgggcttcggcaccagaagcagaaacctgaagccctggatgatcgccgtgctgatcgtgctgagcctgaccgtggtggccgtgaccatcggcctgctggtgcacttcctggtgttcgaccagaagaaggagtactaccacggcagcttcaagatcctggacccccagatcaacaacaacttcggccagagcaacacctaccagctgaaggacctgagagagaccaccgagaacctggtgagccaggtggacgagatcttcatcgacagcgcctggaagaagaactacatcaagaaccaggtggtgagactgacccccgaggaggacggcgtgaaggtggacgtgatcatggtgttccagttccccagcaccgagcagagagccgtgagagagaagaagatccagagcatcctgaaccagaagatcagaaacctgagagccctgcccatcaacgccagcagcgtgcaggtgaacgccatgagcagcagcaccggcgagctgaccgtgcaggccagctgcggcaagagagtggtgcccctgaacgtgaacagaatcgccagcggcgtgatcgcccccaaggccgcctggccctggcaggccagcctgcagtacgacaacatccaccagtgcggcgccaccctgatcagcaacacctggctggtgaccgccgcccactgcttccagaagtacaagaacccccaccagtggaccgtgagcttcggcaccaagatcaacccccccctgatgaagagaaacgtgagaagattcatcatccacgagaagtacagaagcgccgccagagagtacgacatcgccgtggtgcaggtgagcagcagagtgaccttcagcgacgacatcagacagatctgcctgcccgaggccagcgccagcttccagcccaacctgaccgtgcacatcaccggcttcggcgccctgtactacggcggcgagagccagaacgacctgagagaggccagagtgaagatcatcagcgacgacgtgtgcaagcagccccaggtgtacggcaacgacatcaagcccggcatgttctgcgccggctacatggagggcatctacgacgcctgcagaggcgacagcggcggccccctggtgaccagagacctgaaggacacctggtacctgatcggcatcgtgagctggggcgacaactgcggccagaaggacaagcccggcgtgtacacccaggtgacctactacagaaactggatcgccagcaagaccggcatctag

SEQ ID NO: 103170 - DNA, 1257 bp, synthetic construct
  misc_feature 1..1257: note = Description of Artificial Sequence: Synthetic coding sequence
  source 1..1257: mol_type = other DNA
atgatgtacagaaccgtgggcttcggcaccagaagcagaaacctgaagccctggatgatcgccgtgctgatcgtgctgagcctgaccgtggtggccgtgaccatcggcctgctggtgcacttcctggtgttcgaccagaagaaggagtactaccacggcagcttcaagatcctggacccccagatcaacaacaacttcggccagagcaacacctaccagctgaaggacctgagagagaccaccgagaacctggtggacgagatcttcatcgacagcgcctggaagaagaactacatcaagaaccaggtggtgagactgacccccgaggaggacggcgtgaaggtggacgtgatcatggtgttccagttccccagcaccgagcagagagccgtgagagagaagaagatccagagcatcctgaaccagaagatcagaaacctgagagccctgcccatcaacgccagcagcgtgcaggtgaacgccatgagcagcagcaccggcgagctgaccgtgcaggccagctgcggcaagagagtggtgcccctgaacgtgaacagaatcgccagcggcgtgatcgcccccaaggccgcctggccctggcaggccagcctgcagtacgacaacatccaccagtgcggcgccaccctgatcagcaacacctggctggtgaccgccgcccactgcttccagaagtacaagaacccccaccagtggaccgtgagcttcggcaccaagatcaacccccccctgatgaagagaaacgtgagaagattcatcatccacgagaagtacagaagcgccgccagagagtacgacatcgccgtggtgcaggtgagcagcagagtgaccttcagcgacgacatcagacagatctgcctgcccgaggccagcgccagcttccagcccaacctgaccgtgcacatcaccggcttcggcgccctgtactacggcggcgagagccagaacgacctgagagaggccagagtgaagatcatcagcgacgacgtgtgcaagcagccccaggtgtacggcaacgacatcaagcccggcatgttctgcgccggctacatggagggcatctacgacgcctgcagaggcgacagcggcggccccctggtgaccagagacctgaaggacacctggtacctgatcggcatcgtgagctggggcgacaactgcggccagaaggacaagcccggcgtgtacacccaggtgacctactacagaaactggatcgccagcaagaccggcatctag

SEQ ID NO: 103171 - DNA, 1254 bp, synthetic construct
  misc_feature 1..1254: note = Description of Artificial Sequence: Synthetic coding sequence
  source 1..1254: mol_type = other DNA
atgtacagaaccgtgggcttcggcaccagaagcagaaacctgaagccctggatgatcgccgtgctgatcgtgctgagcctgaccgtggtggccgtgaccatcggcctgctggtgcacttcctggtgttcgaccagaagaaggagtactaccacggcagcttcaagatcctggacccccagatcaacaacaacttcggccagagcaacacctaccagctgaaggacctgagagagaccaccgagaacctggtggacgagatcttcatcgacagcgcctggaagaagaactacatcaagaaccaggtggtgagactgacccccgaggaggacggcgtgaaggtggacgtgatcatggtgttccagttccccagcaccgagcagagagccgtgagagagaagaagatccagagcatcctgaaccagaagatcagaaacctgagagccctgcccatcaacgccagcagcgtgcaggtgaacgccatgagcagcagcaccggcgagctgaccgtgcaggccagctgcggcaagagagtggtgcccctgaacgtgaacagaatcgccagcggcgtgatcgcccccaaggccgcctggccctggcaggccagcctgcagtacgacaacatccaccagtgcggcgccaccctgatcagcaacacctggctggtgaccgccgcccactgcttccagaagtacaagaacccccaccagtggaccgtgagcttcggcaccaagatcaacccccccctgatgaagagaaacgtgagaagattcatcatccacgagaagtacagaagcgccgccagagagtacgacatcgccgtggtgcaggtgagcagcagagtgaccttcagcgacgacatcagacagatctgcctgcccgaggccagcgccagcttccagcccaacctgaccgtgcacatcaccggcttcggcgccctgtactacggcggcgagagccagaacgacctgagagaggccagagtgaagatcatcagcgacgacgtgtgcaagcagccccaggtgtacggcaacgacatcaagcccggcatgttctgcgccggctacatggagggcatctacgacgcctgcagaggcgacagcggcggccccctggtgaccagagacctgaaggacacctggtacctgatcggcatcgtgagctggggcgacaactgcggccagaaggacaagcccggcgtgtacacccaggtgacctactacagaaactggatcgccagcaagaccggcatctag

SEQ ID NO: 103172 - DNA, 1689 bp, synthetic construct
  misc_feature 1..1689: note = Description of Artificial Sequence: Synthetic coding sequence
  source 1..1689: mol_type = other DNA
atggagagagacagccacggcaacgccagccccgccagaacccccagcgccggcgccagccccgcccaggccagccccgccggcaccccccccggcagagccagccccgcccaggccagccccgcccaggccagccccgccggcaccccccccggcagagccagccccgcccaggccagccccgccggcaccccccccggcagagccagccccggcagagccagccccctgcaggccagccccgccagagccagccccgccctggccagcctgagcagaagcagcagcggcagaagcagcagcgccagaagcgccagcgtgaccaccagccccaccagagtgtacctggtgagagccacccccgtgggcgccgtgcccatcagaagcagccccgccagaagcgcccccgccaccagagccaccagagagagccccggcaccagcctgcccaagttcacctggagagagggccagaagcagctgcccctgatcggctgcgtgctgctgctgatcgccctggtggtgagcctgatcatcctgttccagttctggcagggccacaccggcatcagatacaaggagcagagagagagctgccccaagcacgccgtgagatgcgacggcgtggtggactgcaagctgaagagcgacgagctgggctgcgtgagattcgactgggacaagagcctgctgaagatctacagcggcagcagccaccagtggctgcccatctgcagcagcaactggaacgacagctacagcgagaagacctgccagcagctgggcttcgagagcgcccacagaaccaccgaggtggcccacagagacttcgccaacagcttcagcatcctgagatacaacagcaccatccaggagagcctgcacagaagcgagtgccccagccagagatacatcagcctgcagtgcagccactgcggcctgagagccatgaccggcagaatcgtgggcggcgccctggccagcgacagcaagtggccctggcaggtgagcctgcacttcggcaccacccacatctgcggcggcaccctgatcgacgcccagtgggtgctgaccgccgcccactgcttcttcgtgaccagagagaaggtgctggagggctggaaggtgtacgccggcaccagcaacctgcaccagctgcccgaggccgccagcatcgccgagatcatcatcaacagcaactacaccgacgaggaggacgactacgacatcgccctgatgagactgagcaagcccctgaccctgagcgcccacatccaccccgcctgcctgcccatgcacggccagaccttcagcctgaacgagacctgctggatcaccggcttcggcaagaccagagagaccgacgacaagaccagccccttcctgagagaggtgcaggtgaacctgatcgacttcaagaagtgcaacgactacctggtgtacgacagctacctgacccccagaatgatgtgcgccggcgacctgagaggcggcagagacagctgccagggcgacagcggcggccccctggtgtgcgagcagaacaacagatggtacctggccggcgtgaccagctggggcaccggctgcggccagagaaacaagcccggcgtgtacaccaaggtgaccgaggtgctgccctggatctacagcaagatggagagcgaggtgagattcagaaagagctag

SEQ ID NO: 103173 - DNA, 1761 bp, synthetic construct
  misc_feature 1..1761: note = Description of Artificial Sequence: Synthetic coding sequence
  source 1..1761: mol_type = other DNA
atggagagagacagccacggcaacgccagccccgccagaacccccagcgccggcgccagccccgcccaggccagccccgccggcaccccccccggcagagccagccccgcccaggccagccccgcccaggccagccccgccggcaccccccccggcagagccagccccgcccaggccagccccgccggcaccccccccggcagagccagccccggcagagccagccccgcccaggccagccccgcccaggccagccccgccagagccagccccgccctggccagcctgagcagaagcagcagcggcagaagcagcagcgccagaagcgccagcgtgaccaccagccccaccagagtgtacctggtgagagccacccccgtgggcgccgtgcccatcagaagcagccccgccagaagcgcccccgccaccagagccaccagagagagccccggcaccagcctgcccaagttcacctggagagagggccagaagcagctgcccctgatcggctgcgtgctgctgctgatcgccctggtggtgagcctgatcatcctgttccagttctggcagggccacaccggcatcagatacaaggagcagagagagagctgccccaagcacgccgtgagatgcgacggcgtggtggactgcaagctgaagagcgacgagctgggctgcgtgagattcgactgggacaagagcctgctgaagatctacagcggcagcagccaccagtggctgcccatctgcagcagcaactggaacgacagctacagcgagaagacctgccagcagctgggcttcgagagcgcccacagaaccaccgaggtggcccacagagacttcgccaacagcttcagcatcctgagatacaacagcaccatccaggagagcctgcacagaagcgagtgccccagccagagatacatcagcctgcagtgcagccactgcggcctgagagccatgaccggcagaatcgtgggcggcgccctggccagcgacagcaagtggccctggcaggtgagcctgcacttcggcaccacccacatctgcggcggcaccctgatcgacgcccagtgggtgctgaccgccgcccactgcttcttcgtgaccagagagaaggtgctggagggctggaaggtgtacgccggcaccagcaacctgcaccagctgcccgaggccgccagcatcgccgagatcatcatcaacagcaactacaccgacgaggaggacgactacgacatcgccctgatgagactgagcaagcccctgaccctgagcgcccacatccaccccgcctgcctgcccatgcacggccagaccttcagcctgaacgagacctgctggatcaccggcttcggcaagaccagagagaccgacgacaagaccagccccttcctgagagaggtgcaggtgaacctgatcgacttcaagaagtgcaacgactacctggtgtacgacagctacctgacccccagaatgatgtgcgccggcgacctgagaggcggcagagacagctgccagggcgacagcggcggccccctggtgtgcgagcagaacaacagatggtacctggccggcgtgaccagctggggcaccggctgcggccagagaaacaagcccggcgtgtacaccaaggtgaccgaggtgctgccctggatctacagcaagatggaggtgagaagcctgcagcaggacaccgcccccagcagactgggcaccagcagcggcggcgaccccggcggcgcccccagactgtag

SEQ ID NO: 103174 - DNA, 1704 bp, synthetic construct
  misc_feature 1..1704: note = Description of Artificial Sequence: Synthetic coding sequence
  source 1..1704: mol_type = other DNA
atggagagagacagccacggcaacgccagccccgccagaacccccagcgccggcgccagccccgcccaggccagccccgccggcaccccccccggcagagccagccccgcccaggccagccccgcccaggccagccccgccggcaccccccccggcagagccagccccgcccaggccagccccgccggcaccccccccggcagagccagccccggcagagccagccccgcccaggccagccccgcccaggccagccccgccagagccagccccgccctggccagcctgagcagaagcagcagcggcagaagcagcagcgccagaagcgccagcgtgaccaccagccccaccagagtgtacctggtgagagccacccccgtgggcgccgtgcccatcagaagcagccccgccagaagcgcccccgccaccagagccaccagagagagccccggcaccagcctgcccaagttcacctggagagagggccagaagcagctgcccctgatcggctgcgtgctgctgctgatcgccctggtggtgagcctgatcatcctgttccagttctggcagggccacaccggcatcagatacaaggagcagagagagagctgccccaagcacgccgtgagatgcgacggcgtggtggactgcaagctgaagagcgacgagctgggctgcgtgagattcgactgggacaagagcctgctgaagatctacagcggcagcagccaccagtggctgcccatctgcagcagcaactggaacgacagctacagcgagaagacctgccagcagctgggcttcgagagcgcccacagaaccaccgaggtggcccacagagacttcgccaacagcttcagcatcctgagatacaacagcaccatccaggagagcctgcacagaagcgagtgccccagccagagatacatcagcctgcagtgcagccactgcggcctgagagccatgaccggcagaatcgtgggcggcgccctggccagcgacagcaagtggccctggcaggtgagcctgcacttcggcaccacccacatctgcggcggcaccctgatcgacgcccagtgggtgctgaccgccgcccactgcttcttcgtgaccagagagaaggtgctggagggctggaaggtgtacgccggcaccagcaacctgcaccagctgcccgaggccgccagcatcgccgagatcatcatcaacagcaactacaccgacgaggaggacgactacgacatcgccctgatgagactgagcaagcccctgaccctgagcgcccacatccaccccgcctgcctgcccatgcacggccagaccttcagcctgaacgagacctgctggatcaccggcttcggcaagaccagagagaccgacgacaagaccagccccttcctgagagaggtgcaggtgaacctgatcgacttcaagaagtgcaacgactacctggtgtacgacagctacctgacccccagaatgatgtgcgccggcgacctgagaggcggcagagacagctgccagggcgacagcggcggccccctggtgtgcgagcagaacaacagatggtacctggccggcgtgaccagctggggcaccggctgcggccagagaaacaagcccggcgtgtacaccaaggtgaccgaggtgctgccctggatctacagcaagatggagagcgaggtgagattcagaaagagctag

SEQ ID NO: 103175 - DNA, 1476 bp, synthetic construct
  misc_feature 1..1476: note = Description of Artificial Sequence: Synthetic coding sequence
  source 1..1476: mol_type = other DNA
atggagagagacagccacggcaacgccagccccgccagaacccccagcgccggcgccagccccgcccaggccagccccgccggcaccccccccggcagagccagccccgcccaggccagccccgcccaggccagccccgccggcaccccccccggcagagccagccccgcccaggccagccccgccggcaccccccccggcagagccagccccggcagagccagccccgcccaggccagccccgcccaggccagccccgccagagccagccccgccctggccagcctgagcagaagcagcagcggcagaagcagcagcgccagaagcgccagcgtgaccaccagccccaccagagtgtacctggtgagagccacccccgtgggcgccgtgcccatcagaagcagccccgccagaagcgcccccgccaccagagccaccagagagagccccggcaccagcctgcccaagttcacctggagagagggccagaagcagctgcccctgatcggctgcgtgctgctgctgatcgccctggtggtgagcctgatcatcctgttccagttctggcagggccacaccggcatcagatacaaggagcagagagagagctgccccaagcacgccgtgagatgcgacggcgtggtggactgcaagctgaagagcgacgagctgggctgcgtgagattcgactgggacaagagcctgctgaagatctacagcggcagcagccaccagtggctgcccatctgcagcagcaactggaacgacagctacagcgagaagacctgccagcagctgggcttcgagagcgcccacagaaccaccgaggtggcccacagagacttcgccaacagcttcagcatcctgagatacaacagcaccatccaggagagcctgcacagaagcgagtgccccagccagagatacatcagcctgcagtgcagccactgcggcctgagagccatgaccggcagaatcgtgggcggcgccctggccagcgacagcaagtggccctggcaggtgagcctgcacttcggcaccacccacatctgcggcggcaccctgatcgacgcccagtgggtgctgaccgccgcccactgcttcttcgtgaccagagagaaggtgctggagggctggaaggtgtacgccggcaccagcaacctgcaccagctgcccgaggccgccagcatcgccgagatcatcatcaacagcaactacaccgacgaggaggacgactacgacatcgccctgatgagactgagcaagcccctgaccctgagcggcgagggcatctgcacccccagaagccccgccccccagccccagcaccccctgcagcccagccacctgagcgccagcgtgaacagctaccccggccccaaggccagcgccggccagaagagcaagaccctgaaggacccctacatggagcacttctgcttcatcatcagagagaccgaggcccagggcctgtag

SEQ ID NO: 103176 - DNA, 1599 bp, synthetic construct
  misc_feature 1..1599: note = Description of Artificial Sequence: Synthetic coding sequence
  source 1..1599: mol_type = other DNA
atggagagagacagccacggcaacgccagccccgccagaacccccagcgccggcgccagccccgcccaggccagccccgccggcaccccccccggcagagccagccccgcccaggccagccccgcccaggccagccccgccggcaccccccccggcagagccagccccgcccaggccagccccgccggcaccccccccggcagagccagccccggcagagccagccccgcccaggccagccccgcccaggccagccccgccagagccagccccgccctggccagcctgagcagaagcagcagcggcagaagcagcagcgccagaagcgccagcgtgaccaccagccccaccagagtgtacctggtgagagccacccccgtgggcgccgtgcccatcagaagcagccccgccagaagcgcccccgccaccagagccaccagagagagccccgtgcagttctggcagggccacaccggcatcagatacaaggagcagagagagagctgccccaagcacgccgtgagatgcgacggcgtggtggactgcaagctgaagagcgacgagctgggctgcgtgagattcgactgggacaagagcctgctgaagatctacagcggcagcagccaccagtggctgcccatctgcagcagcaactggaacgacagctacagcgagaagacctgccagcagctgggcttcgagagcgcccacagaaccaccgaggtggcccacagagacttcgccaacagcttcagcatcctgagatacaacagcaccatccaggagagcctgcacagaagcgagtgccccagccagagatacatcagcctgcagtgcagccactgcggcctgagagccatgaccggcagaatcgtgggcggcgccctggccagcgacagcaagtggccctggcaggtgagcctgcacttcggcaccacccacatctgcggcggcaccctgatcgacgcccagtgggtgctgaccgccgcccactgcttcttcgtgaccagagagaaggtgctggagggctggaaggtgtacgccggcaccagcaacctgcaccagctgcccgaggccgccagcatcgccgagatcatcatcaacagcaactacaccgacgaggaggacgactacgacatcgccctgatgagactgagcaagcccctgaccctgagcgcccacatccaccccgcctgcctgcccatgcacggccagaccttcagcctgaacgagacctgctggatcaccggcttcggcaagaccagagagaccgacgacaagaccagccccttcctgagagaggtgcaggtgaacctgatcgacttcaagaagtgcaacgactacctggtgtacgacagctacctgacccccagaatgatgtgcgccggcgacctgagaggcggcagagacagctgccagggcgacagcggcggccccctggtgtgcgagcagaacaacagatggtacctggccggcgtgaccagctggggcaccggctgcggccagagaaacaagcccggcgtgtacaccaaggtgaccgaggtgctgccctggatctacagcaagatggagagcgaggtgagattcagaaagagctag

SEQ ID NO: 103177 - DNA, 1365 bp, synthetic construct
  misc_feature 1..1365: note = Description of Artificial Sequence: Synthetic coding sequence
  source 1..1365: mol_type = other DNA
atgggcgagaacgacccccccgccgtggaggcccccttcagcttcagaagcctgttcggcctggacgacctgaagatcagccccgtggcccccgacgccgacgccgtggccgcccagatcctgagcctgctgcccctgaagttcttccccatcatcgtgatcggcatcatcgccctgatcctggccctggccatcggcctgggcatccacttcgactgcagcggcaagtacagatgcagaagcagcttcaagtgcatcgagctgatcgccagatgcgacggcgtgagcgactgcaaggacggcgaggacgagtacagatgcgtgagagtgggcggccagaacgccgtgctgcaggtgttcaccgccgccagctggaagaccatgtgcagcgacgactggaagggccactacgccaacgtggcctgcgcccagctgggcttccccagctacgtgagcagcgacaacctgagagtgagcagcctggagggccagttcagagaggagttcgtgagcatcgaccacctgctgcccgacgacaaggtgaccgccctgcaccacagcgtgtacgtgagagagggctgcgccagcggccacgtggtgaccctgcagtgcaccgcctgcggccacagaagaggctacagcagcagaatcgtgggcggcaacatgagcctgctgagccagtggccctggcaggccagcctgcagttccagggctaccacctgtgcggcggcagcgtgatcacccccctgtggatcatcaccgccgcccactgcgtgtacgacctgtacctgcccaagagctggaccatccaggtgggcctggtgagcctgctggacaaccccgcccccagccacctggtggagaagatcgtgtaccacagcaagtacaagcccaagagactgggcaacgacatcgccctgatgaagctggccggccccctgaccttcaacgagatgatccagcccgtgtgcctgcccaacagcgaggagaacttccccgacggcaaggtgtgctggaccagcggctggggcgccaccgaggacggcgccggcgacgccagccccgtgctgaaccacgccgccgtgcccctgatcagcaacaagatctgcaaccacagagacgtgtacggcggcatcatcagccccagcatgctgtgcgccggctacctgaccggcggcgtggacagctgccagggcgacagcggcggccccctggtgtgccaggagagaagactgtggaagctggtgggcgccaccagcttcggcatcggctgcgccgaggtgaacaagcccggcgtgtacaccagagtgaccagcttcctggactggatccacgagcagatggagagagacctgaagacctag

SEQ ID NO: 103178 - DNA, 1617 bp, synthetic construct
  misc_feature 1..1617: note = Description of Artificial Sequence: Synthetic coding sequence
  source 1..1617: mol_type = other DNA
atgcaggccgtgggccccaagcccctgcccaccctgctgtgcggcggcagaaccggccacagaaccgccagagtgctgagcttcctgatcagaagctgcccctgcgagcccggcaagggctgcgtgtacggcaagcccgtgaccctgtggcccaccatcagcagcgtggtgcccagcaccttcctgggcctgggcaactacgaggtggaggtggaggccgagcccgacgtgagaggccccgagatcgtgaccatgggcgagaacgacccccccgccgtggaggcccccttcagcttcagaagcctgttcggcctggacgacctgaagatcagccccgtggcccccgacgccgacgccgtggccgcccagatcctgagcctgctgcccctgaagttcttccccatcatcgtgatcggcatcatcgccctgatcctggccctggccatcggcctgggcatccacttcgactgcagcggcaagtacagatgcagaagcagcttcaagtgcatcgagctgatcgccagatgcgacggcgtgagcgactgcaaggacggcgaggacgagtacagatgcgtgagagtgggcggccagaacgccgtgctgcaggtgttcaccgccgccagctggaagaccatgtgcagcgacgactggaagggccactacgccaacgtggcctgcgcccagctgggcttccccagctacgtgagcagcgacaacctgagagtgagcagcctggagggccagttcagagaggagttcgtgagcatcgaccacctgctgcccgacgacaaggtgaccgccctgcaccacagcgtgtacgtgagagagggctgcgccagcggccacgtggtgaccctgcagtgcaccgcctgcggccacagaagaggctacagcagcagaatcgtgggcggcaacatgagcctgctgagccagtggccctggcaggccagcctgcagttccagggctaccacctgtgcggcggcagcgtgatcacccccctgtggatcatcaccgccgcccactgcgtgtacgacctgtacctgcccaagagctggaccatccaggtgggcctggtgagcctgctggacaaccccgcccccagccacctggtggagaagatcgtgtaccacagcaagtacaagcccaagagactgggcaacgacatcgccctgatgaagctggccggccccctgaccttcaacgagatgatccagcccgtgtgcctgcccaacagcgaggagaacttccccgacggcaaggtgtgctggaccagcggctggggcgccaccgaggacggcgccggcgacgccagccccgtgctgaaccacgccgccgtgcccctgatcagcaacaagatctgcaaccacagagacgtgtacggcggcatcatcagccccagcatgctgtgcgccggctacctgaccggcggcgtggacagctgccagggcgacagcggcggccccctggtgtgccaggagagaagactgtggaagctggtgggcgccaccagcttcggcatcggctgcgccgaggtgaacaagcccggcgtgtacaccagagtgaccagcttcctggactggatccacgagcagatggagagagacctgaagacctag

SEQ ID NO: 103179 - DNA, 1035 bp, synthetic construct
  misc_feature 1..1035: note = Description of Artificial Sequence: Synthetic coding sequence
  source 1..1035: mol_type = other DNA
atgggcgagaacgacccccccgccgtggaggcccccttcagcttcagaagcctgttcggcctggacgacctgaagatcagccccgtggcccccgacgccgacgccgtggccgcccagatcctgagcctgctgcccctgaagttcttccccatcatcgtgatcggcatcatcgccctgatcctggccctggccatcggcctgggcatccacttcgactgcagcggcaagtacagatgcagaagcagcttcaagtgcatcgagctgatcgccagatgcgacggcgtgagcgactgcaaggacggcgaggacgagtacagatgcgtgagagtgggcggccagaacgccgtgctgcaggtgttcaccgccgccagctggaagaccatgtgcagcgacgactggaagggccactacgccaacgtggcctgcgcccagctgggcttccccagctacgtgagcagcgacaacctgagagtgagcagcctggagggccagttcagagaggagttcgtgagcatcgaccacctgctgcccgacgacaaggtgaccgccctgcaccacagcgtgtacgtgagagagggctgcgccagcggccacgtggtgaccctgcagtgcaccgcctgcggccacagaagaggctacagcagcagaatcgtgggcggcaacatgagcctgctgagccagtggccctggcaggccagcctgcagttccagggctaccacctgtgcggcggcagcgtgatcacccccctgtggatcatcaccgccgcccactgcgtgtacgacctgtacctgcccaagagctggaccatccaggtgggcctggtgagcctgctggacaaccccgcccccagccacctggtggagaagatcgtgtaccacagcaagtacaagcccaagagactgggcaacgacatcgccctgatgaagctggccggccccctgaccttcaacggcaccagcggcagcctgtgcggcagcgccgccctgcccctgttccaggaggacctgcagctgctgatcgaggccttcctgtag

SEQ ID NO: 103180 - DNA, 1362 bp, synthetic construct
  misc_feature 1..1362: note = Description of Artificial Sequence: Synthetic coding sequence
  source 1..1362: mol_type = other DNA
atgggcgagaacgacccccccgccgtggaggcccccttcagcttcagaagcctgttcggcctggacgacctgaagatcagccccgtggcccccgacgccgacgccgtggccgcccagatcctgagcctgctgcccctgaagttcttccccatcatcgtgatcggcatcatcgccctgatcctggccctggccatcggcctgggcatccacttcgactgcagcggcaagtacagatgcagaagcagcttcaagtgcatcgagctgatcgccagatgcgacggcgtgagcgactgcaaggacggcgaggacgagtacagatgcgtgagagtgggcggccagaacgccgtgctgcaggtgttcaccgccgccagctggaagaccatgtgcagcgacgactggaagggccactacgccaacgtggcctgcgcccagctgggcttccccagctacgtgagcagcgacaacctgagagtgagcagcctggagggccagttcagagaggagttcgtgagcatcgaccacctgctgcccgacgacaaggtgaccgccctgcaccacagcgtgtacgtgagagagggctgcgccagcggccacgtggtgaccctgcagtgcaccgcctgcggccacagaagaggctacagcagcagaatcgtgggcggcaacatgagcctgctgagccagtggccctggcaggccagcctgcagttccagggctaccacctgtgcggcggcagcgtgatcacccccctgtggatcatcaccgccgcccactgcgtgtacgacctgtacctgcccaagagctggaccatccaggtgggcctggtgagcctgctggacaaccccgcccccagccacctggtggagaagatcgtgtaccacagcaagtacaagcccaagagactgggcaacgacatcgccctgatgaagctggccggccccctgaccttcaacgagatgatccagcccgtgtgcctgcccaacagcgaggagaacttccccgacggcaaggtgtgctggaccagcggctggggcgccaccgaggacggcggcgacgccagccccgtgctgaaccacgccgccgtgcccctgatcagcaacaagatctgcaaccacagagacgtgtacggcggcatcatcagccccagcatgctgtgcgccggctacctgaccggcggcgtggacagctgccagggcgacagcggcggccccctggtgtgccaggagagaagactgtggaagctggtgggcgccaccagcttcggcatcggctgcgccgaggtgaacaagcccggcgtgtacaccagagtgaccagcttcctggactggatccacgagcagatggagagagacctgaagacctag

SEQ ID NO: 103181 - DNA, 1314 bp, synthetic construct
  misc_feature 1..1314: note = Description of Artificial Sequence: Synthetic coding sequence
  source 1..1314: mol_type = other DNA
atgctgcaggaccccgacagcgaccagcccctgaacagcctggacgtgaagcccctgagaaagcccagaatccccatggagaccttcagaaaggtgggcatccccatcatcatcgccctgctgagcctggccagcatcatcatcgtggtggtgctgatcaaggtgatcctggacaagtactacttcctgtgcggccagcccctgcacttcatccccagaaagcagctgtgcgacggcgagctggactgccccctgggcgaggacgaggagcactgcgtgaagagcttccccgagggccccgccgtggccgtgagactgagcaaggacagaagcaccctgcaggtgctggacagcgccaccggcaactggttcagcgcctgcttcgacaacttcaccgaggccctggccgagaccgcctgcagacagatgggctacagcagcaagcccaccttcagagccgtggagatcggccccgaccaggacctggacgtggtggagatcaccgagaacagccaggagctgagaatgagaaacagcagcggcccctgcctgagcggcagcctggtgagcctgcactgcctggcctgcggcaagagcctgaagacccccagagtggtgggcgtggaggaggccagcgtggacagctggccctggcaggtgagcatccagtacgacaagcagcacgtgtgcggcggcagcatcctggacccccactgggtgctgaccgccgcccactgcttcagaaagcacaccgacgtgttcaactggaaggtgagagccggcagcgacaagctgggcagcttccccagcctggccgtggccaagatcatcatcatcgagttcaaccccatgtaccccaaggacaacgacatcgccctgatgaagctgcagttccccctgaccttcagcggcaccgtgagacccatctgcctgcccttcttcgacgaggagctgacccccgccacccccctgtggatcatcggctggggcttcaccaagcagaacggcggcaagatgagcgacatcctgctgcaggccagcgtgcaggtgatcgacagcaccagatgcaacgccgacgacgcctaccagggcgaggtgaccgagaagatgatgtgcgccggcatccccgagggcggcgtggacacctgccagggcgacagcggcggccccctgatgtaccagagcgaccagtggcacgtggtgggcatcgtgagctggggctacggctgcggcggccccagcacccccggcgtgtacaccaaggtgagcgcctacctgaactggatctacaacgtgtggaaggccgagctgtag

SEQ ID NO: 103182 - DNA, 1299 bp, synthetic construct
  misc_feature 1..1299: note = Description of Artificial Sequence: Synthetic coding sequence
  source 1..1299: mol_type = other DNA
atgctgcaggaccccgacagcgaccagcccctgaacagcctggacgtgaagcccctgagaaagcccagaatccccatggagaccttcagaaaggtgggcatccccatcatcatcgccctgctgagcctggccagcatcatcatcgtggtggtgctgatcaaggtgatcctggacaagtactacttcctgtgcggccagcccctgcacttcatccccagaaagcagctgtgcgacggcgagctggactgccccctgggcgaggacgaggagcactgcgtgaagagcttccccgagggccccgccgtggccgtgagactgagcaaggacagaagcaccctgcaggtgctggacagcgccaccggcaactggttcagcgcctgcttcgacaacttcaccgaggccctggccgagaccgcctgcagacagatgggctacagcagagccgtggagatcggccccgaccaggacctggacgtggtggagatcaccgagaacagccaggagctgagaatgagaaacagcagcggcccctgcctgagcggcagcctggtgagcctgcactgcctggcctgcggcaagagcctgaagacccccagagtggtgggcgtggaggaggccagcgtggacagctggccctggcaggtgagcatccagtacgacaagcagcacgtgtgcggcggcagcatcctggacccccactgggtgctgaccgccgcccactgcttcagaaagcacaccgacgtgttcaactggaaggtgagagccggcagcgacaagctgggcagcttccccagcctggccgtggccaagatcatcatcatcgagttcaaccccatgtaccccaaggacaacgacatcgccctgatgaagctgcagttccccctgaccttcagcggcaccgtgagacccatctgcctgcccttcttcgacgaggagctgacccccgccacccccctgtggatcatcggctggggcttcaccaagcagaacggcggcaagatgagcgacatcctgctgcaggccagcgtgcaggtgatcgacagcaccagatgcaacgccgacgacgcctaccagggcgaggtgaccgagaagatgatgtgcgccggcatccccgagggcggcgtggacacctgccagggcgacagcggcggccccctgatgtaccagagcgaccagtggcacgtggtgggcatcgtgagctggggctacggctgcggcggccccagcacccccggcgtgtacaccaaggtgagcgcctacctgaactggatctacaacgtgtggaaggccgagctgtag

SEQ ID NO: 103183 - DNA, 1308 bp, synthetic construct
  misc_feature 1..1308: note = Description of Artificial Sequence: Synthetic coding sequence
  source 1..1308: mol_type = other DNA
atggaccccgacagcgaccagcccctgaacagcctggacgtgaagcccctgagaaagcccagaatccccatggagaccttcagaaaggtgggcatccccatcatcatcgccctgctgagcctggccagcatcatcatcgtggtggtgctgatcaaggtgatcctggacaagtactacttcctgtgcggccagcccctgcacttcatccccagaaagcagctgtgcgacggcgagctggactgccccctgggcgaggacgaggagcactgcgtgaagagcttccccgagggccccgccgtggccgtgagactgagcaaggacagaagcaccctgcaggtgctggacagcgccaccggcaactggttcagcgcctgcttcgacaacttcaccgaggccctggccgagaccgcctgcagacagatgggctacagcagcaagcccaccttcagagccgtggagatcggccccgaccaggacctggacgtggtggagatcaccgagaacagccaggagctgagaatgagaaacagcagcggcccctgcctgagcggcagcctggtgagcctgcactgcctggcctgcggcaagagcctgaagacccccagagtggtgggcgtggaggaggccagcgtggacagctggccctggcaggtgagcatccagtacgacaagcagcacgtgtgcggcggcagcatcctggacccccactgggtgctgaccgccgcccactgcttcagaaagcacaccgacgtgttcaactggaaggtgagagccggcagcgacaagctgggcagcttccccagcctggccgtggccaagatcatcatcatcgagttcaaccccatgtaccccaaggacaacgacatcgccctgatgaagctgcagttccccctgaccttcagcggcaccgtgagacccatctgcctgcccttcttcgacgaggagctgacccccgccacccccctgtggatcatcggctggggcttcaccaagcagaacggcggcaagatgagcgacatcctgctgcaggccagcgtgcaggtgatcgacagcaccagatgcaacgccgacgacgcctaccagggcgaggtgaccgagaagatgatgtgcgccggcatccccgagggcggcgtggacacctgccagggcgacagcggcggccccctgatgtaccagagcgaccagtggcacgtggtgggcatcgtgagctggggctacggctgcggcggccccagcacccccggcgtgtacaccaaggtgagcgcctacctgaactggatctacaacgtgtggaaggccgagctgtag

SEQ ID NO: 103184 - DNA, 1374 bp, synthetic construct
  misc_feature 1..1374: note = Description of Artificial Sequence: Synthetic coding sequence
  source 1..1374: mol_type = other DNA
atgagcctgatgctggacgaccagccccccatggaggcccagtacgccgaggagggccccggccccggcatcttcagagccgagcccggcgaccagcagcaccccatcagccaggccgtgtgctggagaagcatgagaagaggctgcgccgtgctgggcgccctgggcctgctggccggcgccggcgtgggcagctggctgctggtgctgtacctgtgccccgccgccagccagcccatcagcggcaccctgcaggacgaggagatcaccctgagctgcagcgaggccagcgccgaggaggccctgctgcccgccctgcccaagaccgtgagcttcagaatcaacagcgaggacttcctgctggaggcccaggtgagagaccagcccagatggctgctggtgtgccacgagggctggagccccgccctgggcctgcagatctgctggagcctgggccacctgagactgacccaccacaagggcgtgaacctgaccgacatcaagctgaacagcagccaggagttcgcccagctgagccccagactgggcggcttcctggaggaggcctggcagcccagaaacaactgcaccagcggccaggtggtgagcctgagatgcagcgagtgcggcgccagacccctggccagcagaatcgtgggcggccagagcgtggcccccggcagatggccctggcaggccagcgtggccctgggcttcagacacacctgcggcggcagcgtgctggcccccagatgggtggtgaccgccgcccactgcatgcacagcttcagactggccagactgagcagctggagagtgcacgccggcctggtgagccacagcgccgtgagaccccaccagggcgccctggtggagagaatcatcccccaccccctgtacagcgcccagaaccacgactacgacgtggccctgctgagactgcagaccgccctgaacttcagcgacaccgtgggcgccgtgtgcctgcccgccaaggagcagcacttccccaagggcagcagatgctgggtgagcggctggggccacacccaccccagccacacctacagcagcgacatgctgcaggacaccgtggtgcccctgttcagcacccagctgtgcaacagcagctgcgtgtacagcggcgccctgacccccagaatgctgtgcgccggctacctggacggcagagccgacgcctgccagggcgacagcggcggccccctggtgtgccccgacggcgacacctggagactggtgggcgtggtgagctggggcagaggctgcgccgagcccaaccaccccggcgtgtacgccaaggtggccgagttcctggactggatccacgacaccgcccaggacagcctgctgtag

SEQ ID NO: 103185 - DNA, 2436 bp, synthetic construct
  misc_feature 1..2436: note = Description of Artificial Sequence: Synthetic coding sequence
  source 1..2436: mol_type = other DNA
atgctgctgctgttccacagcaagagaatgcccgtggccgaggccccccaggtggccggcggccagggcgacggcggcgacggcgaggaggccgagcccgagggcatgttcaaggcctgcgaggacagcaagagaaaggccagaggctacctgagactggtgcccctgttcgtgctgctggccctgctggtgctggccagcgccggcgtgctgctgtggtacttcctgggctacaaggccgaggtgatggtgagccaggtgtacagcggcagcctgagagtgctgaacagacacttcagccaggacctgaccagaagagagagcagcgccttcagaagcgagaccgccaaggcccagaagatgctgaaggagctgatcaccagcaccagactgggcacctactacaacagcagcagcgtgtacagcttcggcgagggccccctgacctgcttcttctggttcatcctgcagatccccgagcacagaagactgatgctgagccccgaggtggtgcaggccctgctggtggaggagctgctgagcaccgtgaacagcagcgccgccgtgccctacagagccgagtacgaggtggaccccgagggcctggtgatcctggaggccagcgtgaaggacatcgccgccctgaacagcaccctgggctgctacagatacagctacgtgggccagggccaggtgctgagactgaagggccccgaccacctggccagcagctgcctgtggcacctgcagggccccaaggacctgatgctgaagctgagactggagtggaccctggccgagtgcagagacagactggccatgtacgacgtggccggccccctggagaagagactgatcaccagcgtgtacggctgcagcagacaggagcccgtggtggaggtgctggccagcggcgccatcatggccgtggtgtggaagaagggcctgcacagctactacgaccccttcgtgctgagcgtgcagcccgtggtgttccaggcctgcgaggtgaacctgaccctggacaacagactggacagccagggcgtgctgagcaccccctacttccccagctactacagcccccagacccactgcagctggcacctgaccgtgcccagcctggactacggcctggccctgtggttcgacgcctacgccctgagaagacagaagtacgacctgccctgcacccagggccagtggaccatccagaacagaagactgtgcggcctgagaatcctgcagccctacgccgagagaatccccgtggtggccaccgccggcatcaccatcaacttcaccagccagatcagcctgaccggccccggcgtgagagtgcactacggcctgtacaaccagagcgacccctgccccggcgagttcctgtgcagcgtgaacggcctgtgcgtgcccgcctgcgacggcgtgaaggactgccccaacggcctggacgagagaaactgcgtgtgcagagccaccttccagtgcaaggaggacagcacctgcatcagcctgcccaaggtgtgcgacggccagcccgactgcctgaacggcagcgacgaggagcagtgccaggagggcgtgccctgcggcaccttcaccttccagtgcgaggacagaagctgcgtgaagaagcccaacccccagtgcgacggcagacccgactgcagagacggcagcgacgaggagcactgcgactgcggcctgcagggccccagcagcagaatcgtgggcggcgccgtgagcagcgagggcgagtggccctggcaggccagcctgcaggtgagaggcagacacatctgcggcggcgccctgatcgccgacagatgggtgatcaccgccgcccactgcttccaggaggacagcatggccagcaccgtgctgtggaccgtgttcctgggcaaggtgtggcagaacagcagatggcccggcgaggtgagcttcaaggtgagcagactgctgctgcacccctaccacgaggaggacagccacgactacgacgtggccctgctgcagctggaccaccccgtggtgagaagcgccgccgtgagacccgtgtgcctgcccgccagaagccacttcttcgagcccggcctgcactgctggatcaccggctggggcgccctgagagagggcggccccatcagcaacgccctgcagaaggtggacgtgcagctgatcccccaggacctgtgcagcgaggtgtacagataccaggtgacccccagaatgctgtgcgccggctacagaaagggcaagaaggacgcctgccagggcgacagcggcggccccctggtgtgcaaggccctgagcggcagatggttcctggccggcctggtgagctggggcctgggctgcggcagacccaactacttcggcgtgtacaccagaatcaccggcgtgatcagctggatccagcaggtggtgacctag

SEQ ID NO: 103186 - DNA, 2475 bp, synthetic construct
  misc_feature 1..2475: note = Description of Artificial Sequence: Synthetic coding sequence
  source 1..2475: mol_type = other DNA
atgcccgtggccgaggccccccaggtggccggcggccagggcgacggcggcgacggcgaggaggccgagcccgagggcatgttcaaggcctgcgaggacagcaagagaaaggccagaggctacctgagactggtgcccctgttcgtgctgctggccctgctggtgctggccagcgccggcgtgctgctgtggtacttcctgggctacaaggccgaggtgatggtgagccaggtgtacagcggcagcctgagagtgctgaacagacacttcagccaggacctgaccagaagagagagcagcgccttcagaagcgagaccgccaaggcccagaagatgctgaaggagctgatcaccagcaccagactgggcacctactacaacagcagcagcgtgtacagcttcggcgagggccccctgacctgcttcttctggttcatcctgcagatccccgagcacagaagactgatgctgagccccgaggtggtgcaggccctgctggtggaggagctgctgagcaccgtgaacagcagcgccgccgtgccctacagagccgagtacgaggtggaccccgagggcctggtgatcctggaggccagcgtgaaggacatcgccgccctgaacagcaccctgggctgctacagatacagctacgtgggccagggccaggtgctgagactgaagggccccgaccacctggccagcagctgcctgtggcacctgcagggccccaaggacctgatgctgaagctgagactggagtggaccctggccgagtgcagagacagactggccatgtacgacgtggccggccccctggagaagagactgatcaccagcgtgtacggctgcagcagacaggagcccgtggtggaggtgctggccagcggcgccatcatggccgtggtgtggaagaagggcctgcacagctactacgaccccttcgtgctgagcgtgcagcccgtggtgttccaggcctgcgaggtgaacctgaccctggacaacagactggacagccagggcgtgctgagcaccccctacttccccagctactacagcccccagacccactgcagctggcacctgaccgtgcccagcctggactacggcctggccctgtggttcgacgcctacgccctgagaagacagaagtacgacctgccctgcacccagggccagtggaccatccagaacagaagactgtgcggcctgagaatcctgcagccctacgccgagagaatccccgtggtggccaccgccggcatcaccatcaacttcaccagccagatcagcctgaccggccccggcgtgagagtgcactacggcctgtacaaccagagcgacccctgccccggcgagttcctgtgcagcgtgaacggcctgtgcgtgcccgcctgcgacggcgtgaaggactgccccaacggcctggacgagagaaactgcgtgtgcagagccaccttccagtgcaaggaggacagcacctgcatcagcctgcccaaggtgtgcgacggccagcccgactgcctgaacggcagcgacgaggagcagtgccaggagggcgtgccctgcggcaccttcaccttccagtgcgaggacagaagctgcgtgaagaagcccaacccccagtgcgacggcagacccgactgcagagacggcagcgacgaggagcactgcgactgcggcctgcagggccccagcagcagaatcgtgggcggcgccgtgagcagcgagggcgagtggccctggcaggccagcctgcaggtgagaggcagacacatctgcggcggcgccctgatcgccgacagatgggtgatcaccgccgcccactgcttccaggaggacagcatggccagcaccgtgctgtggaccgtgttcctgggcaaggtgtggcagaacagcagatggcccggcgaggtgagcttcaaggtgagcagactgctgctgcacccctaccacgaggaggacagccacgactacgacgtggccctgctgcagctggaccaccccgtggtgagaagcgccgccgtgagacccgtgtgcctgcccgccagaagccacttcttcgagcccggcctgcactgctggatcaccggctggggcgccctgagagagggcgccctgagagccgacgccgtggccctgttctacggctggagaaaccagggcagcgagacctgctgctgccccatcagcaacgccctgcagaaggtggacgtgcagctgatcccccaggacctgtgcagcgaggtgtacagataccaggtgacccccagaatgctgtgcgccggctacagaaagggcaagaaggacgcctgccagggcgacagcggcggccccctggtgtgcaaggccctgagcggcagatggttcctggccggcctggtgagctggggcctgggctgcggcagacccaactacttcggcgtgtacaccagaatcaccggcgtgatcagctggatccagcaggtggtgacctag

SEQ ID NO: 103187 - DNA, 2409 bp, synthetic construct
  misc_feature 1..2409: note = Description of Artificial Sequence: Synthetic coding sequence
  source 1..2409: mol_type = other DNA
atgcccgtggccgaggccccccaggtggccggcggccagggcgacggcggcgacggcgaggaggccgagcccgagggcatgttcaaggcctgcgaggacagcaagagaaaggccagaggctacctgagactggtgcccctgttcgtgctgctggccctgctggtgctggccagcgccggcgtgctgctgtggtacttcctgggctacaaggccgaggtgatggtgagccaggtgtacagcggcagcctgagagtgctgaacagacacttcagccaggacctgaccagaagagagagcagcgccttcagaagcgagaccgccaaggcccagaagatgctgaaggagctgatcaccagcaccagactgggcacctactacaacagcagcagcgtgtacagcttcggcgagggccccctgacctgcttcttctggttcatcctgcagatccccgagcacagaagactgatgctgagccccgaggtggtgcaggccctgctggtggaggagctgctgagcaccgtgaacagcagcgccgccgtgccctacagagccgagtacgaggtggaccccgagggcctggtgatcctggaggccagcgtgaaggacatcgccgccctgaacagcaccctgggctgctacagatacagctacgtgggccagggccaggtgctgagactgaagggccccgaccacctggccagcagctgcctgtggcacctgcagggccccaaggacctgatgctgaagctgagactggagtggaccctggccgagtgcagagacagactggccatgtacgacgtggccggccccctggagaagagactgatcaccagcgtgtacggctgcagcagacaggagcccgtggtggaggtgctggccagcggcgccatcatggccgtggtgtggaagaagggcctgcacagctactacgaccccttcgtgctgagcgtgcagcccgtggtgttccaggcctgcgaggtgaacctgaccctggacaacagactggacagccagggcgtgctgagcaccccctacttccccagctactacagcccccagacccactgcagctggcacctgaccgtgcccagcctggactacggcctggccctgtggttcgacgcctacgccctgagaagacagaagtacgacctgccctgcacccagggccagtggaccatccagaacagaagactgtgcggcctgagaatcctgcagccctacgccgagagaatccccgtggtggccaccgccggcatcaccatcaacttcaccagccagatcagcctgaccggccccggcgtgagagtgcactacggcctgtacaaccagagcgacccctgccccggcgagttcctgtgcagcgtgaacggcctgtgcgtgcccgcctgcgacggcgtgaaggactgccccaacggcctggacgagagaaactgcgtgtgcagagccaccttccagtgcaaggaggacagcacctgcatcagcctgcccaaggtgtgcgacggccagcccgactgcctgaacggcagcgacgaggagcagtgccaggagggcgtgccctgcggcaccttcaccttccagtgcgaggacagaagctgcgtgaagaagcccaacccccagtgcgacggcagacccgactgcagagacggcagcgacgaggagcactgcgactgcggcctgcagggccccagcagcagaatcgtgggcggcgccgtgagcagcgagggcgagtggccctggcaggccagcctgcaggtgagaggcagacacatctgcggcggcgccctgatcgccgacagatgggtgatcaccgccgcccactgcttccaggaggacagcatggccagcaccgtgctgtggaccgtgttcctgggcaaggtgtggcagaacagcagatggcccggcgaggtgagcttcaaggtgagcagactgctgctgcacccctaccacgaggaggacagccacgactacgacgtggccctgctgcagctggaccaccccgtggtgagaagcgccgccgtgagacccgtgtgcctgcccgccagaagccacttcttcgagcccggcctgcactgctggatcaccggctggggcgccctgagagagggcggccccatcagcaacgccctgcagaaggtggacgtgcagctgatcccccaggacctgtgcagcgaggtgtacagataccaggtgacccccagaatgctgtgcgccggctacagaaagggcaagaaggacgcctgccagggcgacagcggcggccccctggtgtgcaaggccctgagcggcagatggttcctggccggcctggtgagctggggcctgggctgcggcagacccaactacttcggcgtgtacaccagaatcaccggcgtgatcagctggatccagcaggtggtgacctag

SEQ ID NO: 103188 - DNA, 2475 bp, synthetic construct; identical to SEQ ID NO: 103186
  misc_feature 1..2475: note = Description of Artificial Sequence: Synthetic coding sequence
  source 1..2475: mol_type = other DNA

SEQ ID NO: 103189 - DNA, 426 bp, synthetic construct
  misc_feature 1..426: note = Description of Artificial Sequence: Synthetic coding sequence
  source 1..426: mol_type = other DNA
atgcccgtggccgaggccccccaggtggccggcggccagggcgacggcggcgacggcgaggaggccgagcccgagggcatgttcaaggcctgcgaggacagcaagagaaaggccagaggctacctgagactggtgcccctgttcgtgctgctggccctgctggtgctggccagcgccggcgtgctgctgtggtacttcctgggctacaaggccgaggtgatggtgagccaggtgtacagcggcagcctgagagtgctgaacagacacttcagccaggacctgaccagaagagagagcagcgccttcagaagcgagaccgccaaggcccagaagatgctgaaggagctgatcaccagcaccagactgggcacctactacaacagcagcagcgtgtacagcttcggcgagggccccctgacctgctag

SEQ ID NO: 103190 - DNA, 1386 bp, synthetic construct
  misc_feature 1..1386: note = Description of Artificial Sequence: Synthetic coding sequence
  source 1..1386: mol_type = other DNA
atgctgctgctgttccacagcaagagaatgcccgtggccgaggccccccaggtggccggcggccagggcgacggcggcgacggcgaggaggccgagcccgagggcatgttcaaggcctgcgaggacagcaagagaaaggccagaggctacctgagactggtgcccctgttcgtgctgctggccctgctggtgctggccagcgccggcgtgctgctgtggtacttcctgggctacaaggccgaggtgatggtgagccaggtgtacagcggcagcctgagagtgctgaacagacacttcagccaggacctgaccagaagagagagcagcgccttcagaagcgagaccgccaaggcccagaagatgctgaaggagctgatcaccagcaccagactgggcacctactacaacagcagcagcgtgtacagcttcggcgagggccccctgacctgcttcttctggttcatcctgcagatccccgagcacagaagactgatgctgagccccgaggtggtgcaggccctgctggtggaggagctgctgagcaccgtgaacagcagcgccgccgtgccctacagagccgagtacgaggtggaccccgagggcctggtgatcctggaggccagcgtgaaggacatcgccgccctgaacagcaccctgggctgctacagatacagctacgtgggccagggccaggtgctgagactgaagggccccgaccacctggccagcagctgcctgtggcacctgcagggccccaaggacctgatgctgaagctgagactggagtggaccctggccgagtgcagagacagactggccatgtacgacgtggccggccccctggagaagagactgatcaccagcgtgtacggctgcagcagacaggagcccgtggtggaggtgctggccagcggcgccatcatggccgtggtgtggaagaagggcctgcacagctactacgaccccttcgtgctgagcgtgcagcccgtggtgttccaggcctgcgaggtgaacctgaccctggacaacagactggacagccagggcgtgctgagcaccccctacttccccagctactacagcccccagacccactgcagctggcacctgaccgtgcccagcctggactacggcctggccctgtggttcgacgcctacgccctgagaagacagaagtacgacctgccctgcacccagggccagtggaccatccagaacagaagataccacttcctgagcagcctgtggctgcccttcctgccccccccccccagcctgcccagcagcatcgtgacccccagcctggaggcccaggtgcccaacctgagaggcgccgccagaggcgccagcagaggctggggctggtgccaggcctgctgcccctag

SEQ ID NO: 103191 - DNA, 1527 bp, synthetic construct
  misc_feature 1..1527: note = Description of Artificial Sequence: Synthetic coding sequence
  source 1..1527: mol_type = other DNA
atggccagcgccgtgtggggcagcgccccctggtggggcccccccccccccgcccccgccagacccctgaccgacatcgacttctgcagcggcgcccagctgcaggagctgacccagctgatccaggagctgggcgtgcaggagagctggagcgacggccccaagcccggcgccgacctgctgagagccaaggacttcgtgttcagcctgctgggcctggtgcacagaagagaccccagattccccccccaggccgagctgctgctgctgagaggcggcatcagagagggcagcctggacctgggccacgcccccctgggcccctacgccagaggcccccactacgacgccggcttcaccctgctggtgcccatgttcagcctggacggcaccgagctgcagctggacctggagagctgctacgcccaggtgtgcctgcccgagatggtgtgcggcacccccatcagagagatgtggcaggactgcctgggcccccccgtgcccggcgccagagacagcatccacagaaccgagagcgaggagagcagcaaggactggcagagcagcgtggaccagccccacagctacgtgaccgagcacgaggcccccgtgagcctggagaagagccccagcgacgtgagcgccagcgagagcccccagcacgacgtggtggacctgggcagcaccgcccccctgaagaccatgagcagcgacgtgaccaaggccgccgtggagagccccgtgcccaagcccagcgaggccagagaggcctggcccaccctgtgcagcgcccaggtggccgcctggttcttcgccaccctggccgccgtggccgagagcctgatccccgtgcccggcgcccccagactggtgcacgccgccagacacgccggcttcaccaccgtgctgctggccacccccgagccccccagaagactgctgctgttcgacctgatccccgtggtgagcgtggccggctggcccgagggcgccagaagccacagctgggccggccccctggccagcgagagcgccagcttctacctggtgcccggcggcggcaccgagagaccctgcgccagcgcctggcagctgtgcttcgccagacaggagctggccctgaaggccagaatccccgcccccctgctgcaggcccacgccgccgcccaggccctgctgagacccctggtggccggcaccagagccgccgccccctacctgctgagaaccctgctgtactgggcctgcgagagactgcccgccctgtacctggccagacccgagaacgccggcgcctgctgcctgggcctgctggacgagctgggcagagtgctggaggccggcaccctgccccactacttcctgaacggcagacagctgagaaccggcgacgacagcgccgccctgctgggcgagctggccagactgagaggcgaccccgccagagccctgagagccgccgtggaggaggccaaggtggccagaaagggcggcggcctggccggcgtgggcggcggcgcccactag

SEQ ID NO: 103192 - DNA, 1527 bp, synthetic construct; identical to SEQ ID NO: 103191
  misc_feature 1..1527: note = Description of Artificial Sequence: Synthetic coding sequence
  source 1..1527: mol_type = other DNA

SEQ ID NO: 103193 - DNA, 825 bp, synthetic construct
  misc_feature 1..825: note = Description of Artificial Sequence: Synthetic coding sequence
  source 1..825: mol_type = other DNA
atgggcaagagcctgagccacctgcccctgcacagcagcaaggaggacgcctacgacggcgtgaccagcgagaacatgagaaacggcctggtgaacagcgaggtgcacaacgaggacggcagaaacggcgacgtgagccagttcccctacgtggagttcaccggcagagacagcgtgacctgccccacctgccagggcaccggcagaatccccagaggccaggagaaccagctggtggccctgatcccctacagcgaccagagactgagacccagaagaaccaagctgtacgtgatggccagcgtgttcgtgtgcctgctgctgagcggcctggccgtgttcttcctgttccccagaagcatcgacgtgaagtacatcggcgtgaagagcgcctacgtgagctacgacgtgcagaagagaaccatctacctgaacatcaccaacaccctgaacatcaccaacaacaactactacagcgtggaggtggagaacatcaccgcccaggtgcagttcagcaagaccgtgatcggcaaggccagactgaacaacatcaccatcatcggccccctggacatgaagcagatcgactacaccgtgcccaccgtgatcgccgaggagatgagctacatgtacgacttctgcaccctgatcagcatcaaggtgcacaacatcgtgctgatgatgcaggtgaccgtgaccaccacctacttcggccacagcgagcagatcagccaggagagataccagtacgtggactgcggcagaaacaccacctaccagctgggccagagcgagtacctgaacgtgctgcagccccagcagtag

SEQ ID NO: 103194 - DNA, 825 bp, synthetic construct; identical to SEQ ID NO: 103193
  misc_feature 1..825: note = Description of Artificial Sequence: Synthetic coding sequence
  source 1..825: mol_type = other DNA

SEQ ID NO: 103195 - DNA, 78 bp, synthetic construct
  misc_feature 1..78: note = Description of Artificial Sequence: Synthetic coding sequence
  source 1..78: mol_type = other DNA
atgggcaagagcctgagccacctgcccctgcacagcagcaaggaggacgcctacgacggcgtgaccagcgagaactag

SEQ ID NO: 103196 - DNA, 333 bp, synthetic construct
  misc_feature 1..333: note = Description of Artificial Sequence: Synthetic coding sequence
  source 1..333: mol_type = other DNA
atgggcaagagcctgagccacctgcccctgcacagcagcaaggaggacgcctacgacggcgtgaccagcgagaacatgagaaacggcctggtgaacagcgaggtgcacaacgaggacggcagaaacggcgacgtgagccagttcccctacgtggagttcaccggcagagacagcgtgacctgccccacctgccagggcaccggcagaatccccagaggccaggagaaccagctggtggccctgatcccctacagcgaccagagactgagacccagaagaaccaagctgtacgtgatggccagcgtgttcgtgtgcctgctgctgagcggctag

SEQ ID NO: 103197 - DNA, 369 bp, synthetic construct
  misc_feature 1..369: note = Description of Artificial Sequence: Synthetic coding sequence
  source 1..369: mol_type = other DNA
atgcacggcaccttcgtgatcctgctgcccctgagcctgatcctgatggtgttcggcggcatgaccggcttcctgagcttcctgctgcaggcctacctgctgctgctgctgaccggcatcctgttcctgttcggcgccatggtgaccctggccggcatcagcgtgtacatcgcctacagcgccgccgccttcagagaggccctgtgcctgctggaggagaaggccctgctggaccaggtggacatcagcttcggctggagcctggccctgggctggatcagcttcatcgccgagctgctgaccggcgccgccttcctggccgccgccagagagctgagcctgagaagaagacaggaccaggccatctag

SEQ ID NO: 103198 - DNA, 570 bp, synthetic construct
  misc_feature 1..570: note = Description of Artificial Sequence: Synthetic coding sequence
  source 1..570: mol_type = other DNA
atgggcctgggcgccagaggcgcctgggccgccctgctgctgggcaccctgcaggtgctggccctgctgggcgccgcccacgagagcgccgccatggccgagaccctgcagcacgtgcccagcgaccacaccaacgagaccagcaacagcaccgtgaagccccccaccagcgtggccagcgacagcagcaacaccaccgtgaccaccatgaagcccaccgccgccagcaacaccaccacccccggcatggtgagcaccaacatgaccagcaccaccctgaagagcacccccaagaccaccagcgtgagccagaacaccagccagatcagcaccagcaccatgaccgtgacccacaacagcagcgtgaccagcgccgccagcagcgtgaccatcaccaccaccatgcacagcgaggccaagaagggcagcaagttcgacaccggcagcttcgtgggcggcatcgtgctgaccctgggcgtgctgagcatcctgtacatcggctgcaagatgtactacagcagaagaggcatcagatacagaaccatcgacgagcacgacgccatcatctag

SEQ ID NO: 103199 - DNA, 627 bp, synthetic construct
  misc_feature 1..627: note = Description of Artificial Sequence: Synthetic coding sequence
  source 1..627: mol_type = other DNA
atgggcctgggcgccagaggcgcctgggccgccctgctgctgggcaccctgcaggtgctggccctgctgggcgccgcccacgagagcgccgccatggccgccagcgccaacatcgagaacagcggcctgccccacaacagcagcgccaacagcaccgagaccctgcagcacgtgcccagcgaccacaccaacgagaccagcaacagcaccgtgaagccccccaccagcgtggccagcgacagcagcaacaccaccgtgaccaccatgaagcccaccgccgccagcaacaccaccacccccggcatggtgagcaccaacatgaccagcaccaccctgaagagcacccccaagaccaccagcgtgagccagaacaccagccagatcagcaccagcaccatgaccgtgacccacaacagcagcgtgaccagcgccgccagcagcgtgaccatcaccaccaccatgcacagcgaggccaagaagggcagcaagttcgacaccggcagcttcgtgggcggcatcgtgctgaccctgggcgtgctgagcatcctgtacatcggctgcaagatgtactacagcagaagaggcatcagatacagaaccatcgacgagcacgacgccatcatctag

SEQ ID NO: 103200 - DNA, 588 bp, synthetic construct
  misc_feature 1..588: note = Description of Artificial Sequence: Synthetic coding sequence
  source 1..588: mol_type = other DNA
atggagaaccacaagagcaacaacaaggagaacatcaccatcgtggacatcagcagaaagatcaaccagctgcccgaggccgagagaaacctgctggagaacggcagcgtgtacgtgggcctgaacgccgccctgtgcggcctgatcgccaacagcctgttcagaagaatcctgaacgtgaccaaggccagaatcgccgccggcctgcccatggccggcatccccttcctgaccaccgacctgacctacagatgcttcgtgagcttccccctgaacaccggcgacctggactgcgagacctgcaccatcaccagaagcggcctgaccggcctggtgatcggcggcctgtaccccgtgttcctggccatccccgtgaacggcggcctggccgccagataccagagcgccctgctgccccacaagggcaacatcctgagctactggatcagaaccagcaagcccgtgttcagaaagatgctgttccccatcctgctgcagaccatgttcagcgcctacctgggcagcgagcagtacaagctgctgatcaaggccctgcagctgagcgagcccggcaaggagatccactag

SEQ ID NO: 103201 - DNA, 378 bp, synthetic construct
  misc_feature 1..378: note = Description of Artificial Sequence: Synthetic coding sequence
  source 1..378: mol_type = other DNA
atggccggcatccccttcctgaccaccgacctgacctacagatgcttcgtgagcttccccctgaacaccggcgacctggactgcgagacctgcaccatcaccagaagcggcctgaccggcctggtgatcggcggcctgtaccccgtgttcctggccatccccgtgaacggcggcctggccgccagataccagagcgccctgctgccccacaagggcaacatcctgagctactggatcagaaccagcaagcccgtgttcagaaagatgctgttccccatcctgctgcagaccatgttcagcgcctacctgggcagcgagcagtacaagctgctgatcaaggccctgcagctgagcgagcccggcaaggagatccactag

SEQ ID NO: 103202 - DNA, 489 bp, synthetic construct
  misc_feature 1..489: note = Description of Artificial Sequence: Synthetic coding sequence
  source 1..489: mol_type = other DNA
atgctgcagaccagcaactacagcctggtgctgagcctgcagttcctgctgctgagctacgacctgttcgtgaacagcttcagcgagctgctgcagaagacccccgtgatccagctggtgctgttcatcatccaggacatcgccgtgctgttcaacatcatcatcatcttcctgatgttcttcaacaccttcgtgttccaggccggcctggtgaacctgctgttccacaagttcaagggcaccatcatcctgaccgccgtgtacttcgccctgagcatcagcctgcacgtgtgggtgatgaacctgagatggaagaacagcaacagcttcatctggaccgacggcctgcagatgctgttcgtgttccagagactggccgccgtgctgtactgctacttctacaagagaaccgccgtgagactgggcgacccccacttctaccaggacagcctgtggctgagaaaggagttcatgcaggtgagaagatag

SEQ ID NO: 103203 - DNA, 318 bp, synthetic construct
  misc_feature 1..318: note = Description of Artificial Sequence: Synthetic coding sequence
  source 1..318: mol_type = other DNA
atgctgcagaccagcaactacagcctggtgctgagcctgcagttcctgctgctgagctacgacctgttcgtgaacagcttcagcgagctgctgcagaagacccccgtgatccagctggtgctgttcatcatccaggacatcgccgtgctgttcaacatcatcatcatcttcctgatgttcttcaacaccttcgtgttccaggccggcctggtgaacctgctgttccacaagttcaagggcaccatcatcctgaccgccgtgtacttcgccctgagcatcagcctgcacgtgtgggtgatggtgagagtggccgtgtag

SEQ ID NO: 103204 - DNA, 1140 bp, synthetic construct
  misc_feature 1..1140: note = Description of Artificial Sequence: Synthetic coding sequence
  source 1..1140: mol_type = other DNA
atgccccacagcagcctgcaccccagcatcccctgccccagaggccacggcgcccagaaggccgccctggtgctgctgagcgcctgcctggtgaccctgtggggcctgggcgagccccccgagcacaccctgagatacctggtgctgcacctggccagcctgcagctgggcctgctgctgaacggcgtgtgcagcctggccgaggagctgagacacatccacagcagatacagaggcagctactggagaaccgtgagagcctgcctgggctgccccctgagaagaggcgccctgctgctgctgagcatctacttctactacagcctgcccaacgccgtgggcccccccttcacctggatgctggccctgctgggcctgagccaggccctgaacatcctgctgggcctgaagggcctggcccccgccgagatcagcgccgtgtgcgagaagggcaacttcaacgtggcccacggcctggcctggagctactacatcggctacctgagactgatcctgcccgagctgcaggccagaatcagaacctacaaccagcactacaacaacctgctgagaggcgccgtgagccagagactgtacatcctgctgcccctggactgcggcgtgcccgacaacctgagcatggccgaccccaacatcagattcctggacaagctgccccagcagaccggcgaccacgccggcatcaaggacagagtgtacagcaacagcatctacgagctgctggagaacggccagagagccggcacctgcgtgctggagtacgccacccccctgcagaccctgttcgccatgagccagtacagccaggccggcttcagcagagaggacagactggagcaggccaagctgttctgcagaaccctggaggacatcctggccgacgcccccgagagccagaacaactgcagactgatcgcctaccaggagcccgccgacgacagcagcttcagcctgagccaggaggtgctgagacacctgagacaggaggagaaggaggaggtgaccgtgggcagcctgaagaccagcgccgtgcccagcaccagcaccatgagccaggagcccgagctgctgatcagcggcatggagaagcccctgcccctgagaaccgacttcagctag

SEQ ID NO: 103205 - DNA, 762 bp, synthetic construct
  misc_feature 1..762: note = Description of Artificial Sequence: Synthetic coding sequence
  source 1..762: mol_type = other DNA
atgccccacagcagcctgcaccccagcatcccctgccccagaggccacggcgcccagaaggccgccctggtgctgctgagcgcctgcctggtgaccctgtggggcctgggcgagccccccgagcacaccctgagatacctggtgctgcacctggccagcctgcagctgggcctgctgctgaacggcgtgtgcagcctggccgaggagctgagacacatccacagcagatacagaggcagctactggagaaccgtgagagcctgcctgggctgccccctgagaagaggcgccctgctgctgctgagcatctacttctactacagcctgcccaacgccgtgggcccccccttcacctggatgctggccctgctgggcctgagccaggccctgaacatcctgctgggcctgaagggcctggcccccgccgagatcagcgccgtgtgcgagaagggcaacttcaacgtggcccacggcctggcctggagctactacatcggctacctgagactgatcctgcccgagctgcaggccagaatcagaacctacaaccagcactacaacaacctgctgagaggcgccgtgagccagagactgtacatcctgctgcccctggactgcggcgtgcccgacaacctgagcatggccgaccccaacatcagattcctggacaagctgccccagcagaccggcgaccacgccggcatcaaggacagagtgtacagcaacagcatctacgagctgctggagaacggccagagatag

SEQ ID NO: 103206 - DNA, 423 bp, synthetic construct
  misc_feature 1..423: note = Description of Artificial Sequence: Synthetic coding sequence
  source 1..423: mol_type = other DNA
atgcccagcgccttcagcgtgagcagcttccccgtgagcatccccgccgtgctgacccagaccgactggaccgagccctggctgatgggcctggccaccttccacgccctgtgcgtgctgctgacctgcctgagcagcagaagctacagactgcagatcggccacttcctgtgcctggtgatcctggtgtactgcgccgagtacatcaacgaggccgccgccatgaactggagactgttcagcaagtaccagtacttcgacagcagaggcatgttcatcagcatcgtgttcagcgcccccctgctggtgaacgccatgatcatcgtggtgatgtgggtgtggaagaccctgaacgtgatgaccgacctgaagaacgcccaggagagaagaaaggagaagaagagaagaagaaaggaggactag

SEQ ID NO: 103207 - DNA, 384 bp, synthetic construct
  misc_feature 1..384: note = Description of Artificial Sequence: Synthetic coding sequence
  source 1..384: mol_type = other DNA
atgctgagcggctacctgcagaccgactggaccgagccctggctgatgggcctggccaccttccacgccctgtgcgtgctgctgacctgcctgagcagcagaagctacagactgcagatcggccacttcctgtgcctggtgatcctggtgtactgcgccgagtacatcaacgaggccgccgccatgaactggagactgttcagcaagtaccagtacttcgacagcagaggcatgttcatcagcatcgtgttcagcgcccccctgctggtgaacgccatgatcatcgtggtgatgtgggtgtggaagaccctgaacgtgatgaccgacctgaagaacgcccaggagagaagaaaggagaagaagagaagaagaaaggaggactag

SEQ ID NO: 103208 - DNA, 1560 bp, synthetic construct
  misc_feature 1..1560: note = Description of Artificial Sequence: Synthetic coding sequence
  source 1..1560: mol_type = other DNA
ggccccgcccagagagccagcagccccatccccagcgccggcagaagagagggcgcccaggccgccacccagagagtggagagaagagacagagaccccggcggctgcgccgcctggacccccagcaccctgcccctgagccccagaagcgccgccagcagcagcacctgcgccggcggctgcggcaagagaaccgccagcagcagaagaaccagcagacccagcagaatgaccgccaccaccggccccaaggtgatccagaccagcgccgccaacttcagcctgaacaacagcaagaagctgaagcccatccagatcctgagcaaccccctgagcacctacaaccagcagctgtggctgacctgcgtggtggagctggaccagagcaaggagaccagcatcaagaccagcttccccatgaccgtgaaggtggacggcgtggcccaggacggcaccaccatgtacatccacaacaaggtgcacaacagaaccagaaccctgacctgcgccggcaagtgcgccgagatcatcgtggcccacctgggctacctgaactacacccagtacaccgtgatcgtgggcttcgagcacctgaagctgcccatcaagggcatgaacttcacctggaagacctacaaccccgccttcagcagactggagatctggttcagattcttcttcgtggtgctgaccttcatcgtgacctgcctgttcgcccacagcctgagaaagttcagcatgagagactggggcatcgagcagaagtggatgagcgtgctgctgcccctgctgctgctgtacaacgaccccttcttccccctgagcttcctggtgaacagctggctgcccggcatgctggacgacctgttccagagcatgttcctgtgcgccctgctgctgttctggctgtgcgtgtaccacggcatcagagtgcagggcgagagaaagtgcctgaccttctacctgcccaagttcttcatcgtgggcctgctgtggctggccagcgtgaccctgggcatctggcagaccgtgaacgagctgcacgaccccatgtaccagtacagagtggacaccggcaacttccagggcatgaaggtgttcttcatggtggtggccgccgtgtacatcctgtacctgctgttcctgatcgtgagagcctgcagcgagctgagacacatgccctacgtggacctgagactgaagttcctgaccgccctgaccttcgtggtgctggtgatcagcatcgccatcctgtacctgagattcggcgcccaggtgctgcaggacaacttcgtggccgagctgagcacccactaccagaagcccgccgagttcctgagcttctacggcctgctgaacttctacctgtacaccctggccttcgtgtacagccccagcaagaacgccctgtacgagagccagctgaaggacaaccccgccttcagcatgctgaacgacagcgacgacgacgtgatctacggcagcgactacgaggagatgcccctgcagaacggccaggccatcagagccaagtacaaggaggagagcgacagcgactag

SEQ ID NO: 103209 - DNA, 1839 bp, synthetic construct
  misc_feature 1..1839: note = Description of Artificial Sequence: Synthetic coding sequence
  source 1..1839: mol_type = other DNA
atgggcgccgcccccagccccacccaggccagcagcagaggcggcggccccggcccccccgcccccaccagagccgtgagcagcagcagcagagccagaggcggcgccctgagcgccctgggccccagccccgccagacccctgaccaccagccccgcccccgcccccccccccagaagcagacccgccagacagcagcccgacccccagtgctgggagaagagaggcggcgccggcggcgacaccaagggcggcgccgccggccccggccccggcagactgagaggcatggacgccgagtaccccgccttcgagccccccctgtgcagcgagctgaagcacctgtgcagaagactgagagaggcctacagagagctgaaggaggacctgacccccttcaaggacgacagatactacagactggcccccatgagactgtacaccctgagcaagagacacttcgtgctggtgttcgtggtgttcttcatctgcttcggcctgaccatcttcgtgggcatcagaggccccaaggtgatccagaccagcgccgccaacttcagcctgaacaacagcaagaagctgaagcccatccagatcctgagcaaccccctgagcacctacaaccagcagctgtggctgacctgcgtggtggagctggaccagagcaaggagaccagcatcaagaccagcttccccatgaccgtgaaggtggacggcgtggcccaggacggcaccaccatgtacatccacaacaaggtgcacaacagaaccagaaccctgacctgcgccggcaagtgcgccgagatcatcgtggcccacctgggctacctgaactacacccagtacaccgtgatcgtgggcttcgagcacctgaagctgcccatcaagggcatgaacttcacctggaagacctacaaccccgccttcagcagactggagatctggttcagattcttcttcgtggtgctgaccttcatcgtgacctgcctgttcgcccacagcctgagaaagttcagcatgagagactggggcatcgagcagaagtggatgagcgtgctgctgcccctgctgctgctgtacaacgaccccttcttccccctgagcttcctggtgaacagctggctgcccggcatgctggacgacctgttccagagcatgttcctgtgcgccctgctgctgttctggctgtgcgtgtaccacggcatcagagtgcagggcgagagaaagtgcctgaccttctacctgcccaagttcttcatcgtgggcctgctgtggctggccagcgtgaccctgggcatctggcagaccgtgaacgagctgcacgaccccatgtaccagtacagagtggacaccggcaacttccagggcatgaaggtgttcttcatggtggtggccgccgtgtacatcctgtacctgctgttcctgatcgtgagagcctgcagcgagctgagacacatgccctacgtggacctgagactgaagttcctgaccgccctgaccttcgtggtgctggtgatcagcatcgccatcctgtacctgagattcggcgcccaggtgctgcaggacaacttcgtggccgagctgagcacccactaccagaacagcgccgagttcctgagcttctacggcctgctgaacttctacctgtacaccctggccttcgtgtacagccccagcaagaacgccctgtacgagagccagctgaaggacaaccccgccttcagcatgctgaacgacagcgacgacgacgtgatctacggcagcgactacgaggagatgcccctgcagaacggccaggccatcagagccaagtacaaggaggagagcgacagcgactag

SEQ ID NO: 103210 - DNA, 1317 bp, synthetic construct
  misc_feature 1..1317: note = Description of Artificial Sequence: Synthetic coding sequence
  source 1..1317: mol_type = other DNA
atgccctgcacctgcacctggagaaactggagacagtggatcagacccctggtggccgtgatctacctggtgagcatcgtggtggccgtgcccctgtgcgtgtgggagctgcagaagctggaggtgggcatccacaccaaggcctggttcatcgccggcatcttcctgctgctgaccatccccatcagcctgtgggtgatcctgcagcacctggtgcactacacccagcccgagctgcagaagcccatcatcagaatcctgtggatggtgcccatctacagcctggacagctggatcgccctgaagtaccccggcatcgccatctacgtggacacctgcagagagtgctacgaggcctacgtgatctacaacttcatgggcttcctgaccaactacctgaccaacagataccccaacctggtgctgatcctggaggccaaggaccagcagaagcacttcccccccctgtgctgctgccccccctgggccatgggcgaggtgctgctgttcagatgcaagctgggcgtgctgcagtacaccgtggtgagacccttcaccaccatcgtggccctgatctgcgagctgctgggcatctacgacgagggcaacttcagcttcagcaacgcctggacctacctggtgatcatcaacaacatgagccagctgttcgccatgtactgcctgctgctgttctacaaggtgctgaaggaggagctgagccccatccagcccgtgggcaagttcctgtgcgtgaagctggtggtgttcgtgagcttctggcaggccgtggtgatcgccctgctggtgaaggtgggcgtgatcagcgagaagcacacctgggagtggcagaccgtggaggccgtggccaccggcctgcaggacttcatcatctgcatcgagatgttcctggccgccatcgcccaccactacaccttcagctacaagccctacgtgcaggaggccgaggagggcagctgcttcgacagcttcctggccatgtgggacgtgagcgacatcagagacgacatcagcgagcaggtgagacacgtgggcagaaccgtgagaggccaccccagaaagaagctgttccccgaggaccaggaccagaacgagcacaccagcctgctgagcagcagcagccaggacgccatcagcatcgccagcagcatgccccccagccccatgggccactaccagggcttcggccacaccgtgaccccccagaccacccccaccaccgccaagatcagcgacgagatcctgagcgacaccatcggcgagaagaaggagcccagcgacaagagcgtggacagctag

SEQ ID NO: 103211 - DNA, 4152 bp, synthetic construct
  misc_feature 1..4152: note = Description of Artificial Sequence: Synthetic coding sequence
  source 1..4152: mol_type = other DNA
atgtacgccaccgacagcagaggccacagccccgccttcctgcagccccagaacggcaacagcagacaccccagcggctacgtgcccggcaaggtggtgcccctgagacccccccccccccccaagagccaggccagcgccaagttcaccagcatcagaagagaggacagagccaccttcgccttcagccccgaggagcagcaggcccagagagagagccagaagcagaagagacacaagaacaccttcatctgcttcgccatcaccagcttcagcttcttcatcgccctggccatcatcctgggcatcagcagcaagtacgcccccgacgagaactgccccgaccagaaccccagactgagaaactgggaccccggccaggacagcgccaagcaggtggtgatcaaggagggcgacatgctgagactgaccagcgacgccaccgtgcacagcatcgtgatccaggacggcggcctgctggtgttcggcgacaacaaggacggcagcagaaacatcaccctgagaacccactacatcctgatccaggacggcggcgccctgcacatcggcgccgagaagtgcagatacaagagcaaggccaccatcaccctgtacggcaagagcgacgagggcgagagcatgcccaccttcggcaagaagttcatcggcgtggaggccggcggcaccctggagctgcacggcgccagaaaggccagctggaccctgctggccagaaccctgaacagcagcggcctgcccttcggcagctacaccttcgagaaggacttcagcagaggcctgaacgtgagagtgatcgaccaggacaccgccaagatcctggagagcgagagattcgacacccacgagtacagaaacgagagcagaagactgcaggagttcctgagattccaggaccccggcagaatcgtggccatcgccgtgggcgacagcgccgccaagagcctgctgcagggcaccatccagatgatccaggagagactgggcagcgagctgatccagggcctgggctacagacaggcctgggccctggtgggcgtgatcgacggcggcagcaccagctgcaacgagagcgtgagaaactacgagaaccacagcagcggcggcaaggccctggcccagagagagttctacaccgtggacggccagaagttcagcgtgaccgcctacagcgagtggatcgagggcgtgagcctgagcggcttcagagtggaggtggtggacggcgtgaagctgaacctgctggacgacgtgagcagctggaagcccggcgaccagatcgtggtggccagcaccgactacagcatgtaccaggccgaggagttcaccctgctgccctgcagcgagtgcagccacttccaggtgaaggtgaaggagaccccccagttcctgcacatgggcgagatcatcgacggcgtggacatgagagccgaggtgggcatcctgaccagaaacatcgtgatccagggcgaggtggaggacagctgctacgccgagaaccagtgccagttcttcgactacgacaccttcggcggccacatcatgatcatgaagaacttcaccagcgtgcacctgagctacgtggagctgaagcacatgggccagcagcagatgggcagataccccgtgcacttccacctgtgcggcgacgtggactacaagggcggctacagacacgccaccttcgtggacggcctgagcatccaccacagcttcagcagatgcatcaccgtgcacggcaccaacggcctgctgatcaaggacaccatcggcttcgacaccctgggccactgcttcttcctggaggacggcatcgagcagagaaacaccctgttccacaacctgggcctgctgaccaagcccggcaccctgctgcccaccgacagaaacaacagcatgtgcaccaccatgagagacaaggtgttcggcaactacatccccgtgcccgccaccgactgcatggccgtgagcaccttctggatcgcccaccccaacaacaacctgatcaacaacgccgccgccggcagccaggacgccggcatctggtacctgttccacaaggagcccaccggcgagagcagcggcctgcagctgctggccaagcccgagctgacccccctgggcatcttctacaacaacagagtgcacagcaacttcaaggccggcctgttcatcgacaagggcgtgaagaccaccaacagcagcgccgccgaccccagagagtacctgtgcctggacaacagcgccagattcagaccccaccaggacgccaaccccgagaagcccagagtggccgccctgatcgacagactgatcgccttcaagaacaacgacaacggcgcctgggtgagaggcggcgacatcatcgtgcagaacagcgccttcgccgacaacggcatcggcctgaccttcgccagcgacggcagcttccccagcgacgagggcagcagccaggaggtgagcgagagcctgttcgtgggcgagagcagaaactacggcttccagggcggccagaacaagtacgtgggcaccggcggcatcgaccagaagcccagaaccctgcccagaaacagaaccttccccatcagaggcttccagatctacgacggccccatccacctgaccagaagcaccttcaagaagtacgtgcccacccccgacagatacagcagcgccatcggcttcctgatgaagaacagctggcagatcacccccagaaacaacatcagcctggtgaagttcggcccccacgtgagcctgaacgtgttcttcggcaagcccggcccctggttcgaggactgcgagatggacggcgacaagaacagcatcttccacgacatcgacggcagcgtgaccggctacaaggacgcctacgtgggcagaatggacaactacctgatcagacaccccagctgcgtgaacgtgagcaagtggaacgccgtgatctgcagcggcacctacgcccaggtgtacgtgcagacctggagcacccagaacctgagcatgaccatcaccagagacgagtaccccagcaaccccatggtgctgagaggcatcaaccagaaggccgccttcccccagtaccagcccgtggtgatgctggagaagggctacaccatccactggaacggccccgcccccagaaccaccttcctgtacctggtgaacttcaacaagaacgactggatcagagtgggcctgtgctaccccagcaacaccagcttccaggtgaccttcggctacctgcagagacagaacggcagcctgagcaagatcgaggagtacgagcccgtgcacagcctggaggagctgcagagaaagcagagcgagagaaagttctacttcgacagcagcaccggcctgctgttcctgtacctgaaggccaagagccacagacacggccacagctactgcagcagccagggctgcgagagagtgaagatccaggccgccaccgacagcaaggacatcagcaactgcatggccaaggcctacccccagtactacagaaagcccagcgtggtgaagagaatgcccgccatgctgaccggcctgtgccagggctgcggcaccagacaggtggtgttcaccagcgacccccacaagagctacctgcccgtgcagttccagagccccgacaaggccgagacccagagaggcgaccccagcgtgatcagcgtgaacggcaccgacttcaccttcagaagcgccggcgtgctgctgctggtggtggacccctgcagcgtgcccttcagactgaccgagaagaccgtgttccccctggccgacgtgagcagaatcgaggagtacctgaagaccggcatcccccccagaagcatcgtgctgctgagcaccagaggcgagatcaagcagctgaacatcagccacctgctggtgcccctgggcctggccaagcccgcccacctgtacgacaagggcagcaccatcttcctgggcttcagcggcaacttcaagcccagctggaccaagctgttcaccagccccgccggccagggcctgggcgtgctggagcagttcatccccctgcagctggacgagtacggctgccccagagccaccaccgtgagaagaagagacctggagctgctgaagcaggccagcaaggcccactag

SEQ ID NO: 103212 - DNA, 3963 bp, synthetic construct
  misc_feature 1..3963: note = Description of Artificial Sequence: Synthetic coding sequence
  source 1..3963: mol_type = other DNA
atgtacgccaccgacagcagaggccacagccccgccttcctgcagccccagaacggcaacagcagacaccccagcggctacgtgcccggcaaggtggtgcccctgagacccccccccccccccaagagccaggccagcgccaagttcaccagcatcagaagagaggacagagccaccttcgccttcagccccgaggagcagcaggcccagagagagagccagaagcagaagagacacaagaacaccttcatctgcttcgccatcaccagcttcagcttcttcatcgccctggccatcatcctgggcatcagcagcaagtacgcccccgacgagaactgccccgaccagaaccccagactgagaaactgggaccccggccaggacagcgccaagcaggtggtgatcaaggagggcgacatgctgagactgaccagcgacgccaccgtgcacagcatcgtgatccaggacggcggcctgctggtgttcggcgacaacaaggacggcagcagaaacatcaccctgagaacccactacatcctgatccaggacggcggcgccctgcacatcggcgccgagaagtgcagatacaagagcaaggccaccatcaccctgtacggcaagagcgacgagggcgagagcatgcccaccttcggcaagaagttcatcggcgtggaggccggcggcaccctggagctgcacggcgccagaaaggccagctggaccctgctggccagaaccctgaacagcagcggcctgcccttcggcagctacaccttcgagaaggacttcagcagaggcctgaacgtgagagtgatcgaccaggacaccgccaagatcctggagagcgagagattcgacacccacgagtacagaaacgagagcagaagactgcaggagttcctgagattccaggaccccggcagaatcgtggccatcgccgtgggcgacagcgccgccaagagcctgctgcagggcaccatccagatgatccaggagagactgggcagcgagctgatccagggcctgggctacagacaggcctgggccctggtgggcgtgatcgacggcggcagcaccagctgcaacgagagcgtgagaaactacgagaaccacagcagcggcggcaaggccctggcccagagagagttctacaccgtggacggccagaagttcagcgtgaccgcctacagcgagtggatcgaggagaccccccagttcctgcacatgggcgagatcatcgacggcgtggacatgagagccgaggtgggcatcctgaccagaaacatcgtgatccagggcgaggtggaggacagctgctacgccgagaaccagtgccagttcttcgactacgacaccttcggcggccacatcatgatcatgaagaacttcaccagcgtgcacctgagctacgtggagctgaagcacatgggccagcagcagatgggcagataccccgtgcacttccacctgtgcggcgacgtggactacaagggcggctacagacacgccaccttcgtggacggcctgagcatccaccacagcttcagcagatgcatcaccgtgcacggcaccaacggcctgctgatcaaggacaccatcggcttcgacaccctgggccactgcttcttcctggaggacggcatcgagcagagaaacaccctgttccacaacctgggcctgctgaccaagcccggcaccctgctgcccaccgacagaaacaacagcatgtgcaccaccatgagagacaaggtgttcggcaactacatccccgtgcccgccaccgactgcatggccgtgagcaccttctggatcgcccaccccaacaacaacctgatcaacaacgccgccgccggcagccaggacgccggcatctggtacctgttccacaaggagcccaccggcgagagcagcggcctgcagctgctggccaagcccgagctgacccccctgggcatcttctacaacaacagagtgcacagcaacttcaaggccggcctgttcatcgacaagggcgtgaagaccaccaacagcagcgccgccgaccccagagagtacctgtgcctggacaacagcgccagattcagaccccaccaggacgccaaccccgagaagcccagagtggccgccctgatcgacagactgatcgccttcaagaacaacgacaacggcgcctgggtgagaggcggcgacatcatcgtgcagaacagcgccttcgccgacaacggcatcggcctgaccttcgccagcgacggcagcttccccagcgacgagggcagcagccaggaggtgagcgagagcctgttcgtgggcgagagcagaaactacggcttccagggcggccagaacaagtacgtgggcaccggcggcatcgaccagaagcccagaaccctgcccagaaacagaaccttccccatcagaggcttccagatctacgacggccccatccacctgaccagaagcaccttcaagaagtacgtgcccacccccgacagatacagcagcgccatcggcttcctgatgaagaacagctggcagatcacccccagaaacaacatcagcctggtgaagttcggcccccacgtgagcctgaacgtgttcttcggcaagcccggcccctggttcgaggactgcgagatggacggcgacaagaacagcatcttccacgacatcgacggcagcgtgaccggctacaaggacgcctacgtgggcagaatggacaactacctgatcagacaccccagctgcgtgaacgtgagcaagtggaacgccgtgatctgcagcggcacctacgcccaggtgtacgtgcagacctggagcacccagaacctgagcatgaccatcaccagagacgagtaccccagcaaccccatggtgctgagaggcatcaaccagaaggccgccttcccccagtaccagcccgtggtgatgctggagaagggctacaccatccactggaacggccccgcccccagaaccaccttcctgtacctggtgaacttcaacaagaacgactggatcagagtgggcctgtgctaccccagcaacaccagcttccaggtgaccttcggctacctgcagagacagaacggcagcctgagcaagatcgaggagtacgagcccgtgcacagcctggaggagctgcagagaaagcagagcgagagaaagttctacttcgacagcagcaccggcctgctgttcctgtacctgaaggccaagagccacagacacggccacagctactgcagcagccagggctgcgagagagtgaagatccaggccgccaccgacagcaaggacatcagcaactgcatggccaaggcctacccccagtactacagaaagcccagcgtggtgaagagaatgcccgccatgctgaccggcctgtgccagggctgcggcaccagacaggtggtgttcaccagcgacccccacaagagctacctgcccgtgcagttccagagccccgacaaggccgagacccagagaggcgaccccagcgtgatcagcgtgaacggcaccgacttcaccttcagaagcgccggcgtgctgctgctggtggtggacccctgcagcgtgcccttcagactgaccgagaagaccgtgttccccctggccgacgtgagcagaatcgaggagtacctgaagaccggcatcccccccagaagcatcgtgctgctgagcaccagaggcgagatcaagcagctgaacatcagccacctgctggtgcccctgggcctggccaagcccgcccacctgtacgacaagggcagcaccatcttcctgggcttcagcggcaacttcaagcccagctggaccaagctgttcaccagccccgccggccagggcctgggcgtgctggagcagttcatccccctgcagctggacgagtacggctgccccagagccaccaccgtgagaagaagagacctggagctgctgaagcaggccagcaaggcccactag

SEQ ID NO: 103213 - DNA, 1131 bp, synthetic construct
  misc_feature 1..1131: note = Description of Artificial Sequence: Synthetic coding sequence
  source 1..1131: mol_type = other DNA
atgaccatcaccagagacgagtaccccagcaaccccatggtgctgagaggcatcaaccagaaggccgccttcccccagtaccagcccgtggtgatgctggagaagggctacaccatccactggaacggccccgcccccagaaccaccttcctgtacctggtgaacttcaacaagaacgactggatcagagtgggcctgtgctaccccagcaacaccagcttccaggtgaccttcggctacctgcagagacagaacggcagcctgagcaagatcgaggagtacgagcccgtgcacagcctggaggagctgcagagaaagcagagcgagagaaagttctacttcgacagcagcaccggcctgctgttcctgtacctgaaggccaagagccacagacacggccacagctactgcagcagccagggctgcgagagagtgaagatccaggccgccaccgacagcaaggacatcagcaactgcatggccaaggcctacccccagtactacagaaagcccagcgtggtgaagagaatgcccgccatgctgaccggcctgtgccagggctgcggcaccagacaggtggtgttcaccagcgacccccacaagagctacctgcccgtgcagttccagagccccgacaaggccgagacccagagaggcgaccccagcgtgatcagcgtgaacggcaccgacttcaccttcagaagcgccggcgtgctgctgctggtggtggacccctgcagcgtgcccttcagactgaccgagaagaccgtgttccccctggccgacgtgagcagaatcgaggagtacctgaagaccggcatcccccccagaagcatcgtgctgctgagcaccagaggcgagatcaagcagctgaacatcagccacctgctggtgcccctgggcctggccaagcccgcccacctgtacgacaagggcagcaccatcttcctgggcttcagcggcaacttcaagcccagctggaccaagctgttcaccagccccgccggccagggcctgggcgtgctggagcagttcatccccctgcagctggacgagtacggctgccccagagccaccaccgtgagaagaagagacctggagctgctgaagcaggccagcaaggcccactag

SEQ ID NO: 103214 - DNA, 57 bp, synthetic construct
  misc_feature 1..57: note = Description of Artificial Sequence: Synthetic coding sequence
  source 1..57: mol_type = other DNA
atgtacgccaccgacagcagaggccacagccccgccttcctgcagccccagaactag

SEQ ID NO: 103215 - DNA, 570 bp, synthetic construct
  misc_feature 1..570: note = Description of Artificial Sequence: Synthetic coding sequence
  source 1..570: mol_type = other DNA
atggaggagggcggcaacctgggcggcctgatcaagatggtgcacctgctggtgctgagcggcgcctggggcatgcagatgtgggtgaccttcgtgagcggcttcctgctgttcagaagcctgcccagacacaccttcggcctggtgcagagcaagctgttccccttctacttccacatcagcatgggctgcgccttcatcaacctgtgcatcctggccagccagcacgcctgggcccagctgaccttctgggaggccagccagctgtacctgctgttcctgagcctgaccctggccaccgtgaacgccagatggctggagcccagaaccaccgccgccatgtgggccctgcagaccgtggagaaggagagaggcctgggcggcgaggtgcccggcagccaccagggccccgacccctacagacagctgagagagaaggaccccaagtacagcgccctgagacagaacttcttcagataccacggcctgagcagcctgtgcaacctgggctgcgtgctgagcaacggcctgtgcctggccggcctggccctggagatcagaagcctgtag

SEQ ID NO: 103216 - DNA, 570 bp, synthetic construct; identical to SEQ ID NO: 103215
  misc_feature 1..570: note = Description of Artificial Sequence: Synthetic coding sequence
  source 1..570: mol_type = other DNA

SEQ ID NO: 103217 - DNA, 570 bp, synthetic construct; identical to SEQ ID NO: 103215
  misc_feature 1..570: note = Description of Artificial Sequence: Synthetic coding sequence
  source 1..570: mol_type = other DNA

SEQ ID NO: 103218 - DNA, 447 bp, synthetic construct
  misc_feature 1..447: note = Description of Artificial Sequence: Synthetic coding sequence
  source 1..447: mol_type = other DNA
atgctgcccagaggcctgaagatggcccccagaggcaagagactgagcagcacccccctggagatcctgttcttcctgaacggctggtacaacgccacctacttcctgctggagctgttcatcttcctgtacaagggcgtgctgctgccctaccccaccgccaacctggtgctggacgtggtgatgctgctgctgtacctgggcatcgaggtgatcagactgttcttcggcaccaagggcaacctgtgccagagaaagatgcccctgagcatcagcgtggccctgaccttccccagcgccatgatggccagctactacctgctgctgcagacctacgtgctgagactggaggccatcatgaacggcatcctgctgttcttctgcggcagcgagctgctgctggaggtgctgaccctggccgccttcagcagcatggacagaatctag

SEQ ID NO: 103219 - DNA, 438 bp, synthetic construct
  misc_feature 1..438: note = Description of Artificial Sequence: Synthetic coding sequence
  source 1..438: mol_type = other DNA
atgctgcccagaggcctgaagatggcccccagaggcaagagactgagcagcacccccctggagatcctgttcttcctgaacggctggtacaacgccacctacttcctgctggagctgttcatcttcctgtacaagggcgtgctgctgccctaccccaccgccaacctggtgctggacgtggtgatgctgctgctgtacctgggcatcgaggtgatcagactgttcttcggcaccaagggcaacctgtgccagagaaagatgcccctgagcatcagcgtggccctgaccttccccagcgccatgatggccagctactacctgctgctgcagacctacgtgctgagactggaggccatcatgaacggcatcctgctgttcttctgcggcagcgagctgctgctggaggtgctgaccctggccgccttcagcagaatctag

SEQ ID NO: 103220 - DNA, 942 bp, synthetic construct
  misc_feature 1..942: note = Description of Artificial Sequence: Synthetic coding sequence
  source 1..942: mol_type = other DNA
atgagaaccgacagcggcgccagactggaggagggccacctgagaccccccagagccctgccccccgtgcccagcatcgacgacatccccctgagcagacccaagaagaagaagacccagcccgccgagctgcagtacgccaacgagctgggcgtggaggacgaggacatcatcaccgacgagcagaccaccgtggagcagcagagcgtgttcaccgcccccaccggcatcagccagcccgtgggcaaggtgttcgtggagaagagcagaagattccaggccgccgacagaagcgagctgatcaagaccaccgagaacatcgacgtgagcatggacgtgaagcccagctggaccaccagagacgtggccctgaccgtgcacagagccttcagaatgatcggcctgttcagccacggcttcctggccggctgcgccgtgtggaacatcgtggtgatctacgtgctggccggcgaccagctgagcaacctgagcaacctgctgcagcagtacaagaccctggcctaccccttccagagcctgctgtacctgctgctggccctgagcaccatcagcgccttcgacagaatcgacttcgccaagatcagcgtggccatcagaaacttcctggccctggaccccaccgccctggccagcttcctgtacttcaccgccctgatcctgagcctgagccagcagatgaccagcgacagaatccacctgtacacccccagcagcgtgaacggcagcctgtgggaggccggcatcgaggagcagatcctgcagccctggatcgtggtgaacctggtggtggccctgctggtgggcctgagctggctgttcctgagctacagacccggcatggacctgagcgaggagctgatgttcagcagcgaggtggaggagtaccccgacaaggagaaggagatcaaggccagcagctag

SEQ ID NO: 103221 - DNA, 1203 bp, synthetic construct
  misc_feature 1..1203: note = Description of Artificial Sequence: Synthetic coding sequence
  source 1..1203: mol_type = other DNA
atgggcaagaaccccgtgagaccccccagagccctgccccccgtgcccagccaggacgacatccccctgagcagacccaagaagaagaagcccagaaccaagaacacccccgccagcgccagcctggagggcctggcccagaccgccggcagaagacccagcgagggcaacgagcccagcaccaaggagctgaaggagcaccccgaggcccccgtgcagagaagacagaagaagaccagactgcccctggagctggagaccagcagcacccagaagaagagcagcagcagcagcctgctgagaaacgagaacggcatcgacgccgagcccgccgaggaggccgtgatccagaagcccagaagaaagaccaagaagacccagcccgccgagctgcagtacgccaacgagctgggcgtggaggacgaggacatcatcaccgacgagcagaccaccgtggagcagcagagcgtgttcaccgcccccaccggcatcagccagcccgtgggcaaggtgttcgtggagaagagcagaagattccaggccgccgacagaagcgagctgatcaagaccaccgagaacatcgacgtgagcatggacgtgaagcccagctggaccaccagagacgtggccctgaccgtgcacagagccttcagaatgatcggcctgttcagccacggcttcctggccggctgcgccgtgtggaacatcgtggtgatctacgtgctggccggcgaccagctgagcaacctgagcaacctgctgcagcagtacaagaccctggcctaccccttccagagcctgctgtacctgctgctggccctgagcaccatcagcgccttcgacagaatcgacttcgccaagatcagcgtggccatcagaaacttcctggccctggaccccaccgccctggccagcttcctgtacttcaccgccctgatcctgagcctgagccagcagatgaccagcgacagaatccacctgtacacccccagcagcgtgaacggcagcctgtgggaggccggcatcgaggagcagatcctgcagccctggatcgtggtgaacctggtggtggccctgctggtgggcctgagctggctgttcctgagctacagacccggcatggacctgagcgaggagctgatgttcagcagcgaggtggaggagtaccccgacaaggagaaggagatcaaggccagcagctag

SEQ ID NO: 103222 - DNA, 1227 bp, synthetic construct
  misc_feature 1..1227: note = Description of Artificial Sequence: Synthetic coding sequence
  source 1..1227: mol_type = other DNA
atgagaaccgacagcggcgccagactggaggagggccacctgagaccccccagagccctgccccccgtgcccagccaggacgacatccccctgagcagacccaagaagaagaagcccagaaccaagaacacccccgccagcgccagcctggagggcctggcccagaccgccggcagaagacccagcgagggcaacgagcccagcaccaaggagctgaaggagcaccccgaggcccccgtgcagagaagacagaagaagaccagactgcccctggagctggagaccagcagcacccagaagaagagcagcagcagcagcctgctgagaaacgagaacggcatcgacgccgagcccgccgaggaggccgtgatccagaagcccagaagaaagaccaagaagacccagcccgccgagctgcagtacgccaacgagctgggcgtggaggacgaggacatcatcaccgacgagcagaccaccgtggagcagcagagcgtgttcaccgcccccaccggcatcagccagcccgtgggcaaggtgttcgtggagaagagcagaagattccaggccgccgacagaagcgagctgatcaagaccaccgagaacatcgacgtgagcatggacgtgaagcccagctggaccaccagagacgtggccctgaccgtgcacagagccttcagaatgatcggcctgttcagccacggcttcctggccggctgcgccgtgtggaacatcgtggtgatctacgtgctggccggcgaccagctgagcaacctgagcaacctgctgcagcagtacaagaccctggcctaccccttccagagcctgctgtacctgctgctggccctgagcaccatcagcgccttcgacagaatcgacttcgccaagatcagcgtggccatcagaaacttcctggccctggaccccaccgccctggccagcttcctgtacttcaccgccctgatcctgagcctgagccagcagatgaccagcgacagaatccacctgtacacccccagcagcgtgaacggcagcctgtgggaggccggcatcgaggagcagatcctgcagccctggatcgtggtgaacctggtggtggccctgctggtgggcctgagctggctgttcctgagctacagacccggcatggacctgagcgaggagctgatgttcagcagcgaggtggaggagtaccccgacaaggagaaggagatcaaggccagcagctag

SEQ ID NO: 103223 - DNA, 1293 bp, synthetic construct
  misc_feature 1..1293: note = Description of Artificial Sequence: Synthetic coding sequence
  source 1..1293: mol_type = other DNA
atgacccactgcgcctgcgccagagacagaagagagggctggggcgccagatgcctgggcagaagaccccccagacccgccaagagaagaatgggcaagaaccccgtgagaccccccagagccctgccccccgtgcccagcatcgacgacatccccctgagcagacccaagaagaagaagcccagaaccaagaacacccccgccagcgccagcctggagggcctggcccagaccgccggcagaagacccagcgagggcaacgagcccagcaccaaggagctgaaggagcaccccgaggcccccgtgcagagaagacagaagaagaccagactgcccctggagctggagaccagcagcacccagaagaagagcagcagcagcagcctgctgagaaacgagaacggcatcgacgccgagcccgccgaggaggccgtgatccagaagcccagaagaaagaccaagaagacccagcccgccgagctgcagtacgccaacgagctgggcgtggaggacgaggacatcatcaccgacgagcagaccaccgtggagcagcagagcgtgttcaccgcccccaccggcatcagccagcccgtgggcaaggtgttcgtggagaagagcagaagattccaggccgccgacagaagcgagctgatcaagaccaccgagaacatcgacgtgagcatggacgtgaagcccagctggaccaccagagacgtggccctgaccgtgcacagagccttcagaatgatcggcctgttcagccacggcttcctggccggctgcgccgtgtggaacatcgtggtgatctacgtgctggccggcgaccagctgagcaacctgagcaacctgctgcagcagtacaagaccctggcctaccccttccagagcctgctgtacctgctgctggccctgagcaccatcagcgccttcgacagaatcgacttcgccaagatcagcgtggccatcagaaacttcctggccctggaccccaccgccctggccagcttcctgtacttcaccgccctgatcctgagcctgagccagcagatgaccagcgacagaatccacctgtacacccccagcagcgtgaacggcagcctgtgggaggccggcatcgaggagcagatcctgcagccctggatcgtggtgaacctggtggtggccctgctggtgggcctgagctggctgttcctgagctacagacccggcatggacctgagcgaggagctgatgttcagcagcgaggtggaggagtaccccgacaaggagaaggagatcaaggccagcagctag

SEQ ID NO: 103224 - DNA, 1227 bp, synthetic construct
  misc_feature 1..1227: note = Description of Artificial Sequence: Synthetic coding sequence
  source 1..1227: mol_type = other DNA
atgagaaccgacagcggcgccagactggaggagggccacctgagaccccccagagccctgccccccgtgcccagcatcgacgacatccccctgagcagacccaagaagaagaagcccagaaccaagaacacccccgccagcgccagcctggagggcctggcccagaccgccggcagaagacccagcgagggcaacgagcccagcaccaaggagctgaaggagcaccccgaggcccccgtgcagagaagacagaagaagaccagactgcccctggagctggagaccagcagcacccagaagaagagcagcagcagcagcctgctgagaaacgagaacggcatcgacgccgagcccgccgaggaggccgtgatccagaagcccagaagaaagaccaagaagacccagcccgccgagctgcagtacgccaacgagctgggcgtggaggacgaggacatcatcaccgacgagcagaccaccgtggagcagcagagcgtgttcaccgcccccaccggcatcagccagcccgtgggcaaggtgttcgtggagaagagcagaagattccaggccgccgacagaagcgagctgatcaagaccaccgagaacatcgacgtgagcatggacgtgaagcccagctggaccaccagagacgtggccctgaccgtgcacagagccttcagaatgatcggcctgttcagccacggcttcctggccggctgcgccgtgtggaacatcgtggtgatctacgtgctggccggcgaccagctgagcaacctgagcaacctgctgcagcagtacaagaccctggcctaccccttccagagcctgctgtacctgctgctggccctgagcaccatcagcgccttcgacagaatcgacttcgccaagatcagcgtggccatcagaaacttcctggccctggaccccaccgccctggccagcttcctgtacttcaccgccctgatcctgagcctgagccagcagatgaccagcgacagaatccacctgtacacccccagcagcgtgaacggcagcctgtgggaggccggcatcgaggagcagatcctgcagccctggatcgtggtgaacctggtggtggccctgctggtgggcctgagctggctgttcctgagctacagacccggcatggacctgagcgaggagctgatgttcagcagcgaggtggaggagtaccccgacaaggagaaggagatcaaggccagcagctag

SEQ ID NO: 103225 - DNA, 1101 bp, synthetic construct
  misc_feature 1..1101: note = Description of Artificial Sequence: Synthetic coding sequence
  source 1..1101: mol_type = other DNA
atggccctgccccccggccccgccgccctgagacacaccctgctgctgctgcccgccctgctgagcagcggctggggcgagctggagccccagatcgacggccagacctgggccgagagagccctgagagagaacgagagacacgccttcacctgcagagtggccggcggccccggcacccccagactggcctggtacctggacggccagctgcaggaggccagcaccagcagactgctgagcgtgggcggcgaggccttcagcggcggcaccagcaccttcaccgtgaccgcccacagagcccagcacgagctgaactgcagcctgcaggaccccagaagcggcagaagcgccaacgccagcgtgatcctgaacgtgcagttcaagcccgagatcgcccaggtgggcgccaagtaccaggaggcccagggccccggcctgctggtggtgctgttcgccctggtgagagccaacccccccgccaacgtgacctggatcgaccaggacggccccgtgaccgtgaacaccagcgacttcctggtgctggacgcccagaactacccctggctgaccaaccacaccgtgcagctgcagctgagaagcctggcccacaacctgagcgtggtggccaccaacgacgtgggcgtgaccagcgccagcctgcccgcccccggcctgctggccaccagagtggaggtgcccctgctgggcatcgtggtggccgccggcctggccctgggcaccctggtgggcttcagcaccctggtggcctgcctggtgtgcagaaaggagaagaagaccaagggccccagcagacaccccagcctgatcagcagcgacagcaacaacctgaagctgaacaacgtgagactgcccagagagaacatgagcctgcccagcaacctgcagctgaacgacctgacccccgacagcagagccgtgaagcccgccgacagacagatggcccagaacaacagcagacccgagctgctggaccccgagcccggcggcctgctgaccagccagggcttcatcagactgcccgtgctgggctacatctacagagtgagcagcgtgagcagcgacgagatctggctgtag

SEQ ID NO: 103226 - DNA, 657 bp, synthetic construct
  misc_feature 1..657: note = Description of Artificial Sequence: Synthetic coding sequence
  source 1..657: mol_type = other DNA
atggccctgccccccggccccgccgccctgagacacaccctgctgctgctgcccgccctgctgagcagcgtgaagcccgagatcgcccaggtgggcgccaagtaccaggaggcccagggccccggcctgctggtggtgctgttcgccctggtgagagccaacccccccgccaacgtgacctggatcgaccaggacggccccgtgaccgtgaacaccagcgacttcctggtgctggacgcccagaactacccctggctgaccaaccacaccgtgcagctgcagctgagaagcctggcccacaacctgagcgtggtggccaccaacgacgtgggcgtgaccagcgccagcctgcccgcccccggccccagcagacaccccagcctgatcagcagcgacagcaacaacctgaagctgaacaacgtgagactgcccagagagaacatgagcctgcccagcaacctgcagctgaacgacctgacccccgacagcagagccgtgaagcccgccgacagacagatggcccagaacaacagcagacccgagctgctggaccccgagcccggcggcctgctgaccagccagggcttcatcagactgcccgtgctgggctacatctacagagtgagcagcgtgagcagcgacgagatctggctgtag

SEQ ID NO: 103227 - DNA, 1056 bp, synthetic construct
  misc_feature 1..1056: note = Description of Artificial Sequence: Synthetic coding sequence
  source 1..1056: mol_type = other DNA
atggccctgccccccggccccgccgccctgagacacaccctgctgctgctgcccgccctgctgagcagcggctggggcgagctggagccccagatcgacggccagacctgggccgagagagccctgagagagaacgagagacacgccttcacctgcagagtggccggcggccccggcacccccagactggcctggtacctggacggccagctgcaggaggccagcaccagcagactgctgagcgtgggcggcgaggccttcagcggcggcaccagcaccttcaccgtgaccgcccacagagcccagcacgagctgaactgcagcctgcaggaccccagaagcggcagaagcgccaacgccagcgtgatcctgaacgtgcagttcaagcccgagatcgcccaggtgggcgccaagtaccaggaggcccagggccccggcctgctggtggtgctgttcgccctggtgagagccaacccccccgccaacgtgacctggatcgaccaggacggccccgtgaccgtgaacaccagcgacttcctggtgctggacgcccagaactacccctggctgaccaaccacaccgtgcagctgcagctgagaagcctggcccacaacctgagcgtggtggccaccaacgacgtgggcgtgaccagcgccagcctgcccgcccccggcctgctggccaccagagtggaggtgcccctgctgggcatcgtggtggccgccggcctggccctgggcaccctggtgggcttcagcaccctggtggcctgcctggtgtgcagaaaggagaagaagaccaagggccccagcagacaccccagcctgatcagcagcgacagcaacaacctgaagctgaacaacgtgagactgcccagagagaacatgagcctgcccagcaacctgcagctgaacgacctgacccccgacagcagagccgtgaagcccgccgacagacagatggcccagaacaacagcagacccgagctgctggaccccgagcccggcggcctgctgaccagccagggcagaagaaaccaggacaaggacgcctag

SEQ ID NO: 103228 - DNA, 969 bp, synthetic construct
  misc_feature 1..969: note = Description of Artificial Sequence: Synthetic coding sequence
  source 1..969: mol_type = other DNA
atggccctgccccccggccccgccgccctgagacacaccctgctgctgctgcccgccctgctgagcagcggctggggcgagctggagccccagatcgacggccagacctgggccgagagagccctgagagagaacgagagacacgccttcacctgcagagtggccggcggccccggcacccccagactggcctggtacctggacggccagctgcaggaggccagcaccagcagactgctgagcgtgggcggcgaggccttcagcggcggcaccagcaccttcaccgtgaccgcccacagagcccagcacgagctgaactgcagcctgcaggaccccagaagcggcagaagcgccaacgccagcgtgatcctgaacgtgcagttcaagcccgagatcgcccaggtgggcgccaagtaccaggaggcccagggccccggcctgctggtggtgctgttcgccctggtgagagccaacccccccgccaacgtgacctggatcgaccaggacggccccgtgaccgtgaacaccagcgacttcctggtgctggacgcccagaactacccctggctgaccaaccacaccgtgcagctgcagctgagaagcctggcccacaacctgagcgtggtggccaccaacgacgtgggcgtgaccagcgccagcctgcccgcccccggccccagcagacaccccagcctgatcagcagcgacagcaacaacctgaagctgaacaacgtgagactgcccagagagaacatgagcctgcccagcaacctgcagctgaacgacctgacccccgacagcagagccgtgaagcccgccgacagacagatggcccagaacaacagcagacccgagctgctggaccccgagcccggcggcctgctgaccagccagggcttcatcagactgcccgtgctgggctacatctacagagtgagcagcgtgagcagcgacgagatctggctgtag

SEQ ID NO: 103229 - DNA, 969 bp, synthetic construct; identical to SEQ ID NO: 103228
  misc_feature 1..969: note = Description of Artificial Sequence: Synthetic coding sequence
  source 1..969: mol_type = other DNA

SEQ ID NO: 103230 - DNA, 921 bp, synthetic construct
  misc_feature 1..921: note = Description of Artificial Sequence: Synthetic coding sequence
  source 1..921: mol_type = other DNA
atggccctgccccccggccccgccgccctgagacacaccctgctgctgctgcccgccctgctgagcagcggctggggcgagctggagccccagatcgacggccagacctgggccgagagagccctgagagagaacgagagacacgccttcacctgcagagtggccggcggccccggcacccccagactggcctggtacctggacggccagctgcaggaggccagcaccagcagactgctgagcgtgggcggcgaggccttcagcggcggcaccagcaccttcaccgtgaccgcccacagagcccagcacgagctgaactgcagcctgcaggaccccagaagcggcagaagcgccaacgccagcgtgatcctgaacgtgcagttcaagcccgagatcgcccaggtgggcgccaagtaccaggaggcccagggccccggcctgctggtggtgctgttcgccctggtgagagccaacccccccgccaacgtgacctggatcgaccaggacggccccgtgaccgtgaacaccagcgacttcctggtgctggacgcccagaactacccctggctgaccaaccacaccgtgcagctgcagctgagaagcctggcccacaacctgagcgtggtggccaccaacgacgtgggcgtgaccagcgccagcctgcccgcccccggccccagcagacaccccagcctgatcagcagcgacagcaacaacctgaagctgaacaacgtgagactgcccagagagaacatgagcctgcccagcaacctgcagctgaacgacctgacccccgacagcagagtgaagcccgccgacagacagatggcccagaacaacagcagacccgagctgctggaccccgagcccggcggcctgctgaccagccagggcagaagaaaccaggacaaggacgcctag

SEQ ID NO: 103231 - DNA, 1146 bp, synthetic construct
  misc_feature 1..1146: note = Description of Artificial Sequence: Synthetic coding sequence
  source 1..1146: mol_type = other DNA
atggccctgccccccggccccgccgccctgagacacaccctgctgctgctgcccgccctgctgagcagcggctggggcgagctggagccccagatcgacggccagacctgggccgagagagccctgagagagaacgagagacacgccttcacctgcagagtggccggcggccccggcacccccagactggcctggtacctggacggccagctgcaggaggccagcaccagcagactgctgagcgtgggcggcgaggccttcagcggcggcaccagcaccttcaccgtgaccgcccacagagcccagcacgagctgaactgcagcctgcaggaccccagaagcggcagaagcgccaacgccagcgtgatcctgaacgtgcagttcaagcccgagatcgcccaggtgggcgccaagtaccaggaggcccagggccccggcctgctggtggtgctgttcgccctggtgagagccaacccccccgccaacgtgacctggatcgaccaggacggccccgtgaccgtgaacaccagcgacttcctggtgctggacgcccagaactacccctggctgaccaaccacaccgtgcagctgcagctgagaagcctggcccacaacctgagcgtggtggccaccaacgacgtgggcgtgaccagcgccagcctgcccgcccccggcctgctggccaccagagtggaggtgcccctgctgggcatcgtggtggccgccggcctggccctgggcaccctggtgggcttcagcaccctggtggcctgcctggtgtgcagaaaggagaagaagaccaagggccccagcagacaccccagcctgatcagcagcgacagcaacaacctgaagctgaacaacgtgagactgcccagagagaacatgagcctgcccagcaacctgcagctgaacgacctgacccccgacagcagagtgaagcccgccgacagacagatggcccagaacaacagcagacccgagctgctggaccccgagcccggcggcctgctgaccagccaggcctgcctgctgcaccacggcacccccgccctgaccaacccctggctgccccaccagcaggagggcgccctgcccggcggctggagcccccaggcccacaacagcaccgtgtggaagctgtag

SEQ ID NO: 103232 - DNA, 810 bp, synthetic construct
  misc_feature 1..810: note = Description of Artificial Sequence: Synthetic coding sequence
  source 1..810: mol_type = other DNA
atggccctgccccccggccccgccgccctgagacacaccctgctgctgctgcccgccctgctgagcagcggctggggcgagctggagccccagatcgacggccagacctgggccgagagagccctgagagagaacgagagacacgccttcacctgcagagtggccggcggccccggcacccccagactggcctggtacctggacggccagctgcaggaggccagcaccagcagactgctgagcgtgggcggcgaggccttcagcggcggcaccagcaccttcaccgtgaccgcccacagagcccagcacgagctgaactgcagcctgcaggaccccagaagcggcagaagcgccaacgccagcgtgatcctgaacgtgcagtggctgctggccaccagagtggaggtgcccctgctgggcatcgtggtggccgccggcctggccctgggcaccctggtgggcttcagcaccctggtggcctgcctggtgtgcagaaaggagaagaagaccaagggccccagcagacaccccagcctgatcagcagcgacagcaacaacctgaagctgaacaacgtgagactgcccagagagaacatgagcctgcccagcaacctgcagctgaacgacctgacccccgacagcagagccgtgaagcccgccgacagacagatggcccagaacaacagcagacccgagctgctggaccccgagcccggcggcctgctgaccagccagggcttcatcagactgcccgtgctgggctacatctacagagtgagcagcgtgagcagcgacgagatctggctgtag

SEQ ID NO: 103233 - DNA, 669 bp, synthetic construct
  misc_feature 1..669: note = Description of Artificial Sequence: Synthetic coding sequence
  source 1..669: mol_type = other DNA
atgctgtggctgctgttcttcctggtgaccgccatccacgccgagctgtgccagcccggcgccgagaacgccttcaaggtgagactgagcatcagaaccgccctgggcgacaaggcctacgcctgggacaccaacgaggagtacctgttcaaggccatggtggccttcagcatgagaaaggtgcccaacagagaggccaccgagatcagccacgtgctgctgtgcaacgtgacccagagagtgagcttctggttcgtggtgaccgaccccagcaagaaccacaccctgcccgccgtggaggtgcagagcgccatcagaatgaacaagaacagaatcaacaacgccttcttcctgaacgaccagaccctggagttcctgaagatccccagcaccctggccccccccatggaccccagcgtgcccatctggatcatcatcttcggcgtgatcttctgcatcatcatcgtggccatcgccctgctgatcctgagcggcatctggcagagaagaagaaagaacaaggagcccagcgaggtggacgacgccgaggacaagtgcgagaacatgatcaccatcgagaacggcatccccagcgaccccctggacatgaagggcggccacatcaacgacgccttcatgaccgaggacgagagactgacccccctgtag

SEQ ID NO: 103234 - DNA, 252 bp, synthetic construct
  misc_feature 1..252: note = Description of Artificial Sequence: Synthetic coding sequence
  source 1..252: mol_type = other DNA
atgctgagaaacctgctggccctgagacagatcggccagagaaccatcagcaccgccagcagaagacacttcaagaacaaggtgcccgagaagcagaagctgttccaggaggacgacgagatccccctgtacctgaagggcggcgtggccgacgccctgctgtacagagccaccatgatcctgaccgtgggcggcaccgcctacgccatctacgagctggccgtggccagcttccccaagaagcaggagtag

SEQ ID NO: 103235 - DNA, 729 bp, synthetic construct
  misc_feature 1..729: note = Description of Artificial Sequence: Synthetic coding sequence
  source 1..729: mol_type = other DNA
atgtactacggcctgagcaacttctaccagaaccacagaagatacgtgaagagcagagacgacagccagctgaacggcgacagcagcgccctgctgaaccccagcaaggagtgcgagccctacagaagaaacgaggacaagcccatcgccccctgcggcgccatcgccaacagcatgttcaacgacaccctggagctgttcctgatcggcaacgacagctaccccatccccatcgccctgaagaagaagggcatcgcctggtggaccgacaagaacgtgaagttcagaaacccccccggcggcgacaacctggaggagagattcaagggcaccaccaagcccgtgaactggctgaagcccgtgtacatgctggacagcgaccccgacaacaacggcttcatcaacgaggacttcatcgtgtggatgagaaccgccgccctgcccaccttcagaaagctgtacagactgatcgagagaaagagcgacctgcaccccaccctgcccgccggcagatacagcctgaacgtgacctacaactaccccgtgcactacttcgacggcagaaagagaatgatcctgagcaccatcagctggatgggcggcaagaaccccttcctgggcatcgcctacatcgccgtgggcagcatcagcttcctgctgggcgtggtgctgctggtgatcaaccacaagtacagaaacagcagcaacaccgccgacatcaccatctag

SEQ ID NO: 103236 - DNA, 978 bp, synthetic construct
  misc_feature 1..978: note = Description of Artificial Sequence: Synthetic coding sequence
  source 1..978: mol_type = other DNA
atggccatgaactacaacgccaaggacgaggtggacggcggccccccctgcgcccccggcggcaccgccaagaccagaagacccgacaacaccgccttcaagcagcagagactgcccgcctggcagcccatcctgaccgccggcaccgtgctgcccatcttcttcatcatcggcctgatcttcatccccatcggcatcggcatcttcgtgaccagcaacaacatcagagagatcgagggcaacgtgttcatgtactacggcctgagcaacttctaccagaaccacagaagatacgtgaagagcagagacgacagccagctgaacggcgacagcagcgccctgctgaaccccagcaaggagtgcgagccctacagaagaaacgaggacaagcccatcgccccctgcggcgccatcgccaacagcatgttcaacgacaccctggagctgttcctgatcggcaacgacagctaccccatccccatcgccctgaagaagaagggcatcgcctggtggaccgacaagaacgtgaagttcagaaacccccccggcggcgacaacctggaggagagattcaagggcaccaccaagcccgtgaactggctgaagcccgtgtacatgctggacagcgaccccgacaacaacggcttcatcaacgaggacttcatcgtgtggatgagaaccgccgccctgcccaccttcagaaagctgtacagactgatcgagagaaagagcgacctgcaccccaccctgcccgccggcagatacagcctgaacgtgacctacaactaccccgtgcactacttcgacggcagaaagagaatgatcctgagcaccatcagctggatgggcggcaagaaccccttcctgggcatcgcctacatcgccgtgggcagcatcagcttcctgctgggcgtggtgctgctggtgatcaaccacaagtacagaaacagcagcaacaccgccgacatcaccatctag

SEQ ID NO: 103237 - DNA, 234 bp, synthetic construct
  misc_feature 1..234: note = Description of Artificial Sequence: Synthetic coding sequence
  source 1..234: mol_type = other DNA
atgtactacggcctgagcaacttctaccagaaccacagaagatacgtgaagagcagagacgacagccagctgaacggcgacagcagcgccctgctgaaccccagcaaggagtgcgagccctacagaagaaacgaggacaagcccatcgccccctgcggcgccatcgccaacagcatgttcaacgacaccctggagctgttcctgatcggcaacgacagctaccccatcccctag

SEQ ID NO: 103238 - DNA, 1038 bp, synthetic construct
  misc_feature 1..1038: note = Description of Artificial Sequence: Synthetic coding sequence
  source 1..1038: mol_type = other DNA
atggccatgaactacaccgccaagaccagaagacccgacaacaccgccttcaagcagcagagactgcccgcctggcagcccatcctgaccgccggcaccgtgctgcccatcttcttcatcatcggcctgatcttcatccccatcggcatcggcatcttcgtgaccagcaacaacatcagagagatcgagatcgactacaccggcaccgagcccagcagcccctgcaacaagtgcctgagccccgacgtgaccccctgcttctgcaccatcaacttcaccctggagaagagcttcgagggcaacgtgttcatgtactacggcctgagcaacttctaccagaaccacagaagatacgtgaagagcagagacgacagccagctgaacggcgacagcagcgccctgctgaaccccagcaaggagtgcgagccctacagaagaaacgaggacaagcccatcgccccctgcggcgccatcgccaacagcatgttcaacgacaccctggagctgttcctgatcggcaacgacagctaccccatccccatcgccctgaagaagaagggcatcgcctggtggaccgacaagaacgtgaagttcagaaacccccccggcggcgacaacctggaggagagattcaagggcaccaccaagcccgtgaactggctgaagcccgtgtacatgctggacagcgaccccgacaacaacggcttcatcaacgaggacttcatcgtgtggatgagaaccgccgccctgcccaccttcagaaagctgtacagactgatcgagagaaagagcgacctgcaccccaccctgcccgccggcagatacagcctgaacgtgacctacaactaccccgtgcactacttcgacggcagaaagagaatgatcctgagcaccatcagctggatgggcggcaagaaccccttcctgggcatcgcctacatcgccgtgggcagcatcagcttcctgctgggcgtggtgctgctggtgatcaaccacaagtacagaaacagcagcaacaccgccgacatcaccatctag

SEQ ID NO: 103239 - DNA, 1056 bp, synthetic construct
  misc_feature 1..1056: note = Description of Artificial Sequence: Synthetic coding sequence
  source 1..1056: mol_type = other DNA
atgacctggagcgccaccgccagaggcgcccaccagcccgacaacaccgccttcacccagcagagactgcccgcctggcagcccctgctgagcgccagcatcgccctgcccctgttcttctgcgccggcctggccttcatcggcctgggcctgggcctgtactacagcagcaacggcatcaaggagctggagtacgactacaccggcgaccccggcaccggcaactgcagcgtgtgcgccgccgccggccagggcagagccctgccccccccctgcagctgcgcctggtacttcagcctgcccgagctgttccagggccccgtgtacctgtactacgagctgaccaacttctaccagaacaacagaagatacggcgtgagcagagacgacgcccagctgagcggcctgcccagcgccctgagacaccccgtgaacgagtgcgccccctaccagagaagcgccgccggcctgcccatcgccccctgcggcgccatcgccaacagcctgttcaacgacagcttcagcctgtggcaccagagacagcccggcggcccctacgtggaggtgcccctggacagaagcggcatcgcctggtggaccgactaccacgtgaagttcagaaacccccccctggtgaacggcagcctggccctggccttccagggcaccgcccccccccccaactggagaagacccgtgtacgagctgagccccgaccccaacaacaccggcttcatcaaccaggacttcgtggtgtggatgagaaccgccgccctgcccaccttcagaaagctgtacgccagaatcagacagggcaactacagcgccggcctgcccagaggcgcctacagagtgaacatcacctacaactaccccgtgagagccttcggcggccacaagctgctgatcttcagcagcatcagctggatgggcggcaagaaccccttcctgggcatcgcctacctggtggtgggcagcctgtgcatcctgaccggcttcgtgatgctggtggtgtacatcagataccaggaccaggacgacgacgacgaggagtag

SEQ ID NO: 103240 - DNA, 1056 bp, synthetic construct; identical to SEQ ID NO: 103239
  misc_feature 1..1056: note = Description of Artificial Sequence: Synthetic coding sequence
  source 1..1056: mol_type = other DNA

SEQ ID NO: 103241 - DNA, 342 bp, synthetic construct
  misc_feature 1..342: note = Description of Artificial Sequence: Synthetic coding sequence
  source 1..342: mol_type = other DNA
atggaggagagagcccagcactgcctgagcagactgctggacaacagcgccctgaagcagcaggagctgcccatccacagactgtacttcaccgccagaagagtgctgttcgtgttcttcgccaccggcatcttctgcctgtgcatgggcatcatcctgatcctgagcgccagaagcacccaggagatcgagatcaactacaccagaatctgcgccaactgcgccaagctgagagagaacgccagcaacttcgacaaggagtgcacctgcagcatccccttctacctgagcggcaagatgatggtgggcgagatccaggagaccagactgaccctgcactag

SEQ ID NO: 103242 - DNA, 207 bp, synthetic construct
  misc_feature 1..207: note = Description of Artificial Sequence: Synthetic coding sequence
  source 1..207: mol_type = other DNA
tgactgtgcatgggcatcatcctgatcctgagcgccagaagcacccaggagatcgagatcaactacaccagaatctgcgccaactgcgccaagctgagagagaacgccagcaacttcgacaaggagtgcacctgcagcatccccttctacctgagcggcaagatgatggtgggcgagatccaggagaccagactgaccctgcactag

SEQ ID NO: 103243 - DNA, 1203 bp, synthetic construct
  misc_feature 1..1203: note = Description of Artificial Sequence: Synthetic coding sequence
  source 1..1203: mol_type = other DNA
atggccgccaactacagcagcaccagcaccagaagagagcacgtgaaggtgaagaccagcagccagcccggcttcctggagagactgagcgagaccagcggcggcatgttcgtgggcctgatggccttcctgctgagcttctacctgatcttcaccaacgagggcagagccctgaagaccgccaccagcctggccgagggcctgagcctggtggtgagccccgacagcatccacagcgtggcccccgagaacgagggcagactggtgcacatcatcggcgccctgagaaccagcaagctgctgagcgaccccaactacggcgtgcacctgcccgccgtgaagctgagaagacacgtggagatgtaccagtgggtggagaccgaggagagcagagagtacaccgaggacggccaggtgaagaaggagaccagatacagctacaacaccgagtggagaagcgagatcatcaacagcaagaacttcgacagagagatcggccacaagaaccccagcgccatggccgtggagagcttcatggccaccgcccccttcgtgcagatcggcagattcttcctgagcagcggcctgatcgacaaggtggacaacttcaagagcctgagcctgagcaagctggaggacccccacgtggacatcatcagaagaggcgacttcttctaccacagcgagaaccccaagtaccccgaggtgggcgacctgagagtgagcttcagctacgccggcctgagcggcgacgaccccgacctgggccccgcccacgtggtgaccgtgatcgccagacagagaggcgaccagctggtgcccttcagcaccaagagcggcgacaccctgctgctgctgcaccacggcgacttcagcgccgaggaggtgttccacagagagctgagaagcaacagcatgaagacctggggcctgagagccgccggctggatggccatgttcatgggcctgaacctgatgaccagaatcctgtacaccctggtggactggttccccgtgttcagagacctggtgaacatcggcctgaaggccttcgccttctgcgtggccaccagcctgaccctgctgaccgtggccgccggctggctgttctacagacccctgtgggccctgctgatcgccggcctggccctggtgcccatcctggtggccagaaccagagtgcccgccaagaagctggagtag

SEQ ID NO: 103244 - DNA, 546 bp, synthetic construct
  misc_feature 1..546: note = Description of Artificial Sequence: Synthetic coding sequence
  source 1..546: mol_type = other DNA
atggccagcgccggcagcggcatggaggaggtgagagtgagcgtgctgacccccctgaagctggtgggcctggtgtgcatcttcctggccctgtgcctggacctgggcgccgtgctgagccccgcctgggtgaccgccgaccaccagtactacctgagcctgtgggagagctgcagaaagcccgccagcctggacatctggcactgcgagagcaccctgagcagcgactggcagatcgccaccctggccctgctgctgggcggcgccgccatcatcctgatcgccttcctggtgggcctgatcagcatctgcgtgggcagcagaagaagattctacagacccgtggccgtgatgctgttcgccgccgtggtgctgcaggtgtgcagcctggtgctgtaccccatcaagttcatcgagaccgtgagcctgaagatctaccacgagttcaactggggctacggcctggcctggggcgccaccatcttcagcttcggcggcgccatcctgtactgcctgaaccccaagaactacgaggactactactag

SEQ ID NO: 103245 - DNA, 2745 bp, synthetic construct; identical to SEQ ID NO: 76570
  misc_feature 1..2745: note = Description of Artificial Sequence: Synthetic coding sequence
  source 1..2745: mol_type = other DNA

SEQ ID NO: 103246 - DNA, 1674 bp, synthetic construct
  misc_feature 1..1674: note = Description of Artificial Sequence: Synthetic coding sequence
  source 1..1674: mol_type = other DNA
atggccaccgccgtgagcagaccctgcgccggcagaagcagagacatcctgtggagagtgctgggctggagaatcgtggccagcatcgtgtggagcgtgctgttcctgcccatctgcaccaccgtgttcatcatcttcagcagaatcgacctgttccaccccatccagtggctgagcgacagcttcagcgacctgtacagcagctacgtgatcttctacttcctgctgctgagcgtggtgatcatcatcatcagcatcttcaacgtggagttctacgccgtggtgcccagcatcccctgcagcagactggccctgatcggcaagatcatccacccccagcagctgatgcacagcttcatccacgccgccatgggcatggtgatggcctggtgcgccgccgtgatcacccagggccagtacagcttcctggtggtgccctgcaccggcaccaacagcttcggcagccccgccgcccagacctgcctgaacgagtaccacctgttcttcctgctgaccggcgccttcatgggctacagctacagcctgctgtacttcgtgaacaacatgaactacctgcccttccccatcatccagcagtacaagttcctgagattcagaagaagcctgctgctgctggtgaagcacagctgcgtggagagcctgttcctggtgagaaacttctgcatcctgtactacttcctgggctacatccccaaggcctggatcagcaccgccatgaacctgcacatcgacgagcaggtgcacagacccctggacaccgtgagcggcctgctgaacctgagcctgctgtaccacgtgtggctgtgcggcgtgttcctgctgaccacctggtacgtgagctggatcctgttcaagatctacgccaccgaggcccacgtgttccccgtgcagccccccttcgccgagggcagcgacgagtgcctgcccaaggtgctgaacagcaaccccccccccatcatcaagtacctggccctgcaggacctgatgctgctgagccagtacagccccagcagaagacaggaggtgttcagcctgagccagcccggcggccacccccacaactggaccgccatcagcagagagtgcctgaacctgctgaacgagatgaccgagttcagcaaccccagccccagcaccagcatcagcgccgagggcaagaccatgagacagcccagcgtgatctacagctggatccagaacaagagagagcagatcaagaacttcctgagcaagagagtgctgatcatgtacttcttcagcaagcaccccgaggccagcatccaggccgtgttcagcgacgcccagatgcacatctgggccctggagggcctgagccacctggtggccgccagcttcaccgaggacagattcggcgtggtgcagaccaccctgcccgccatcctgaacaccctgctgaccctgcaggaggccgtggacaagtacttcaagctgccccacgccagcagcaagccccccagaatcagcggcagcctggtggacaccagctacaagaccctgagattcgccttcagagccagcctgaagaccgccatctacagaatcaccaccaccttcggcgagcacctgaacgccgtgcaggccagcgccgagcaccagaagagactgcagcagttcctggagttcaaggagtag

SEQ ID NO: 103247 - DNA, 2025 bp, synthetic construct
  misc_feature 1..2025: note = Description of Artificial Sequence: Synthetic coding sequence
  source 1..2025: mol_type = other DNA
atggccaccgccgtgagcagaccctgcgccggcagaagcagagacatcctgtggagagtgctgggctggagaatcgtggccagcatcgtgtggagcgtgctgttcctgcccatctgcaccaccgtgttcatcatcttcagcagaatcgacctgttccaccccatccagtggctgagcgacagcttcagcgacctgtacagcagctacgtgatcttctacttcctgctgctgagcgtggtgatcatcatcatcagcatcttcaacgtggagttctacgccgtggtgcccagcatcccctgcagcagactggccctgatcggcaagatcatccacccccagcagctgatgcacagcttcatccacgccgccatgggcatggtgatggcctggtgcgccgccgtgatcacccagggccagtacagcttcctggtggtgccctgcaccggcaccaacagcttcggcagccccgccgcccagacctgcctgaacgagtaccacctgttcttcctgctgaccggcgccttcatgggctacagctacagcctgctgtacttcgtgaacaacatgaactacctgcccttccccatcatccagcagtacaagttcctgagattcagaagaagcctgctgctgctggtgaagcacagctgcgtggagagcctgttcctggtgagaaacttctgcatcctgtactacttcctgggctacatccccaaggcctggatcagcaccgccatgaacctgcacatcgacgagcaggtgcacagacccctggacaccgtgagcggcctgctgaacctgagcctgctgtaccacgtgtggctgtgcggcgtgttcctgctgaccacctggtacgtgagctggatcctgttcaagatctacgccaccgaggcccacgtgttccccgtgcagccccccttcgccgagggcagcgacgagtgcctgcccaaggtgctgaacagcaaccccccccccatcatcaagtacctggccctgcaggacctgatgctgctgagccagtacagccccagcagaagacaggaggtgttcagcctgagccagcccggcggccacccccacaactggaccgccatcagcagagagtgcctgaacctgctgaacggcatgacccagaagctgatcctgtaccaggaggccgccgccaccaacggcagagtgagcagcagctaccccgtggagcccaagaagctgaacagccccgaggagaccgccttccagacccccaagagcagccagatgcccagacccagcgtgccccccctggtgaagaccagcctgttcagcagcaagctgagcacccccgacgtggtgagccccttcggcacccccttcggcagcagcgtgatgaacagaatggccggcatcttcgacgtgaacacctgctacggcagcccccagagcccccagctgatcagaagaggccccagactgtggaccagcgccagcgaccagcagatgaccgagttcagcaaccccagccccagcaccagcatcagcgccgagggcaagaccatgagacagcccagcgtgatctacagctggatccagaacaagagagagcagatcaagaacttcctgagcaagagagtgctgatcatgtacttcttcagcaagcaccccgaggccagcatccaggccgtgttcagcgacgcccagatgcacatctgggccctggagggcctgagccacctggtggccgccagcttcaccgaggacagattcggcgtggtgcagaccaccctgcccgccatcctgaacaccctgctgaccctgcaggaggccgtggacaagtacttcaagctgccccacgccagcagcaagccccccagaatcagcggcagcctggtggacaccagctacaagaccctgagattcgccttcagagccagcctgaagaccgccatctacagaatcaccaccaccttcggcgagcacctgaacgccgtgcaggccagcgccgagcaccagaagagactgcagcagttcctggagttcaaggagtag

SEQ ID NO: 103248 - DNA, 1020 bp, synthetic construct
  misc_feature 1..1020: note = Description of Artificial Sequence: Synthetic coding sequence
  source 1..1020: mol_type = other DNA
atgctgctgagccagtacagccccagcagaagacaggaggtgttcagcctgagccagcccggcggccacccccacaactggaccgccatcagcagagagtgcctgaacctgctgaacggcatgacccagaagctgatcctgtaccaggaggccgccgccaccaacggcagagtgagcagcagctaccccgtggagcccaagaagctgaacagccccgaggagaccgccttccagacccccaagagcagccagatgcccagacccagcgtgccccccctggtgaagaccagcctgttcagcagcaagctgagcacccccgacgtggtgagccccttcggcacccccttcggcagcagcgtgatgaacagaatggccggcatcttcgacgtgaacacctgctacggcagcccccagagcccccagctgatcagaagaggccccagactgtggaccagcgccagcgaccagcagatgaccgagttcagcaaccccagccccagcaccagcatcagcgccgagggcaagaccatgagacagcccagcgtgatctacagctggatccagaacaagagagagcagatcaagaacttcctgagcaagagagtgctgatcatgtacttcttcagcaagcaccccgaggccagcatccaggccgtgttcagcgacgcccagatgcacatctgggccctggagggcctgagccacctggtggccgccagcttcaccgaggacagattcggcgtggtgcagaccaccctgcccgccatcctgaacaccctgctgaccctgcaggaggccgtggacaagtacttcaagctgccccacgccagcagcaagccccccagaatcagcggcagcctggtggacaccagctacaagaccctgagattcgccttcagagccagcctgaagaccgccatctacagaatcaccaccaccttcggcgagcacctgaacgccgtgcaggccagcgccgagcaccagaagagactgcagcagttcctggagttcaaggagtag

SEQ ID NO: 103249 - DNA, 1629 bp, synthetic construct
  misc_feature 1..1629: note = Description of Artificial Sequence: Synthetic coding sequence
  source 1..1629: mol_type = other DNA
atggccaccgccgtgagcagaccctgcgccggcagaagcagagacatcctgtggagagtgctgggctggagaatcgtggccagcatcgtgtggagcgtgctgttcctgcccatctgcaccaccgtgttcatcatcttcagcagaatcgacctgttccaccccatccagtggctgagcgacagcttcagcgacctgtacagcagctacgtgatcttctacttcctgctgctgagcgtggtgatcatcatcatcagcatcttcaacgtggagttctacgccgtggtgcccagcatcccctgcagcagactggccctgatcggcaagatcatccacccccagcagctgatgcacagcttcatccacgccgccatgggcatggtgatggcctggtgcgccgccgtgatcacccagggccagtacagcttcctggtggtgccctgcaccggcaccaacagcttcggcagccccgccgcccagacctgcctgaacgagtaccacctgttcttcctgctgaccggcgccttcatgggctacagctacagcctgctgtacttcgtgaacaacatgaactacctgcccttccccatcatccagcagtacaagttcctgagattcagaagaagcctgctgctgctggtgaagcacagctgcgtggagagcctgttcctggtgagaaacttctgcatcctgtactacttcctgggctacatccccaaggcctggatcagcaccgccatgaacctgcacatcgacgagcaggtgcacagacccctggacaccgtgagcggcctgctgaacctgagcctgctgtaccacgtgtggctgtgcggcgtgttcctgctgaccacctggtacgtgagctggatcctgttcaagatctacgccaccgaggcccacgtgttccccgtgcagccccccttcgccgagggcagcgacgagtgcctgcccaaggtgctgaacagcaaccccccccccatcatcaagtacctggccctgcaggacctgatgctgctgagccagtacagccccagcagaagacaggaggtgttcagcctgagccagcccggcggccacccccacaactggaccgccatcagcagagagtgcctgaacctgctgaacggcatgacccagaagctgatcctgtaccaggaggccgccgccaccaacggcagagtgagcagcagctaccccgtggagcccaagaagctgaacagccccgaggagaccgccttccagacccccaagagcagccagatgcccagacccagcgtgccccccctggtgaagaccagcctgttcagcagcaagctgagcacccccgacgtggtgagccccttcggcacccccttcggcagcagcgtgatgaacagaatggccggcatcttcgacgtgaacacctgctacggcagcccccagagcccccagctgatcagaagaggccccagactgtggaccagcgccagcgaccagcagatgaccgagttcagcaaccccagccccagcaccagcatcagcgccgaggcccccagaggcctgcacagcggctgcttcttcagatgccccaacgcctacctgggcatcagaagaagcgtggccctgagcagcagcatcatctacagaggctag

SEQ ID NO: 103250 - DNA, 1332 bp, synthetic construct
  misc_feature 1..1332: note = Description of Artificial Sequence: Synthetic coding sequence
  source 1..1332: mol_type = other DNA
atgagactgaccagaaagagactgtgcagcttcctgatcgccctgtactgcctgttcagcctgtacgccgcctaccacgtgttcttcggcagaagaagacaggcccccgccggcagccccagaggcctgagaaagggcgccgcccccgccagagagagaagaggcagagagcagagcaccctggagagcgaggagtggaacccctgggagggcgacgagaagaacgagcagcagcacagattcaagaccagcctgcagatcctggacaagagcaccaagggcaagaccgacctgagcgtgcagatctggggcaaggccgccatcggcctgtacctgtgggagcacatcttcgagggcctgctggaccccagcgacgtgaccgcccagtggagagagggcaagagcatcgtgggcagaacccagtacagcttcatcaccggccccgccgtgatccccggctacttcagcgtggacgtgaacaacgtggtgctgatcctgaacggcagagagaaggccaagatcttctacgccacccagtggctgctgtacgcccagaacctggtgcagatccagaagctgcagcacctggccgtggtgctgctgggcaacgagcactgcgacaacgagtggatcaaccccttcctgaagagaaacggcggcttcgtggagctgctgttcatcatctacgacagcccctggatcaacgacgtggacgtgttccagtggcccctgggcgtggccacctacagaaacttccccgtggtggaggccagctggagcatgctgcacgacgagagaccctacctgtgcaacttcctgggcaccatctacgagaacagcagcagacaggccctgatgaacatcctgaagaaggacggcaacgacaagctgtgctgggtgagcgccagagagcactggcagccccaggagaccaacgagagcctgaagaactaccaggacgccctgctgcagagcgacctgaccctgtgccccgtgggcgtgaacaccgagtgctacagaatctacgaggcctgcagctacggcagcatccccgtggtggaggacgtgatgaccgccggcaactgcggcaacaccagcgtgcaccacggcgcccccctgcagctgctgaagagcatgggcgcccccttcatcttcatcaagaactggaaggagctgcccgccgtgctggagaaggagaagaccatcatcctgcaggagaagatcgagagaagaaagatgctgctgcagtggtaccagcacttcaagaccgagctgaagatgaagttcaccaacatcctggagagcagcttcctgatgaacaacaagagctag

SEQ ID NO: 103251 - DNA, 774 bp, synthetic construct
  misc_feature 1..774: note = Description of Artificial Sequence: Synthetic coding sequence
  source 1..774: mol_type = other DNA
atggccgccgacggcgtggacgagagaagccccctgctgagcgccagccacagcggcaacgtgacccccaccgcccccccctacctgcaggagagcagccccagagccgagctgccccccccctacaccgccatcgccagccccgacgccagcggcatccccgtgatcaactgcagagtgtgccagagcctgatcaacctggacggcaagctgcaccagcacgtggtgaagtgcaccgtgtgcaacgaggccacccccatcaagaacccccccaccggcaagaagtacgtgagatgcccctgcaactgcctgctgatctgcaaggacaccagcagaagaatcggctgccccagacccaactgcagaagaatcatcaacctgggccccgtgatgctgatcagcgaggagcagcccgcccagcccgccctgcccatccagcccgagggcaccagagtggtgtgcggccactgcggcaacaccttcctgtggatggagctgagattcaacaccctggccaagtgcccccactgcaagaagatcagcagcgtgggcagcgccctgcccagaagaagatgctgcgcctacatcaccatcggcatgatctgcatcttcatcggcgtgggcctgaccgtgggcacccccgacttcgccagaagattcagagccacctacgtgagctgggccatcgcctacctgctgggcctgatctgcctgatcagagcctgctactggggcgccatcagagtgagctaccccgagcacagcttcgcctag

SEQ ID NO: 103252 - DNA, 2745 bp, synthetic construct
  misc_feature 1..2745: note = Description of Artificial Sequence: Synthetic coding sequence
  source 1..2745: mol_type = other DNA
atgagcctgagccactggccctacttcagactggtgctgaacttcagaccccaggtgatctgcctgccccagccccccaaggtgctgggctacagactggagcccccccacctgaccctggcctgcaccctggagggcatgtacaacatcatcgaggagatcctggagagagacatcaacggcaccctgctgagccaggccacctgcgagctgtgcgacggcaacgagaacagcttcatggtggtgaacgccctgggcgacagatgcgtgagatgcgagcccaccttcgtgaacaccagcagaagctgcgcctgcagcgagcccaacatcctgaccggcggcctgtgcttcagcagcaccggcaacttccccctgagaagaatcagcgccgccagatacggcgaggtgggcatgagcctgaccagcgagtggttcgccaagtacctgcagagcagcgccgccgcctgctgggtgtacgccaacctgaccagctgccaggccctgggcaacatgtgcgtgatgaacatgaacagctacgacttcgccaccttcgacgcctgcggcctgttccagttcatcttcgagaacaccgccggcctgagcaccgtgcacagcatcagcttctggagacagaacctgccctggctgttctacggcgaccagctgggcctggccccccaggtgctgagcagcaccagcctgcccaccaacttcagcttcaagggcgagaaccagaacaccaagctgaagttcgtggccgccagctacgacatcagaggcaacttcctgaagtggcagaccctggagggcggcgtgctgcagctgtgccccgacaccgagaccagactgaacgccgcctacagcttcggcaccacctaccagcagaactgcgagatccccatcagcaagatcctgatcgacttccccacccccatcttctacgacgtgtacctggagtacaccgacgagaaccagcaccagtacatcctggccgtgcccgtgctgaacctgaacctgcagcacaacaagatcttcgtgaaccaggacagcaacagcggcaagtggctgctgaccagaagaatcttcctggtggacgccgtgagcggcagagagaacgacctgggcacccagcccagagtgatcagagtggccacccagatcagcctgagcgtgcacctggtgcccaacaccatcaacggcaacatctacccccccctgatcaccatcgcctacagcgacatcgacatcaaggacgccaacagccagagcgtgaaggtgagcttcagcgtgacctacgagatggaccacggcgaggcccacgtgcagaccgacatcgccctgggcgtgctgggcggcctggccgtgctggccagcctgctgaagaccgccggctggaagagaagaatcggcagccccatgatcgacctgcagaccgtggtgaagttcctggtgtactacgccggcgacctggccaacgtgttcttcatcatcaccgtgggcaccggcctgtactggctgatcttcttcaaggcccagaagagcgtgagcgtgctgctgcccatgcccatccaggaggagagattcgtgacctacgtgggctgcgccttcgccctgaaggccctgcagttcctgcacaagctgatcagccagatcaccatcgacgtgttcttcatcgactgggagagacccaagggcaaggtgctgaaggccgtggagggcgagggcggcgtgagaagcgccaccgtgcccgtgagcatctggagaacctacttcgtggccaacgagtggaacgagatccagaccgtgagaaagatcaacagcctgttccaggtgctgaccgtgctgttcttcctggaggtggtgggcttcaagaacctggccctgatggacagcagcagcagcctgagcagaaacccccccagctacatcgccccctacagctgcatcctgagatacgccgtgagcgccgccctgtggctggccatcggcatcatccaggtggtgttcttcgccgtgttctacgagagattcatcgaggacaagatcagacagttcgtggacctgtgcagcatgagcaacatcagcgtgttcctgctgagccacaagtgcttcggctactacatccacggcagaagcgtgcacggccacgccgacaccaacatggaggagatgaacatgaacctgaagagagaggccgagaacctgtgcagccagagaggcctggtgcccaacaccgacggccagaccttcgagatcgccatcagcaaccagatgagacagcactacgacagaatccacgagaccctgatcagaaagaacggccccgccagactgctgagcagcagcgccagcaccttcgagcagagcatcaaggcctaccacatgatgaacaagttcctgggcagcttcatcgaccacgtgcacaaggagatggactacttcatcaaggacaagctgctgctggagagaatcctgggcatggagttcatggagcccatggagaagagcatcttctacaacgacgagggctacagcttcagcagcgtgctgtactacggcaacgaggccaccctgctgatcttcgacctgctgttcttctgcgtggtggacctggcctgccagaacttcatcctggccagcttcctgacctacctgcagcaggagatcttcagatacatcagaaacaccgtgggccagaagaacctggccagcaagaccctggtggaccagagattcctgatctag

SEQ ID NO: 103253 - DNA, 2988 bp, synthetic construct
  misc_feature 1..2988: note = Description of Artificial Sequence: Synthetic coding sequence
  source 1..2988: mol_type = other DNA
atggccaccagaggcggcgccggcgtggccatggccgtgtggagcctgctgagcgccagagccgtgaccgccttcctgctgctgttcctgcccagattcctgcaggcccagaccttcagcttccccttccagcagcccgagaagtgcgacaacaaccagtacttcgacatcagcgccctgagctgcgtgccctgcggcgccaaccagagacaggacgccagaggcaccagctgcgtgtgcctgcccggcttccagatgatcagcaacaacggcggccccgccatcatctgcaagaagtgccccgagaacatgaagggcgtgaccgaggacggctggaactgcatcagctgccccagcgacctgaccgccgagggcaagtgccactgccccatcggccacatcctggtggagagagacatcaacggcaccctgctgagccaggccacctgcgagctgtgcgacggcaacgagaacagcttcatggtggtgaacgccctgggcgacagatgcgtgagatgcgagcccaccttcgtgaacaccagcagaagctgcgcctgcagcgagcccaacatcctgaccggcggcctgtgcttcagcagcaccggcaacttccccctgagaagaatcagcgccgccagatacggcgaggtgggcatgagcctgaccagcgagtggttcgccaagtacctgcagagcagcgccgccgcctgctgggtgtacgccaacctgaccagctgccaggccctgggcaacatgtgcgtgatgaacatgaacagctacgacttcgccaccttcgacgcctgcggcctgttccagttcatcttcgagaacaccgccggcctgagcaccgtgcacagcatcagcttctggagacagaacctgccctggctgttctacggcgaccagctgggcctggccccccaggtgctgagcagcaccagcctgcccaccaacttcagcttcaagggcgagaaccagaacaccaagctgaagttcgtggccgccagctacgacatcagaggcaacttcctgaagtggcagaccctggagggcggcgtgctgcagctgtgccccgacaccgagaccagactgaacgccgcctacagcttcggcaccacctaccagcagaactgcgagatccccatcagcaagatcctgatcgacttccccacccccatcttctacgacgtgtacctggagtacaccgacgagaaccagcaccagtacatcctggccgtgcccgtgctgaacctgaacctgcagcacaacaagatcttcgtgaaccaggacagcaacagcggcaagtggctgctgaccagaagaatcttcctggtggacgccgtgagcggcagagagaacgacctgggcacccagcccagagtgatcagagtggccacccagatcagcctgagcgtgcacctggtgcccaacaccatcaacggcaacatctacccccccctgatcaccatcgcctacagcgacatcgacatcaaggacgccaacagccagagcgtgaaggtgagcttcagcgtgacctacgagatggaccacggcgaggcccacgtgcagaccgacatcgccctgggcgtgctgggcggcctggccgtgctggccagcctgctgaagaccgccggctggaagagaagaatcggcagccccatgatcgacctgcagaccgtggtgaagttcctggtgtactacgccggcgacctggccaacgtgttcttcatcatcaccgtgggcaccggcctgtactggctgatcttcttcaaggcccagaagagcgtgagcgtgctgctgcccatgcccatccaggaggagagattcgtgacctacgtgggctgcgccttcgccctgaaggccctgcagttcctgcacaagctgatcagccagatcaccatcgacgtgttcttcatcgactgggagagacccaagggcaaggtgctgaaggccgtggagggcgagggcggcgtgagaagcgccaccgtgcccgtgagcatctggagaacctacttcgtggccaacgagtggaacgagatccagaccgtgagaaagatcaacagcctgttccaggtgctgaccgtgctgttcttcctggaggtggtgggcttcaagaacctggccctgatggacagcagcagcagcctgagcagaaacccccccagctacatcgccccctacagctgcatcctgagatacgccgtgagcgccgccctgtggctggccatcggcatcatccaggtggtgttcttcgccgtgttctacgagagattcatcgaggacaagatcagacagttcgtggacctgtgcagcatgagcaacatcagcgtgttcctgctgagccacaagtgcttcggctactacatccacggcagaagcgtgcacggccacgccgacaccaacatggaggagatgaacatgaacctgaagagagaggccgagaacctgtgcagccagagaggcctggtgcccaacaccgacggccagaccttcgagatcgccatcagcaaccagatgagacagcactacgacagaatccacgagaccctgatcagaaagaacggccccgccagactgctgagcagcagcgccagcaccttcgagcagagcatcaaggcctaccacatgatgaacaagttcctgggcagcttcatcgaccacgtgcacaaggagatggactacttcatcaaggacaagctgctgctggagagaatcctgggcatggagttcatggagcccatggagaagagcatcttctacaacgacgagggctacagcttcagcagcgtgctgtactacggcaacgaggccaccctgctgatcttcgacctgctgttcttctgcgtggtggacctggcctgccagaacttcatcctggccagcttcctgacctacctgcagcaggagatcttcagatacatcagaaacaccgtgggccagaagaacctggccagcaagaccctggtggaccagagattcctgatctag

SEQ ID NO: 103254 - DNA, 783 bp, synthetic construct
  misc_feature 1..783: note = Description of Artificial Sequence: Synthetic coding sequence
  source 1..783: mol_type = other DNA
atgctgttcctggccctgggcagcccctgggccgtggagctgcccctgtgcggcagaagaaccgccctgtgcgccgccgccgccctgagaggccccagagccagcgtgagcagagccagcagcagcagcggccccagcggccccgtggccggctggagcaccggccccagcggcgccgccagactgctgagaagacccggcagagcccagatccccgtgtactgggagggctacgtgagattcctgaacacccccagcgacaagagcgaggacggcagactgatctacaccggcaacatggccagagccgtgttcggcgtgaagtgcttcagctacagcaccagcctgatcggcctgaccttcctgccctacatcttcacccagaacaacgccatcagcgagagcgtgcccctgcccatccagatcatcttctacggcatcatgggcagcttcaccgtgatcacccccgtgctgctgcacttcatcaccaagggctacgtgatcagactgtaccacgaggccaccaccgacacctacaaggccatcacctacaacgccatgctggccgagaccagcaccgtgttccaccagaacgacgtgaagatccccgacgccaagcacgtgttcaccaccttctacgccaagaccaagagcctgctggtgaaccccgtgctgttccccaacagagaggactacatccacctgatgggctacgacaaggaggagttcatcctgtacatggaggagaccagcgaggagaagagacacaaggacgacaagtag

SEQ ID NO: 103255 - DNA, 324 bp, synthetic construct
  misc_feature 1..324: note = Description of Artificial Sequence: Synthetic coding sequence
  source 1..324: mol_type = other DNA
atgctgttcctggccctgggcagcccctgggccgtggagctgcccctgtgcggcagaagaaccgccctgtgcgccgccgccgccctgagaggccccagagccagcgtgagcagagccagcagcagcagcggccccagcggccccgtggccggctggagcaccggccccagcggcgccgccagactgctgagaagacccggcagagcccagatccccgtgtactgggagggctacgtgagattcctgaacacccccagcgacaagagcgaggacggcagactgatctacaccggcaacatggccagagccgtgttcggcaagtag

SEQ ID NO: 103256 - DNA, 918 bp, synthetic construct
  misc_feature 1..918: note = Description of Artificial Sequence: Synthetic coding sequence
  source 1..918: mol_type = other DNA
atggagctgcactacctggccaagaagagcaaccaggccgacctgtgcgacgccagagactggagcagcagaggcctgcccggcgaccaggccgacaccgccgccaccagagccgccctgtgctgccagaagcagtgcgccagcacccccagagccaccgagatggagggcagcaagctgagcagcagccccgccagccccagcagcagcctgcagaacagcaccctgcagcccgacgccttcccccccggcctgctgcacagcggcaacaaccagatcaccgccgagagaaaggtgtgcaactgctgcagccaggagctggagaccagcttcacctacgtggacaagaacatcaacctggagcagagaaacagaagcagccccagcgccaagggccacaaccaccccggcgagctgggctgggagaaccccaacgagtggagccaggaggccgccatcagcctgatcagcgaggaggaggacgacaccagcagcgaggccaccagcagcggcaagagcatcgactacggcttcatcagcgccatcctgttcctggtgaccggcatcctgctggtgatcatcagctacatcgtgcccagagaggtgaccgtggaccccaacaccgtggccgccagagagatggagagactggagaaggagagcgccagactgggcgcccacctggacagatgcgtgatcgccggcctgtgcctgctgaccctgggcggcgtgatcctgagctgcctgctgatgatgagcatgtggaagggcgagctgtacagaagaaacagattcgccagcagcaaggagagcgccaagctgtacggcagcttcaacttcagaatgaagaccagcaccaacgagaacaccctggagctgagcctggtggaggaggacgccctggccgtgcagagctag

SEQ ID NO: 103257 - DNA, 951 bp, synthetic construct
  misc_feature 1..951: note = Description of Artificial Sequence: Synthetic coding sequence
  source 1..951: mol_type = other DNA
atgagcggcgacacctgcctgtgccccgccagcggcgccaagcccaagctgagcggcttcaagggcggcggcctgggcaacaagtacgtgcagctgaacgtgggcggcagcctgtactacaccaccgtgagagccctgaccagacacgacaccatgctgaaggccatgttcagcggcagaatggaggtgctgaccgacaaggagggctggatcctgatcgacagatgcggcaagcacttcggcaccatcctgaactacctgagagacgacaccatcaccctgccccagaacagacaggagatcaaggagctgatggccgaggccaagtactacctgatccagggcctggtgaacatgtgccagagcgccctgcaggacaagaaggacagctaccagcccgtgtgcaacatccccatcatcaccagcctgaaggaggaggagagactgatcgagagcagcaccaagcccgtggtgaagctgctgtacaacagaagcaacaacaagtacagctacaccagcaacagcgacgaccacctgctgaagaacatcgagctgttcgacaagctgagcctgagattcaacggcagagtgctgttcatcaaggacgtgatcggcgacgagatctgctgctggagcttctacggccagggcagaaagctggccgaggtgtgctgcaccagcatcgtgtacgccaccgagaagaagcagaccaaggtggagttccccgaggccagaatctacgaggagaccctgaacgtgctgctgtacgagacccccagagtgcccgacaacagcctgctggaggccaccagcagaagcagaagccaggccagccccagcgaggacgaggagaccttcgagctgagagacagagtgagaagaatccacgtgaagagatacagcacctacgacgacagacagctgggccaccagagcacccacagagactag

SEQ ID NO: 103258 - DNA, 210 bp, synthetic construct
  misc_feature 1..210: note = Description of Artificial Sequence: Synthetic coding sequence
  source 1..210: mol_type = other DNA
atgaccaccctgatccccatcctgagcaccttcctgttcgaggacttcagcaaggccagcggcttcaagggccagagacccgagaccctgcacgagagactgaccctggtgagcgtgtacgccccctacctgctgatccccttcatcctgctgatcttcatgctgagaagcccctactacaagtacgaggagaagagaaagaagaagtag

SEQ ID NO: 103259 - DNA, 1125 bp, synthetic construct
  misc_feature 1..1125: note = Description of Artificial Sequence: Synthetic coding sequence
  source 1..1125: mol_type = other DNA
atggtgctgtgggagagccccagacagtgcagcagctggaccctgtgcgagggcttctgctggctgctgctgctgcccgtgatgctgctgatcgtggccagacccgtgaagctggccgccttccccaccagcctgagcgactgccagacccccaccggctggaactgcagcggctacgacgacagagagaacgacctgttcctgtgcgacaccaacacctgcaagttcgacggcgagtgcctgagaatcggcgacaccgtgacctgcgtgtgccagttcaagtgcaacaacgactacgtgcccgtgtgcggcagcaacggcgagagctaccagaacgagtgctacctgagacaggccgcctgcaagcagcagagcgagatcctggtggtgagcgagggcagctgcgccaccgacgccggcagcggcagcggcgacggcgtgcacgagggcagcggcgagaccagccagaaggagaccagcacctgcgacatctgccagttcggcgccgagtgcgacgaggacgccgaggacgtgtggtgcgtgtgcaacatcgactgcagccagaccaacttcaaccccctgtgcgccagcgacggcaagagctacgacaacgcctgccagatcaaggaggccagctgccagaagcaggagaagatcgaggtgatgagcctgggcagatgccaggacaacaccaccaccaccaccaagagcgaggacggccactacgccagaaccgactacgccgagaacgccaacaagctggaggagagcgccagagagcaccacatcccctgccccgagcactacaacggcttctgcatgcacggcaagtgcgagcacagcatcaacatgcaggagcccagctgcagatgcgacgccggctacaccggccagcactgcgagaagaaggactacagcgtgctgtacgtggtgcccggccccgtgagattccagtacgtgctgatcgccgccgtgatcggcaccatccagatcgccgtgatctgcgtggtggtgctgtgcatcaccagaaagtgccccagaagcaacagaatccacagacagaagcagaacaccggccactacagcagcgacaacaccaccagagccagcaccagactgatctag

SEQ ID NO: 103260 - DNA, 528 bp, synthetic construct
  misc_feature 1..528: note = Description of Artificial Sequence: Synthetic coding sequence
  source 1..528: mol_type = other DNA
atggtgctgtgggagagccccagacagtgcagcagctggaccctgtgcgagggcttctgctggctgctgctgctgcccgtgatgctgctgatcgtggccagacccgtgaagctggccgccttccccaccagcctgagcgactgccagacccccaccggctggaactgcagcggctacgacgacagagagaacgacctgttcctgtgcgacaccaacacctgcaagttcgacggcgagtgcctgagaatcggcgacaccgtgacctgcgtgtgccagttcaagtgcaacaacgactacgtgcccgtgtgcggcagcaacggcgagagctaccagaacgagtgctacctgagacaggccgcctgcaagcagcagagcgagatcctggtggtgagcgagggcagctgcgccaccgacgccggcagcggcagcggcgacggcggcagaagctgcctgttcacctacctgaagatctactggtggatcctgctgtgcatcttcacctacgtgtgcagcatcagcgacatctag

SEQ ID NO: 103261 - DNA, 2427 bp, synthetic construct
  misc_feature 1..2427: note = Description of Artificial Sequence: Synthetic coding sequence
  source 1..2427: mol_type = other DNA
atggccgagctgctggccagcgccggcagcgcctgcagctgggacttccccagagccccccccagcttccccccccccgccgccagcagaggcggcctgggcggcaccagaagcttcagaccccacagaggcgccgagagccccagacccggcagagacagagacggcgtgagagtgcccatggccagcagcagatgccccgcccccagaggctgcagatgcctgcccggcgccagcctggcctggctgggcaccgtgctgctgctgctggccgactgggtgctgctgagaaccgccctgcccagaatcttcagcctgctggtgcccaccgccctgcccctgctgagagtgtgggccgtgggcctgagcagatgggccgtgctgtggctgggcgcctgcggcgtgctgagagccaccgtgggcagcaagagcgagaacgccggcgcccagggctggctggccgccctgaagcccctggccgccgccctgggcctggccctgcccggcctggccctgttcagagagctgatcagctggggcgcccccggcagcgccgacagcaccagactgctgcactggggcagccaccccaccgccttcgtggtgagctacgccgccgccctgcccgccgccgccctgtggcacaagctgggcagcctgtgggtgcccggcggccagggcggcagcggcaaccccgtgagaagactgctgggctgcctgggcagcgagaccagaagactgagcctgttcctggtgctggtggtgctgagcagcctgggcgagatggccatccccttcttcaccggcagactgaccgactggatcctgcaggacggcagcgccgacaccttcaccagaaacctgaccctgatgagcatcctgaccatcgccagcgccgtgctggagttcgtgggcgacggcatctacaacaacaccatgggccacgtgcacagccacctgcagggcgaggtgttcggcgccgtgctgagacaggagaccgagttcttccagcagaaccagaccggcaacatcatgagcagagtgaccgaggacaccagcaccctgagcgacagcctgagcgagaacctgagcctgttcctgtggtacctggtgagaggcctgtgcctgctgggcatcatgctgtggggcagcgtgagcctgaccatggtgaccctgatcaccctgcccctgctgttcctgctgcccaagaaggtgggcaagtggtaccagctgctggaggtgcaggtgagagagagcctggccaagagcagccaggtggccatcgaggccctgagcgccatgcccaccgtgagaagcttcgccaacgaggagggcgaggcccagaagttcagagagaagctgcaggagatcaagaccctgaaccagaaggaggccgtggcctacgccgtgaacagctggaccaccagcatcagcggcatgctgctgaaggtgggcatcctgtacatcggcggccagctggtgaccagcggcgccgtgagcagcggcaacctggtgaccttcgtgctgtaccagatgcagttcacccaggccgtggaggtgctgctgagcatctaccccagagtgcagaaggccgtgggcagcagcgagaagatcttcgagtacctggacagaacccccagatgcccccccagcggcctgctgacccccctgcacctggagggcctggtgcagttccaggacgtgagcttcgcctaccccaacagacccgacgtgctggtgctgcagggcctgaccttcaccctgagacccggcgaggtgaccgccctggtgggccccaacggcagcggcaagagcaccgtggccgccctgctgcagaacctgtaccagcccaccggcggccagctgctgctggacggcaagcccctgccccagtacgagcacagatacctgcacagacaggtggccgccgtgggccaggagccccaggtgttcggcagaagcctgcaggagaacatcgcctacggcctgacccagaagcccaccatggaggagatcaccgccgccgccgtgaagagcggcgcccacagcttcatcagcggcctgccccagggctacgacaccgaggtggacgaggccggcagccagctgagcggcggccagagacaggccgtggccctggccagagccctgatcagaaagccctgcgtgctgatcctggacgacgccaccagcgccctggacgccaacagccagctgcaggtggagcagctgctgtacgagagccccgagagatacagcagaagcgtgctgctgatcacccagcacctgagcctggtggagcaggccgaccacatcctgttcctggagggcggcgccatcagagagggcggcacccaccagcagctgatggagaagaagggctgctactgggccatggtgcaggcccccgccgacgcccccgagtag

SEQ ID NO: 103262 - DNA, 2427 bp, synthetic construct; identical to SEQ ID NO: 103261
  misc_feature 1..2427: note = Description of Artificial Sequence: Synthetic coding sequence
  source 1..2427: mol_type = other DNA

SEQ ID NO: 103263 - DNA, 2427 bp, synthetic construct; identical to SEQ ID NO: 103261
  misc_feature 1..2427: note = Description of Artificial Sequence: Synthetic coding sequence
  source 1..2427: mol_type = other DNA

SEQ ID NO: 103264 - DNA, 2427 bp, synthetic construct; identical to SEQ ID NO: 103261
  misc_feature 1..2427: note = Description of Artificial Sequence: Synthetic coding sequence
  source 1..2427: mol_type = other DNA

SEQ ID NO: 103265 - DNA, 2427 bp, synthetic construct; identical to SEQ ID NO: 103261
  misc_feature 1..2427: note = Description of Artificial Sequence: Synthetic coding sequence
  source 1..2427: mol_type = other DNA

SEQ ID NO: 103266 - DNA, 1644 bp, synthetic construct
  misc_feature 1..1644: note = Description of Artificial Sequence: Synthetic coding sequence
  source 1..1644: mol_type = other DNA
atggccatccccttcttcaccggcagactgaccgactggatcctgcaggacggcagcgccgacaccttcaccagaaacctgaccctgatgagcatcctgaccatcgccagcgccgtgctggagttcgtgggcgacggcatctacaacaacaccatgggccacgtgcacagccacctgcagggcgaggtgttcggcgccgtgctgagacaggagaccgagttcttccagcagaaccagaccggcaacatcatgagcagagtgaccgaggacaccagcaccctgagcgacagcctgagcgagaacctgagcctgttcctgtggtacctggtgagaggcctgtgcctgctgggcatcatgctgtggggcagcgtgagcctgaccatggtgaccctgatcaccctgcccctgctgttcctgctgcccaagaaggtgggcaagtggtaccagctgctggaggtgcaggtgagagagagcctggccaagagcagccaggtggccatcgaggccctgagcgccatgcccaccgtgagaagcttcgccaacgaggagggcgaggcccagaagttcagagagaagctgcaggagatcaagaccctgaaccagaaggaggccgtggcctacgccgtgaacagctggaccaccagcatcagcggcatgctgctgaaggtgggcatcctgtacatcggcggccagctggtgaccagcggcgccgtgagcagcggcaacctggtgaccttcgtgctgtaccagatgcagttcacccaggccgtggaggtgctgctgagcatctaccccagagtgcagaaggccgtgggcagcagcgagaagatcttcgagtacctggacagaacccccagatgcccccccagcggcctgctgacccccctgcacctggagggcctggtgcagttccaggacgtgagcttcgcctaccccaacagacccgacgtgctggtgctgcagggcctgaccttcaccctgagacccggcgaggtgaccgccctggtgggccccaacggcagcggcaagagcaccgtggccgccctgctgcagaacctgtaccagcccaccggcggccagctgctgctggacggcaagcccctgccccagtacgagcacagatacctgcacagacaggtggccgccgtgggccaggagccccaggtgttcggcagaagcctgcaggagaacatcgcctacggcctgacccagaagcccaccatggaggagatcaccgccgccgccgtgaagagcggcgcccacagcttcatcagcggcctgccccagggctacgacaccgaggtggacgaggccggcagccagctgagcggcggccagagacaggccgtggccctggccagagccctgatcagaaagccctgcgtgctgatcctggacgacgccaccagcgccctggacgccaacagccagctgcaggtggagcagctgctgtacgagagccccgagagatacagcagaagcgtgctgctgatcacccagcacctgagcctggtggagcaggccgaccacatcctgttcctggagggcggcgccatcagagagggcggcacccaccagcagctgatggagaagaagggctgctactgggccatggtgcaggcccccgccgacgcccccgagtag

SEQ ID NO: 103267 - DNA, 2427 bp, synthetic construct
  misc_feature 1..2427: note = Description of Artificial Sequence: Synthetic coding sequence
  source 1..2427: mol_type = other DNA
atggccgagctgctggccagcgccggcagcgcctgcagctgggacttccccagagccccccccagcttccccccccccgccgccagcagaggcggcctgggcggcaccagaagcttcagaccccacagaggcgccgagagccccagacccggcagagacagagacggcgtgagagtgcccatggccagcagcagatgccccgcccccagaggctgcagatgcctgcccggcgccagcctggcctggctgggcaccgtgctgctgctgctggccgactgggtgctgctgagaaccgccctgcccagaatcttcagcctgctggtgcccaccgccctgcccctgctgagagtgtgggccgtgggcctgagcagatgggccgtgctgtggctgggcgcctgcggcgtgctgagagccaccggcggcagcaagagcgagaacgccggcgcccagggctggctggccgccctgaagcccctggccgccgccctgggcctggccctgcccggcctggccctgttcagagagctgatcagctggggcgcccccggcagcgccgacagcaccagactgctgcactggggcagccaccccaccgccttcgtggtgagctacgccgccgccctgcccgccgccgccctgtggcacaagctgggcagcctgtgggtgcccggcggccagggcggcagcggcaaccccgtgagaagactgctgggctgcctgggcagcgagaccagaagactgagcctgttcctggtgctggtggtgctgagcagcctgggcgagatggccatccccttcttcaccggcagactgaccgactggatcctgcaggacggcagcgccgacaccttcaccagaaacctgaccctgatgagcatcctgaccatcgccagcgccgtgctggagttcgtgggcgacggcatctacaacaacaccatgggccacgtgcacagccacctgcagggcgaggtgttcggcgccgtgctgagacaggagaccgagttcttccagcagaaccagaccggcaacatcatgagcagagtgaccgaggacaccagcaccctgagcgacagcctgagcgagaacctgagcctgttcctgtggtacctggtgagaggcctgtgcctgctgggcatcatgctgtggggcagcgtgagcctgaccatggtgaccctgatcaccctgcccctgctgttcctgctgcccaagaaggtgggcaagtggtaccagctgctggaggtgcaggtgagagagagcctggccaagagcagccaggtggccatcgaggccctgagcgccatgcccaccgtgagaagcttcgccaacgaggagggcgaggcccagaagttcagagagaagctgcaggagatcaagaccctgaaccagaaggaggccgtggcctacgccgtgaacagctggaccaccagcatcagcggcatgctgctgaaggtgggcatcctgtacatcggcggccagctggtgaccagcggcgccgtgagcagcggcaacctggtgaccttcgtgctgtaccagatgcagttcacccaggccgtggaggtgctgctgagcatctaccccagagtgcagaaggccgtgggcagcagcgagaagatcttcgagtacctggacagaacccccagatgcccccccagcggcctgctgacccccctgcacctggagggcctggtgcagttccaggacgtgagcttcgcctaccccaacagacccgacgtgctggtgctgcagggcctgaccttcaccctgagacccggcgaggtgaccgccctggtgggccccaacggcagcggcaagagcaccgtggccgccctgctgcagaacctgtaccagcccaccggcggccagctgctgctggacggcaagcccctgccccagtacgagcacagatacctgcacagacaggtggccgccgtgggccaggagccccaggtgttcggcagaagcctgcaggagaacatcgcctacggcctgacccagaagcccaccatggaggagatcaccgccgccgccgtgaagagcggcgcccacagcttcatcagcggcctgccccagggctacgacaccgaggtggacgaggccggcagccagctgagcggcggccagagacaggccgtggccctggccagagccctgatcagaaagccctgcgtgctgatcctggacgacgccaccagcgccctggacgccaacagccagctgcaggtggagcagctgctgtacgagagccccgagagatacagcagaagcgtgctgctgatcacccagcacctgagcctggtggagcaggccgaccacatcctgttcctggagggcggcgccatcagagagggcggcacccaccagcagctgatggagaagaagggctgctactgggccatggtgcaggcccccgccgacgcccccgagtag

SEQ ID NO: 103268 - DNA, 2427 bp, synthetic construct; identical to SEQ ID NO: 103261
  misc_feature 1..2427: note = Description of Artificial Sequence: Synthetic coding sequence
  source 1..2427: mol_type = other DNA

SEQ ID NO: 103269 - DNA, 2427 bp, synthetic construct; identical to SEQ ID NO: 103261
  misc_feature 1..2427: note = Description of Artificial Sequence: Synthetic coding sequence
  source 1..2427: mol_type = other DNA

SEQ ID NO: 103270 - DNA, 1644 bp, synthetic construct; identical to SEQ ID NO: 103266
  misc_feature 1..1644: note = Description of Artificial Sequence: Synthetic coding sequence
  source 1..1644: mol_type = other DNA

SEQ ID NO: 103271 - DNA, 1644 bp, synthetic construct; identical to SEQ ID NO: 103266
  misc_feature 1..1644: note = Description of Artificial Sequence: Synthetic coding sequence
  source 1..1644: mol_type = other DNA

SEQ ID NO: 103272 - DNA, 1644 bp, synthetic construct; identical to SEQ ID NO: 103266
  misc_feature 1..1644: note = Description of Artificial Sequence: Synthetic coding sequence
  source 1..1644: mol_type = other DNA

SEQ ID NO: 103273 - DNA, 1644 bp, synthetic construct; identical to SEQ ID NO: 103266
  misc_feature 1..1644: note = Description of Artificial Sequence: Synthetic coding sequence
  source 1..1644: mol_type = other DNA

SEQ ID NO: 103274 - DNA, 1644 bp, synthetic construct; identical to SEQ ID NO: 103266
  misc_feature 1..1644: note = Description of Artificial Sequence: Synthetic coding sequence
  source 1..1644: mol_type = other DNA

SEQ ID NO: 103275 - DNA, 1644 bp, synthetic construct; identical to SEQ ID NO: 103266
  misc_feature 1..1644: note = Description of Artificial Sequence: Synthetic coding sequence
  source 1..1644: mol_type = other DNA

SEQ ID NO: 103276 - DNA, 1644 bp, synthetic construct; identical to SEQ ID NO: 103266
  misc_feature 1..1644: note = Description of Artificial Sequence: Synthetic coding sequence
  source 1..1644: mol_type = other DNA

SEQ ID NO: 103277 - DNA, 2061 bp, synthetic construct
  misc_feature 1..2061: note = Description of Artificial Sequence: Synthetic coding sequence
  source 1..2061: mol_type = other DNA
atgagactgcccgacctgagaccctggaccagcctgctgctggtggacgccgccctgctgtggctgctgcagggccccctgggcaccctgctgccccagggcctgcccggcctgtggctggagggcaccctgagactgggcggcctgtggggcctgctgaagctgagaggcctgctgggcttcgtgggcaccctgctgctgcccctgtgcctggccacccccctgaccgtgagcctgagagccctggtggccggcgccagcagagccccccccgccagagtggccagcgccccctggagctggctgctggtgggctacggcgccgccggcctgagctggagcctgtgggccgtgctgagcccccccggcgcccaggagaaggagcaggaccaggtgaacaacaaggtgctgatgtggagactgctgaagctgagcagacccgacctgcccctgctggtggccgccttcttcttcctggtgctggccgtgctgggcgagaccctgatcccccactacagcggcagagtgatcgacatcctgggcggcgacttcgacccccacgccttcgccagcgccatcttcttcatgtgcctgttcagcttcggcagcagcctgagcgccggctgcagaggcggctgcttcacctacaccatgagcagaatcaacctgagaatcagagagcagctgttcagcagcctgctgagacaggacctgggcttcttccaggagaccaagaccggcgagctgaacagcagactgagcagcgacaccaccctgatgagcaactggctgcccctgaacgccaacgtgctgctgagaagcctggtgaaggtggtgggcctgtacggcttcatgctgagcatcagccccagactgaccctgctgagcctgctgcacatgcccttcaccatcgccgccgagaaggtgtacaacaccagacaccaggaggtgctgagagagatccaggacgccgtggccagagccggccaggtggtgagagaggccgtgggcggcctgcagaccgtgagaagcttcggcgccgaggagcacgaggtgtgcagatacaaggaggccctggagcagtgcagacagctgtactggagaagagacctggagagagccctgtacctgctggtgagaagagtgctgcacctgggcgtgcagatgctgatgctgagctgcggcctgcagcagatgcaggacggcgagctgacccagggcagcctgctgagcttcatgatctaccaggagagcgtgggcagctacgtgcagaccctggtgtacatctacggcgacatgctgagcaacgtgggcgccgccgagaaggtgttcagctacatggacagacagcccaacctgcccagccccggcaccctggcccccaccaccctgcagggcgtggtgaagttccaggacgtgagcttcgcctaccccaacagacccgacagacccgtgctgaagggcctgaccttcaccctgagacccggcgaggtgaccgccctggtgggccccaacggcagcggcaagagcaccgtggccgccctgctgcagaacctgtaccagcccaccggcggccaggtgctgctggacgagaagcccatcagccagtacgagcactgctacctgcacagccaggtggtgagcgtgggccaggagcccgtgctgttcagcggcagcgtgagaaacaacatcgcctacggcctgcagagctgcgaggacgacaaggtgatggccgccgcccaggccgcccacgccgacgacttcatccaggagatggagcacggcatctacaccgacgtgggcgagaagggcagccagctggccgccggccagaagcagagactggccatcgccagagccctggtgagagaccccagagtgctgatcctggacgaggccaccagcgccctggacgtgcagtgcgagcaggccctgcaggactggaacagcagaggcgacagaaccgtgctggtgatcgcccacagactgcagaccgtgcagagagcccaccagatcctggtgctgcaggagggcaagctgcagaagctggcccagctgtag

SEQ ID NO: 103278 - DNA, 1962 bp, synthetic construct
  misc_feature 1..1962: note = Description of Artificial Sequence: Synthetic coding sequence
  source 1..1962: mol_type = other DNA
atgagactgcccgacctgagaccctggaccagcctgctgctggtggacgccgccctgctgtggctgctgcagggccccctgggcaccctgctgccccagggcctgcccggcctgtggctggagggcaccctgagactgggcggcctgtggggcctgctgaagctgagaggcctgctgggcttcgtgggcaccctgctgctgcccctgtgcctggccacccccctgaccgtgagcctgagagccctggtggccggcgccagcagagccccccccgccagagtggccagcgccccctggagctggctgctggtgggctacggcgccgccggcctgagctggagcctgtgggccgtgctgagcccccccggcgcccaggagaaggagcaggaccaggtgaacaacaaggtgctgatgtggagactgctgaagctgagcagacccgacctgcccctgctggtggccgccttcttcttcctggtgctggccgtgctgggcgagaccctgatcccccactacagcggcagagtgatcgacatcctgggcggcgacttcgacccccacgccttcgccagcgccatcttcttcatgtgcctgttcagcttcggcagcagcctgagcgccggctgcagaggcggctgcttcacctacaccatgagcagaatcaacctgagaatcagagagcagctgttcagcagcctgctgagacaggacctgggcttcttccaggagaccaagaccggcgagctgaacagcagactgagcagcgacaccaccctgatgagcaactggctgcccctgaacgccaacgtgctgctgagaagcctggtgaaggtggtgggcctgtacggcttcatgctgagcatcagccccagactgaccctgctgagcctgctgcacatgcccttcaccatcgccgccgagaaggtgtacaacaccagacaccaggaggtgctgagagagatccaggacgccgtggccagagccggccaggtggtgagagaggccgtgggcggcctgcagaccgtgagaagcttcggcgccgaggagcacgaggtgtgcagatacaaggaggccctggagcagtgcagacagctgtactggagaagagacctggagagagccctgtacctgctggtgagaagagtgctgcacctgggcgtgcagatgctgatgctgagctgcggcctgcagcagatgcaggacggcgagctgacccagggcagcctgctgagcttcatgatctaccaggagagcgtgggcagctacgtgcagaccctggtgtacatctacggcgacatgctgagcaacgtgggcgccgccgagaaggtgttcagctacatggacagacagcccaacctgcccagccccggcaccctggcccccaccaccctgcagggcgtggtgaagttccaggacgtgagcttcgcctaccccaacagacccgacagacccgtgctgaagggcctgaccttcaccctgagacccggcgaggtgaccgccctggtgggccccaacggcagcggcaagagcaccgtggccgccctgctgcagaacctgtaccagcccaccggcggccaggtgctgctggacgagaagcccatcagccagtacgagcactgctacctgcacagccaggtggtgagcgtgggccaggagcccgtgctgttcagcggcagcgtgagaaacaacatcgcctacggcctgcagagctgcgaggacgacaaggtgatggccgccgcccaggccgcccacgccgacgacttcatccaggagatggagcacggcatctacaccgacgtgggcgagaagggcagccagctggccgccggccagaagcagagactggccatcgccagagccctggtgagagaccccagagtgctgatcctggacgaggccaccagcgccctggacgtgcagtgcgagcaggccaagaccctgtggaagttcatgatcttctag

SEQ ID NO: 103279 - DNA, 2061 bp, synthetic construct; identical to SEQ ID NO: 103277
  misc_feature 1..2061: note = Description of Artificial Sequence: Synthetic coding sequence
  source 1..2061: mol_type = other DNA

SEQ ID NO: 103280 - DNA, 1962 bp, synthetic construct; identical to SEQ ID NO: 103278
  misc_feature 1..1962: note = Description of Artificial Sequence: Synthetic coding sequence
  source 1..1962: mol_type = other DNA

SEQ ID NO: 103281 - DNA, 2061 bp, synthetic construct; identical to SEQ ID NO: 103277
  misc_feature 1..2061: note = Description of Artificial Sequence: Synthetic coding sequence
  source 1..2061: mol_type = other DNA

SEQ ID NO: 103282 - DNA, 1962 bp, synthetic construct; identical to SEQ ID NO: 103278
  misc_feature 1..1962: note = Description of Artificial Sequence: Synthetic coding sequence
  source 1..1962: mol_type = other DNA

SEQ ID NO: 103283 - DNA, 1962 bp, synthetic construct; identical to SEQ ID NO: 103278
  misc_feature 1..1962: note = Description of Artificial Sequence: Synthetic coding sequence
  source 1..1962: mol_type = other DNA

SEQ ID NO: 103284 - DNA, 2061 bp, synthetic construct
  misc_feature 1..2061: note = Description of Artificial Sequence: Synthetic coding sequence
  source 1..2061: mol_type = other DNA
atgagactgcccgacctgagaccctggaccagcctgctgctggtggacgccgccctgctgtggctgctgcagggccccctgggcaccctgctgccccagggcctgcccggcctgtggctggagggcaccctgagactgggcggcctgtggggcctgctgaagctgagaggcctgctgggcttcgtgggcaccctgctgctgcccctgtgcctggccacccccctgaccgtgagcctgagagccctggtggccggcgccagcagagccccccccgccagagtggccagcgccccctggagctggctgctggtgggctacggcgccgccggcctgagctggagcctgtgggccgtgctgagcccccccggcgcccaggagaaggagcaggaccaggtgaacaacaaggtgctgatgtggagactgctgaagctgagcagacccgacctgcccctgctggtggccgccttcttcttcctggtgctggccgtgctgggcgagaccctgatcccccactacagcggcagagtgatcgacatcctgggcggcgacttcgacccccacgccttcgccagcgccatcttcttcatgtgcctgttcagcttcggcagcagcctgagcgccggctgcagaggcggctgcttcacctacaccatgagcagaatcaacctgagaatcagagagcagctgttcagcagcctgctgagacaggacctgggcttcttccaggagaccaagaccggcgagctgaacagcagactgagcagcgacaccaccctgatgagcaactggctgcccctgaacgccaacgtgctgctgagaagcctggtgaaggtggtgggcctgtacggcttcatgctgagcatcagccccagactgaccctgctgagcctgctgcacatgcccttcaccatcgccgccgagaaggtgtacaacaccagacaccaggaggtgctgagagagatccaggacgccgtggccagagccggccaggtggtgagagaggccgtgggcggcctgcagaccgtgagaagcttcggcgccgaggagcacgaggtgtgcagatacaaggaggccctggagcagtgcagacagctgtactggagaagagacctggagagagccctgtacctgctgatcagaagagtgctgcacctgggcgtgcagatgctgatgctgagctgcggcctgcagcagatgcaggacggcgagctgacccagggcagcctgctgagcttcatgatctaccaggagagcgtgggcagctacgtgcagaccctggtgtacatctacggcgacatgctgagcaacgtgggcgccgccgagaaggtgttcagctacatggacagacagcccaacctgcccagccccggcaccctggcccccaccaccctgcagggcgtggtgaagttccaggacgtgagcttcgcctaccccaacagacccgacagacccgtgctgaagggcctgaccttcaccctgagacccggcgaggtgaccgccctggtgggccccaacggcagcggcaagagcaccgtggccgccctgctgcagaacctgtaccagcccaccggcggccaggtgctgctggacgagaagcccatcagccagtacgagcactgctacctgcacagccaggtggtgagcgtgggccaggagcccgtgctgttcagcggcagcgtgagaaacaacatcacctacggcctgcagagctgcgaggacgacaaggtgatggccgccgcccaggccgcccacgccgacgacttcatccaggagatggagcacggcatctacaccgacgtgggcgagaagggcagccagctggccgccggccagaagcagagactggccatcgccagagccctggtgagagaccccagagtgctgatcctggacgaggccaccagcgccctggacgtgcagtgcgagcaggccctgcaggactggaacagcagaggcgacagaaccgtgctggtgatcgcccacagactgcagaccgtgcagagagcccaccagatcctggtgctgcaggagggcaagctgcagaagctggcccagctgtag

SEQ ID NO: 103285 - DNA, 1962 bp, synthetic construct; identical to SEQ ID NO: 103278
  misc_feature 1..1962: note = Description of Artificial Sequence: Synthetic coding sequence
  source 1..1962: mol_type = other DNA

SEQ ID NO: 103286 - DNA, 1962 bp, synthetic construct; identical to SEQ ID NO: 103278
  misc_feature 1..1962: note = Description of Artificial Sequence: Synthetic coding sequence
  source 1..1962: mol_type = other DNA

SEQ ID NO: 103287 - DNA, 2061 bp, synthetic construct; identical to SEQ ID NO: 103277
  misc_feature 1..2061: note = Description of Artificial Sequence: Synthetic coding sequence
  source 1..2061: mol_type = other DNA

SEQ ID NO: 103288 - DNA, 1962 bp, synthetic construct
  misc_feature 1..1962: note = Description of Artificial Sequence: Synthetic coding sequence
  source 1..1962: mol_type = other DNA
atgagactgcccgacctgagaccctggaccagcctgctgctggtggacgccgccctgctgtggctgctgcagggccccctgggcaccctgctgccccagggcctgcccggcctgtggctggagggcaccctgagactgggcggcctgtggggcctgctgaagctgagaggcctgctgggcttcgtgggcaccctgctgctgcccctgtgcctggccacccccctgaccgtgagcctgagagccctggtggccggcgccagcagagccccccccgccagagtggccagcgccccctggagctggctgctggtgggctacggcgccgccggcctgagctggagcctgtgggccgtgctgagcccccccggcgcccaggagaaggagcaggaccaggtgaacaacaaggtgctgatgtggagactgctgaagctgagcagacccgacctgcccctgctggtggccgccttcttcttcctggtgctggccgtgctgggcgagaccctgatcccccactacagcggcagagtgatcgacatcctgggcggcgacttcgacccccacgccttcgccagcgccatcttcttcatgtgcctgttcagcttcggcagcagcctgagcgccggctgcagaggcggctgcttcacctacaccatgagcagaatcaacctgagaatcagagagcagctgttcagcagcctgctgagacaggacctgggcttcttccaggagaccaagaccggcgagctgaacagcagactgagcagcgacaccaccctgatgagcaactggctgcccctgaacgccaacgtgctgctgagaagcctggtgaaggtggtgggcctgtacggcttcatgctgagcatcagccccagactgaccctgctgagcctgctgcacatgcccttcaccatcgccgccgagaaggtgtacaacaccagacaccaggaggtgctgagagagatccaggacgccgtggccagagccggccaggtggtgagagaggccgtgggcggcctgcagaccgtgagaagcttcggcgccgaggagcacgaggtgtgcagatacaaggaggccctggagcagtgcagacagctgtactggagaagagacctggagagagccctgtacctgctgatcagaagagtgctgcacctgggcgtgcagatgctgatgctgagctgcggcctgcagcagatgcaggacggcgagctgacccagggcagcctgctgagcttcatgatctaccaggagagcgtgggcagctacgtgcagaccctggtgtacatctacggcgacatgctgagcaacgtgggcgccgccgagaaggtgttcagctacatggacagacagcccaacctgcccagccccggcaccctggcccccaccaccctgcagggcgtggtgaagttccaggacgtgagcttcgcctaccccaacagacccgacagacccgtgctgaagggcctgaccttcaccctgagacccggcgaggtgaccgccctggtgggccccaacggcagcggcaagagcaccgtggccgccctgctgcagaacctgtaccagcccaccggcggccaggtgctgctggacgagaagcccatcagccagtacgagcactgctacctgcacagccaggtggtgagcgtgggccaggagcccgtgctgttcagcggcagcgtgagaaacaacatcacctacggcctgcagagctgcgaggacgacaaggtgatggccgccgcccaggccgcccacgccgacgacttcatccaggagatggagcacggcatctacaccgacgtgggcgagaagggcagccagctggccgccggccagaagcagagactggccatcgccagagccctggtgagagaccccagagtgctgatcctggacgaggccaccagcgccctggacgtgcagtgcgagcaggccaagaccctgtggaagttcatgatcttctag

SEQ ID NO: 103289 - DNA, 1962 bp, synthetic construct; identical to SEQ ID NO: 103278
  misc_feature 1..1962: note = Description of Artificial Sequence: Synthetic coding sequence
  source 1..1962: mol_type = other DNA

SEQ ID NO: 103290 - DNA, 2112 bp, synthetic construct
  misc_feature 1..2112: note = Description of Artificial Sequence: Synthetic coding sequence
  source 1..2112: mol_type = other DNA
atgagactgcccgacctgagaccctggaccagcctgctgctggtggacgccgccctgctgtggctgctgcagggccccctgggcaccctgctgccccagggcctgcccggcctgtggctggagggcaccctgagactgggcggcctgtggggcctgctgaagctgagaggcctgctgggcttcgtgggcaccctgctgctgcccctgtgcctggccacccccctgaccgtgagcctgagagccctggtggccggcgccagcagagccccccccgccagagtggccagcgccccctggagctggctgctggtgggctacggcgccgccggcctgagctggagcctgtgggccgtgctgagcccccccggcgcccaggagaaggagcaggaccaggtgaacaacaaggtgctgatgtggagactgctgaagctgagcagacccgacctgcccctgctggtggccgccttcttcttcctggtgctggccgtgctgggcgagaccctgatcccccactacagcggcagagtgatcgacatcctgggcggcgacttcgacccccacgccttcgccagcgccatcttcttcatgtgcctgttcagcttcggcagcagcctgagcgccggctgcagaggcggctgcttcacctacaccatgagcagaatcaacctgagaatcagagagcagctgttcagcagcctgctgagacaggacctgggcttcttccaggagaccaagaccggcgagctgaacagcagactgagcagcgacaccaccctgatgagcaactggctgcccctgaacgccaacgtgctgctgagaagcctggtgaaggtggtgggcctgtacggcttcatgctgagcatcagccccagactgaccctgctgagcctgctgcacatgcccttcaccatcgccgccgagaaggtgtacaacaccagacaccaggaggtgctgagagagatccaggacgccgtggccagagccggccaggtggtgagagaggccgtgggcggcctgcagaccgtgagaagcttcggcgccgaggagcacgaggtgtgcagatacaaggaggccctggagcagtgcagacagctgtactggagaagagacctggagagagccctgtacctgctggtgagaagagtgctgcacctgggcgtgcagatgctgatgctgagctgcggcctgcagcagatgcaggacggcgagctgacccagggcagcctgctgagcttcatgatctaccaggagagcgtgggcagctacgtgcagaccctggtgtacatctacggcgacatgctgagcaacgtgggcgccgccgagaaggtgttcagctacatggacagacagcccaacctgcccagccccggcaccctggcccccaccaccctgcagggcgtggtgaagttccaggacgtgagcttcgcctaccccaacagacccgacagacccgtgctgaagggcctgaccttcaccctgagacccggcgaggtgaccgccctggtgggccccaacggcagcggcaagagcaccgtggccgccctgctgcagaacctgtaccagcccaccggcggccaggtgctgctggacgagaagcccatcagccagtacgagcactgctacctgcacagccaggtggtgagcgtgggccaggagcccgtgctgttcagcggcagcgtgagaaacaacatcgcctacggcctgcagagctgcgaggacgacaaggtgatggccgccgcccaggccgcccacgccgacgacttcatccaggagatggagcacggcatctacaccgacgtgggcgagaagggcagccagctggccgccggccagaagcagagactggccatcgccagagccctggtgagagaccccagagtgctgatcctggacgaggccaccagcgccctggacgtgcagtgcgagcaggccctgcaggactggaacagcagaggcgacagaaccgtgctggtgatcgcccacagactgcaggccgtgcagagagcccaccagatcctggtgctgcaggagggcaagctgcagaagctggcccagctgcaggagggccaggacctgtacagcagactggtgcagcagagactgatggactag

SEQ ID NO: 103291 - DNA, 2112 bp, synthetic construct; identical to SEQ ID NO: 103290
  misc_feature 1..2112: note = Description of Artificial Sequence: Synthetic coding sequence
  source 1..2112: mol_type = other DNA

SEQ ID NO: 103292 - DNA, 2112 bp, synthetic construct; identical to SEQ ID NO: 103290
  misc_feature 1..2112: note = Description of Artificial Sequence: Synthetic coding sequence
  source 1..2112: mol_type = other DNA

SEQ ID NO: 103293 - DNA, 2310 bp, synthetic construct
  misc_feature 1..2310: note = Description of Artificial Sequence: Synthetic coding sequence
  source 1..2310: mol_type = other DNA
atgagactgcccgacctgagaccctggaccagcctgctgctggtggacgccgccctgctgtggctgctgcagggccccctgggcaccctgctgccccagggcctgcccggcctgtggctggagggcaccctgagactgggcggcctgtggggcctgctgaagctgagaggcctgctgggcttcgtgggcaccctgctgctgcccctgtgcctggccacccccctgaccgtgagcctgagagccctggtggccggcgccagcagagccccccccgccagagtggccagcgccccctggagctggctgctggtgggctacggcgccgccggcctgagctggagcctgtgggccgtgctgagcccccccggcgcccaggagaaggagcaggaccaggtgaacaacaaggtgctgatgtggagactgctgaagctgagcagacccgacctgcccctgctggtggccgccttcttcttcctggtgctggccgtgctgggcgagaccctgatcccccactacagcggcagagtgatcgacatcctgggcggcgacttcgacccccacgccttcgccagcgccatcttcttcatgtgcctgttcagcttcggcagcagcctgagcgccggctgcagaggcggctgcttcacctacaccatgagcagaatcaacctgagaatcagagagcagctgttcagcagcctgctgagacaggacctgggcttcttccaggagaccaagaccggcgagctgaacagcagactgagcagcgacaccaccctgatgagcaactggctgcccctgaacgccaacgtgctgctgagaagcctggtgaaggtggtgggcctgtacggcttcatgctgagcatcagccccagactgaccctgctgagcctgctgcacatgcccttcaccatcgccgccgagaaggtgtacaacaccagacaccaggaggtgctgagagagatccaggacgccgtggccagagccggccaggtggtgagagaggccgtgggcggcctgcagaccgtgagaagcttcggcgccgaggagcacgaggtgtgcagatacaaggaggccctggagcagtgcagacagctgtactggagaagagacctggagagagccctgtacctgctggtgagaagagtgctgcacctgggcgtgcagatgctgatgctgagctgcggcctgcagcagatgcaggacggcgagctgacccagggcagcctgctgagcttcatgatctaccaggagagcgtgggcagctacgtgcagaccctggtgtacatctacggcgacatgctgagcaacgtgggcgccgccgagaaggtgttcagctacatggacagacagcccaacctgcccagccccggcaccctggcccccaccaccctgcagggcgtggtgaagttccaggacgtgagcttcgcctaccccaacagacccgacagacccgtgctgaagggcctgaccttcaccctgagacccggcgaggtgaccgccctggtgggccccaacggcagcggcaagagcaccgtggccgccctgctgcagaacctgtaccagcccaccggcggccaggtgctgctggacgagaagcccatcagccagtacgagcactgctacctgcacagccaggtggtgagcgtgggccaggagcccgtgctgttcagcggcagcgtgagaaacaacatcgcctacggcctgcagagctgcgaggacgacaaggtgatggccgccgcccaggccgcccacgccgacgacttcatccaggagatggagcacggcatctacaccgacgtgggcgagaagggcagccagctggccgccggccagaagcagagactggccatcgccagagccctggtgagagaccccagagtgctgatcctggacgaggccaccagcgccctggacgtgcagtgcgagcaggccaacggcttctgggtgggccccctgggcggcggcagcgccagcgagagcgaccccaccggcttcctgcacgacagcagacacagactgagcagcgacgtgggcatgttcgtggccctgaccaagctgggccagcccgacgccgagcagtggaacagcagactggacctgctggagagaagcagacaggccgtggacggcgtgtgcagacacaactacagactgggcgcccccttcaccgtgggcagaaaggtgcagcccgaggtgaccgtgtaccccgagagaacccccctgctgcaccagcacaacctgctgcactgcagcgtgaccggcttctaccccggcgacatcaagatcaagtggttcctgaacggccagtag

SEQ ID NO: 103294 - DNA, 2310 bp, synthetic construct; identical to SEQ ID NO: 103293
  misc_feature 1..2310: note = Description of Artificial Sequence: Synthetic coding sequence
  source 1..2310: mol_type = other DNA

SEQ ID NO: 103295 - DNA, 2310 bp, synthetic construct; identical to SEQ ID NO: 103293
  misc_feature 1..2310: note = Description of Artificial Sequence: Synthetic coding sequence
  source 1..2310: mol_type = other DNA

SEQ ID NO: 103296 - DNA, 2310 bp, synthetic construct
  misc_feature 1..2310: note = Description of Artificial Sequence: Synthetic coding sequence
  source 1..2310: mol_type = other DNA
atgagactgcccgacctgagaccctggaccagcctgctgctggtggacgccgccctgctgtggctgctgcagggccccctgggcaccctgctgccccagggcctgcccggcctgtggctggagggcaccctgagactgggcggcctgtggggcctgctgaagctgagaggcctgctgggcttcgtgggcaccctgctgctgcccctgtgcctggccacccccctgaccgtgagcctgagagccctggtggccggcgccagcagagccccccccgccagagtggccagcgccccctggagctggctgctggtgggctacggcgccgccggcctgagctggagcctgtgggccgtgctgagcccccccggcgcccaggagaaggagcaggaccaggtgaacaacaaggtgctgatgtggagactgctgaagctgagcagacccgacctgcccctgctggtggccgccttcttcttcctggtgctggccgtgctgggcgagaccctgatcccccactacagcggcagagtgatcgacatcctgggcggcgacttcgacccccacgccttcgccagcgccatcttcttcatgtgcctgttcagcttcggcagcagcctgagcgccggctgcagaggcggctgcttcacctacaccatgagcagaatcaacctgagaatcagagagcagctgttcagcagcctgctgagacaggacctgggcttcttccaggagaccaagaccggcgagctgaacagcagactgagcagcgacaccaccctgatgagcaactggctgcccctgaacgccaacgtgctgctgagaagcctggtgaaggtggtgggcctgtacggcttcatgctgagcatcagccccagactgaccctgctgagcctgctgcacatgcccttcaccatcgccgccgagaaggtgtacaacaccagacaccaggaggtgctgagagagatccaggacgccgtggccagagccggccaggtggtgagagaggccgtgggcggcctgcagaccgtgagaagcttcggcgccgaggagcacgaggtgtgcagatacaaggaggccctggagcagtgcagacagctgtactggagaagagacctggagagagccctgtacctgctgatcagaagagtgctgcacctgggcgtgcagatgctgatgctgagctgcggcctgcagcagatgcaggacggcgagctgacccagggcagcctgctgagcttcatgatctaccaggagagcgtgggcagctacgtgcagaccctggtgtacatctacggcgacatgctgagcaacgtgggcgccgccgagaaggtgttcagctacatggacagacagcccaacctgcccagccccggcaccctggcccccaccaccctgcagggcgtggtgaagttccaggacgtgagcttcgcctaccccaacagacccgacagacccgtgctgaagggcctgaccttcaccctgagacccggcgaggtgaccgccctggtgggccccaacggcagcggcaagagcaccgtggccgccctgctgcagaacctgtaccagcccaccggcggccaggtgctgctggacgagaagcccatcagccagtacgagcactgctacctgcacagccaggtggtgagcgtgggccaggagcccgtgctgttcagcggcagcgtgagaaacaacatcacctacggcctgcagagctgcgaggacgacaaggtgatggccgccgcccaggccgcccacgccgacgacttcatccaggagatggagcacggcatctacaccgacgtgggcgagaagggcagccagctggccgccggccagaagcagagactggccatcgccagagccctggtgagagaccccagagtgctgatcctggacgaggccaccagcgccctggacgtgcagtgcgagcaggccaacggcttctgggtgggccccctgggcggcggcagcgccagcgagagcgaccccaccggcttcctgcacgacagcagacacagactgagcagcgacgtgggcatgttcgtggccctgaccaagctgggccagcccgacgccgagcagtggaacagcagactggacctgctggagagaagcagacaggccgtggacggcgtgtgcagacacaactacagactgggcgcccccttcaccgtgggcagaaaggtgcagcccgaggtgaccgtgtaccccgagagaacccccctgctgcaccagcacaacctgctgcactgcagcgtgaccggcttctaccccggcgacatcaagatcaagtggttcctgaacggccagtag

SEQ ID NO: 103297 - DNA, 2310 bp, synthetic construct; identical to SEQ ID NO: 103293
  misc_feature 1..2310: note = Description of Artificial Sequence: Synthetic coding sequence
  source 1..2310: mol_type = other DNA

SEQ ID NO: 103298 - DNA, 2310 bp, synthetic construct; identical to SEQ ID NO: 103293
  misc_feature 1..2310: note = Description of Artificial Sequence: Synthetic coding sequence
  source 1..2310: mol_type = other DNA

SEQ ID NO: 103299 - DNA, 2697 bp, synthetic construct
  misc_feature 1..2697: note = Description of Artificial Sequence: Synthetic coding sequence
  source 1..2697: mol_type = other DNA
atggtgtgggacagacagaccaagatggagtacgagtggaagcccgacgagcagggcctgcagcagatcctgcagctgctgaaggagagccagagccccgacaccaccatccagagaaccgtgcagcagaagctggagcagctgaaccagtaccccgacttcaacaactacctgatcttcgtgctgaccaagctgaagagcgaggacgagcccaccagaagcctgagcggcctgatcctgaagaacaacgtgaaggcccacttccagaacttccccaacggcgtgaccgacttcatcaagagcgagtgcctgaacaacatcggcgacagcagccccctgatcagagccaccgtgggcatcctgatcaccaccatcgccagcaagggcgagctgcagaactggcccgacctgctgcccaagctgtgcagcctgctggacagcgaggactacaacacctgcgagggcgccttcggcgccctgcagaagatctgcgaggacagcgccgagatcctggacagcgacgtgctggacagacccctgaacatcatgatccccaagttcctgcagttcttcaagcacagcagccccaagatcagaagccacgccgtggcctgcgtgaaccagttcatcatcagcagaacccaggccctgatgctgcacatcgacagcttcatcgagaacctgttcgccctggccggcgacgaggagcccgaggtgagaaagaacgtgtgcagagccctggtgatgctgctggaggtgagaatggacagactgctgccccacatgcacaacatcgtggagtacatgctgcagagaacccaggaccaggacgagaacgtggccctggaggcctgcgagttctggctgaccctggccgagcagcccatctgcaaggacgtgctggtgagacacctgcccaagctgatccccgtgctggtgaacggcatgaagtacagcgacatcgacatcatcctgctgaagggcgacgtggaggaggacgagaccatccccgacagcgagcaggacatcagacccagattccacagaagcagaaccgtggcccagcagcacgacgaggacggcatcgaggaggaggacgacgacgacgacgagatcgacgacgacgacaccatcagcgactggaacctgagaaagtgcagcgccgccgccctggacgtgctggccaacgtgtacagagacgagctgctgccccacatcctgcccctgctgaaggagctgctgttccaccacgagtgggtggtgaaggagagcggcatcctggtgctgggcgccatcgccgagggctgcatgcagggcatgatcccctacctgcccgagctgatcccccacctgatccagtgcctgagcgacaagaaggccctggtgagaagcatcacctgctggaccctgagcagatacgcccactgggtggtgagccagccccccgacacctacctgaagcccctgatgaccgagctgctgaagagaatcctggacagcaacaagagagtgcaggaggccgcctgcagcgccttcgccaccctggaggaggaggcctgcaccgagctggtgccctacctggcctacatcctggacaccctggtgttcgccttcagcaagtaccagcacaagaacctgctgatcctgtacgacgccatcggcaccctggccgacagcgtgggccaccacctgaacaagcccgagtacatccagatgctgatgccccccctgatccagaagtggaacatgctgaaggacgaggacaaggacctgttccccctgctggagtgcctgagcagcgtggccaccgccctgcagagcggcttcctgccctactgcgagcccgtgtaccagagatgcgtgaacctggtgcagaagaccctggcccaggccatgctgaacaacgcccagcccgaccagtacgaggcccccgacaaggacttcatgatcgtggccctggacctgctgagcggcctggccgagggcctgggcggcaacatcgagcagctggtggccagaagcaacatcctgaccctgatgtaccagtgcatgcaggacaagatgcccgaggtgagacagagcagcttcgccctgctgggcgacctgaccaaggcctgcttccagcacgtgaagccctgcatcgccgacttcatgcccatcctgggcaccaacctgaaccccgagttcatcagcgtgtgcaacaacgccacctgggccatcggcgagatcagcatccagatgggcatcgagatgcagccctacatccccatggtgctgcaccagctggtggagatcatcaacagacccaacacccccaagaccctgctggagaacaccgccatcaccatcggcagactgggctacgtgtgcccccaggaggtggcccccatgctgcagcagttcatcagaccctggtgcaccagcctgagaaacatcagagacaacgaggagaaggacagcgccttcagaggcatctgcaccatgatcagcgtgaaccccagcggcgtgatccaggacttcatcttcttctgcgacgccgtggccagctggatcaaccccaaggacgacctgagagacatgttctgcaagatcctgcacggcttcaagaaccaggtgggcgacgagaactggagaagattcagcgaccagttccccctgcccctgaaggagagactggccgccttctacggcgtgtag

SEQ ID NO: 103300 - DNA, 387 bp, synthetic construct
  misc_feature 1..387: note = Description of Artificial Sequence: Synthetic coding sequence
  source 1..387: mol_type = other DNA
atggagtacgagtggaagcccgacgagcagggcctgcagcagatcctgcagctgctgaaggagagccagagccccgacaccaccatccagagaaccgtgcagcagaagctggagcagctgaaccagtaccccgacttcaacaactacctgatcttcgtgctgaccaagctgaagagcgaggacgagcccaccagaagcctgagcggcctgatcctgaagaacaacgtgaaggcccacttccagaacttccccaacggcgtgaccgacttcatcaagagcgagtgcctgaacaacatcggcgacagcagccccctgatcagagccaccgtgggcctgaccctgctgcacgtgagcatcagcctgagcagcgtgggcctgaagctgtag

SEQ ID NO: 103301 - DNA, 2547 bp, synthetic construct
  misc_feature 1..2547: note = Description of Artificial Sequence: Synthetic coding sequence
  source 1..2547: mol_type = other DNA
atggtgtgggacagacagaccaagatggagtacgagtggaagcccgacgagcagggcctgcagcagatcctgcagctgctgaaggagagccagagccccgacaccaccatccagagaaccgtgcagcagaagctggagcagctgaaccagtaccccgacttcaacaactacctgatcttcgtgctgaccaagctgaagagcgagggcatcctgatcaccaccatcgccagcaagggcgagctgcagaactggcccgacctgctgcccaagctgtgcagcctgctggacagcgaggactacaacacctgcgagggcgccttcggcgccctgcagaagatctgcgaggacagcgccgagatcctggacagcgacgtgctggacagacccctgaacatcatgatccccaagttcctgcagttcttcaagcacagcagccccaagatcagaagccacgccgtggcctgcgtgaaccagttcatcatcagcagaacccaggccctgatgctgcacatcgacagcttcatcgagaacctgttcgccctggccggcgacgaggagcccgaggtgagaaagaacgtgtgcagagccctggtgatgctgctggaggtgagaatggacagactgctgccccacatgcacaacatcgtggagtacatgctgcagagaacccaggaccaggacgagaacgtggccctggaggcctgcgagttctggctgaccctggccgagcagcccatctgcaaggacgtgctggtgagacacctgcccaagctgatccccgtgctggtgaacggcatgaagtacagcgacatcgacatcatcctgctgaagggcgacgtggaggaggacgagaccatccccgacagcgagcaggacatcagacccagattccacagaagcagaaccgtggcccagcagcacgacgaggacggcatcgaggaggaggacgacgacgacgacgagatcgacgacgacgacaccatcagcgactggaacctgagaaagtgcagcgccgccgccctggacgtgctggccaacgtgtacagagacgagctgctgccccacatcctgcccctgctgaaggagctgctgttccaccacgagtgggtggtgaaggagagcggcatcctggtgctgggcgccatcgccgagggctgcatgcagggcatgatcccctacctgcccgagctgatcccccacctgatccagtgcctgagcgacaagaaggccctggtgagaagcatcacctgctggaccctgagcagatacgcccactgggtggtgagccagccccccgacacctacctgaagcccctgatgaccgagctgctgaagagaatcctggacagcaacaagagagtgcaggaggccgcctgcagcgccttcgccaccctggaggaggaggcctgcaccgagctggtgccctacctggcctacatcctggacaccctggtgttcgccttcagcaagtaccagcacaagaacctgctgatcctgtacgacgccatcggcaccctggccgacagcgtgggccaccacctgaacaagcccgagtacatccagatgctgatgccccccctgatccagaagtggaacatgctgaaggacgaggacaaggacctgttccccctgctggagtgcctgagcagcgtggccaccgccctgcagagcggcttcctgccctactgcgagcccgtgtaccagagatgcgtgaacctggtgcagaagaccctggcccaggccatgctgaacaacgcccagcccgaccagtacgaggcccccgacaaggacttcatgatcgtggccctggacctgctgagcggcctggccgagggcctgggcggcaacatcgagcagctggtggccagaagcaacatcctgaccctgatgtaccagtgcatgcaggacaagatgcccgaggtgagacagagcagcttcgccctgctgggcgacctgaccaaggcctgcttccagcacgtgaagccctgcatcgccgacttcatgcccatcctgggcaccaacctgaaccccgagttcatcagcgtgtgcaacaacgccacctgggccatcggcgagatcagcatccagatgggcatcgagatgcagccctacatccccatggtgctgcaccagctggtggagatcatcaacagacccaacacccccaagaccctgctggagaacaccgccatcaccatcggcagactgggctacgtgtgcccccaggaggtggcccccatgctgcagcagttcatcagaccctggtgcaccagcctgagaaacatcagagacaacgaggagaaggacagcgccttcagaggcatctgcaccatgatcagcgtgaaccccagcggcgtgatccaggacttcatcttcttctgcgacgccgtggccagctggatcaaccccaaggacgacctgagagacatgttctgcaagatcctgcacggcttcaagaaccaggtgggcgacgagaactggagaagattcagcgaccagttccccctgcccctgaaggagagactggccgccttctacggcgtgtag

SEQ ID NO: 103302 - DNA, 2673 bp, synthetic construct
  misc_feature 1..2673: note = Description of Artificial Sequence: Synthetic coding sequence
  source 1..2673: mol_type = other DNA
atggagtacgagtggaagcccgacgagcagggcctgcagcagatcctgcagctgctgaaggagagccagagccccgacaccaccatccagagaaccgtgcagcagaagctggagcagctgaaccagtaccccgacttcaacaactacctgatcttcgtgctgaccaagctgaagagcgaggacgagcccaccagaagcctgagcggcctgatcctgaagaacaacgtgaaggcccacttccagaacttccccaacggcgtgaccgacttcatcaagagcgagtgcctgaacaacatcggcgacagcagccccctgatcagagccaccgtgggcatcctgatcaccaccatcgccagcaagggcgagctgcagaactggcccgacctgctgcccaagctgtgcagcctgctggacagcgaggactacaacacctgcgagggcgccttcggcgccctgcagaagatctgcgaggacagcgccgagatcctggacagcgacgtgctggacagacccctgaacatcatgatccccaagttcctgcagttcttcaagcacagcagccccaagatcagaagccacgccgtggcctgcgtgaaccagttcatcatcagcagaacccaggccctgatgctgcacatcgacagcttcatcgagaacctgttcgccctggccggcgacgaggagcccgaggtgagaaagaacgtgtgcagagccctggtgatgctgctggaggtgagaatggacagactgctgccccacatgcacaacatcgtggagtacatgctgcagagaacccaggaccaggacgagaacgtggccctggaggcctgcgagttctggctgaccctggccgagcagcccatctgcaaggacgtgctggtgagacacctgcccaagctgatccccgtgctggtgaacggcatgaagtacagcgacatcgacatcatcctgctgaagggcgacgtggaggaggacgagaccatccccgacagcgagcaggacatcagacccagattccacagaagcagaaccgtggcccagcagcacgacgaggacggcatcgaggaggaggacgacgacgacgacgagatcgacgacgacgacaccatcagcgactggaacctgagaaagtgcagcgccgccgccctggacgtgctggccaacgtgtacagagacgagctgctgccccacatcctgcccctgctgaaggagctgctgttccaccacgagtgggtggtgaaggagagcggcatcctggtgctgggcgccatcgccgagggctgcatgcagggcatgatcccctacctgcccgagctgatcccccacctgatccagtgcctgagcgacaagaaggccctggtgagaagcatcacctgctggaccctgagcagatacgcccactgggtggtgagccagccccccgacacctacctgaagcccctgatgaccgagctgctgaagagaatcctggacagcaacaagagagtgcaggaggccgcctgcagcgccttcgccaccctggaggaggaggcctgcaccgagctggtgccctacctggcctacatcctggacaccctggtgttcgccttcagcaagtaccagcacaagaacctgctgatcctgtacgacgccatcggcaccctggccgacagcgtgggccaccacctgaacaagcccgagtacatccagatgctgatgccccccctgatccagaagtggaacatgctgaaggacgaggacaaggacctgttccccctgctggagtgcctgagcagcgtggccaccgccctgcagagcggcttcctgccctactgcgagcccgtgtaccagagatgcgtgaacctggtgcagaagaccctggcccaggccatgctgaacaacgcccagcccgaccagtacgaggcccccgacaaggacttcatgatcgtggccctggacctgctgagcggcctggccgagggcctgggcggcaacatcgagcagctggtggccagaagcaacatcctgaccctgatgtaccagtgcatgcaggacaagatgcccgaggtgagacagagcagcttcgccctgctgggcgacctgaccaaggcctgcttccagcacgtgaagccctgcatcgccgacttcatgcccatcctgggcaccaacctgaaccccgagttcatcagcgtgtgcaacaacgccacctgggccatcggcgagatcagcatccagatgggcatcgagatgcagccctacatccccatggtgctgcaccagctggtggagatcatcaacagacccaacacccccaagaccctgctggagaacaccgccatcaccatcggcagactgggctacgtgtgcccccaggaggtggcccccatgctgcagcagttcatcagaccctggtgcaccagcctgagaaacatcagagacaacgaggagaaggacagcgccttcagaggcatctgcaccatgatcagcgtgaaccccagcggcgtgatccaggacttcatcttcttctgcgacgccgtggccagctggatcaaccccaaggacgacctgagagacatgttctgcaagatcctgcacggcttcaagaaccaggtgggcgacgagaactggagaagattcagcgaccagttccccctgcccctgaaggagagactggccgccttctacggcgtgtag

SEQ ID NO: 103303 - DNA, 2664 bp, synthetic construct
  misc_feature 1..2664: note = Description of Artificial Sequence: Synthetic coding sequence
  source 1..2664: mol_type = other DNA
atggactggcagcccgacgagcagggcctgcagcaggtgctgcagctgctgaaggacagccagagccccaacaccgccacccagagaatcgtgcaggacaagctgaagcagctgaaccagttccccgacttcaacaactacctgatcttcgtgctgaccagactgaagagcgaggacgagcccaccagaagcctgagcggcctgatcctgaagaacaacgtgaaggcccactaccagagcttccccccccccgtggccgacttcatcaagcaggagtgcctgaacaacatcggcgacgccagcagcctgatcagagccaccatcggcatcctgatcaccaccatcgccagcaagggcgagctgcagatgtggcccgagctgctgccccagctgtgcaacctgctgaacagcgaggactacaacacctgcgagggcgccttcggcgccctgcagaagatctgcgaggacagcagcgagctgctggacagcgacgccctgaacagacccctgaacatcatgatccccaagttcctgcagttcttcaagcactgcagccccaagatcagaagccacgccatcgcctgcgtgaaccagttcatcatggacagagcccaggccctgatggacaacatcgacaccttcatcgagcacctgttcgccctggccgtggacgacgaccccgaggtgagaaagaacgtgtgcagagccctggtgatgctgctggaggtgagaatcgacagactgatcccccacatgcacagcatcatccagtacatgctgcagagaacccaggaccacgacgagaacgtggccctggaggcctgcgagttctggctgaccctggccgagcagcccatctgcaaggaggtgctggccagccacctggtgcagctgatccccatcctggtgaacggcatgaagtacagcgagatcgacatcatcctgctgaagggcgacgtggaggaggacgaggccgtgcccgacagcgagcaggacatcaagcccagattccacaagagcagaaccgtgaccctgccccacgaggccgagagacccgacggcagcgaggacgccgaggacgacgacgacgacgacgccctgagcgactggaacctgagaaagtgcagcgccgccgccctggacgtgctggccaacgtgttcagagaggagctgctgccccacctgctgcccctgctgaagggcctgctgttccaccccgagtgggtggtgaaggagagcggcatcctggtgctgggcgccatcgccgagggctgcatgcagggcatggtgccctacctgcccgagctgatcccccacctgatccagtgcctgagcgacaagaaggccctggtgagaagcatcgcctgctggaccctgagcagatacgcccactgggtggtgagccagccccccgacatgcacctgaagcccctgatgaccgagctgctgaagagaatcctggacggcaacaagagagtgcaggaggccgcctgcagcgccttcgccaccctggaggaggaggcctgcaccgagctggtgccctacctgagctacatcctggacaccctggtgttcgccttcggcaagtaccagcacaagaacctgctgatcctgtacgacgccatcggcaccctggccgacagcgtgggccaccacctgaaccagcccgagtacatccagaagctgatgccccccctgatccagaagtggaacgagctgaaggacgaggacaaggacctgttccccctgctggagtgcctgagcagcgtggccaccgccctgcagagcggcttcctgccctactgcgagcccgtgtaccagagatgcgtgaccctggtgcagaagaccctggcccaggccatgatgtacacccagcaccccgagcagtacgaggcccccgacaaggacttcatgatcgtggccctggacctgctgagcggcctggccgagggcctgggcggccacgtggagcagctggtggccagaagcaacatcatgaccctgctgttccagtgcatgcaggacagcatgcccgaggtgagacagagcagcttcgccctgctgggcgacctgaccaaggcctgcttcatccacgtgaagccctgcatcgccgagttcatgcccatcctgggcaccaacctgaaccccgagttcatcagcgtgtgcaacaacgccacctgggccatcggcgagatctgcatgcagatgggcgccgagatgcagccctacgtgcagatggtgctgaacaacctggtggagatcatcaacagacccaacacccccaagaccctgctggagaacaccgccatcaccatcggcagactgggctacgtgtgcccccaggaggtggcccccatgctgcagcagttcatcagaccctggtgcaccagcctgagaaacatcagagacaacgaggagaaggacagcgccttcagaggcatctgcatgatgatcggcgtgaaccccggcggcgtggtgcaggacttcatcttcttctgcgacgccgtggccagctgggtgagccccaaggacgacctgagagacatgttctacaagatcctgcacggcttcaaggaccaggtgggcgaggacaactggcagcagttcagcgagcagttcccccccctgctgaaggagagactggccgccttctacggcgtgtag

SEQ ID NO: 103304 - DNA, 2100 bp, synthetic construct
  misc_feature 1..2100: note = Description of Artificial Sequence: Synthetic coding sequence
  source 1..2100: mol_type = other DNA
atggactggcagcccgacgagcagggcctgcagcaggtgctgcagctgctgaaggacagccagagccccaacaccgccacccagagaatcgtgcaggacaagctgaagcagctgaaccagttccccgacttcaacaactacctgatcttcgtgctgaccagactgaagagcgaggacgagcccaccagaagcctgagcggcctgatcctgaagaacaacgtgaaggcccactaccagagcttccccccccccgtggccgacttcatcaagcaggagtgcctgaacaacatcggcgacgccagcagcctgatcagagccaccatcggcatcctgatcaccaccatcgccagcaagggcgagctgcagatgtggcccgagctgctgccccagctgtgcaacctgctgaacagcgaggactacaacacctgcgagggcgccttcggcgccctgcagaagatctgcgaggacagcagcgagctgctggacagcgacgccctgaacagacccctgaacatcatgatccccaagttcctgcagttcttcaagcactgcagccccaagatcagaagccacgccatcgcctgcgtgaaccagttcatcatggacagagcccaggccctgatggacaacatcgacaccttcatcgagcacctgttcgccctggccgtggacgacgaccccgaggtgagaaagaacgtgtgcagagccctggtgatgctgctggaggtgagaatcgacagactgatcccccacatgcacagcatcatccagtacatgctgcagagaacccaggaccacgacgagaacgtggccctggaggcctgcgagttctggctgaccctggccgagcagcccatctgcaaggaggtgctggccagccacctggtgcagctgatccccatcctggtgaacggcatgaagtacagcgagatcgacatcatcctgctgaagggcgacgtggaggaggacgaggccgtgcccgacagcgagcaggacatcaagcccagattccacaagagcagaaccgtgaccctgccccacgaggccgagagacccgacggcagcgaggacgccgaggacgacgacgacgacgacgccctgagcgactggaacctgagaaagtgcagcgccgccgccctggacgtgctggccaacgtgttcagagaggagctgctgccccacctgctgcccctgctgaagggcctgctgttccaccccgagtgggtggtgaaggagagcggcatcctggtgctgggcgccatcgccgagggctgcatgcagggcatggtgccctacctgcccgagctgatcccccacctgatccagtgcctgagcgacaagaaggccctggtgagaagcatcgcctgctggaccctgagcagatacgcccactgggtggtgagccagccccccgacatgcacctgaagcccctgatgaccgagctgctgaagagaatcctggacggcaacaagagagtgcaggaggccgcctgcagcgccttcgccaccctggaggaggaggcctgcaccgagctggtgccctacctgagctacatcctggacaccctggtgttcgccttcggcaagtaccagcacaagaacctgctgatcctgtacgacgccatcggcaccctggccgacagcgtgggccaccacctgaaccagcccgagtacatccagaagctgatgccccccctgatccagaagtggaacgagctgaaggacgaggacaaggacctgttccccctgctggagtgcctgagcagcgtggccaccgccctgcagagcggcttcctgccctactgcgagcccgtgtaccagagatgcgtgaccctggtgcagaagaccctggcccaggccatgatgtacacccagcaccccgagcagtacgaggcccccgacaaggacttcatgatcgtggccctggacctgctgagcggcctggccgagggcctgggcggccacgtggagcagctggtggcccacagccccagcttccccccccaccccctgccccccgccggcagcagagtgtgccccttcgtgaccgtgctgtgctggggcctggcccccagatggagagagatccccctggtgtag

SEQ ID NO: 103305 - DNA, 2694 bp, synthetic construct
  misc_feature 1..2694: note = Description of Artificial Sequence: Synthetic coding sequence
  source 1..2694: mol_type = other DNA
atggactggcagcccgacgagcagggcctgcagcaggtgctgcagctgctgaaggacagccagagccccaacaccgccacccagagaatcgtgcaggacaagctgaagcagctgaaccagttccccgacttcaacaactacctgatcttcgtgctgaccagactgaagagcgaggacgagcccaccagaagcctgagcggcctgatcctgaagaacaacgtgaaggcccactaccagagcttccccccccccgtggccgacttcatcaagcaggagtgcctgaacaacatcggcgacgccagcagcctgatcagagccaccatcggcatcctgatcaccaccatcgccagcaagggcgagctgcagatgtggcccgagctgctgccccagctgtgcaacctgctgaacagcgaggactacaacacctgcgagggcgccttcggcgccctgcagaagatctgcgaggacagcagcgagctgctggacagcgacgccctgaacagacccctgaacatcatgatccccaagttcctgcagttcttcaagcactgcagccccaagatcagaagccacgccatcgcctgcgtgaaccagttcatcatggacagagcccaggccctgatggacaacatcgacaccttcatcgagcacctgttcgccctggccgtggacgacgaccccgaggtgagaaagaacgtgtgcagagccctggtgatgctgctggaggtgagaatcgacagactgatcccccacatgcacagcatcatccagtacatgctgcagagaacccaggaccacgacgagaacgtggccctggaggcctgcgagttctggctgaccctggccgagcagcccatctgcaaggaggtgctggccagccacctggtgcagctgatccccatcctggtgaacggcatgaagtacagcgagatcgacatcatcctgctgaagggcgacgtggaggaggacgaggccgtgcccgacagcgagcaggacatcaagcccagattccacaagagcagaaccgtgaccctgccccacgaggccgagagacccgacggcagcgaggacgccgaggacgacgacgacgacgacgccctgagcgactggaacctgagaaagtgcagcgccgccgccctggacgtgctggccaacgtgttcagagaggagctgctgccccacctgctgcccctgctgaagggcctgctgttccaccccgagtgggtggtgaaggagagcggcatcctggtgctgggcgccatcgccgagggctgcatgcagggcatggtgccctacctgcccgagctgatcccccacctgatccagtgcctgagcgacaagaaggccctggtgagaagcatcgcctgctggaccctgagcagatacgcccactgggtggtgagccagccccccgacatgcacctgaagcccctgatgaccgagctgctgaagagaatcctggacggcaacaagagagtgcaggaggccgcctgcagcgccttcgccaccctggaggaggaggcctgcaccgagctggtgccctacctgagctacatcctggacaccctggtgttcgccttcggcaagtaccagcacaagaacctgctgatcctgtacgacgccatcggcaccctggccgacagcgtgggccaccacctgaaccagcccgagtacatccagaagctgatgccccccctgatccagaagtggaacgagctgaaggacgaggacaaggacctgttccccctgctggagtgcctgagcagcgtggccaccgccctgcagagcggcttcctgccctactgcgagcccgtgtaccagagatgcgtgaccctggtgcagaagaccctggcccaggccatgatgtacacccagcaccccgagcagtacgaggcccccgacaaggacttcatgatcgtggccctggacctgctgagcggcctggccgagggcctgggcggccacgtggagcagctggtggccagaagcaacatcatgaccctgctgttccagtgcatgcaggacagcatgcccgaggtgagacagagcagcttcgccctgctgggcgacctgaccaaggcctgcttcatccacgtgaagccctgcatcgccgagttcatgcccatcctgggcaccaacctgaaccccgagttcatcagcgtgtgcaacaacgccacctgggccatcggcgagatctgcatgcagatgggcgccgagatgcagccctacgtgcagatggtgctgaacaacctggtggagatcatcaacagacccaacacccccaagaccctgctggagaacaccggcagactgaccagccccagcgccatccccgccatcaccatcggcagactgggctacgtgtgcccccaggaggtggcccccatgctgcagcagttcatcagaccctggtgcaccagcctgagaaacatcagagacaacgaggagaaggacagcgccttcagaggcatctgcatgatgatcggcgtgaaccccggcggcgtggtgcaggacttcatcttcttctgcgacgccgtggccagctgggtgagccccaaggacgacctgagagacatgttctacaagatcctgcacggcttcaaggaccaggtgggcgaggacaactggcagcagttcagcgagcagttcccccccctgctgaaggagagactggccgccttctacggcgtgtag

SEQ ID NO: 103306 - DNA, 2664 bp, synthetic construct; identical to SEQ ID NO: 103303
  misc_feature 1..2664: note = Description of Artificial Sequence: Synthetic coding sequence
  source 1..2664: mol_type = other DNA

SEQ ID NO: 103307 - DNA, 2694 bp, synthetic construct; identical to SEQ ID NO: 103305
  misc_feature 1..2694: note = Description of Artificial Sequence: Synthetic coding sequence
  source 1..2694: mol_type = other DNA

SEQ ID NO: 103308 - DNA, 3156 bp, synthetic construct
  misc_feature 1..3156: note = Description of Artificial Sequence: Synthetic coding sequence
  source 1..3156: mol_type = other DNA
ggccagagcgtgggcggcagaggcctgttcagagactgcgcctgcatcgaggagaccaccggcgccggcgccctgagcagaagcggcgccggccccctggacgtggaggccgccggccccagccccagcagatgcgagggcggcggcagcctgagagccagaagcagaggccagagacacggccccccctgggacgagggcagcagcctgggccccatgagaatcagaagagcccccccccccccccccgtggccagattccacatccccccccccgccctgcccagccccagactgagaggcagaggctggagaagctggagaggccccagaacctgggccggcgtggacagaagacccccccccgtgagaagaggcagaagcagaagacacgccgccaccgccgccagcggcgccccccccggcagccacaccgagccccagagacccagcgccgaccccggcccctacctgagaagcctgccctgcgccatggactggcagcccgacgagcagggcctgcagcaggtgctgcagctgctgaaggacagccagagccccaacaccgccacccagagaatcgtgcaggacaagctgaagcagctgaaccagttccccgacttcaacaactacctgatcttcgtgctgaccagactgaagagcgaggacgagcccaccagaagcctgagcggcctgatcctgaagaacaacgtgaaggcccactaccagagcttccccccccccgtggccgacttcatcaagcaggagtgcctgaacaacatcggcgacgccagcagcctgatcagagccaccatcggcatcctgatcaccaccatcgccagcaagggcgagctgcagatgtggcccgagctgctgccccagctgtgcaacctgctgaacagcgaggactacaacacctgcgagggcgccttcggcgccctgcagaagatctgcgaggacagcagcgagctgctggacagcgacgccctgaacagacccctgaacatcatgatccccaagttcctgcagttcttcaagcactgcagccccaagatcagaagccacgccatcgcctgcgtgaaccagttcatcatggacagagcccaggccctgatggacaacatcgacaccttcatcgagcacctgttcgccctggccgtggacgacgaccccgaggtgagaaagaacgtgtgcagagccctggtgatgctgctggaggtgagaatcgacagactgatcccccacatgcacagcatcatccagtacatgctgcagagaacccaggaccacgacgagaacgtggccctggaggcctgcgagttctggctgaccctggccgagcagcccatctgcaaggaggtgctggccagccacctggtgcagctgatccccatcctggtgaacggcatgaagtacagcgagatcgacatcatcctgctgaagggcgacgtggaggaggacgaggccgtgcccgacagcgagcaggacatcaagcccagattccacaagagcagaaccgtgaccctgccccacgaggccgagagacccgacggcagcgaggacgccgaggacgacgacgacgacgacgccctgagcgactggaacctgagaaagtgcagcgccgccgccctggacgtgctggccaacgtgttcagagaggagctgctgccccacctgctgcccctgctgaagggcctgctgttccaccccgagtgggtggtgaaggagagcggcatcctggtgctgggcgccatcgccgagggctgcatgcagggcatggtgccctacctgcccgagctgatcccccacctgatccagtgcctgagcgacaagaaggccctggtgagaagcatcgcctgctggaccctgagcagatacgcccactgggtggtgagccagccccccgacatgcacctgaagcccctgatgaccgagctgctgaagagaatcctggacggcaacaagagagtgcaggaggccgcctgcagcgccttcgccaccctggaggaggaggcctgcaccgagctggtgccctacctgagctacatcctggacaccctggtgttcgccttcggcaagtaccagcacaagaacctgctgatcctgtacgacgccatcggcaccctggccgacagcgtgggccaccacctgaaccagcccgagtacatccagaagctgatgccccccctgatccagaagtggaacgagctgaaggacgaggacaaggacctgttccccctgctggagtgcctgagcagcgtggccaccgccctgcagagcggcttcctgccctactgcgagcccgtgtaccagagatgcgtgaccctggtgcagaagaccctggcccaggccatgatgtacacccagcaccccgagcagtacgaggcccccgacaaggacttcatgatcgtggccctggacctgctgagcggcctggccgagggcctgggcggccacgtggagcagctggtggccagaagcaacatcatgaccctgctgttccagtgcatgcaggacagcatgcccgaggtgagacagagcagcttcgccctgctgggcgacctgaccaaggcctgcttcatccacgtgaagccctgcatcgccgagttcatgcccatcctgggcaccaacctgaaccccgagttcatcagcgtgtgcaacaacgccacctgggccatcggcgagatctgcatgcagatgggcgccgagatgcagccctacgtgcagatggtgctgaacaacctggtggagatcatcaacagacccaacacccccaagaccctgctggagaacaccgccatcaccatcggcagactgggctacgtgtgcccccaggaggtggcccccatgctgcagcagttcatcagaccctggtgcaccagcctgagaaacatcagagacaacgaggagaaggacagcgccttcagaggcatctgcatgatgatcggcgtgaaccccggcggcgtggtgcaggacttcatcttcttctgcgacgccgtggccagctgggtgagccccaaggacgacctgagagacatgttctacaagatcctgcacggcttcaaggaccaggtgggcgaggacaactggcagcagttcagcgagcagttcccccccctgctgaaggagagactggccgccttctacggcgtgtag

SEQ ID NO: 103309 - DNA, 2316 bp, synthetic construct
  misc_feature 1..2316: note = Description of Artificial Sequence: Synthetic coding sequence
  source 1..2316: mol_type = other DNA
atggactggcagcccgacgagcagggcctgcagcaggtgctgcagctgctgaaggacagccagagccccaacaccgccacccagagaatcgtgcaggacaagctgaagcagctgaaccagttccccgacttcaacaactacctgatcttcgtgctgaccagactgaagagcgaggacgagcccaccagaagcctgagcggcctgatcctgaagaacaacgtgaaggcccactaccagagcttccccccccccgtggccgacttcatcaagcaggagtgcctgaacaacatcggcgacgccagcagcctgatcagagccaccatcggcatcctgatcaccaccatcgccagcaagggcgagctgcagatgtggcccgagctgctgccccagctgtgcaacctgctgaacagcgaggactacaacacctgcgagggcgccttcggcgccctgcagaagatctgcgaggacagcagcgagctgctggacagcgacgccctgaacagacccctgaacatcatgatccccaagttcctgcagttcttcaagcactgcagccccaagatcagaagccacgccatcgcctgcgtgaaccagttcatcatggacagagcccaggccctgatggacaacatcgacaccttcatcgagcacctgttcgccctggccgtggacgacgaccccgaggtgagaaagaacgtgtgcagagccctggtgatgctgctggaggtgagaatcgacagactgatcccccacatgcacagcatcatccagtacatgctgcagagaacccaggaccacgacgagaacgtggccctggaggcctgcgagttctggctgaccctggccgagcagcccatctgcaaggaggtgctggccagccacctggtgcagctgatccccatcctggtgaacggcatgaagtacagcgagatcgacatcatcctgctgaagggcgacgtggaggaggacgaggccgtgcccgacagcgagcaggacatcaagcccagattccacaagagcagaaccgtgaccctgccccacgaggccgagagacccgacggcagcgaggacgccgaggacgacgacgacgacgacgccctgagcgactggaacctgagaaagtgcagcgccgccgccctggacgtgctggccaacgtgttcagagaggagctgctgccccacctgctgcccctgctgaagggcctgctgttccaccccgagtgggtggtgaaggagagcggcatcctggtgctgggcgccatcgccgagggctgcatgcagggcatggtgccctacctgcccgagctgatcccccacctgatccagtgcctgagcgacaagaaggccctggtgagaagcatcgcctgctggaccctgagcagatacgcccactgggtggtgagccagccccccgacatgcacctgaagcccctgatgaccgagctgctgaagagaatcctggacggcaacaagagagtgcaggaggccgcctgcagcgccttcgccaccctggaggaggaggcctgcaccgagctggtgccctacctgagctacatcctggacaccctggtgttcgccttcggcaagtaccagcacaagaacctgctgatcctgtacgacgccatcggcaccctggccgacagcgtgggccaccacctgaaccagcccgagtacatccagaagctgatgccccccctgatccagaagtggaacgagctgaaggacgaggacaaggacctgttccccctgctggagtgcctgagcagcgtggccaccgccctgcagagcggcttcctgccctactgcgagcccgtgtaccagagatgcgtgaccctggtgcagaagaccctggcccaggccatgatgtacacccagcaccccgagcagtacgaggcccccgacaaggacttcatgatcgtggccctggacctgctgagcggcctggccgagggcctgggcggccacgtggagcagctggtggccagaagcaacatcatgaccctgctgttccagtgcatgcaggacagcatgcccgaggtgagacagagcagcttcgccctgctgggcgacctgaccaaggcctgcttcatccacgtgaagccctgcatcgccgagttcatgcccatcctgggcaccaacctgaaccccgagttcatcagcgtgtgcaacaacgccacctgggccatcggcgagatctgcatgcagatgggcgccgagatgcagccctacgtgcagatggtgctgaacaacctggtggagatcatcaacagacccacccccagccagaagcagaacaagaccaagaagaacaagtag

SEQ ID NO: 103310 - DNA, 2772 bp, synthetic construct
  misc_feature 1..2772: note = Description of Artificial Sequence: Synthetic coding sequence
  source 1..2772: mol_type = other DNA
atggagggcgccaagcccaccctgcagctggtgtaccaggccgtgcaggccctgtaccacgaccccgaccccagcggcaaggagagagccagcttctggctgggcgagctgcagagaagcgtgcacgcctgggagatcagcgaccagctgctgcagatcagacaggacgtggagagctgctacttcgccgcccagaccatgaagatgaagatccagaccagcttctacgagctgcccaccgacagccacgccagcctgagagacagcctgctgacccacatccagaacctgaaggacctgagccccgtgatcgtgacccagctggccctggccatcgccgacctggccctgcagatgcccagctggaagggctgcgtgcagaccctggtggagaagtacagcaacgacgtgaccagcctgcccttcctgctggagatcctgaccgtgctgcccgaggaggtgcacagcagaagcctgagaatcggcgccaacagaagaaccgagatcatcgaggacctggccttctacagcagcaccgtggtgagcctgctgatgacctgcgtggagaaggccggcaccgacgagaagatgctgatgaaggtgttcagatgcctgggcagctggttcaacctgggcgtgctggacagcaacttcatggccaacaacaagctgctggccctgctgttcgaggtgctgcagcaggacaagaccagcagcaacctgcacgaggccgccagcgactgcgtgtgcagcgccctgtacgccatcgagaacgtggagaccaacctgcccctggccatgcagctgttccagggcgtgctgaccctggagaccgcctaccacatggccgtggccagagaggacctggacaaggtgctgaactactgcagaatcttcaccgagctgtgcgagaccttcctggagaagatcgtgtgcacccccggccagggcctgggcgacctgagaaccctggagctgctgctgatctgcgccggccacccccagtacgaggtggtggagatcagcttcaacttctggtacagactgggcgagcacctgtacaagaccaacgacgaggtgatccacggcatcttcaaggcctacatccagagactgctgcacgccctggccagacactgccagctggagcccgaccacgagggcgtgcccgaggagaccgacgacttcggcgagttcagaatgagagtgagcgacctggtgaaggacctgatcttcctgatcggcagcatggagtgcttcgcccagctgtacagcaccctgaaggagggcaaccccccctgggaggtgaccgaggccgtgctgttcatcatggccgccatcgccaagagcgtggaccccgagaacaaccccaccctggtggaggtgctggagggcgtggtgagactgcccgagaccgtgcacaccgccgtgagatacaccagcatcgagctggtgggcgagatgagcgaggtggtggacagaaacccccagttcctggaccccgtgctgggctacctgatgaagggcctgtgcgagaagcccctggccagcgccgccgccaaggccatccacaacatctgcagcgtgtgcagagaccacatggcccagcacttcaacggcctgctggagatcgccagaagcctggacagcttcctgctgagccccgaggccgccgtgggcctgctgaagggcaccgccctggtgctggccagactgcccctggacaagatcaccgagtgcctgagcgagctgtgcagcgtgcaggtgatggccctgaagaagctgctgagccaggagcccagcaacggcatcagcagcgaccccaccgtgttcctggacagactggccgtgatcttcagacacaccaaccccatcgtggagaacggccagacccacccctgccagaaggtgatccaggagatctggcccgtgctgagcgagaccctgaacaagcacagagccgacaacagaatcgtggagagatgctgcagatgcctgagattcgccgtgagatgcgtgggcaagggcagcgccgccctgctgcagcccctggtgacccagatggtgaacgtgtaccacgtgcaccagcacagctgcttcctgtacctgggcagcatcctggtggacgagtacggcatggaggagggctgcagacagggcctgctggacatgctgcaggccctgtgcatccccaccttccagctgctggagcagcagaacggcctgcagaaccaccccgacaccgtggacgacctgttcagactggccaccagattcatccagagaagccccgtgaccctgctgagaagccaggtggtgatccccatcctgcagtgggccatcgccagcaccaccctggaccacagagacgccaactgcagcgtgatgagattcctgagagacctgatccacaccggcgtggccaacgaccacgaggaggacttcgagctgagaaaggagctgatcggccaggtgatgaaccagctgggccagcagctggtgagccagctgctgcacacctgctgcttctgcctgcccccctacaccctgcccgacgtggccgaggtgctgtgggagatcatgcaggtggacagacccaccttctgcagatggctggagaacagcctgaagggcctgcccaaggagaccaccgtgggcgccgtgaccgtgacccacaagcagctgaccgacttccacaagcaggtgaccagcgccgaggagtgcaagcaggtgtgctgggccctgagagacttcaccagactgttcagatag

SEQ ID NO: 103311 - DNA, 2874 bp, synthetic construct
  misc_feature 1..2874: note = Description of Artificial Sequence: Synthetic coding sequence
  source 1..2874: mol_type = other DNA
atggagggcgccaagcccaccctgcagctggtgtaccaggccgtgcaggccctgtaccacgaccccgaccccagcggcaaggagagagccagcttctggctgggcgagctgcagagaagcgtgcacgcctgggagatcagcgaccagctgctgcagatcagacaggacgtggagagctgctacttcgccgcccagaccatgaagatgaagatccagaccagcttctacgagctgcccaccgacagccacgccagcctgagagacagcctgctgacccacatccagaacctgaaggacctgagccccgtgatcgtgacccagctggccctggccatcgccgacctggccctgcagatgcccagctggaagggctgcgtgcagaccctggtggagaagtacagcaacgacgtgaccagcctgcccttcctgctggagatcctgaccgtgctgcccgaggaggtgcacagcagaagcctgagaatcggcgccaacagaagaaccgagatcatcgaggacctggccttctacagcagcaccgtggtgagcctgctgatgacctgcgtggagaaggccggcaccgacgagaagatgctgatgaaggtgttcagatgcctgggcagctggttcaacctgggcgtgctggacagcaacttcatggccaacaacaagctgctggccctgctgttcgaggtgctgcagcaggacaagaccagcagcaacctgcacgaggccgccagcgactgcgtgtgcagcgccctgtacgccatcgagaacgtggagaccaacctgcccctggccatgcagctgttccagggcgtgctgaccctggagaccgcctaccacatggccgtggccagagaggacctggacaaggtgctgaactactgcagaatcttcaccgagctgtgcgagaccttcctggagaagatcgtgtgcacccccggccagggcctgggcgacctgagaaccctggagctgctgctgatctgcgccggccacccccagtacgaggtggtggagatcagcttcaacttctggtacagactgggcgagcacctgtacaagaccaacgacgaggtgatccacggcatcttcaaggcctacatccagagactgctgcacgccctggccagacactgccagctggagcccgaccacgagggcgtgcccgaggagaccgacgacttcggcgagttcagaatgagagtgagcgacctggtgaaggacctgatcttcctgatcggcagcatggagtgcttcgcccagctgtacagcaccctgaaggagggcaaccccccctgggaggtgaccgaggccgtgctgttcatcatggccgccatcgccaagagcgtggaccccaagaagcccttcagcaacgccgtgtgcagacacagcctgctgttcggccagaacatcaccagcgagatcagcaactgcgagtacctgccccccgtgctgagagagaacaaccccaccctggtggaggtgctggagggcgtggtgagactgcccgagaccgtgcacaccgccgtgagatacaccagcatcgagctggtgggcgagatgagcgaggtggtggacagaaacccccagttcctggaccccgtgctgggctacctgatgaagggcctgtgcgagaagcccctggccagcgccgccgccaaggccatccacaacatctgcagcgtgtgcagagaccacatggcccagcacttcaacggcctgctggagatcgccagaagcctggacagcttcctgctgagccccgaggccgccgtgggcctgctgaagggcaccgccctggtgctggccagactgcccctggacaagatcaccgagtgcctgagcgagctgtgcagcgtgcaggtgatggccctgaagaagctgctgagccaggagcccagcaacggcatcagcagcgaccccaccgtgttcctggacagactggccgtgatcttcagacacaccaaccccatcgtggagaacggccagacccacccctgccagaaggtgatccaggagatctggcccgtgctgagcgagaccctgaacaagcacagagccgacaacagaatcgtggagagatgctgcagatgcctgagattcgccgtgagatgcgtgggcaagggcagcgccgccctgctgcagcccctggtgacccagatggtgaacgtgtaccacgtgcaccagcacagctgcttcctgtacctgggcagcatcctggtggacgagtacggcatggaggagggctgcagacagggcctgctggacatgctgcaggccctgtgcatccccaccttccagctgctggagcagcagaacggcctgcagaaccaccccgacaccgtggacgacctgttcagactggccaccagattcatccagagaagccccgtgaccctgctgagaagccaggtggtgatccccatcctgcagtgggccatcgccagcaccaccctggaccacagagacgccaactgcagcgtgatgagattcctgagagacctgatccacaccggcgtggccaacgaccacgaggaggacttcgagctgagaaaggagctgatcggccaggtgatgaaccagctgggccagcagctggtgagccagctgctgcacacctgctgcttctgcctgcccccctacaccctgcccgacgtggccgaggtgctgtgggagatcatgcaggtggacagacccaccttctgcagatggctggagaacagcctgaagggcctgcccaaggagaccaccgtgggcgccgtgaccgtgacccacaagcagctgaccgacttccacaagcaggtgaccagcgccgaggagtgcaagcaggtgtgctgggccctgagagacttcaccagactgttcagatag

SEQ ID NO: 103312 - DNA, 2874 bp, synthetic construct; identical to SEQ ID NO: 103311
  misc_feature 1..2874: note = Description of Artificial Sequence: Synthetic coding sequence
  source 1..2874: mol_type = other DNA

SEQ ID NO: 103313 - DNA, 2580 bp, synthetic construct
  misc_feature 1..2580: note = Description of Artificial Sequence: Synthetic coding sequence
  source 1..2580: mol_type = other DNA
atggagggcgccaagcccaccctgcagctggtgtaccaggccgtgcaggccctgtaccacgaccccgaccccagcggcaaggagagagccagcttctggctgggcgagctgcagagaagcgtgcacgcctgggagatcagcgaccagctgctgcagatcagacaggacgtggagagctgctacttcgccgcccagaccatgaagatgaagatccagaccagcttctacgagctgcccaccgacagccacgccagcctgagagacagcctgctgacccacatccagaacctgaaggacctgagccccgtgatcgtgacccagctggccctggccatcgccgacctggccctgcagatgcccagctggaagggctgcgtgcagaccctggtggagaagtacagcaacgacgtgaccagcctgcccttcctgctggagatcctgaccgtgctgcccgaggaggtgcacagcagaagcctgagaatcggcgccaacagaagaaccgagatcatcgaggacctggccttctacagcagcaccgtggtgagcctgctgatgacctgcgtggagaaggccggcaccgacgagaagatgctgatgaaggtgttcagatgcctgggcagctggttcaacctgggcgtgctggacagcaacttcatggccaacaacaagctgctggccctgctgttcgaggtgctgcagcaggacaagaccagcagcaacctgcacgaggccgccagcgactgcgtgtgcagcgccctgtacgccatcgagaacgtggagaccaacctgcccctggccatgcagctgttccagggcgtgctgaccctggagaccgcctaccacatggccgtggccagagaggacctggacaaggtgctgaactactgcagaatcttcaccgagctgtgcgagaccttcctggagaagatcgtgtgcacccccggccagggcctgggcgacctgagaaccctggagctgctgctgatctgcgccggccacccccagtacgaggtggtggagatcagcttcaacttctggtacagactgggcgagcacctgtacaagaccaacgacgaggtgatccacggcatcttcaaggcctacatccagagactgctgcacgccctggccagacactgccagctggagcccgaccacgagggcgtgcccgaggagaccgacgacttcggcgagttcagaatgagagtgagcgacctggtgaaggacctgatcttcctgatcggcagcatggagtgcttcgcccagctgtacagcaccctgaaggagggcaaccccccctgggaggtgaccgaggccgtgctgttcatcatggccgccatcgccaagagcgtggaccccgagaacaaccccaccctggtggaggtgctggagggcgtggtgagactgcccgagaccgtgcacaccgccgtgagatacaccagcatcgagctggtgggcgagatgagcgaggtggtggacagaaacccccagttcctgggcaccgccctggtgctggccagactgcccctggacaagatcaccgagtgcctgagcgagctgtgcagcgtgcaggtgatggccctgaagaagctgctgagccaggagcccagcaacggcatcagcagcgaccccaccgtgttcctggacagactggccgtgatcttcagacacaccaaccccatcgtggagaacggccagacccacccctgccagaaggtgatccaggagatctggcccgtgctgagcgagaccctgaacaagcacagagccgacaacagaatcgtggagagatgctgcagatgcctgagattcgccgtgagatgcgtgggcaagggcagcgccgccctgctgcagcccctggtgacccagatggtgaacgtgtaccacgtgcaccagcacagctgcttcctgtacctgggcagcatcctggtggacgagtacggcatggaggagggctgcagacagggcctgctggacatgctgcaggccctgtgcatccccaccttccagctgctggagcagcagaacggcctgcagaaccaccccgacaccgtggacgacctgttcagactggccaccagattcatccagagaagccccgtgaccctgctgagaagccaggtggtgatccccatcctgcagtgggccatcgccagcaccaccctggaccacagagacgccaactgcagcgtgatgagattcctgagagacctgatccacaccggcgtggccaacgaccacgaggaggacttcgagctgagaaaggagctgatcggccaggtgatgaaccagctgggccagcagctggtgagccagctgctgcacacctgctgcttctgcctgcccccctacaccctgcccgacgtggccgaggtgctgtgggagatcatgcaggtggacagacccaccttctgcagatggctggagaacagcctgaagggcctgcccaaggagaccaccgtgggcgccgtgaccgtgacccacaagcagctgaccgacttccacaagcaggtgaccagcgccgaggagtgcaagcaggtgtgctgggccctgagagacttcaccagactgttcagatag

SEQ ID NO: 103314 - DNA, 4236 bp, synthetic construct
  misc_feature 1..4236: note = Description of Artificial Sequence: Synthetic coding sequence
  source 1..4236: mol_type = other DNA
atggccgaggccagaaagagaagagagctgctgcccctgatctaccaccacctgctgagagccggctacgtgagagccgccagagaggtgaaggagcagagcggccagaagtgcttcctggcccagcccgtgaccctgctggacatctacacccactggcagcagaccagcgagctgggcagaaagagaaaggccgaggaggacgccgccctgcaggccaagaagaccagagtgagcgaccccatcagcaccagcgagagcagcgaggaggaggaggaggccgaggccgagaccgccaaggccacccccagactggccagcaccaacagcagcgtgctgggcgccgacctgcccagcagcatgaaggagaaggccaaggccgagaccgagaaggccggcaagaccggcaacagcatgccccaccccgccaccggcaagaccgtggccaacctgctgagcggcaagagccccagaaagagcgccgagcccagcgccaacaccaccctggtgagcgagaccgaggaggagggcagcgtgcccgccttcggcgccgccgccaagcccggcatggtgagcgccggccaggccgacagcagcagcgaggacaccagcagcagcagcgacgagaccgacgtggaggtgaaggccagcgagaagatcctgcaggtgagagccgccagcgcccccgccaagggcacccccggcaagggcgccacccccgccccccccggcaaggccggcgccgtggccagccagaccaaggccggcaagcccgaggaggacagcgagagcagcagcgaggagagcagcgacagcgaggaggagacccccgccgccaaggccctgctgcaggccaaggccagcggcaagaccagccaggtgggcgccgccagcgcccccgccaaggagagccccagaaagggcgccgcccccgccccccccggcaagaccggccccgccgtggccaaggcccaggccggcaagagagaggaggacagccagagcagcagcgaggagagcgacagcgaggaggaggcccccgcccaggccaagcccagcggcaaggccccccaggtgagagccgccagcgcccccgccaaggagagccccagaaagggcgccgcccccgccccccccagaaagaccggccccgccgccgcccaggtgcaggtgggcaagcaggaggaggacagcagaagcagcagcgaggagagcgacagcgacagagaggccctggccgccatgaacgccgcccaggtgaagcccctgggcaagagcccccaggtgaagcccgccagcaccatgggcatgggccccctgggcaagggcgccggccccgtgccccccggcaaggtgggccccgccacccccagcgcccaggtgggcaagtgggaggaggacagcgagagcagcagcgaggagagcagcgacagcagcgacggcgaggtgcccaccgccgtggcccccgcccaggagaagagcctgggcaacatcctgcaggccaagcccaccagcagccccgccaagggccccccccagaaggccggccccgtggccgtgcaggtgaaggccgagaagcccatggacaacagcgagagcagcgaggagagcagcgacagcgccgacagcgaggaggcccccgccgccatgaccgccgcccaggccaagcccgccctgaagatcccccagaccaaggcctgccccaagaagaccaacaccaccgccagcgccaaggtggcccccgtgagagtgggcacccaggcccccagaaaggccggcaccgccaccagccccgccggcagcagccccgccgtggccggcggcacccagagacccgccgaggacagcagcagcagcgaggagagcgacagcgaggaggagaagaccggcctggccgtgaccgtgggccaggccaagagcgtgggcaagggcctgcaggtgaaggccgccagcgtgcccgtgaagggcagcctgggccagggcaccgcccccgtgctgcccggcaagaccggccccaccgtgacccaggtgaaggccgagaagcaggaggacagcgagagcagcgaggaggagagcgacagcgaggaggccgccgccagccccgcccaggtgaagaccagcgtgaagaagacccaggccaaggccaaccccgccgccgccagagcccccagcgccaagggcaccatcagcgcccccggcaaggtggtgaccgccgccgcccaggccaagcagagaagccccagcaaggtgaagccccccgtgagaaacccccagaacagcaccgtgctggccagaggccccgccagcgtgcccagcgtgggcaaggccgtggccaccgccgcccaggcccagaccggccccgaggaggacagcggcagcagcgaggaggagagcgacagcgaggaggaggccgagaccctggcccaggtgaagcccagcggcaagacccaccagatcagagccgccctggcccccgccaaggagagccccagaaagggcgccgcccccaccccccccggcaagaccggccccagcgccgcccaggccggcaagcaggacgacagcggcagcagcagcgaggagagcgacagcgacggcgaggcccccgccgccgtgaccagcgcccaggtgatcaagccccccctgatcttcgtggaccccaacagaagccccgccggccccgccgccacccccgcccaggcccaggccgccagcacccccagaaaggccagagccagcgagagcaccgccagaagcagcagcagcgagagcgaggacgaggacgtgatccccgccacccagtgcctgacccccggcatcagaaccaacgtggtgaccatgcccaccgcccaccccagaatcgcccccaaggccagcatggccggcgccagcagcagcaaggagagcagcagaatcagcgacggcaagaagcaggagggccccgccacccaggtgagcaagaagaaccccgccagcctgcccctgacccaggccgccctgaaggtgctggcccagaaggccagcgaggcccagccccccgtggccagaacccagcccagcagcggcgtggacagcgccgtgggcaccctgcccgccaccagcccccagagcaccagcgtgcaggccaagggcaccaacaagctgagaaagcccaagctgcccgaggtgcagcaggccaccaaggcccccgagagcagcgacgacagcgaggacagcagcgacagcagcagcggcagcgaggaggacggcgagggcccccagggcgccaagagcgcccacaccctgggccccacccccagcagaaccgagaccctggtggaggagaccgccgccgagagcagcgaggacgacgtggtggcccccagccagagcctgctgagcggctacatgacccccggcctgacccccgccaacagccaggccagcaaggccacccccaagctggacagcagccccagcgtgagcagcaccctggccgccaaggacgaccccgacggcaagcaggaggccaagccccagcaggccgccggcatgctgagccccaagaccggcggcaaggaggccgccagcggcaccaccccccagaagagcagaaagcccaagaagggcgccggcaacccccaggccagcaccctggccctgcagagcaacatcacccagtgcctgctgggccagccctggcccctgaacgaggcccaggtgcaggccagcgtggtgaaggtgctgaccgagctgctggagcaggagagaaagaaggtggtggacaccaccaaggagagcagcagaaagggctgggagagcagaaagagaaagctgagcggcgaccagcccgccgccagaacccccagaagcaagaagaagaagaagctgggcgccggcgagggcggcgaggccagcgtgagccccgagaagaccagcaccaccagcaagggcaaggccaagagagacaaggccagcggcgacgtgaaggagaagaagggcaagggcagcctgggcagccagggcgccaaggacgagcccgaggaggagctgcagaagggcatgggcaccgtggagggcggcgaccagagcaaccccaagagcaagaaggagaagaagaagagcgacaagagaaagaaggacaaggagaagaaggagaagaagaagaaggccaagaaggccagcaccaaggacagcgagagccccagccagaagaagaagaagaagaagaagaagaccgccgagcagaccgtgtag

SEQ ID NO: 103315 - DNA, 4470 bp, synthetic construct
  misc_feature 1..4470: note = Description of Artificial Sequence: Synthetic coding sequence
  source 1..4470: mol_type = other DNA
atggccgaggccagaaagagaagagagctgctgcccctgatctaccaccacctgctgagagccggctacgtgagagccgccagagaggtgaaggagcagagcggccagaagtgcttcctggcccagcccgtgaccctgctggacatctacacccactggcagcagaccagcgagctgggcagaaagagaaaggccgaggaggacgccgccctgcaggccaagaagaccagagtgagcgaccccatcagcaccagcgagagcagcgaggaggaggaggaggccgaggccgagaccgccaaggccacccccagactggccagcaccaacagcagcgtgctgggcgccgacctgcccagcagcatgaaggagaaggccaaggccgagaccgagaaggccggcaagaccggcaacagcatgccccaccccgccaccggcaagaccgtggccaacctgctgagcggcaagagccccagaaagagcgccgagcccagcgccaacaccaccctggtgagcgagaccgaggaggagggcagcgtgcccgccttcggcgccgccgccaagcccggcatggtgagcgccggccaggccgacagcagcagcgaggacaccagcagcagcagcgacgagaccgacgtggagggcaagcccagcgtgaagcccgcccaggtgaaggccagcagcgtgagcaccaaggagagccccgccagaaaggccgcccccgcccccggcaaggtgggcgacgtgaccccccaggtgaagggcggcgccctgccccccgccaagagagccaagaagcccgaggaggagagcgagagcagcgaggagggcagcgagagcgaggaggaggcccccgccggcaccagaagccaggtgaaggccagcgagaagatcctgcaggtgagagccgccagcgcccccgccaagggcacccccggcaagggcgccacccccgccccccccggcaaggccggcgccgtggccagccagaccaaggccggcaagcccgaggaggacagcgagagcagcagcgaggagagcagcgacagcgaggaggagacccccgccgccaaggccctgctgcaggccaaggccagcggcaagaccagccaggtgggcgccgccagcgcccccgccaaggagagccccagaaagggcgccgcccccgccccccccggcaagaccggccccgccgtggccaaggcccaggccggcaagagagaggaggacagccagagcagcagcgaggagagcgacagcgaggaggaggcccccgcccaggccaagcccagcggcaaggccccccaggtgagagccgccagcgcccccgccaaggagagccccagaaagggcgccgcccccgccccccccagaaagaccggccccgccgccgcccaggtgcaggtgggcaagcaggaggaggacagcagaagcagcagcgaggagagcgacagcgacagagaggccctggccgccatgaacgccgcccaggtgaagcccctgggcaagagcccccaggtgaagcccgccagcaccatgggcatgggccccctgggcaagggcgccggccccgtgccccccggcaaggtgggccccgccacccccagcgcccaggtgggcaagtgggaggaggacagcgagagcagcagcgaggagagcagcgacagcagcgacggcgaggtgcccaccgccgtggcccccgcccaggagaagagcctgggcaacatcctgcaggccaagcccaccagcagccccgccaagggccccccccagaaggccggccccgtggccgtgcaggtgaaggccgagaagcccatggacaacagcgagagcagcgaggagagcagcgacagcgccgacagcgaggaggcccccgccgccatgaccgccgcccaggccaagcccgccctgaagatcccccagaccaaggcctgccccaagaagaccaacaccaccgccagcgccaaggtggcccccgtgagagtgggcacccaggcccccagaaaggccggcaccgccaccagccccgccggcagcagccccgccgtggccggcggcacccagagacccgccgaggacagcagcagcagcgaggagagcgacagcgaggaggagaagaccggcctggccgtgaccgtgggccaggccaagagcgtgggcaagggcctgcaggtgaaggccgccagcgtgcccgtgaagggcagcctgggccagggcaccgcccccgtgctgcccggcaagaccggccccaccgtgacccaggtgaaggccgagaagcaggaggacagcgagagcagcgaggaggagagcgacagcgaggaggccgccgccagccccgcccaggtgaagaccagcgtgaagaagacccaggccaaggccaaccccgccgccgccagagcccccagcgccaagggcaccatcagcgcccccggcaaggtggtgaccgccgccgcccaggccaagcagagaagccccagcaaggtgaagccccccgtgagaaacccccagaacagcaccgtgctggccagaggccccgccagcgtgcccagcgtgggcaaggccgtggccaccgccgcccaggcccagaccggccccgaggaggacagcggcagcagcgaggaggagagcgacagcgaggaggaggccgagaccctggcccaggtgaagcccagcggcaagacccaccagatcagagccgccctggcccccgccaaggagagccccagaaagggcgccgcccccaccccccccggcaagaccggccccagcgccgcccaggccggcaagcaggacgacagcggcagcagcagcgaggagagcgacagcgacggcgaggcccccgccgccgtgaccagcgcccaggtgatcaagccccccctgatcttcgtggaccccaacagaagccccgccggccccgccgccacccccgcccaggcccaggccgccagcacccccagaaaggccagagccagcgagagcaccgccagaagcagcagcagcgagagcgaggacgaggacgtgatccccgccacccagtgcctgacccccggcatcagaaccaacgtggtgaccatgcccaccgcccaccccagaatcgcccccaaggccagcatggccggcgccagcagcagcaaggagagcagcagaatcagcgacggcaagaagcaggagggccccgccacccaggtgagcaagaagaaccccgccagcctgcccctgacccaggccgccctgaaggtgctggcccagaaggccagcgaggcccagccccccgtggccagaacccagcccagcagcggcgtggacagcgccgtgggcaccctgcccgccaccagcccccagagcaccagcgtgcaggccaagggcaccaacaagctgagaaagcccaagctgcccgaggtgcagcaggccaccaaggcccccgagagcagcgacgacagcgaggacagcagcgacagcagcagcggcagcgaggaggacggcgagggcccccagggcgccaagagcgcccacaccctggtgggccccacccccagcagaaccgagaccctggtggaggagaccgccgccgagagcagcgaggacgacgtggtggcccccagccagagcctgctgagcggctacatgacccccggcctgacccccgccaacagccaggccagcaaggccacccccaagctggacagcagccccagcgtgagcagcaccctggccgccaaggacgaccccgacggcaagcaggaggccaagccccagcaggccgccggcatgctgagccccaagaccggcggcaaggaggccgccagcggcaccaccccccagaagagcagaaagcccaagaagggcgccggcaacccccaggccagcaccctggccctgcagagcaacatcacccagtgcctgctgggccagccctggcccctgaacgaggcccaggtgcaggccagcgtggtgaaggtgctgaccgagctgctggagcaggagagaaagaaggtggtggacaccaccaaggagagcagcagaaagggctgggagagcagaaagagaaagctgagcggcgaccagcccgccgccagaacccccagaagcaagaagaagaagaagctgggcgccggcgagggcggcgaggccagcgtgagccccgagaagaccagcaccaccagcaagggcaaggccaagagagacaaggccagcggcgacgtgaaggagaagaagggcaagggcagcctgggcagccagggcgccaaggacgagcccgaggaggagctgcagaagggcatgggcaccgtggagggcggcgaccagagcaaccccaagagcaagaaggagaagaagaagagcgacaagagaaagaaggacaaggagaagaaggagaagaagaagaaggccaagaaggccagcaccaaggacagcgagagccccagccagaagaagaagaagaagaagaagaagaccgccgagcagaccgtgtag

SEQ ID NO: 103316 - DNA, 2877 bp, synthetic construct
  misc_feature 1..2877: note = Description of Artificial Sequence: Synthetic coding sequence
  source 1..2877: mol_type = other DNA
atggccgaggccagaaagagaagagagctgctgcccctgatctaccaccacctgctgagagccggctacgtgagagccgccagagaggtgaaggagcagagcggccagaagtgcttcctggcccagcccgtgaccctgctggacatctacacccactggcagcagaccagcgagctgggcagaaagagaaaggccgaggaggacgccgccctgcaggccaagaagaccagagtgagcgaccccatcagcaccagcgagagcagcgaggaggaggaggaggccgaggccgagaccgccaaggccacccccagactggccagcaccaacagcagcgtgctgggcgccgacctgcccagcagcatgaaggagaaggccaaggccgagaccgagaaggccggcaagaccggcaacagcatgccccaccccgccaccggcaagaccgtggccaacctgctgagcggcaagagccccagaaagagcgccgagcccagcgccaacaccaccctggtgagcgagaccgaggaggagggcagcgtgcccgccttcggcgccgccgccaagcccggcatggtgagcgccggccaggccgacagcagcagcgaggacaccagcagcagcagcgacgagaccgacgtggagggcaagcccagcgtgaagcccgcccaggtgaaggccagcagcgtgagcaccaaggagagccccgccagaaaggccgcccccgcccccggcaaggtgggcgacgtgaccccccaggtgaagggcggcgccctgccccccgccaagagagccaagaagcccgaggaggagagcgagagcagcgaggagggcagcgagagcgaggaggaggcccccgccggcaccagaagccaggtgaaggccagcgagaagatcctgcaggtgagagccgccagcgcccccgccaagggcacccccggcaagggcgccacccccgccccccccggcaaggccggcgccgtggccagccagaccaaggccggcaagcccgaggaggacagcgagagcagcagcgaggagagcagcgacagcgaggaggagacccccgccgccaaggccctgctgcaggccaaggccagcggcaagaccagccaggtgggcgccgccagcgcccccgccaaggagagccccagaaagggcgccgcccccgccccccccggcaagaccggccccgccgtggccaaggcccaggccggcaagagagaggaggacagccagagcagcagcgaggagagcgacagcgaggaggaggcccccgcccaggccaagcccagcggcaaggccccccaggtgagagccgccagcgcccccgccaaggagagccccagaaagggcgccgcccccgccccccccagaaagaccggccccgccgccgcccaggtgcaggtgggcaagcaggaggaggacagcagaagcagcagcgaggagagcgacagcgacagagaggccctggccgccatgaacgccgcccaggtgaagcccctgggcaagagcccccaggtgaagcccgccagcaccatgggcatgggccccctgggcaagggcgccggccccgtgccccccggcaaggtgggccccgccacccccagcgcccaggtgggcaagtgggaggaggacagcgagagcagcagcgaggagagcagcgacagcagcgacggcgaggtgcccaccgccgtggcccccgcccaggagaagagcctgggcaacatcctgcaggccaagcccaccagcagccccgccaagggccccccccagaaggccggccccgtggccgtgcaggtgaaggccgagaagcccatggacaacagcgagagcagcgaggagagcagcgacagcgccgacagcgaggaggcccccgccgccatgaccgccgcccaggccaagcccgccctgaagatcccccagaccaaggcctgccccaagaagaccaacaccaccgccagcgccaaggtggcccccgtgagagtgggcacccaggcccccagaaaggccggcaccgccaccagccccgccggcagcagccccgccgtggccggcggcacccagagacccgccgaggacagcagcagcagcgaggagagcgacagcgaggaggagaagaccggcctggccgtgaccgtgggccaggccaagagcgtgggcaagggcctgcaggtgaaggccgccagcgtgcccgtgaagggcagcctgggccagggcaccgcccccgtgctgcccggcaagaccggccccaccgtgacccaggtgaaggccgagaagcaggaggacagcgagagcagcgaggaggagagcgacagcgaggaggccgccgccagccccgcccaggtgaagaccagcgtgaagaagacccaggccaaggccaaccccgccgccgccagagcccccagcgccaagggcaccatcagcgcccccggcaaggtggtgaccgccgccgcccaggccaagcagagaagccccagcaaggtgaagccccccgtgagaaacccccagaacagcaccgtgctggccagaggccccgccagcgtgcccagcgtgggcaaggccgtggccaccgccgcccaggcccagaccggccccgaggaggacagcggcagcagcgaggaggagagcgacagcgaggaggaggccgagaccctggcccaggtgaagcccagcggcaagacccaccagatcagagccgccctggcccccgccaaggagagccccagaaagggcgccgcccccaccccccccggcaagaccggccccagcgccgcccaggccggcaagcaggacgacagcggcagcagcagcgaggagagcgacagcgacggcgaggcccccgccgccgtgaccagcgcccaggaccaggagagcagctag

SEQ ID NO: 103317 - DNA, 4245 bp, synthetic construct
  misc_feature 1..4245: note = Description of Artificial Sequence: Synthetic coding sequence
  source 1..4245: mol_type = other DNA
atggccgaggccagaaagagaagagagctgctgcccctgatctaccaccacctgctgagagccggctacgtgagagccgccagagaggtgaaggagcagagcggccagaagtgcttcctggcccagcccgtgaccctgctggacatctacacccactggcagcagaccagcgagctgggcagaaagagaaaggccgaggaggacgccgccctgcaggccaagaagaccagagtgagcgaccccatcagcaccagcgagagcagcgaggaggaggaggaggccgaggccgagaccgccaaggccacccccagactggccagcaccaacagcagcgtgctgggcgccgacctgcccagcagcatgaaggagaaggccaaggccgagaccgagaaggccggcaagaccggcaacagcatgccccaccccgccaccggcaagaccgtggccaacctgctgagcggcaagagccccagaaagagcgccgagcccagcgccaacaccaccctggtgagcgagaccgaggaggagggcagcgtgcccgccttcggcgccgccgccaagcccggcatggtgagcgccggccaggccgacagcagcagcgaggacaccagcagcagcagcgacgagaccgacgtggagggcaagcccagcgtgaagcccgcccaggtgaaggccagcagcgtgagcaccaaggagagccccgccagaaaggccgcccccgcccccggcaaggtgggcgacgtgaccccccaggtgaagggcggcgccctgccccccgccaagagagccaagaagcccgaggaggagagcgagagcagcgaggagggcagcgagagcgaggaggaggcccccgccggcaccagaagccaggtgaaggccagcgagaagatcctgcaggtgagagccgccagcgcccccgccaagggcacccccggcaagggcgccacccccgccccccccggcaaggccggcgccgtggccagccagaccaaggccggcaagcccgaggaggacagcgagagcagcagcgaggagagcagcgacagcgaggaggagacccccgccgccaaggccctgctgcaggccaaggccagcggcaagaccagccaggtgggcgccgccagcgcccccgccaaggagagccccagaaagggcgccgcccccgccccccccggcaagaccggccccgccgtggccaaggcccaggccggcaagagagaggaggacagccagagcagcagcgaggagagcgacagcgaggaggaggcccccgcccaggccaagcccagcggcaaggccccccaggtgagagccgccagcgcccccgccaaggagagccccagaaagggcgccgcccccgccccccccagaaagaccggccccgccgccgcccaggtgcaggtgggcaagcaggaggaggacagcagaagcagcagcgaggagagcgacagcgacagagaggccctggccgccatgaacgccgcccaggtgaagcccctgggcaagagcccccaggtgaagcccgccagcaccatgggcatgggccccctgggcaagggcgccggccccgtgccccccggcaaggtgggccccgccacccccagcgcccaggtgggcaagtgggaggaggacagcgagagcagcagcgaggagagcagcgacagcagcgacggcgaggtgcccaccgccgtggcccccgcccaggagaagagcctgggcaacatcctgcaggccaagcccaccagcagccccgccaagggccccccccagaaggccggccccgtggccgtgcaggtgaaggccgagaagcccatggacaacagcgagagcagcgaggagagcagcgacagcgccgacagcgaggaggcccccgccgccatgaccgccgcccaggccaagcccgccctgaagatcccccagaccaaggcctgccccaagaagaccaacaccaccgccagcgccaaggtggcccccgtgagagtgggcacccaggcccccagaaaggccggcaccgccaccagccccgccggcagcagccccgccgtggccggcggcacccagagacccgccgaggacagcagcagcagcgaggagagcgacagcgaggaggagaagaccggcctggccgtgaccgtgggccaggccaagagcgtgggcaagggcctgcaggtgaaggccgccagcgtgcccgtgaagggcagcctgggccagggcaccgcccccgtgctgcccggcaagaccggccccaccgtgacccaggtgaaggccgagaagcaggaggacagcgagagcagcgaggaggagagcgacagcgaggaggccgccgccagccccgcccaggtgaagaccagcgtgaagaagacccaggccaaggccaaccccgccgccgccagagcccccagcgccaagggcaccatcagcgcccccggcaaggtggtgaccgccgccgcccaggccaagcagagaagccccagcaaggtgaagccccccgtgagaaacccccagaacagcaccgtgctggccagaggccccgccagcgtgcccagcgtgggcaaggccgtggccaccgccgcccaggcccagaccggccccgaggaggacagcggcagcagcgaggaggagagcgacagcgaggaggaggccgagaccctggcccaggtgaagcccagcggcaagacccaccagatcagagccgccctggcccccgccaaggagagccccagaaagggcgccgcccccaccccccccggcaagaccggccccagcgccgcccaggccggcaagcaggacgacagcggcagcagcagcgaggagagcgacagcgacggcgaggcccccgccgccgtgaccagcgcccaggtgatcaagccccccctgatcttcgtggaccccaacagaagccccgccggccccgccgccacccccgcccaggcccaggccgccagcacccccagaaaggccagagccagcgagagcaccgccagaagcagcagcagcgagagcgaggacgaggacgtgatccccgccacccagtgcctgacccccggcatcagaaccaacgtggtgaccatgcccaccgcccaccccagaatcgcccccaaggccagcatggccggcgccagcagcagcaaggagagcagcagaatcagcgacggcaagaagcaggagggccccgccacccaggtggacagcgccgtgggcaccctgcccgccaccagcccccagagcaccagcgtgcaggccaagggcaccaacaagctgagaaagcccaagctgcccgaggtgcagcaggccaccaaggcccccgagagcagcgacgacagcgaggacagcagcgacagcagcagcggcagcgaggaggacggcgagggcccccagggcgccaagagcgcccacaccctgggccccacccccagcagaaccgagaccctggtggaggagaccgccgccgagagcagcgaggacgacgtggtggcccccagccagagcctgctgagcggctacatgacccccggcctgacccccgccaacagccaggccagcaaggccacccccaagctggacagcagccccagcgtgagcagcaccctggccgccaaggacgaccccgacggcaagcaggaggccaagccccagcaggccgccggcatgctgagccccaagaccggcggcaaggaggccgccagcggcaccaccccccagaagagcagaaagcccaagaagggcgccggcaacccccaggccagcaccctggccctgcagagcaacatcacccagtgcctgctgggccagccctggcccctgaacgaggcccaggtgcaggccagcgtggtgaaggtgctgaccgagctgctggagcaggagagaaagaaggtggtggacaccaccaaggagagcagcagaaagggctgggagagcagaaagagaaagctgagcggcgaccagcccgccgccagaacccccagaagcaagaagaagaagaagctgggcgccggcgagggcggcgaggccagcgtgagccccgagaagaccagcaccaccagcaagggcaaggccaagagagacaaggccagcggcgacgtgaaggagaagaagggcaagggcagcctgggcagccagggcgccaaggacgagcccgaggaggagctgcagaagggcatgggcaccgtggagggcggcgaccagagcaaccccaagagcaagaaggagaagaagaagagcgacaagagaaagaaggacaagtag

SEQ ID NO: 103318 - DNA, 4356 bp, synthetic construct
  misc_feature 1..4356: note = Description of Artificial Sequence: Synthetic coding sequence
  source 1..4356: mol_type = other DNA
atggccgaggccagaaagagaagagagctgctgcccctgatctaccaccacctgctgagagccggctacgtgagagccgccagagaggtgaaggagcagagcggccagaagtgcttcctggcccagcccgtgaccctgctggacatctacacccactggcagcagaccagcgagctgggcagaaagagaaaggccgaggaggacgccgccctgcaggccaagaagaccagagtgagcgaccccatcagcaccagcgagagcagcgaggaggaggaggaggccgaggccgagaccgccaaggccacccccagactggccagcaccaacagcagcgtgctgggcgccgacctgcccagcagcatgaaggagaaggccaaggccgagaccgagaaggccggcaagaccggcaacagcatgccccaccccgccaccggcaagaccgtggccaacctgctgagcggcaagagccccagaaagagcgccgagcccagcgccaacaccaccctggtgagcgagaccgaggaggagggcagcgtgcccgccttcggcgccgccgccaagcccggcatggtgagcgccggccaggccgacagcagcagcgaggacaccagcagcagcagcgacgagaccgacgtggagggcaagcccagcgtgaagcccgcccaggtgaaggccagcagcgtgagcaccaaggagagccccgccagaaaggccgcccccgcccccggcaaggtgggcgacgtgaccccccaggtgaagggcggcgccctgccccccgccaagagagccaagaagcccgaggaggagagcgagagcagcgaggagggcagcgagagcgaggaggaggcccccgccggcaccagaagccaggtgaaggccagcgagaagatcctgcaggtgagagccgccagcgcccccgccaagggcacccccggcaagggcgccacccccgccccccccggcaaggccggcgccgtggccagccagaccaaggccggcaagcccgaggaggacagcgagagcagcagcgaggagagcagcgacagcgaggaggagacccccgccgccaaggccctgctgcaggccaaggccagcggcaagaccagccaggtgggcgccgccagcgcccccgccaaggagagccccagaaagggcgccgcccccgccccccccggcaagaccggccccgccgtggccaaggcccaggccggcaagagagaggaggacagccagagcagcagcgaggagagcgacagcgaggaggaggcccccgcccaggccaagcccagcggcaaggccccccaggtgagagccgccagcgcccccgccaaggagagccccagaaagggcgccgcccccgccccccccagaaagaccggccccgccgccgcccaggtgcaggtgggcaagcaggaggaggacagcagaagcagcagcgaggagagcgacagcgacagagaggccctggccgccatgaacgccgcccaggtgaagcccctgggcaagagcccccaggtgaagcccgccagcaccatgggcatgggccccctgggcaagggcgccggccccgtgccccccggcaaggtgggccccgccacccccagcgcccaggtgggcaagtgggaggaggacagcgagagcagcagcgaggagagcagcgacagcagcgacggcgaggtgcccaccgccgtggcccccgcccaggagaagagcctgggcaacatcctgcaggccaagcccaccagcagccccgccaagggccccccccagaaggccggccccgtggccgtgcaggtgaaggccgagaagcccatggacaacagcgagagcagcgaggagagcagcgacagcgccgacagcgaggaggcccccgccgccatgaccgccgcccaggccaagcccgccctgaagatcccccagaccaaggcctgccccaagaagaccaacaccaccgccagcgccaaggtggcccccgtgagagtgggcacccaggcccccagaaaggccggcaccgccaccagccccgccggcagcagccccgccgtggccggcggcacccagagacccgccgaggacagcagcagcagcgaggagagcgacagcgaggaggagaagaccggcctggccgtgaccgtgggccaggccaagagcgtgggcaagggcctgcaggtgaaggccgccagcgtgcccgtgaagggcagcctgggccagggcaccgcccccgtgctgcccggcaagaccggccccaccgtgacccaggtgaaggccgagaagcaggaggacagcgagagcagcgaggaggagagcgacagcgaggaggccgccgccagccccgcccaggtgaagaccagcgtgaagaagacccaggccaaggccaaccccgccgccgccagagcccccagcgccaagggcaccatcagcgcccccggcaaggtggtgaccgccgccgcccaggccaagcagagaagccccagcaaggtgaagccccccgtgagaaacccccagaacagcaccgtgctggccagaggccccgccagcgtgcccagcgtgggcaaggccgtggccaccgccgcccaggcccagaccggccccgaggaggacagcggcagcagcgaggaggagagcgacagcgaggaggaggccgagaccctggcccaggtgaagcccagcggcaagacccaccagatcagagccgccctggcccccgccaaggagagccccagaaagggcgccgcccccaccccccccggcaagaccggccccagcgccgcccaggccggcaagcaggacgacagcggcagcagcagcgaggagagcgacagcgacggcgaggcccccgccgccgtgaccagcgcccaggtgatcaagccccccctgatcttcgtggaccccaacagaagccccgccggccccgccgccacccccgcccaggcccaggccgccagcacccccagaaaggccagagccagcgagagcaccgccagaagcagcagcagcgagagcgaggacgaggacgtgatccccgccacccagtgcctgacccccggcatcagaaccaacgtggtgaccatgcccaccgcccaccccagaatcgcccccaaggccagcatggccggcgccagcagcagcaaggagagcagcagaatcagcgacggcaagaagcaggagggccccgccacccaggtggacagcgccgtgggcaccctgcccgccaccagcccccagagcaccagcgtgcaggccaagggcaccaacaagctgagaaagcccaagctgcccgaggtgcagcaggccaccaaggcccccgagagcagcgacgacagcgaggacagcagcgacagcagcagcggcagcgaggaggacggcgagggcccccagggcgccaagagcgcccacaccctggtgggccccacccccagcagaaccgagaccctggtggaggagaccgccgccgagagcagcgaggacgacgtggtggcccccagccagagcctgctgagcggctacatgacccccggcctgacccccgccaacagccaggccagcaaggccacccccaagctggacagcagccccagcgtgagcagcaccctggccgccaaggacgaccccgacggcaagcaggaggccaagccccagcaggccgccggcatgctgagccccaagaccggcggcaaggaggccgccagcggcaccaccccccagaagagcagaaagcccaagaagggcgccggcaacccccaggccagcaccctggccctgcagagcaacatcacccagtgcctgctgggccagccctggcccctgaacgaggcccaggtgcaggccagcgtggtgaaggtgctgaccgagctgctggagcaggagagaaagaaggtggtggacaccaccaaggagagcagcagaaagggctgggagagcagaaagagaaagctgagcggcgaccagcccgccgccagaacccccagaagcaagaagaagaagaagctgggcgccggcgagggcggcgaggccagcgtgagccccgagaagaccagcaccaccagcaagggcaaggccaagagagacaaggccagcggcgacgtgaaggagaagaagggcaagggcagcctgggcagccagggcgccaaggacgagcccgaggaggagctgcagaagggcatgggcaccgtggagggcggcgaccagagcaaccccaagagcaagaaggagaagaagaagagcgacaagagaaagaaggacaaggagaagaaggagaagaagaagaaggccaagaaggccagcaccaaggacagcgagagccccagccagaagaagaagaagaagaagaagaagaccgccgagcagaccgtgtag

SEQ ID NO: 103319 - DNA, 4239 bp, synthetic construct
  misc_feature 1..4239: note = Description of Artificial Sequence: Synthetic coding sequence
  source 1..4239: mol_type = other DNA
atggccgaggccagaaagagaagagagctgctgcccctgatctaccaccacctgctgagagccggctacgtgagagccgccagagaggtgaaggagcagagcggccagaagtgcttcctggcccagcccgtgaccctgctggacatctacacccactggcagcagaccagcgagctgggcagaaagagaaaggccgaggaggacgccgccctgcaggccaagaagaccagagtgagcgaccccatcagcaccagcgagagcagcgaggaggaggaggaggccgaggccgagaccgccaaggccacccccagactggccagcaccaacagcagcgtgctgggcgccgacctgcccagcagcatgaaggagaaggccaaggccgagaccgagaaggccggcaagaccggcaacagcatgccccaccccgccaccggcaagaccgtggccaacctgctgagcggcaagagccccagaaagagcgccgagcccagcgccaacaccaccctggtgagcgagaccgaggaggagggcagcgtgcccgccttcggcgccgccgccaagcccggcatggtgagcgccggccaggccgacagcagcagcgaggacaccagcagcagcagcgacgagaccgacgtggaggtgaaggccagcgagaagatcctgcaggtgagagccgccagcgcccccgccaagggcacccccggcaagggcgccacccccgccccccccggcaaggccggcgccgtggccagccagaccaaggccggcaagcccgaggaggacagcgagagcagcagcgaggagagcagcgacagcgaggaggagacccccgccgccaaggccctgctgcaggccaaggccagcggcaagaccagccaggtgggcgccgccagcgcccccgccaaggagagccccagaaagggcgccgcccccgccccccccggcaagaccggccccgccgtggccaaggcccaggccggcaagagagaggaggacagccagagcagcagcgaggagagcgacagcgaggaggaggcccccgcccaggccaagcccagcggcaaggccccccaggtgagagccgccagcgcccccgccaaggagagccccagaaagggcgccgcccccgccccccccagaaagaccggccccgccgccgcccaggtgcaggtgggcaagcaggaggaggacagcagaagcagcagcgaggagagcgacagcgacagagaggccctggccgccatgaacgccgcccaggtgaagcccctgggcaagagcccccaggtgaagcccgccagcaccatgggcatgggccccctgggcaagggcgccggccccgtgccccccggcaaggtgggccccgccacccccagcgcccaggtgggcaagtgggaggaggacagcgagagcagcagcgaggagagcagcgacagcagcgacggcgaggtgcccaccgccgtggcccccgcccaggagaagagcctgggcaacatcctgcaggccaagcccaccagcagccccgccaagggccccccccagaaggccggccccgtggccgtgcaggtgaaggccgagaagcccatggacaacagcgagagcagcgaggagagcagcgacagcgccgacagcgaggaggcccccgccgccatgaccgccgcccaggccaagcccgccctgaagatcccccagaccaaggcctgccccaagaagaccaacaccaccgccagcgccaaggtggcccccgtgagagtgggcacccaggcccccagaaaggccggcaccgccaccagccccgccggcagcagccccgccgtggccggcggcacccagagacccgccgaggacagcagcagcagcgaggagagcgacagcgaggaggagaagaccggcctggccgtgaccgtgggccaggccaagagcgtgggcaagggcctgcaggtgaaggccgccagcgtgcccgtgaagggcagcctgggccagggcaccgcccccgtgctgcccggcaagaccggccccaccgtgacccaggtgaaggccgagaagcaggaggacagcgagagcagcgaggaggagagcgacagcgaggaggccgccgccagccccgcccaggtgaagaccagcgtgaagaagacccaggccaaggccaaccccgccgccgccagagcccccagcgccaagggcaccatcagcgcccccggcaaggtggtgaccgccgccgcccaggccaagcagagaagccccagcaaggtgaagccccccgtgagaaacccccagaacagcaccgtgctggccagaggccccgccagcgtgcccagcgtgggcaaggccgtggccaccgccgcccaggcccagaccggccccgaggaggacagcggcagcagcgaggaggagagcgacagcgaggaggaggccgagaccctggcccaggtgaagcccagcggcaagacccaccagatcagagccgccctggcccccgccaaggagagccccagaaagggcgccgcccccaccccccccggcaagaccggccccagcgccgcccaggccggcaagcaggacgacagcggcagcagcagcgaggagagcgacagcgacggcgaggcccccgccgccgtgaccagcgcccaggtgatcaagccccccctgatcttcgtggaccccaacagaagccccgccggccccgccgccacccccgcccaggcccaggccgccagcacccccagaaaggccagagccagcgagagcaccgccagaagcagcagcagcgagagcgaggacgaggacgtgatccccgccacccagtgcctgacccccggcatcagaaccaacgtggtgaccatgcccaccgcccaccccagaatcgcccccaaggccagcatggccggcgccagcagcagcaaggagagcagcagaatcagcgacggcaagaagcaggagggccccgccacccaggtgagcaagaagaaccccgccagcctgcccctgacccaggccgccctgaaggtgctggcccagaaggccagcgaggcccagccccccgtggccagaacccagcccagcagcggcgtggacagcgccgtgggcaccctgcccgccaccagcccccagagcaccagcgtgcaggccaagggcaccaacaagctgagaaagcccaagctgcccgaggtgcagcaggccaccaaggcccccgagagcagcgacgacagcgaggacagcagcgacagcagcagcggcagcgaggaggacggcgagggcccccagggcgccaagagcgcccacaccctggtgggccccacccccagcagaaccgagaccctggtggaggagaccgccgccgagagcagcgaggacgacgtggtggcccccagccagagcctgctgagcggctacatgacccccggcctgacccccgccaacagccaggccagcaaggccacccccaagctggacagcagccccagcgtgagcagcaccctggccgccaaggacgaccccgacggcaagcaggaggccaagccccagcaggccgccggcatgctgagccccaagaccggcggcaaggaggccgccagcggcaccaccccccagaagagcagaaagcccaagaagggcgccggcaacccccaggccagcaccctggccctgcagagcaacatcacccagtgcctgctgggccagccctggcccctgaacgaggcccaggtgcaggccagcgtggtgaaggtgctgaccgagctgctggagcaggagagaaagaaggtggtggacaccaccaaggagagcagcagaaagggctgggagagcagaaagagaaagctgagcggcgaccagcccgccgccagaacccccagaagcaagaagaagaagaagctgggcgccggcgagggcggcgaggccagcgtgagccccgagaagaccagcaccaccagcaagggcaaggccaagagagacaaggccagcggcgacgtgaaggagaagaagggcaagggcagcctgggcagccagggcgccaaggacgagcccgaggaggagctgcagaagggcatgggcaccgtggagggcggcgaccagagcaaccccaagagcaagaaggagaagaagaagagcgacaagagaaagaaggacaaggagaagaaggagaagaagaagaaggccaagaaggccagcaccaaggacagcgagagccccagccagaagaagaagaagaagaagaagaagaccgccgagcagaccgtgtag

SEQ ID NO: 103320 - DNA, 4578 bp, synthetic construct
  misc_feature 1..4578: note = Description of Artificial Sequence: Synthetic coding sequence
  source 1..4578: mol_type = other DNA
atggccgaggccagaaagagaagagagctgctgcccctgatctaccaccacctgctgagagccggctacgtgagagccgccagagaggtgaaggagcagagcggccagaagtgcttcctggcccagcccgtgaccctgctggacatctacacccactggcagcagaccagcgagctgggcagaaagagaaaggccgaggaggacgccgccctgcaggccaagaagaccagagtgagcgaccccatcagcaccagcgagagcagcgaggaggaggaggaggccgaggccgagaccgccaaggccacccccagactggccagcaccaacagcagcgtgctgggcgccgacctgcccagcagcatgaaggagaaggccaaggccgagaccgagaaggccggcaagaccggcaacagcatgccccaccccgccaccggcaagaccgtggccaacctgctgagcggcaagagccccagaaagagcgccgagcccagcgccaacaccaccctggtgagcgagaccgaggaggagggcagcgtgcccgccttcggcgccgccgccaagcccggcatggtgagcgccggccaggccgacagcagcagcgaggacaccagcagcagcagcgacgagaccgacgtggagggcaagcccagcgtgaagcccgcccaggtgaaggccagcagcgtgagcaccaaggagagccccgccagaaaggccgcccccgcccccggcaaggtgggcgacgtgaccccccaggtgaagggcggcgccctgccccccgccaagagagccaagaagcccgaggaggagagcgagagcagcgaggagggcagcgagagcgaggaggaggcccccgccggcaccagaagccaggtgaaggccagcgagaagatcctgcaggtgagagccgccagcgcccccgccaagggcacccccggcaagggcgccacccccgccccccccggcaaggccggcgccgtggccagccagaccaaggccggcaagcccgaggaggacagcgagagcagcagcgaggagagcagcgacagcgaggaggagacccccgccgccaaggccctgctgcaggccaaggccagcggcaagaccagccaggtgggcgccgccagcgcccccgccaaggagagccccagaaagggcgccgcccccgccccccccggcaagaccggccccgccgtggccaaggcccaggccggcaagagagaggaggacagccagagcagcagcgaggagagcgacagcgaggaggaggcccccgcccaggccaagcccagcggcaaggccccccaggtgagagccgccagcgcccccgccaaggagagccccagaaagggcgccgcccccgccccccccagaaagaccggccccgccgccgcccaggtgcaggtgggcaagcaggaggaggacagcagaagcagcagcgaggagagcgacagcgacagagaggccctggccgccatgaacgccgcccaggtgaagcccctgggcaagagcccccaggtgaagcccgccagcaccatgggcatgggccccctgggcaagggcgccggccccgtgccccccggcaaggtgggccccgccacccccagcgcccaggtgggcaagtgggaggaggacagcgagagcagcagcgaggagagcagcgacagcagcgacggcgaggtgcccaccgccgtggcccccgcccaggagaagagcctgggcaacatcctgcaggccaagcccaccagcagccccgccaagggccccccccagaaggccggccccgtggccgtgcaggtgaaggccgagaagcccatggacaacagcgagagcagcgaggagagcagcgacagcgccgacagcgaggaggcccccgccgccatgaccgccgcccaggccaagcccgccctgaagatcccccagaccaaggcctgccccaagaagaccaacaccaccgccagcgccaaggtggcccccgtgagagtgggcacccaggcccccagaaaggccggcaccgccaccagccccgccggcagcagccccgccgtggccggcggcacccagagacccgccgaggacagcagcagcagcgaggagagcgacagcgaggaggagaagaccggcctggccgtgaccgtgggccaggccaagagcgtgggcaagggcctgcaggtgaaggccgccagcgtgcccgtgaagggcagcctgggccagggcaccgcccccgtgctgcccggcaagaccggccccaccgtgacccaggtgaaggccgagaagcaggaggacagcgagagcagcgaggaggagagcgacagcgaggaggccgccgccagccccgcccaggtgaagaccagcgtgaagaagacccaggccaaggccaaccccgccgccgccagagcccccagcgccaagggcaccatcagcgcccccggcaaggtggtgaccgccgccgcccaggccaagcagagaagccccagcaaggtgaagccccccgtgagaaacccccagaacagcaccgtgctggccagaggccccgccagcgtgcccagcgtgggcaaggccgtggccaccgccgcccaggcccagaccggccccgaggaggacagcggcagcagcgaggaggagagcgacagcgaggaggaggccgagaccctggcccaggtgaagcccagcggcaagacccaccagatcagagccgccctggcccccgccaaggagagccccagaaagggcgccgcccccaccccccccggcaagaccggccccagcgccgcccaggccggcaagcaggacgacagcggcagcagcagcgaggagagcgacagcgacggcgaggcccccgccgccgtgaccagcgcccagaaggacagcaacagcaagcccgccagaagcaagaccctggcccccgccccccccgagagaaacaccgagggcagcagcgagagcagcgaggaggagctgcccctgacccaggtgatcaagccccccctgatcttcgtggaccccaacagaagccccgccggccccgccgccacccccgcccaggcccaggccgccagcacccccagaaaggccagagccagcgagagcaccgccagaagcagcagcagcgagagcgaggacgaggacgtgatccccgccacccagtgcctgacccccggcatcagaaccaacgtggtgaccatgcccaccgcccaccccagaatcgcccccaaggccagcatggccggcgccagcagcagcaaggagagcagcagaatcagcgacggcaagaagcaggagggccccgccacccaggtgagcaagaagaaccccgccagcctgcccctgacccaggccgccctgaaggtgctggcccagaaggccagcgaggcccagccccccgtggccagaacccagcccagcagcggcgtggacagcgccgtgggcaccctgcccgccaccagcccccagagcaccagcgtgcaggccaagggcaccaacaagctgagaaagcccaagctgcccgaggtgcagcaggccaccaaggcccccgagagcagcgacgacagcgaggacagcagcgacagcagcagcggcagcgaggaggacggcgagggcccccagggcgccaagagcgcccacaccctgggccccacccccagcagaaccgagaccctggtggaggagaccgccgccgagagcagcgaggacgacgtggtggcccccagccagagcctgctgagcggctacatgacccccggcctgacccccgccaacagccaggccagcaaggccacccccaagctggacagcagccccagcgtgagcagcaccctggccgccaaggacgaccccgacggcaagcaggaggccaagccccagcaggccgccggcatgctgagccccaagaccggcggcaaggaggccgccagcggcaccaccccccagaagagcagaaagcccaagaagggcgccggcaacccccaggccagcaccctggccctgcagagcaacatcacccagtgcctgctgggccagccctggcccctgaacgaggcccaggtgcaggccagcgtggtgaaggtgctgaccgagctgctggagcaggagagaaagaaggtggtggacaccaccaaggagagcagcagaaagggctgggagagcagaaagagaaagctgagcggcgaccagcccgccgccagaacccccagaagcaagaagaagaagaagctgggcgccggcgagggcggcgaggccagcgtgagccccgagaagaccagcaccaccagcaagggcaaggccaagagagacaaggccagcggcgacgtgaaggagaagaagggcaagggcagcctgggcagccagggcgccaaggacgagcccgaggaggagctgcagaagggcatgggcaccgtggagggcggcgaccagagcaaccccaagagcaagaaggagaagaagaagagcgacaagagaaagaaggacaaggagaagaaggagaagaagaagaaggccaagaaggccagcaccaaggacagcgagagccccagccagaagaagaagaagaagaagaagaagaccgccgagcagaccgtgtag

SEQ ID NO: 103321 - DNA, 4467 bp, synthetic construct
  misc_feature 1..4467: note = Description of Artificial Sequence: Synthetic coding sequence
  source 1..4467: mol_type = other DNA
atggccgaggccagaaagagaagagagctgctgcccctgatctaccaccacctgctgagagccggctacgtgagagccgccagagaggtgaaggagcagagcggccagaagtgcttcctggcccagcccgtgaccctgctggacatctacacccactggcagcagaccagcgagctgggcagaaagagaaaggccgaggaggacgccgccctgcaggccaagaagaccagagtgagcgaccccatcagcaccagcgagagcagcgaggaggaggaggaggccgaggccgagaccgccaaggccacccccagactggccagcaccaacagcagcgtgctgggcgccgacctgcccagcagcatgaaggagaaggccaaggccgagaccgagaaggccggcaagaccggcaacagcatgccccaccccgccaccggcaagaccgtggccaacctgctgagcggcaagagccccagaaagagcgccgagcccagcgccaacaccaccctggtgagcgagaccgaggaggagggcagcgtgcccgccttcggcgccgccgccaagcccggcatggtgagcgccggccaggccgacagcagcagcgaggacaccagcagcagcagcgacgagaccgacgtggagggcaagcccagcgtgaagcccgcccaggtgaaggccagcagcgtgagcaccaaggagagccccgccagaaaggccgcccccgcccccggcaaggtgggcgacgtgaccccccaggtgaagggcggcgccctgccccccgccaagagagccaagaagcccgaggaggagagcgagagcagcgaggagggcagcgagagcgaggaggaggcccccgccggcaccagaagccaggtgaaggccagcgagaagatcctgcaggtgagagccgccagcgcccccgccaagggcacccccggcaagggcgccacccccgccccccccggcaaggccggcgccgtggccagccagaccaaggccggcaagcccgaggaggacagcgagagcagcagcgaggagagcagcgacagcgaggaggagacccccgccgccaaggccctgctgcaggccaaggccagcggcaagaccagccaggtgggcgccgccagcgcccccgccaaggagagccccagaaagggcgccgcccccgccccccccggcaagaccggccccgccgtggccaaggcccaggccggcaagagagaggaggacagccagagcagcagcgaggagagcgacagcgaggaggaggcccccgcccaggccaagcccagcggcaaggccccccaggtgagagccgccagcgcccccgccaaggagagccccagaaagggcgccgcccccgccccccccagaaagaccggccccgccgccgcccaggtgcaggtgggcaagcaggaggaggacagcagaagcagcagcgaggagagcgacagcgacagagaggccctggccgccatgaacgccgcccaggtgaagcccctgggcaagagcccccaggtgaagcccgccagcaccatgggcatgggccccctgggcaagggcgccggccccgtgccccccggcaaggtgggccccgccacccccagcgcccaggtgggcaagtgggaggaggacagcgagagcagcagcgaggagagcagcgacagcagcgacggcgaggtgcccaccgccgtggcccccgcccaggagaagagcctgggcaacatcctgcaggccaagcccaccagcagccccgccaagggccccccccagaaggccggccccgtggccgtgcaggtgaaggccgagaagcccatggacaacagcgagagcagcgaggagagcagcgacagcgccgacagcgaggaggcccccgccgccatgaccgccgcccaggccaagcccgccctgaagatcccccagaccaaggcctgccccaagaagaccaacaccaccgccagcgccaaggtggcccccgtgagagtgggcacccaggcccccagaaaggccggcaccgccaccagccccgccggcagcagccccgccgtggccggcggcacccagagacccgccgaggacagcagcagcagcgaggagagcgacagcgaggaggagaagaccggcctggccgtgaccgtgggccaggccaagagcgtgggcaagggcctgcaggtgaaggccgccagcgtgcccgtgaagggcagcctgggccagggcaccgcccccgtgctgcccggcaagaccggccccaccgtgacccaggtgaaggccgagaagcaggaggacagcgagagcagcgaggaggagagcgacagcgaggaggccgccgccagccccgcccaggtgaagaccagcgtgaagaagacccaggccaaggccaaccccgccgccgccagagcccccagcgccaagggcaccatcagcgcccccggcaaggtggtgaccgccgccgcccaggccaagcagagaagccccagcaaggtgaagccccccgtgagaaacccccagaacagcaccgtgctggccagaggccccgccagcgtgcccagcgtgggcaaggccgtggccaccgccgcccaggcccagaccggccccgaggaggacagcggcagcagcgaggaggagagcgacagcgaggaggaggccgagaccctggcccaggtgaagcccagcggcaagacccaccagatcagagccgccctggcccccgccaaggagagccccagaaagggcgccgcccccaccccccccggcaagaccggccccagcgccgcccaggccggcaagcaggacgacagcggcagcagcagcgaggagagcgacagcgacggcgaggcccccgccgccgtgaccagcgcccaggtgatcaagccccccctgatcttcgtggaccccaacagaagccccgccggccccgccgccacccccgcccaggcccaggccgccagcacccccagaaaggccagagccagcgagagcaccgccagaagcagcagcagcgagagcgaggacgaggacgtgatccccgccacccagtgcctgacccccggcatcagaaccaacgtggtgaccatgcccaccgcccaccccagaatcgcccccaaggccagcatggccggcgccagcagcagcaaggagagcagcagaatcagcgacggcaagaagcaggagggccccgccacccaggtgagcaagaagaaccccgccagcctgcccctgacccaggccgccctgaaggtgctggcccagaaggccagcgaggcccagccccccgtggccagaacccagcccagcagcggcgtggacagcgccgtgggcaccctgcccgccaccagcccccagagcaccagcgtgcaggccaagggcaccaacaagctgagaaagcccaagctgcccgaggtgcagcaggccaccaaggcccccgagagcagcgacgacagcgaggacagcagcgacagcagcagcggcagcgaggaggacggcgagggcccccagggcgccaagagcgcccacaccctgggccccacccccagcagaaccgagaccctggtggaggagaccgccgccgagagcagcgaggacgacgtggtggcccccagccagagcctgctgagcggctacatgacccccggcctgacccccgccaacagccaggccagcaaggccacccccaagctggacagcagccccagcgtgagcagcaccctggccgccaaggacgaccccgacggcaagcaggaggccaagccccagcaggccgccggcatgctgagccccaagaccggcggcaaggaggccgccagcggcaccaccccccagaagagcagaaagcccaagaagggcgccggcaacccccaggccagcaccctggccctgcagagcaacatcacccagtgcctgctgggccagccctggcccctgaacgaggcccaggtgcaggccagcgtggtgaaggtgctgaccgagctgctggagcaggagagaaagaaggtggtggacaccaccaaggagagcagcagaaagggctgggagagcagaaagagaaagctgagcggcgaccagcccgccgccagaacccccagaagcaagaagaagaagaagctgggcgccggcgagggcggcgaggccagcgtgagccccgagaagaccagcaccaccagcaagggcaaggccaagagagacaaggccagcggcgacgtgaaggagaagaagggcaagggcagcctgggcagccagggcgccaaggacgagcccgaggaggagctgcagaagggcatgggcaccgtggagggcggcgaccagagcaaccccaagagcaagaaggagaagaagaagagcgacaagagaaagaaggacaaggagaagaaggagaagaagaagaaggccaagaaggccagcaccaaggacagcgagagccccagccagaagaagaagaagaagaagaagaagaccgccgagcagaccgtgtag

SEQ ID NO: 103322 - DNA, 255 bp, synthetic construct
  misc_feature 1..255: note = Description of Artificial Sequence: Synthetic coding sequence
  source 1..255: mol_type = other DNA
atggccaccatggagaacaaggtgatctgcgccctggtgctggtgagcatgctggccctgggcaccctggccgaggcccagaccgagacctgcaccgtggcccccagagagagacagaactgcggcttccccggcgtgacccccagccagtgcgccaacaagggctgctgcttcgacgacaccgtgagaggcgtgccctggtgcttctaccccaacaccatcgacgtgccccccgaggaggagtgcgagttctag

SEQ ID NO: 103323 - DNA, 390 bp, synthetic construct
  misc_feature 1..390: note = Description of Artificial Sequence: Synthetic coding sequence
  source 1..390: mol_type = other DNA
atgggcagaagagacgcccagctgctggccgccctgctggtgctgggcctgtgcgccctggccggcagcgagaagcccagcccctgccagtgcagcagactgagcccccacaacagaaccaactgcggcttccccggcatcaccagcgaccagtgcttcgacaacggctgctgcttcgacagcagcgtgaccggcgtgccctggtgcttccaccccctgcccaagcaggagagcgaccagtgcgtgatggaggtgagcgacagaagaaactgcggctaccccggcatcagccccgaggagtgcgccagcagaaagtgctgcttcagcaacttcatcttcgaggtgccctggtgcttcttccccaagagcgtggaggactgccactactag

SEQ ID NO: 103324 - DNA, 1749 bp, synthetic construct
  misc_feature 1..1749: note = Description of Artificial Sequence: Synthetic coding sequence
  source 1..1749: mol_type = other DNA
atgcccggcagaacctgggagctgtgcctgctgctgctgctgggcctgggcctgggcagccaggaggccctgccccccccctgcgagagcgagatctactgccacggcgagctgctgaaccaggtgcagatggccaagctgtaccaggacgacaagcagttcgtggacatgcccctgagcatcgcccccgagcaggtgctgcagaccttcaccgagctgagcagagaccacaaccacagcatccccagagagcagctgcaggccttcgtgcacgagcacttccaggccaagggccaggagctgcagccctggacccccgccgactggaaggacagcccccagttcctgcagaagatcagcgacgccaagctgagagcctgggccggccagctgcaccagctgtggaagaagctgggcaagaagatgaagcccgaggtgctgagccaccccgagagattcagcctgatctacagcgagcaccccttcatcgtgcccggcggcagattcgtggagttctactactgggacagctactgggtgatggagggcctgctgctgagcgagatggccgagaccgtgaagggcatgctgcagaacttcctggacctggtgaagacctacggccacgtgcccaacggcggcagagtgtactacctgcagagaagccagccccccctgctgaccctgatgatggactgctacctgacccacaccaacgacaccgccttcctgcaggagaacatcgagaccctggccctggagctggacttctggaccaagaacagaaccgtgagcgtgagcctggagggcaagaactacctgctgaacagatactacgtgccctacggcggccccagacccgagagctacagcaaggacgtggagctggccgacaccctgcccgagggcgacagagaggccctgtgggccgagctgaaggccggcgccgagagcggctgggacttcagcagcagatggctgatcggcggccccaaccccaacagcctgagcggcatcagaaccagcaagctggtgcccgtggacctgaacgccttcctgtgccaggccgaggagctgatgagcaacttctacagcagactgggcaacgacagccaggccaccaagtacagaatcctgagaagccagagactggccgccctgaacaccgtgctgtgggacgagcagaccggcgcctggttcgactacgacctggagaagaagaagaagaacagagagttctaccccagcaacctgacccccctgtgggccggctgcttcagcgaccccggcgtggccgacaaggccctgaagtacctggaggacaacagaatcctgacctaccagtacggcatccccaccagcctgcagaagaccggccagcagtgggacttccccaacgcctgggcccccctgcaggacctggtgatcagaggcctggccaaggcccccctgagaagagcccaggaggtggccttccagctggcccagaactggatcagaaccaacttcgacgtgtacagccagaagagcgccatgtacgagaagtacgacgtgagcaacggcggccagcccggcggcggcggcgagtacgaggtgcaggagggcttcggctggaccaacggcgtggtgctgatgctgctggacagatacggcgacagactgaccagcggccccaagctgcccttcctggagccccactgcctggccaccctgctgcccagcctgctgctgagcctgctgccctggtag

SEQ ID NO: 103325 - DNA, 1656 bp, synthetic construct
  misc_feature 1..1656: note = Description of Artificial Sequence: Synthetic coding sequence
  source 1..1656: mol_type = other DNA
atgcccggcagaacctgggagctgtgcctgctgctgctgctgggcctgggcctgggcagccaggaggccctgccccccccctgcgagagcgagatctactgccacggcgagctgctgaaccaggtgcagatggccaagctgtaccaggacgacaagcagttcgtggacatgcccctgagcatcgcccccgagcaggtgctgcagaccttcaccgagctgagcagagaccacaaccacagcatccccagagagcagctgcaggccttcgtgcacgagcacttccaggccaagggccaggagctgcagccctggacccccgccgactggaaggacagcccccagttcctgcagaagatcagcgacgccaagctgagagcctgggccggccagctgcaccagctgtggaagaagctgggcaagaagatgaagcccgaggtgctgagccaccccgagagattcagcctgatctacagcgagcaccccttcatcgtgcccggcggcagattcgtggagttctactactgctacggccacgtgcccaacggcggcagagtgtactacctgcagagaagccagccccccctgctgaccctgatgatggactgctacctgacccacaccaacgacaccgccttcctgcaggagaacatcgagaccctggccctggagctggacttctggaccaagaacagaaccgtgagcgtgagcctggagggcaagaactacctgctgaacagatactacgtgccctacggcggccccagacccgagagctacagcaaggacgtggagctggccgacaccctgcccgagggcgacagagaggccctgtgggccgagctgaaggccggcgccgagagcggctgggacttcagcagcagatggctgatcggcggccccaaccccaacagcctgagcggcatcagaaccagcaagctggtgcccgtggacctgaacgccttcctgtgccaggccgaggagctgatgagcaacttctacagcagactgggcaacgacagccaggccaccaagtacagaatcctgagaagccagagactggccgccctgaacaccgtgctgtgggacgagcagaccggcgcctggttcgactacgacctggagaagaagaagaagaacagagagttctaccccagcaacctgacccccctgtgggccggctgcttcagcgaccccggcgtggccgacaaggccctgaagtacctggaggacaacagaatcctgacctaccagtacggcatccccaccagcctgcagaagaccggccagcagtgggacttccccaacgcctgggcccccctgcaggacctggtgatcagaggcctggccaaggcccccctgagaagagcccaggaggtggccttccagctggcccagaactggatcagaaccaacttcgacgtgtacagccagaagagcgccatgtacgagaagtacgacgtgagcaacggcggccagcccggcggcggcggcgagtacgaggtgcaggagggcttcggctggaccaacggcgtggtgctgatgctgctggacagatacggcgacagactgaccagcggccccaagctgcccttcctggagccccactgcctggccaccctgctgcccagcctgctgctgagcctgctgccctggtag

SEQ ID NO: 103326 - DNA, 1380 bp, synthetic construct
  misc_feature 1..1380: note = Description of Artificial Sequence: Synthetic coding sequence
  source 1..1380: mol_type = other DNA
atgcccaactgcgtgcccggccagggcagctgcatcagcagcggcagaagctggggcagaagataccagagacccggccccgcccagggcctgaccaagggcaccgaggagagaaacgtgcccggcgcccacagcgtgttcggcgcccagatcagagacagctactgggtgatggagggcctgctgctgagcgagatggccgagaccgtgaagggcatgctgcagaacttcctggacctggtgaagacctacggccacgtgcccaacggcggcagagtgtactacctgcagagaagccagccccccctgctgaccctgatgatggactgctacctgacccacaccaacgacaccgccttcctgcaggagaacatcgagaccctggccctggagctggacttctggaccaagaacagaaccgtgagcgtgagcctggagggcaagaactacctgctgaacagatactacgtgccctacggcggccccagacccgagagctacagcaaggacgtggagctggccgacaccctgcccgagggcgacagagaggccctgtgggccgagctgaaggccggcgccgagagcggctgggacttcagcagcagatggctgatcggcggccccaaccccaacagcctgagcggcatcagaaccagcaagctggtgcccgtggacctgaacgccttcctgtgccaggccgaggagctgatgagcaacttctacagcagactgggcaacgacagccaggccaccaagtacagaatcctgagaagccagagactggccgccctgaacaccgtgctgtgggacgagcagaccggcgcctggttcgactacgacctggagaagaagaagaagaacagagagttctaccccagcaacctgacccccctgtgggccggctgcttcagcgaccccggcgtggccgacaaggccctgaagtacctggaggacaacagaatcctgacctaccagtacggcatccccaccagcctgcagaagaccggccagcagtgggacttccccaacgcctgggcccccctgcaggacctggtgatcagaggcctggccaaggcccccctgagaagagcccaggaggtggccttccagctggcccagaactggatcagaaccaacttcgacgtgtacagccagaagagcgccatgtacgagaagtacgacgtgagcaacggcggccagcccggcggcggcggcgagtacgaggtgcaggagggcttcggctggaccaacggcgtggtgctgatgctgctggacagatacggcgacagactgaccagcggccccaagctgcccttcctggagccccactgcctggccaccctgctgcccagcctgctgctgagcctgctgccctggtag

SEQ ID NO: 103327 - DNA, 1641 bp, synthetic construct
  misc_feature 1..1641: note = Description of Artificial Sequence: Synthetic coding sequence
  source 1..1641: mol_type = other DNA
atgcccggcagaacctgggagctgtgcctgctgctgctgctgggcctgggcctgggcagccaggaggccctgccccccccctgcgagagcgagatctactgccacggcgagctgctgaaccaggtgcagatggccaagctgtaccaggacgacaagcagttcgtggacatgcccctgagcatcgcccccgagcaggtgctgcagaccttcaccgagctgagcagagaccacaaccacagcatccccagagagcagctgcaggccttcgtgcacgagcacttccaggccaagggccaggagctgcagccctggacccccgccgactggaaggacagcccccagttcctgcagaagatcagcgacgccaagctgagagcctgggccggccagctgcaccagctgtggaagaagctgggcaagaagatgaagcccgaggtgctgagccaccccgagagattcagcctgatctacagcgagcaccccttcatcgtgcccggcggcagattcgtggagttctactactgctacggccacgtgcccaacggcggcagagtgtactacctgcagagaagccagccccccctgctgaccctgatgatggactgctacctgacccacaccaacgacaccgccttcctgcaggagaacatcgagaccctggccctggagctggacttctggaccaagaacagaaccgtgagcgtgagcctggagggcaagaactacctgctgaacagatactacgtgccctacggcggccccagacccgagagctacagcaaggacgtggagctggccgacaccctgcccgagggcgacagagaggccctgtgggccgagctgaaggccggcgccgagagcggctgggacttcagcagcagatggctgatcggcggccccaaccccaacagcctgagcggcatcagaaccagcaagctggtgcccgtggacctgaacgccttcctgtgccaggccgaggagctgatgagcaacttctacagcagactgggcaacgacagccaggccaccaagtacagaatcctgagaagccagagactggccgccctgaacaccgtgctgtgggacgagcagaccggcgcctggttcgactacgacctggagaagaagaagaagaacagagagttctaccccagcaacctgacccccctgtgggccggctgcttcagcgaccccggcgtggccgacaaggccctgaagtacctggaggacaacagaatcctgacctaccagtacggcatccccaccagcctgcagaagaccggccagcagtgggacttccccaacgcctgggcccccctgcaggacctggtgatcagaggcctggccaaggcccccctgagaagagcccaggaggtggccttccagctggcccagaactggatcagaaccaacttcgacgtgtacagccagaagagcgccatgtacgagaagtacgacgtgagcaacggcggccagcccggcggcggcggcgagtacgaggtgcaggagggcttcggctggaccaacggcgtggtgctgatgctgctggacagatacggcgacagactgaccagcggccccaagctgcccttcctggagccccactgcctgggcccccccttctgccccgccagctgctag

SEQ ID NO: 103328 - DNA, 1734 bp, synthetic construct
  misc_feature 1..1734: note = Description of Artificial Sequence: Synthetic coding sequence
  source 1..1734: mol_type = other DNA
atgcccggcagaacctgggagctgtgcctgctgctgctgctgggcctgggcctgggcagccaggaggccctgccccccccctgcgagagcgagatctactgccacggcgagctgctgaaccaggtgcagatggccaagctgtaccaggacgacaagcagttcgtggacatgcccctgagcatcgcccccgagcaggtgctgcagaccttcaccgagctgagcagagaccacaaccacagcatccccagagagcagctgcaggccttcgtgcacgagcacttccaggccaagggccaggagctgcagccctggacccccgccgactggaaggacagcccccagttcctgcagaagatcagcgacgccaagctgagagcctgggccggccagctgcaccagctgtggaagaagctgggcaagaagatgaagcccgaggtgctgagccaccccgagagattcagcctgatctacagcgagcaccccttcatcgtgcccggcggcagattcgtggagttctactactgggacagctactgggtgatggagggcctgctgctgagcgagatggccgagaccgtgaagggcatgctgcagaacttcctggacctggtgaagacctacggccacgtgcccaacggcggcagagtgtactacctgcagagaagccagccccccctgctgaccctgatgatggactgctacctgacccacaccaacgacaccgccttcctgcaggagaacatcgagaccctggccctggagctggacttctggaccaagaacagaaccgtgagcgtgagcctggagggcaagaactacctgctgaacagatactacgtgccctacggcggccccagacccgagagctacagcaaggacgtggagctggccgacaccctgcccgagggcgacagagaggccctgtgggccgagctgaaggccggcgccgagagcggctgggacttcagcagcagatggctgatcggcggccccaaccccaacagcctgagcggcatcagaaccagcaagctggtgcccgtggacctgaacgccttcctgtgccaggccgaggagctgatgagcaacttctacagcagactgggcaacgacagccaggccaccaagtacagaatcctgagaagccagagactggccgccctgaacaccgtgctgtgggacgagcagaccggcgcctggttcgactacgacctggagaagaagaagaagaacagagagttctaccccagcaacctgacccccctgtgggccggctgcttcagcgaccccggcgtggccgacaaggccctgaagtacctggaggacaacagaatcctgacctaccagtacggcatccccaccagcctgcagaagaccggccagcagtgggacttccccaacgcctgggcccccctgcaggacctggtgatcagaggcctggccaaggcccccctgagaagagcccaggaggtggccttccagctggcccagaactggatcagaaccaacttcgacgtgtacagccagaagagcgccatgtacgagaagtacgacgtgagcaacggcggccagcccggcggcggcggcgagtacgaggtgcaggagggcttcggctggaccaacggcgtggtgctgatgctgctggacagatacggcgacagactgaccagcggccccaagctgcccttcctggagccccactgcctgggcccccccttctgccccgccagctgctag

SEQ ID NO: 103329 - DNA, 273 bp, synthetic construct
  misc_feature 1..273: note = Description of Artificial Sequence: Synthetic coding sequence
  source 1..273: mol_type = other DNA
atggaggagaccaccgactggatctacggcttcttcagcctgctgagcgacatcatcagcagcgaggacgaggaggacgacgacggcgacgaggacaccgacaagggcgagatcgacgagccccccctgagaaagaaggagatccacaaggacaagaccgagaagcaggagaagcccgagagaaagatccagaccaaggactggagcgccaacagcagcaccatcagaaccctgaagctgacccagctgaagcccatctacatctgcacctag

SEQ ID NO: 103330 - DNA, 654 bp, synthetic construct
  misc_feature 1..654: note = Description of Artificial Sequence: Synthetic coding sequence
  source 1..654: mol_type = other DNA
atggaggagaccaccgactggatctacggcttcttcagcctgctgagcgacatcatcagcagcgaggacgaggaggacgacgacggcgacgaggacaccgacaagggcgagatcgacgagccccccctgagaaagaaggagatccacaaggacaagaccgagaagcaggagaagcccgagagaaagatccagaccaaggtgacccacaaggagaaggagaagggcaaggagaaggtgagagagaaggagaagcccgagaagaaggccacccacaaggagaagatcgagaagaaggagaagcccgagaccaagaccctggccaaggagcagaagaaggccaagaccgccgagaagagcgaggagaagaccaagaaggaggtgaagggcggcaagcaggagaaggtgaagcagaccgccgccaaggtgaaggaggtgcagaagacccccagcaagcccaaggagaaggaggacaaggagaaggccgccgtgagcaagcacgagcagaagggcttccccggccccggcatcagaaacagcagctactactgccagtacatcaagggccagatcaacgcctggaacgacctgagaaccagcctgctgcccatcccctacctgagctgcggcaagatgtgcagcaacttcaacaactag

SEQ ID NO: 103331 - DNA, 2166 bp, synthetic construct
  misc_feature 1..2166: note = Description of Artificial Sequence: Synthetic coding sequence
  source 1..2166: mol_type = other DNA
atgaccgagatcaccgccgagggcaacgccagcaccaccaccaccgtgatcgacagcaagaacggcagcgtgcccaagagccccggcaaggtgctgaagagaaccgtgaccgaggacatcgtgaccaccttcagcagccccgccgcctggctgctggtgatcgccctgatcatcacctggagcgccgtggccatcgtgatgttcgacctggtggactacaagaacttcagcgccagcagcatcgccaagatcggcagcgaccccctgaagctggtgagagacgccatggaggagaccaccgactggatctacggcttcttcagcctgctgagcgacatcatcagcagcgaggacgaggaggacgacgacggcgacgaggacaccgacaagggcgagatcgacgagccccccctgagaaagaaggagatccacaaggacaagaccgagaagcaggagaagcccgagagaaagatccagaccaaggtgacccacaaggagaaggagaagggcaaggagaaggtgagagagaaggagaagcccgagaagaaggccacccacaaggagaagatcgagaagaaggagaagcccgagaccaagaccctggccaaggagcagaagaaggccaagaccgccgagaagagcgaggagaagaccaagaaggaggtgaagggcggcaagcaggagaaggtgaagcagaccgccgccaaggtgaaggaggtgcagaagacccccagcaagcccaaggagaaggaggacaaggagaaggccgccgtgagcaagcacgagcagaaggaccagtacgccttctgcagatacatgatcgacatcttcgtgcacggcgacctgaagcccggccagagccccgccatccccccccccctgcccaccgagcaggccagcagacccacccccgccagccccgccctggaggagaaggagggcgagaagaagaaggccgagaagaaggtgaccagcgagaccaagaagaaggagaaggaggacatcaagaagaagagcgagaaggagaccgccatcgacgtggagaagaaggagcccggcaaggccagcgagaccaagcagggcaccgtgaagatcgccgcccaggccgccgccaagaaggacgagaagaaggaggacagcaagaagaccaagaagcccgccgaggtggagcagcccaagggcaagaagcaggagaagaaggagaagcacgtggagcccgccaagagccccaagaaggagcacagcgtgcccagcgacaagcaggtgaaggccaagaccgagagagccaaggaggagatcggcgccgtgagcatcaagaaggccgtgcccggcaagaaggaggagaagaccaccaagaccgtggagcaggagatcagaaaggagaagagcggcaagaccagcagcatcctgaaggacaaggagcccatcaagggcaaggaggagaaggtgcccgccagcctgaaggagaaggagcccgagaccaagaaggacgagaagatgagcaaggccggcaaggaggtgaagcccaagcccccccagctgcagggcaagaaggaggagaagcccgagccccagatcaagaaggaggccaagcccgccatcagcgagaaggtgcagatccacaagcaggacatcgtgaagcccgagaagaccgtgagccacggcaagcccgaggagaaggtgctgaagcaggtgaaggccgtgaccatcgagaagaccgccaagcccaagcccaccaagaaggccgagcacagagagagagagccccccagcatcaagaccgacaagcccaagcccacccccaagggcaccagcgaggtgaccgagagcggcaagaagaagaccgagatcagcgagaaggagagcaaggagaaggccgacatgaagcacctgagagaggagaaggtgagcaccagaaaggagagcctgcagctgcacaacgtgaccaaggaggacgtggaggacgtgcccgccagcaagaaggccaaggagggcaccgaggacgtgagccccaccaagcagaagagccccatcagcttcttccagtgcgtgtacctggacggctacaacggctacggcttccagttccccttcacccccgccgacagacccggcgagagcagcggccaggccaacagccccggccagaagcagcagggccagtag

SEQ ID NO: 103332 - DNA, 81 bp, synthetic construct
  misc_feature 1..81: note = Description of Artificial Sequence: Synthetic coding sequence
  source 1..81: mol_type = other DNA
tgaatccacaaggacaagaccgagaagcaggagaagcccgagagaaagatccagaccaaggaggtgggccacagcagctag

SEQ ID NO: 103333 - DNA, 456 bp, synthetic construct
  misc_feature 1..456: note = Description of Artificial Sequence: Synthetic coding sequence
  source 1..456: mol_type = other DNA
tgaacccacaaggagaaggagaagggcaaggagaaggtgagagagaaggagaagcccgagaagaaggccacccacaaggagaagatcgagaagaaggagaagcccgagaccaagaccctggccaaggagcagaagaaggccaagaccgccgagaagagcgaggagaagaccaagaaggaggtgaagggcggcaagcaggagaaggtgaagcagaccgccgccaaggtgaaggaggtgcagaagacccccagcaagcccaaggagaaggaggacaaggagaaggccgccgtgagcaagcacgagcagaagggcttccccggccccggcatcagaaacagcagctactactgccagtacatcaagggccagatcaacgcctggaacgacctgagaaccagcctgctgcccatcccctacctgagctgcggcaagatgtgcagcaacttcaacaactag

SEQ ID NO: 103334 - DNA, 2196 bp, synthetic construct
  misc_feature 1..2196: note = Description of Artificial Sequence: Synthetic coding sequence
  source 1..2196: mol_type = other DNA
atcgtggagatctacccccagggcaacgccagcaccaccaccaccgtgatcgacagcaagaacggcagcgtgcccaagagccccggcaaggtgctgaagagaaccgtgaccgaggacatcgtgaccaccttcagcagccccgccgcctggctgctggtgatcgccctgatcatcacctggagcgccgtggccatcgtgatgttcgacctggtggactacaagaacttcagcgccagcagcatcgccaagatcggcagcgaccccctgaagctggtgagagacgccatggaggagaccaccgactggatctacggcttcttcagcctgctgagcgacatcatcagcagcgaggacgaggaggacgacgacggcgacgaggacaccgacaagggcgagatcgacgagccccccctgagaaagaaggagatccacaaggacaagaccgagaagcaggagaagcccgagagaaagatccagaccaaggtgacccacaaggagaaggagaagggcaaggagaaggtgagagagaaggagaagcccgagaagaaggccacccacaaggagaagatcgagaagaaggagaagcccgagaccaagaccctggccaaggagcagaagaaggccaagaccgccgagaagagcgaggagaagaccaagaaggaggtgaagggcggcaagcaggagaaggtgaagcagaccgccgccaaggtgaaggaggtgcagaagacccccagcaagcccaaggagaaggaggacaaggagaaggccgccgtgagcaagcacgagcagaaggaccagtacgccttctgcagatacatgatcgacatcttcgtgcacggcgacctgaagcccggccagagccccgccatccccccccccctgcccaccgagcaggccagcagacccacccccgccagccccgccctggaggagaaggagggcgagaagaagaaggccgagaagaaggtgaccagcgagaccaagaagaaggagaaggaggacatcaagaagaagagcgagaaggagaccgccatcgacgtggagaagaaggtgcaggagcccggcaaggccagcgagaccaagcagggcaccgtgaagatcgccgcccaggccgccgccaagaaggacgagaagaaggaggacagcaagaagaccaagaagcccgccgaggtggagcagcccaagggcaagaagcaggagaagaaggagaagcacgtggagcccgccaagagccccaagaaggagcacagcgtgcccagcgacaagcaggtgaaggccaagaccgagagagccaaggaggagatcggcgccgtgagcatcaagaaggccgtgcccggcaagaaggaggagaagaccaccaagaccgtggagcaggagatcagaaaggagaagagcggcaagaccagcagcatcctgaaggacaaggagcccatcaagggcaaggaggagaaggtgcccgccagcctgaaggagaaggagcccgagaccaagaaggacgagaagatgagcaaggccggcaaggaggtgaagcccaagcccccccagctgcagggcaagaaggaggagaagcccgagccccagatcaagaaggaggccaagcccgccatcagcgagaaggtgcagatccacaagcaggacatcgtgaagcccgagaagaccgtgagccacggcaagcccgaggagaaggtgctgaagcaggtgaaggccgtgaccatcgagaagaccgccaagcccaagcccaccaagaaggccgagcacagagagagagagccccccagcatcaagaccgacaagcccaagcccacccccaagggcaccagcgaggtgaccgagagcggcaagaagaagaccgagatcagcgagaaggagagcaaggagaaggccgacatgaagcacctgagagaggagaaggtgagcaccagaaaggagagcctgcagctgcacaacgtgaccaaggccgaggaggtggacagcaccctggaggacgtggaggacgtgcccgccagcaagaaggccaaggagggcaccgaggacgtgagccccaccaagcagaagagccccatcagcttcttccagtgcgtgtacctggacggctacaacggctacggcttccagttccccttcacccccgccgacagacccggcgagagcagcggccaggccaacagccccggccagaagcagcagggccagtag

SEQ ID NO: 103335 - DNA, 2190 bp, synthetic construct
  misc_feature 1..2190: note = Description of Artificial Sequence: Synthetic coding sequence
  source 1..2190: mol_type = other DNA
atgaccgagatcaccgccgagggcaacgccagcaccaccaccaccgtgatcgacagcaagaacggcagcgtgcccaagagccccggcaaggtgctgaagagaaccgtgaccgaggacatcgtgaccaccttcagcagccccgccgcctggctgctggtgatcgccctgatcatcacctggagcgccgtggccatcgtgatgttcgacctggtggactacaagaacttcagcgccagcagcatcgccaagatcggcagcgaccccctgaagctggtgagagacgccatggaggagaccaccgactggatctacggcttcttcagcctgctgagcgacatcatcagcagcgaggacgaggaggacgacgacggcgacgaggacaccgacaagggcgagatcgacgagccccccctgagaaagaaggagatccacaaggacaagaccgagaagcaggagaagcccgagagaaagatccagaccaaggtgacccacaaggagaaggagaagggcaaggagaaggtgagagagaaggagaagcccgagaagaaggccacccacaaggagaagatcgagaagaaggagaagcccgagaccaagaccctggccaaggagcagaagaaggccaagaccgccgagaagagcgaggagaagaccaagaaggaggtgaagggcggcaagcaggagaaggtgaagcagaccgccgccaaggtgaaggaggtgcagaagacccccagcaagcccaaggagaaggaggacaaggagaaggccgccgtgagcaagcacgagcagaaggaccagtacgccttctgcagatacatgatcgacatcttcgtgcacggcgacctgaagcccggccagagccccgccatccccccccccctgcccaccgagcaggccagcagacccacccccgccagccccgccctggaggagaaggagggcgagaagaagaaggccgagaagaaggtgaccagcgagaccaagaagaaggagaaggaggacatcaagaagaagagcgagaaggagaccgccatcgacgtggagaagaaggagcccggcaaggccagcgagaccaagcagggcaccgtgaagatcgccgcccaggccgccgccaagaaggacgagaagaaggaggacagcaagaagaccaagaagcccgccgaggtggagcagcccaagggcaagaagcaggagaagaaggagaagcacgtggagcccgccaagagccccaagaaggagcacagcgtgcccagcgacaagcaggtgaaggccaagaccgagagagccaaggaggagatcggcgccgtgagcatcaagaaggccgtgcccggcaagaaggaggagaagaccaccaagaccgtggagcaggagatcagaaaggagaagagcggcaagaccagcagcatcctgaaggacaaggagcccatcaagggcaaggaggagaaggtgcccgccagcctgaaggagaaggagcccgagaccaagaaggacgagaagatgagcaaggccggcaaggaggtgaagcccaagcccccccagctgcagggcaagaaggaggagaagcccgagccccagatcaagaaggaggccaagcccgccatcagcgagaaggtgcagatccacaagcaggacatcgtgaagcccgagaagaccgtgagccacggcaagcccgaggagaaggtgctgaagcaggtgaaggccgtgaccatcgagaagaccgccaagcccaagcccaccaagaaggccgagcacagagagagagagccccccagcatcaagaccgacaagcccaagcccacccccaagggcaccagcgaggtgaccgagagcggcaagaagaagaccgagatcagcgagaaggagagcaaggagaaggccgacatgaagcacctgagagaggagaaggtgagcaccagaaaggagagcctgcagctgcacaacgtgaccaaggccgagaagcccgccagagtgagcaaggacgtggaggacgtgcccgccagcaagaaggccaaggagggcaccgaggacgtgagccccaccaagcagaagagccccatcagcttcttccagtgcgtgtacctggacggctacaacggctacggcttccagttccccttcacccccgccgacagacccggcgagagcagcggccaggccaacagccccggccagaagcagcagggccagtag

SEQ ID NO: 103336 - DNA, 135 bp, synthetic construct
  misc_feature 1..135: note = Description of Artificial Sequence: Synthetic coding sequence
  source 1..135: mol_type = other DNA
tgaatccacaaggacaagaccgagaagcaggagaagcccgagagaaagatccagaccaaggactggagcgccaacagcagcaccatcagaaccctgaagctgacccagctgaagcccatctacatctgcacctag

SEQ ID NO: 103337 - DNA, 1038 bp, synthetic construct
  misc_feature 1..1038: note = Description of Artificial Sequence: Synthetic coding sequence
  source 1..1038: mol_type = other DNA
atcgtggagatctacccccagggcaacgccagcaccaccaccaccgtgatcgacagcaagaacggcagcgtgcccaagagccccggcaaggtgctgaagagaaccgtgaccgaggacatcgtgaccaccttcagcagccccgccgcctggctgctggtgatcgccctgatcatcacctggagcgccgtggccatcgtgatgttcgacctggtggactacaagaacttcagcgccagcagcatcgccaagatcggcagcgaccccctgaagctggtgagagacgccatggaggagaccaccgactggatctacggcttcttcagcctgctgagcgacatcatcagcagcgaggacgaggaggacgacgacggcgacgaggacaccgacaagggcgagatcgacgagccccccctgagaaagaaggagatccacaaggacaagaccgagaagcaggagaagcccgagagaaagatccagaccaaggtgacccacaaggagaaggagaagggcaaggagaaggtgagagagaaggagaagcccgagaagaaggccacccacaaggagaagatcgagaagaaggagaagcccgagaccaagaccctggccaaggagcagaagaaggccaagaccgccgagaagagcgaggagaagaccaagaaggaggtgaagggcggcaagcaggagaaggtgaagcagaccgccgccaaggtgaaggaggtgcagaagacccccagcaagcccaaggagaaggaggacaaggagaaggccgccgtgagcaagcacgagcagaaggaccagtacgccttctgcagatacatgatcgacatcttcgtgcacggcgacctgaagcccggccagagccccgccatccccccccccctgcccaccgagcaggccagcagacccacccccgccagccccgccctggaggagaaggagggcgagaagaagaaggccgagaagaaggtgaccagcgagaccaagaagaaggagaaggaggacatcaagaagaagaagaagaagaagaagaagaagtag

SEQ ID NO: 103338 - DNA, 504 bp, synthetic construct
  misc_feature 1..504: note = Description of Artificial Sequence: Synthetic coding sequence
  source 1..504: mol_type = other DNA
atgaccgagatcaccgccgagggcaacgccagcaccaccaccaccgtgatcgacagcaagaacggcagcgtgcccaagagccccggcaaggtgctgaagagaaccgtgaccgaggacatcgtgaccaccttcagcagccccgccgcctggctgctggtgatcgccctgatcatcacctggagcgccgtggccatcgtgatgttcgacctggtggactacaagaacttcagcgccagcagcatcgccaagatcggcagcgaccccctgaagctggtgagagacgccatggaggagaccaccgactggatctacggcttcttcagcctgctgagcgacatcatcagcagcgaggacgaggaggacgacgacggcgacgaggacaccgacaagggcgagatcgacgagccccccctgagaaagaaggagatccacaaggacaagaccgagaagcaggagaagcccgagagaaagatccagaccaaggaggtgggccacagcagctag

SEQ ID NO: 103339 - DNA, 987 bp, synthetic construct
  misc_feature 1..987: note = Description of Artificial Sequence: Synthetic coding sequence
  source 1..987: mol_type = other DNA
atgaccgagatcaccgccgagggcaacgccagcaccaccaccaccgtgatcgacagcaagaacggcagcgtgcccaagagccccggcaaggtgctgaagagaaccgtgaccgaggacatcgtgaccaccttcagcagccccgccgcctggctgctggtgatcgccctgatcatcacctggagcgccgtggccatcgtgatgttcgacctggtggactacaagaacttcagcgccagcagcatcgccaagatcggcagcgaccccctgaagctggtgagagacgccatggaggagaccaccgactggatctacggcttcttcagcctgctgagcgacatcatcagcagcgaggacgaggaggacgacgacggcgacgaggacaccgacaagggcgagatcgacgagccccccctgagaaagaaggagatccacaaggacaagaccgagaagcaggagaagcccgagagaaagatccagaccaaggtgacccacaaggagaaggagaagggcaaggagaaggtgagagagaaggagaagcccgagaagaaggccacccacaaggagaagatcgagaagaaggagaagcccgagaccaagaccctggccaaggagcagaagaaggccaagaccgccgagaagagcgaggagaagaccaagaaggaggtgaagggcggcaagcaggagaaggtgaagcagaccgccgccaaggtgaaggaggtgcagaagacccccagcaagcccaaggagaaggaggacaaggagaaggccgccgtgagcaagcacgagcagaaggaccagtacgccttctgcagatacatgatcgacatcttcgtgcacggcgacctgaagcccggccagagccccgccatccccccccccctgcccaccgagcaggccagcagacccacccccgccagccccgccctggagggcgacaaggccagcaaggagaagaagagaaagatgaagagaatgagcgagaagtag

SEQ ID NO: 103340 - DNA, 894 bp, synthetic construct
  misc_feature 1..894: note = Description of Artificial Sequence: Synthetic coding sequence
  source 1..894: mol_type = other DNA
atgaccgagatcaccgccgagggcaacgccagcaccaccaccaccgtgatcgacagcaagaacggcagcgtgcccaagagccccggcaaggtgctgaagagaaccgtgaccgaggacatcgtgaccaccttcagcagccccgccgcctggctgctggtgatcgccctgatcatcacctggagcgccgtggccatcgtgatgttcgacctggtggactacaagaacttcagcgccagcagcatcgccaagatcggcagcgaccccctgaagctggtgagagacgccatggaggagaccaccgactggatctacggcttcttcagcctgctgagcgacatcatcagcagcgaggacgaggaggacgacgacggcgacgaggacaccgacaagggcgagatcgacgagccccccctgagaaagaaggagatccacaaggacaagaccgagaagcaggagaagcccgagagaaagatccagaccaaggtgacccacaaggagaaggagaagggcaaggagaaggtgagagagaaggagaagcccgagaagaaggccacccacaaggagaagatcgagaagaaggagaagcccgagaccaagaccctggccaaggagcagaagaaggccaagaccgccgagaagagcgaggagaagaccaagaaggaggtgaagggcggcaagcaggagaaggtgaagcagaccgccgccaaggtgaaggaggtgcagaagacccccagcaagcccaaggagaaggaggacaaggagaaggccgccgtgagcaagcacgagcagaagggccagagccccgccatccccccccccctgcccaccgagcaggccagcagacccacccccgccagccccgccctggagggcaagtacttcttcttcagctag

SEQ ID NO: 103341 - DNA, 5832 bp, synthetic construct
  misc_feature 1..5832: note = Description of Artificial Sequence: Synthetic coding sequence
  source 1..5832: mol_type = other DNA
atgagccccctgctgagaagcatctgcgacatcaccgagatcttcaaccagtacgtgagccacgactgcgacggcgccgccctgaccaagaaggacctgaagaacctgctggagagagagttcggcgccgtgctgagaagaccccacgaccccaagaccgtggacctgatcctggagctgctggacctggacagcaacggcagagtggacttcaacgagttcctgctgttcatcttcaaggtggcccaggcctgctactacgccctgggccaggccaccggcctggacgaggagaagagagccagatgcgacggcaaggagagcctgctgcaggacagaagacaggaggaggaccagagaagattcgagcccagagacagacagctggaggaggagcccggccagagaagaagacagaagagacaggagcaggagagagagctggccgagggcgaggagcagagcgagaagcaggagagactggagcagagagacagacagagaagagacgaggagctgtggagacagagacaggagtggcaggagagagaggagagaagagccgaggaggagcagctgcagagctgcaagggccacgagaccgaggagttccccgacgaggagcagctgagaagaagagagctgctggagctgagaagaaagggcagagaggagaagcagcagcagagaagagagagacaggacagagtgttccaggaggaggaggagaaggagtggagaaagagagagaccgtgctgagaaaggaggaggagaagctgcaggaggaggagccccagagacagagagagctgcaggaggaggaggagcagctgagaaagctggagagacaggagctgagaagagagagacaggaggaggagcagcagcagcagagactgagaagagagcagcagctgagaagaaagcaggaggaggagagaagagagcagcaggaggagagaagagagcagcaggagagaagagagcagcaggaggagagaagagagcagcagctgagaagagagcaggaggagagaagagagcagcagctgagaagagagcaggaggaggagagaagagagcagcagctgagaagagagcaggaggaggagagaagagagcagcagctgagaagagagcagcagctgagaagagagcagcagctgagaagagagcagcagctgagaagagagcagcagctgagaagagagcagcagctgagaagagagcagcagctgagaagagagcagcagctgagaagagagcagcagctgagaagagagcaggaggaggagagacacgagcagaagcacgagcaggagagaagagagcagagactgaagagagagcaggaggagagaagagactggctgaagagagaggaggagaccgagagacacgagcaggagagaagaaagcagcagctgaagagagaccaggaggaggagagaagagagagatggctgaagctggaggaggaggagagaagagagcagcaggagagaagagagcagcagctgagaagagagcaggaggagagaagagagcagagactgaagagacaggaggaggaggagagactgcagcagagactgagaagcgagcagcagctgagaagagagcaggaggagagaagagagcagctgctgaagagagaggaggagaagagactggagcaggagagaagagagcagagactgaagagagagcaggaggagagaagagaccagctgctgaagagagaggaggagagaagacagcagagactgaagagagagcaggaggagagactggagcagagactgaagagagaggaggtggagagactggagcaggaggagagaagagagcagagactgaagagagaggagcccgaggaggagagaagacagcagctgctgaagagcgaggagcaggaggagagaagacagcagcagctgagaagagagcagcaggagagaagagagcagagactgaagagagaggaggaggaggagagactggagcagagactgaagagagagcacgaggaggagagaagagagcaggagctggccgaggaggagcaggagcaggccagagagagaatcaagagcagaatccccaagtggcagtggcagctggagagcgaggccgacgccagacagagcaaggtgtacagcagacccagaaagcaggagggccagagaagaagacaggagcaggaggagaagagaagaagaagagagagcgagctgcagtggcaggaggaggagagagcccacagacagcagcaggaggaggagcagagaagagacttcacctggcagtggcaggccgaggagaagagcgagagaggcagacagagactgagcgccagaccccccctgagagagcagagagagagacagctgagagccgaggagagacagcagagagagcagagattcctgcccgaggaggaggagaaggagcagagaagaagacagagaagagagagagagaaggagctgcagttcctggaggaggaggagcagctgcagagaagagagagagcccagcagctgcaggaggaggaggacggcctgcaggaggaccaggagagaagaagaagccaggagcagagaagagaccagaagtggagatggcagctggaggaggagagaaagagaagaagacacaccctgtacgccaagcccgccctgcaggagcagctgagaaaggagcagcagctgctgcaggaggaggaggaggagctgcagagagaggagagagagaagagaagaagacaggagcaggagagacagtacagagaggaggagcagctgcagcaggaggaggagcagctgctgagagaggagagagagaagagaagaagacaggagagagagagacagtacagaaaggacaagaagctgcagcagaaggaggagcagctgctgggcgaggagcccgagaagagaagaagacaggagagagagaagaagtacagagaggaggaggagctgcagcaggaggaggagcagctgctgagagaggagagagagaagagaagaagacaggagtgggagagacagtacagaaagaaggacgagctgcagcaggaggaggagcagctgctgagagaggagagagagaagagaagactgcaggagagagagagacagtacagagaggaggaggagctgcagcaggaggaggagcagctgctgggcgaggagagagagaccagaagaagacaggagctggagagacagtacagaaaggaggaggagctgcagcaggaggaggagcagctgctgagagaggagcccgagaagagaagaagacaggagagagagagacagtgcagagaggaggaggagctgcagcaggaggaggagcagctgctgagagaggagagagagaagagaagaagacaggagctggagagacagtacagagaggaggaggaggtgcagcaggaggaggagcagctgctgagagaggagcccgagaagagaagaagacaggagctggagagacagtacagagaggaggaggagctgcagcaggaggaggagcagctgctgagagaggagcaggagaagagaagacaggagagagagagacagtacagagaggaggaggagctgcagagacagaagagaaagcagagatacagagacgaggaccagagaagcgacctgaagtggcagtgggagcccgagaaggagaacgccgtgagagacaacaaggtgtactgcaagggcagagagaacgagcagttcagacagctggaggacagccagctgagagacagacagagccagcaggacctgcagcacctgctgggcgagcagcaggagagagacagagagcaggagagaagaagatggcagcagagagacagacacttccccgaggaggagcagctggagagagaggagcagaaggaggccaagagaagagacagaaagagccaggaggagaagcagctgctgagagaggagagagaggagaagagaagaagacaggagaccgacagaaagttcagagaggaggagcagctgctgcaggagagagaggagcagcccctgagaagacaggagagagacagaaagttcagagaggaggagctgagacaccaggagcagggcagaaagttcctggaggaggagcagagactgagaagacaggagagagagagaaagttcctgaaggaggagcagcagctgagatgccaggagagagagcagcagctgagacaggacagagacagaaagttcagagaggaggagcagcagctgagcagacaggagagagacagaaagttcagagaggaggagcagcaggtgagaagacaggagagagagagaaagttcctggaggaggagcagcagctgagacaggagagacacagaaagttcagagaggaggagcagctgctgcaggagagagaggagcagcagctgcacagacaggagagagacagaaagttcctggaggaggagcagcagctgagaagacaggagagagacagaaagttcagagagcaggagctgagaagccaggagcccgagagaaagttcctggaggaggagcagcagctgcacagacagcagagacagagaaagttcctgcaggaggagcagcagctgagaagacaggagagaggccagcagagaagacaggacagagacagaaagttcagagaggaggagcagctgagacaggagagagaggagcagcagctgagcagacaggagagagacagaaagttcagactggaggagcagaaggtgagaagacaggagcaggagagaaagttcatggaggacgagcagcagctgagaagacaggagggccagcagcagctgagacaggagagagacagaaagttcagagaggacgagcagctgctgcaggagagagaggagcagcagctgcacagacaggagagagacagaaagttcctggaggaggagccccagctgagaagacaggagagagagcagcagctgagacacgacagagacagaaagttcagagaggaggagcagctgctgcaggagggcgaggagcagcagctgagaagacaggagagagacagaaagttcagagaggaggagcagcagctgagaagacaggagagagagagaaagttcctgcaggaggagcagcagctgagaagacaggagctggagagaaagttcagagaggaggagcagctgagacaggagaccgagcaggagcagctgagaagacaggagagatacagaaagatcctggaggaggagcagctgagacccgagagagaggagcagcagctgagaagacaggagagagacagaaagttcagagaggaggagcagctgagacaggagagagaggagcagcagctgagaagccaggagagcgacagaaagttcagagaggaggagcagctgagacaggagagagaggagcagcagctgagaccccagcagagagacggcaagtacagatgggaggaggagcagctgcagctggaggagcaggagcagagactgagacaggagagagacagacagtacagagccgaggagcagttcgccacccaggagaagagcagaagagaggagcaggagctgtggcaggaggaggagcagaagagaagacaggagagagagagaaagctgagagaggagcacatcagaagacagcagaaggaggagcagagacacagacaggtgggcgagatcaagagccaggagggcaagggccacggcagactgctggagcccggcacccaccagttcgccagcgtgcccgtgagaagcagccccctgtacgagtacatccaggagcagagaagccagtacagaccctag

SEQ ID NO: 103342 - DNA, 540 bp, synthetic construct
  misc_feature 1..540: note = Description of Artificial Sequence: Synthetic coding sequence
  source 1..540: mol_type = other DNA
atggccaagaccgccatggcctacaaggagaagatgaaggagctgagcatgctgagcctgatctgcagctgcttctaccccgagcccagaaacatcaacatctacacctacgacgacatggaggtgaagcagatcaacaagagagccagcggccaggccttcgagctgatcctgaagccccccagccccatcagcgaggcccccagaaccctggccagccccaagaagaaggacctgagcctggaggagatccagaagaagctggaggccgccgaggagagaagaaagagccaggaggcccaggtgctgaagcagctggccgagaagagagagcacgagagagaggtgctgcagaaggccctggaggagaacaacaacttcagcaagatggccgaggagaagctgatcctgaagatggagcagatcaaggagaacagagaggccaacctggccgccatcatcgagagactgcaggagaaggagagacacgccgccgaggtgagaagaaacaaggagctgcaggtggagctgagcggctag

SEQ ID NO: 103343 - DNA, 3885 bp, synthetic construct
  misc_feature 1..3885: note = Description of Artificial Sequence: Synthetic coding sequence
  source 1..3885: mol_type = other DNA
atgccctacgaggtgaacgccggctacgacttcaccaacatggtgagaaagaagaacccccccctgagaaacgtggccagcgagggcgagggccagatcctggagcccatcggcaccgagagcaaggtgagcggcaagaacaaggagttcagcgccgaccagatgagcgagaacaccgaccagagcgacgccgccgagctgaaccacaaggaggagcacagcctgcacgtgcaggaccccagcagcagcagcaagaaggacctgaagagcgccgtgctgagcgagaaggccggcttcaactacgagagccccagcaagggcggcaacttccccagcttcccccacgacgaggtgaccgacagaaacatgctggccttcagcagccccgccgccggcggcgtgtgcgagcccctgaagagcccccagagagccgaggccgacgacccccaggacatggcctgcacccccagcggcgacagcctggagaccaaggaggaccagaagatgagccccaaggccaccgaggagaccggccaggcccagagcggccaggccaactgccagggcctgagccccgtgagcgtggccagcaagaacccccaggtgcccagcgacggcggcgtgagactgaacaagagcaagaccgacctgctggtgaacgacaaccccgaccccgcccccctgagccccgagctgcaggacttcaagtgcaacatctgcggctacggctactacggcaacgaccccaccgacctgatcaagcacttcagaaagtaccacctgggcctgcacaacagaaccagacaggacgccgagctggacagcaagatcctggccctgcacaacatggtgcagttcagccacagcaaggacttccagaaggtgaacagaagcgtgttcagcggcgtgctgcaggacatcaacagcagcagacccgtgctgctgaacggcacctacgacgtgcaggtgaccagcggcggcaccttcatcggcatcggcagaaagacccccgactgccagggcaacaccaagtacttcagatgcaagttctgcaacttcacctacatgggcaacagcagcaccgagctggagcagcacttcctgcagacccaccccaacaagatcaaggccagcctgcccagcagcgaggtggccaagcccagcgagaagaacagcaacaagagcatccccgccctgcagagcagcgacagcggcgacctgggcaagtggcaggacaagatcaccgtgaaggccggcgacgacacccccgtgggctacagcgtgcccatcaagcccctggacagcagcagacagaacggcaccgaggccaccagctactactggtgcaagttctgcagcttcagctgcgagagcagcagcagcctgaagctgctggagcactacggcaagcagcacggcgccgtgcagagcggcggcctgaaccccgagctgaacgacaagctgagcagaggcagcgtgatcaaccagaacgacctggccaagagcagcgagggcgagaccatgaccaagaccgacaagagcagcagcggcgccaagaagaaggacttcagcagcaagggcgccgaggacaacatggtgaccagctacaactgccagttctgcgacttcagatacagcaagagccacggccccgacgtgatcgtggtgggccccctgctgagacactaccagcagctgcacaacatccacaagtgcaccatcaagcactgccccttctgccccagaggcctgtgcagccccgagaagcacctgggcgagatcacctaccccttcgcctgcagaaagagcaactgcagccactgcgccctgctgctgctgcacctgagccccggcgccgccggcagcagcagagtgaagcaccagtgccaccagtgcagcttcaccacccccgacgtggacgtgctgctgttccactacgagagcgtgcacgagagccaggccagcgacgtgaagcaggaggccaaccacctgcagggcagcgacggccagcagagcgtgaaggagagcaaggagcacagctgcaccaagtgcgacttcatcacccaggtggaggaggagatcagcagacactacagaagagcccacagctgctacaagtgcagacagtgcagcttcaccgccgccgacacccagagcctgctggagcacttcaacaccgtgcactgccaggagcaggacatcaccaccgccaacggcgaggaggacggccacgccatcagcaccatcaaggaggagcccaagatcgacttcagagtgtacaacctgctgacccccgacagcaagatgggcgagcccgtgagcgagagcgtggtgaagagagagaagctggaggagaaggacggcctgaaggagaaggtgtggaccgagagcagcagcgacgacctgagaaacgtgacctggagaggcgccgacatcctgagaggcagccccagctacacccaggccagcctgggcctgctgacccccgtgagcggcacccaggagcagaccaagaccctgagagacagccccaacgtggaggccgcccacctggccagacccatctacggcctggccgtggagaccaagggcttcctgcagggcgcccccgccggcggcgagaagagcggcgccctgccccagcagtaccccgccagcggcgagaacaagagcaaggacgagagccagagcctgctgagaagaagaagaggcagcggcgtgttctgcgccaactgcctgaccaccaagaccagcctgtggagaaagaacgccaacggcggctacgtgtgcaacgcctgcggcctgtaccagaagctgcacagcacccccagacccctgaacatcatcaagcagaacaacggcgagcagatcatcagaagaagaaccagaaagagactgaaccccgaggccctgcaggccgagcagctgaacaagcagcagagaggcagcaacgaggagcaggtgaacggcagccccctggagagaagaagcgaggaccacctgaccgagagccaccagagagagatccccctgcccagcctgagcaagtacgaggcccagggcagcctgaccaagagccacagcgcccagcagcccgtgctggtgagccagaccctggacatccacaagagaatgcagcccctgcacatccagatcaagagcccccaggagagcaccggcgaccccggcaacagcagcagcgtgagcgagggcaagggcagcagcgagagaggcagccccatcgagaagtacatgagacccgccaagcaccccaactacagcccccccggcagccccatcgagaagtaccagtaccccctgttcggcctgcccttcgtgcacaacgacttccagagcgaggccgactggctgagattctggagcaagtacaagctgagcgtgcccggcaacccccactacctgagccacgtgcccggcctgcccaacccctgccagaactacgtgccctaccccaccttcaacctgcccccccacttcagcgccgtgggcagcgacaacgacatccccctggacctggccatcaagcacagcagacccggccccaccgccaacggcgccagcaaggagaagaccaaggccccccccaacgtgaagaacgagggccccctgaacgtggtgaagaccgagaaggtggacagaagcacccaggacgagctgagcaccaagtgcgtgcactgcggcatcgtgttcctggacgaggtgatgtacgccctgcacatgagctgccacggcgacagcggccccttccagtgcagcatctgccagcacctgtgcaccgacaagtacgacttcaccacccacatccagagaggcctgcacagaaacaacgcccaggtggagaagaacggcaagcccaaggagtag

SEQ ID NO: 103344 - DNA, 3858 bp, synthetic construct
  misc_feature 1..3858: note = Description of Artificial Sequence: Synthetic coding sequence
  source 1..3858: mol_type = other DNA
atgcagagcaacatggtgagaaagaagaacccccccctgagaaacgtggccagcgagggcgagggccagatcctggagcccatcggcaccgagagcaaggtgagcggcaagaacaaggagttcagcgccgaccagatgagcgagaacaccgaccagagcgacgccgccgagctgaaccacaaggaggagcacagcctgcacgtgcaggaccccagcagcagcagcaagaaggacctgaagagcgccgtgctgagcgagaaggccggcttcaactacgagagccccagcaagggcggcaacttccccagcttcccccacgacgaggtgaccgacagaaacatgctggccttcagcagccccgccgccggcggcgtgtgcgagcccctgaagagcccccagagagccgaggccgacgacccccaggacatggcctgcacccccagcggcgacagcctggagaccaaggaggaccagaagatgagccccaaggccaccgaggagaccggccaggcccagagcggccaggccaactgccagggcctgagccccgtgagcgtggccagcaagaacccccaggtgcccagcgacggcggcgtgagactgaacaagagcaagaccgacctgctggtgaacgacaaccccgaccccgcccccctgagccccgagctgcaggacttcaagtgcaacatctgcggctacggctactacggcaacgaccccaccgacctgatcaagcacttcagaaagtaccacctgggcctgcacaacagaaccagacaggacgccgagctggacagcaagatcctggccctgcacaacatggtgcagttcagccacagcaaggacttccagaaggtgaacagaagcgtgttcagcggcgtgctgcaggacatcaacagcagcagacccgtgctgctgaacggcacctacgacgtgcaggtgaccagcggcggcaccttcatcggcatcggcagaaagacccccgactgccagggcaacaccaagtacttcagatgcaagttctgcaacttcacctacatgggcaacagcagcaccgagctggagcagcacttcctgcagacccaccccaacaagatcaaggccagcctgcccagcagcgaggtggccaagcccagcgagaagaacagcaacaagagcatccccgccctgcagagcagcgacagcggcgacctgggcaagtggcaggacaagatcaccgtgaaggccggcgacgacacccccgtgggctacagcgtgcccatcaagcccctggacagcagcagacagaacggcaccgaggccaccagctactactggtgcaagttctgcagcttcagctgcgagagcagcagcagcctgaagctgctggagcactacggcaagcagcacggcgccgtgcagagcggcggcctgaaccccgagctgaacgacaagctgagcagaggcagcgtgatcaaccagaacgacctggccaagagcagcgagggcgagaccatgaccaagaccgacaagagcagcagcggcgccaagaagaaggacttcagcagcaagggcgccgaggacaacatggtgaccagctacaactgccagttctgcgacttcagatacagcaagagccacggccccgacgtgatcgtggtgggccccctgctgagacactaccagcagctgcacaacatccacaagtgcaccatcaagcactgccccttctgccccagaggcctgtgcagccccgagaagcacctgggcgagatcacctaccccttcgcctgcagaaagagcaactgcagccactgcgccctgctgctgctgcacctgagccccggcgccgccggcagcagcagagtgaagcaccagtgccaccagtgcagcttcaccacccccgacgtggacgtgctgctgttccactacgagagcgtgcacgagagccaggccagcgacgtgaagcaggaggccaaccacctgcagggcagcgacggccagcagagcgtgaaggagagcaaggagcacagctgcaccaagtgcgacttcatcacccaggtggaggaggagatcagcagacactacagaagagcccacagctgctacaagtgcagacagtgcagcttcaccgccgccgacacccagagcctgctggagcacttcaacaccgtgcactgccaggagcaggacatcaccaccgccaacggcgaggaggacggccacgccatcagcaccatcaaggaggagcccaagatcgacttcagagtgtacaacctgctgacccccgacagcaagatgggcgagcccgtgagcgagagcgtggtgaagagagagaagctggaggagaaggacggcctgaaggagaaggtgtggaccgagagcagcagcgacgacctgagaaacgtgacctggagaggcgccgacatcctgagaggcagccccagctacacccaggccagcctgggcctgctgacccccgtgagcggcacccaggagcagaccaagaccctgagagacagccccaacgtggaggccgcccacctggccagacccatctacggcctggccgtggagaccaagggcttcctgcagggcgcccccgccggcggcgagaagagcggcgccctgccccagcagtaccccgccagcggcgagaacaagagcaaggacgagagccagagcctgctgagaagaagaagaggcagcggcgtgttctgcgccaactgcctgaccaccaagaccagcctgtggagaaagaacgccaacggcggctacgtgtgcaacgcctgcggcctgtaccagaagctgcacagcacccccagacccctgaacatcatcaagcagaacaacggcgagcagatcatcagaagaagaaccagaaagagactgaaccccgaggccctgcaggccgagcagctgaacaagcagcagagaggcagcaacgaggagcaggtgaacggcagccccctggagagaagaagcgaggaccacctgaccgagagccaccagagagagatccccctgcccagcctgagcaagtacgaggcccagggcagcctgaccaagagccacagcgcccagcagcccgtgctggtgagccagaccctggacatccacaagagaatgcagcccctgcacatccagatcaagagcccccaggagagcaccggcgaccccggcaacagcagcagcgtgagcgagggcaagggcagcagcgagagaggcagccccatcgagaagtacatgagacccgccaagcaccccaactacagcccccccggcagccccatcgagaagtaccagtaccccctgttcggcctgcccttcgtgcacaacgacttccagagcgaggccgactggctgagattctggagcaagtacaagctgagcgtgcccggcaacccccactacctgagccacgtgcccggcctgcccaacccctgccagaactacgtgccctaccccaccttcaacctgcccccccacttcagcgccgtgggcagcgacaacgacatccccctggacctggccatcaagcacagcagacccggccccaccgccaacggcgccagcaaggagaagaccaaggccccccccaacgtgaagaacgagggccccctgaacgtggtgaagaccgagaaggtggacagaagcacccaggacgagctgagcaccaagtgcgtgcactgcggcatcgtgttcctggacgaggtgatgtacgccctgcacatgagctgccacggcgacagcggccccttccagtgcagcatctgccagcacctgtgcaccgacaagtacgacttcaccacccacatccagagaggcctgcacagaaacaacgcccaggtggagaagaacggcaagcccaaggagtag

SEQ ID NO: 103345 - DNA, 705 bp, synthetic construct
  misc_feature 1..705: note = Description of Artificial Sequence: Synthetic coding sequence
  source 1..705: mol_type = other DNA
atgagaaagaccagactgtggggcctgctgtggatgctgttcgtgagcgagctgagagccgccaccaagctgaccgaggagaagtacgagctgaaggagggccagaccctggacgtgaagtgcgactacaccctggagaagttcgccagcagccagaaggcctggcagatcatcagagacggcgagatgcccaagaccctggcctgcaccgagagacccagcaagaacagccaccccgtgcaggtgggcagaatcatcctggaggactaccacgaccacggcctgctgagagtgagaatggtgaacctgcaggtggaggacagcggcctgtaccagtgcgtgatctaccagccccccaaggagccccacatgctgttcgacagaatcagactggtggtgaccaagggcttcagcggcacccccggcagcaacgagaacagcacccagaacgtgtacaagatcccccccaccaccaccaaggccctgtgccccctgtacaccagccccagaaccgtgacccaggccccccccaagagcaccgccgacgtgagcacccccgacagcgagatcaacctgaccaacgtgaccgacatcatcagagtgcccgtgttcaacatcgtgatcctgctggccggcggcttcctgagcaagagcctggtgttcagcgtgctgttcgccgtgaccctgagaagcttcgtgccctag

SEQ ID NO: 103346 - DNA, 453 bp, synthetic construct
  misc_feature 1..453: note = Description of Artificial Sequence: Synthetic coding sequence
  source 1..453: mol_type = other DNA
atgagaaagaccagactgtggggcctgctgtggatgctgttcgtgagcgagctgagagccgccaccaagctgaccgaggagaagtacgagctgaaggagggccagaccctggacgtgaagtgcgactacaccctggagaagttcgccagcagccagaaggcctggcagatcatcagagacggcgagatgcccaagaccctggcctgcaccgagagacccagcaagaacagccaccccgtgcaggtgggcagaatcatcctggaggactaccacgaccacggcctgctgagagtgagaatggtgaacctgcaggtggaggacagcggcctgtaccagtgcgtgatctaccagccccccaaggagccccacatgctgttcgacagaatcagactggtggtgaccaagggcttcagatgcagcaccctgagcttcagctggctggtggacagctag

SEQ ID NO: 103347 - DNA, 678 bp, synthetic construct
  misc_feature 1..678: note = Description of Artificial Sequence: Synthetic coding sequence
  source 1..678: mol_type = other DNA
atgagaaagaccagactgtggggcctgctgtggatgctgttcgtgagcgagctgagagccgccaccaagctgaccgaggagaagtacgagctgaaggagggccagaccctggacgtgaagtgcgactacaccctggagaagttcgccagcagccagaaggcctggcagatcatcagagacggcgagatgcccaagaccctggcctgcaccgagagacccagcaagaacagccaccccgtgcaggtgggcagaatcatcctggaggactaccacgaccacggcctgctgagagtgagaatggtgaacctgcaggtggaggacagcggcctgtaccagtgcgtgatctaccagccccccaaggagccccacatgctgttcgacagaatcagactggtggtgaccaagggcttcagcggcacccccggcagcaacgagaacagcacccagaacgtgtacaagatcccccccaccaccaccaaggccctgtgccccctgtacaccagccccagaaccgtgacccaggccccccccaagagcaccgccgacgtgagcacccccgacagcgagatcaacctgaccaacgtgaccgacatcatcagatacagcttccaggtgcccggccccctggtgtggaccctgagccccctgttccccagcctgtgcgccgagagaatgtag

SEQ ID NO: 103348 - DNA, 501 bp, synthetic construct
  misc_feature 1..501: note = Description of Artificial Sequence: Synthetic coding sequence
  source 1..501: mol_type = other DNA
atggagcccctgagactgctgatcctgctgttcgtgaccgagctgagcggcgcccacaacaccaccgtgttccagggcgtggccggccagagcctgcaggtgagctgcccctacgacagcatgaagcactggggcagaagaaaggcctggtgcagacagctgggcgagaagggcccctgccagagagtggtgagcacccacaacctgtggctgctgagcttcctgagaagatggaacggcagcaccgccatcaccgacgacaccctgggcggcaccctgaccatcaccctgagaaacctgcagccccacgacgccggcctgtaccagtgccagagcctgcacggcagcgaggccgacaccctgagaaaggtgctggtggaggtgctggccgaccccctggaccacagagacgccggcgacctgtggttccccggcgagagcgagagcttcgaggacgcccacgtggagcacagcatcagcagagccgagagacacgtgtag

SEQ ID NO: 103349 - DNA, 693 bp, synthetic construct
  misc_feature 1..693: note = Description of Artificial Sequence: Synthetic coding sequence
  source 1..693: mol_type = other DNA
atggagcccctgagactgctgatcctgctgttcgtgaccgagctgagcggcgcccacaacaccaccgtgttccagggcgtggccggccagagcctgcaggtgagctgcccctacgacagcatgaagcactggggcagaagaaaggcctggtgcagacagctgggcgagaagggcccctgccagagagtggtgagcacccacaacctgtggctgctgagcttcctgagaagatggaacggcagcaccgccatcaccgacgacaccctgggcggcaccctgaccatcaccctgagaaacctgcagccccacgacgccggcctgtaccagtgccagagcctgcacggcagcgaggccgacaccctgagaaaggtgctggtggaggtgctggccgaccccctggaccacagagacgccggcgacctgtggttccccggcgagagcgagagcttcgaggacgcccacgtggagcacagcatcagcagaagcctgctggagggcgagatccccttcccccccaccagcatcctgctgctgctggcctgcatcttcctgatcaagatcctggccgccagcgccctgtgggccgccgcctggcacggccagaagcccggcacccacccccccagcgagctggactgcggccacgaccccggctaccagctgcagaccctgcccggcctgagagacacctag

SEQ ID NO: 103350 - DNA, 660 bp, synthetic construct
  misc_feature 1..660: note = Description of Artificial Sequence: Synthetic coding sequence
  source 1..660: mol_type = other DNA
atggagcccctgagactgctgatcctgctgttcgtgaccgagctgagcggcgcccacaacaccaccgtgttccagggcgtggccggccagagcctgcaggtgagctgcccctacgacagcatgaagcactggggcagaagaaaggcctggtgcagacagctgggcgagaagggcccctgccagagagtggtgagcacccacaacctgtggctgctgagcttcctgagaagatggaacggcagcaccgccatcaccgacgacaccctgggcggcaccctgaccatcaccctgagaaacctgcagccccacgacgccggcctgtaccagtgccagagcctgcacggcagcgaggccgacaccctgagaaaggtgctggtggaggtgctggccgaccccctggaccacagagacgccggcgacctgtggttccccggcgagagcgagagcttcgaggacgcccacgtggagcacagcatcagcagagccgagagacacgtgaaggaggacgacggcagaaagagccccggcgaggtgccccccggcaccagccccgcctgcatcctggccacctggccccccggcctgctggtgctgctgtggcaggagaccaccctgcccgagcactgcttcagctggaccctggaggccggcaccggctag

SEQ ID NO: 103351 - DNA, 936 bp, synthetic construct
  misc_feature 1..936: note = Description of Artificial Sequence: Synthetic coding sequence
  source 1..936: mol_type = other DNA
atgggcctgaccctgctgctgctgctgctgctgggcctggagggccagggcatcgtgggcagcctgcccgaggtgctgcaggcccccgtgggcagcagcatcctggtgcagtgccactacagactgcaggacgtgaaggcccagaaggtgtggtgcagattcctgcccgagggctgccagcccctggtgagcagcgccgtggacagaagagcccccgccggcagaagaaccttcctgaccgacctgggcggcggcctgctgcaggtggagatggtgaccctgcaggaggaggacgccggcgagtacggctgcatggtggacggcgccagaggcccccagatcctgcacagagtgagcctgaacatcctgccccccgaggaggaggaggagacccacaagatcggcagcctggccgagaacgccttcagcgaccccgccggcagcgccaaccccctggagcccagccaggacgagaagagcatccccctgatctggggcgccgtgctgctggtgggcctgctggtggccgccgtggtgctgttcgccgtgatggccaagagaaagcagggcaacagactgggcgtgtgcggcagattcctgagcagcagagtgagcggcatgaaccccagcagcgtggtgcaccacgtgagcgacagcggccccgccgccgagctgcccctggacgtgccccacatcagactggacagcccccccagcttcgacaacaccacctacaccagcctgcccctggacagccccagcggcaagcccagcctgcccgcccccagcagcctgccccccctgccccccaaggtgctggtgtgcagcaagcccgtgacctacgccaccgtgatcttccccggcggcaacaagggcggcggcaccagctgcggccccgcccagaacccccccaacaaccagacccccagcagctag

SEQ ID NO: 103352 - DNA, 600 bp, synthetic construct
  misc_feature 1..600: note = Description of Artificial Sequence: Synthetic coding sequence
  source 1..600: mol_type = other DNA
atgggcctgaccctgctgctgctgctgctgctgggcctggagggccagggcatcgtgggcagcctgcccgaggtgctgcaggcccccgtgggcagcagcatcctggtgcagtgccactacagactgcaggacgtgaaggcccagaaggtgtggtgcagattcctgcccgagggctgccagcccctggtgagcagcgccgtggacagaagagcccccgccggcagaagaaccttcctgaccgacctgggcggcggcctgctgcaggtggagatggtgaccctgcaggaggaggacgccggcgagtacggctgcatggtggacggcgccagaggcccccagatcctgcacagagtgagcctgaacatcctgccccccgaggaggaggaggagacccacaagatcggcagcctggccgagaacgccttcagcgaccccgccggcagcgccaaccccctggagcccagccaggacgagaagagcatccccctgatctggggcgccgtgctgctggtgggcctgctggtggccgccgtggtgctgttcgccgtgatggccaagagaaagcaggagagcctgctgagcggcccccccagacagtag

SEQ ID NO: 103353 - DNA, 603 bp, synthetic construct
  misc_feature 1..603: note = Description of Artificial Sequence: Synthetic coding sequence
  source 1..603: mol_type = other DNA
atgggcctgaccctgctgctgctgctgctgctgggcctggaggaggaggaggaggagacccacaagatcggcagcctggccgagaacgccttcagcgaccccgccggcagcgccaaccccctggagcccagccaggacgagaagagcatccccctgatctggggcgccgtgctgctggtgggcctgctggtggccgccgtggtgctgttcgccgtgatggccaagagaaagcagggcaacagactgggcgtgtgcggcagattcctgagcagcagagtgagcggcatgaaccccagcagcgtggtgcaccacgtgagcgacagcggccccgccgccgagctgcccctggacgtgccccacatcagactggacagcccccccagcttcgacaacaccacctacaccagcctgcccctggacagccccagcggcaagcccagcctgcccgcccccagcagcctgccccccctgccccccaaggtgctggtgtgcagcaagcccgtgacctacgccaccgtgatcttccccggcggcaacaagggcggcggcaccagctgcggccccgcccagaacccccccaacaaccagacccccagcagctag

SEQ ID NO: 103354 - DNA, 966 bp, synthetic construct
  misc_feature 1..966: note = Description of Artificial Sequence: Synthetic coding sequence
  source 1..966: mol_type = other DNA
atggcccccgccttcctgctgctgctgctgctgtggccccagggctgcgtgagcggccccagcgccgacagcgtgtacaccaaggtgagactgctggagggcgagaccctgagcgtgcagtgcagctacaagggctacaagaacagagtggagggcaaggtgtggtgcaagatcagaaagaagaagtgcgagcccggcttcgccagagtgtgggtgaagggccccagatacctgctgcaggacgacgcccaggccaaggtggtgaacatcaccatggtggccctgaagctgcaggacagcggcagatactggtgcatgagaaacaccagcggcatcctgtaccccctgatgggcttccagctggacgtgagccccgccccccagaccgagagaaacatccccttcacccacctggacaacatcctgaagagcggcaccgtgaccaccggccaggcccccaccagcggccccgacgcccccttcaccaccggcgtgatggtgttcacccccggcctgatcaccctgcccagactgctggccagcaccagacccgccagcaagaccggctacagcttcaccgccaccagcaccaccagccagggccccagaagaaccatgggcagccagaccgtgaccgccagccccagcaacgccagagacagcagcgccggccccgagagcatcagcaccaagagcggcgacctgagcaccagaagccccaccaccggcctgtgcctgaccagcagaagcctgctgaacagactgcccagcatgcccagcatcagacaccaggacgtgtacagcaccgtgctgggcgtggtgctgaccctgctggtgctgatgctgatcatggtgtacggcttctggaagaagagacacatggccagctacagcatgtgcagcgaccccagcaccagagacccccccggcagacccgagccctacgtggaggtgtacctgatctag

SEQ ID NO: 103355 - DNA, 2562 bp, synthetic construct
  misc_feature 1..2562: note = Description of Artificial Sequence: Synthetic coding sequence
  source 1..2562: mol_type = other DNA
atgtgctgcgagaagtggagcagagtggccgagatgttcctgttcatcgaggagagagaggactgcaagatcctgtgcctgtgcagcagagccttcgtggaggacagaaagctgtacaacctgggcctgaagggctactacatcagagacagcggcaacaacagcggcgaccaggccaccgaggaggaggagggcggctacagctgcggcaccgccgagagccacgacagcaagggcatcggcctggacgagagcgagctggacagcgaggccgagctgatgagaagcatgggcctgcccctgcagttcggcagaatcaccgcccacaaggacttcgaggtgagcatgaacaccagaaacaaggtgaagatcaagaagaagaagcaccagaagaagtacctggacgagatcgtgcaggagagctggagaaaggagtacgaggaggacgacatcctggccagcgacgaccccagcagcatcgagcagtacgagaacaccagaacctacgagctgcagagcaagaaggacaccgagaccgagaacccccccgtggagaacaccctgagccccaagctggagatcaccgagaagtgggagaagtactggaacgagtacggcggcggcctgctgtggcagagctggcaggagaagcaccccggccaggccctgagcagcgagccctggaacttccccgacaccaaggaggagtgggagcagcactacagccagctgtactggtactacctggagcagttccagtactgggaggcccagggctggaccttcgacgccagccagagctgcgacaccgacacctacaccagcaagaccgaggccgacgacaagaacgacgagaagtgcatgaaggtggacctggtgagcttccccagcagccccatcatggtggacaacgacagcagcggcaccagcgacaaggaccacagcgagatcctggacggcatcagcaacatcaagctgaacagcgaggaggtgacccagagccagctggacagctgcaccagccacgacggccaccagcagctgagcgaggtgagcagcaagagagagtgccccgccagcggccagagcgagcccagaaacggcggcaccaacgaggagagcaacagcagcggcaacaccaacaccgacccccccgccgaggacagccagaagagcagcggcgccaacaccagcaaggacagaccccacgccagcggcaccgacggcgacgagagcgaggaggacccccccgagcacaagcccagcaagctgaagagaagccacgagctggacatcgacgagaaccccgccagcgacttcgacgacagcggcagcctgctgggcttcaagtacggcagcggccagaagtacggcggcatccccaacttcagccacagacaggtgagatacctggagaagaacgtgaagctgaagagcaagtacctggacatgagaagacagatcaagatgaagaacaagcacatcttcttcaccaaggagagcgagaagcccttcttcaagaagagcaagatcctgagcaaggtggagaagttcctgacctgggtgaacaagcccatggacgaggaggccagccaggagagcagcagccacgacaacgtgcacgacgccagcaccagcagcgacagcgaggagcaggacatgagcgtgaagaagggcgacgacctgctggagaccaacaaccccgagcccgagaagtgccagagcgtgagcagcgccggcgagctggagaccgagaactacgagagagacagcctgctggccaccgtgcccgacgagcaggactgcgtgacccaggaggtgcccgacagcagacaggccgagaccgaggccgaggtgaagaagaagaagaacaagaagaagaacaagaaggtgaacggcctgccccccgagatcgccgccgtgcccgagctggccaagtactgggcccagagatacagactgttcagcagattcgacgacggcatcaagctggacagagagggctggttcagcgtgacccccgagaagatcgccgagcacatcgccggcagagtgagccagagcttcaagtgcgacgtggtggtggacgccttctgcggcgtgggcggcaacaccatccagttcgccctgaccggcatgagagtgatcgccatcgacatcgaccccgtgaagatcgccctggccagaaacaacgccgaggtgtacggcatcgccgacaagatcgagttcatctgcggcgacttcctgctgctggccagcttcctgaaggccgacgtggtgttcctgagccccccctggggcggccccgactacgccaccgccgagaccttcgacatcagaaccatgatgagccccgacggcttcgagatcttcagactgagcaagaagatcaccaacaacatcgtgtacttcctgcccagaaacgccgacatcgaccaggtggccagcctggccggccccggcggccaggtggagatcgagcagaacttcctgaacaacaagctgaagaccatcaccgcctacttcggcgacctgatcagaagacccgccagcgagacctag

SEQ ID NO: 103356 - DNA, 1266 bp, synthetic construct
  misc_feature 1..1266: note = Description of Artificial Sequence: Synthetic coding sequence
  source 1..1266: mol_type = other DNA
atgtggtaccacagactgagccacctgcacagcagactgcaggacctgctgaagggcggcgtgatctaccccgccctgccccagcccaacttcaagagcctgctgcccctggccgtgcactggcaccacaccgccagcaagagcctgacctgcgcctggcagcagcacgaggaccacttcgagctgaagtacgccaacaccgtgatgagattcgactacgtgtggctgagagaccactgcagaagcgccagctgctacaacagcaagacccaccagagaagcctggacaccgccagcgtggacctgtgcatcaagcccaagaccatcagactggacgagaccaccctgttcttcacctggcccgacggccacgtgaccaagtacgacctgaactggctggtgaagaacagctacgagggccagaagcagaaggtgatccagcccagaatcctgtggaacgccgagatctaccagcaggcccaggtgcccagcgtggactgccagagcttcctggagaccaacgagggcctgaagaagttcctgcagaacttcctgctgtacggcatcgccttcgtggagaacgtgccccccacccaggagcacaccgagaagctggccgagagaatcagcctgatcagagagaccatctacggcagaatgtggtacttcaccagcgacttcagcagaggcgacaccgcctacaccaagctggccctggacagacacaccgacaccacctacttccaggagccctgcggcatccaggtgttccactgcctgaagcacgagggcaccggcggcagaaccctgctggtggacggcttctacgccgccgagcaggtgctgcagaaggcccccgaggagttcgagctgctgagcaaggtgcccctgaagcacgagtacatcgaggacgtgggcgagtgccacaaccacatgatcggcatcggccccgtgctgaacatctacccctggaacaaggagctgtacctgatcagatacaacaactacgacagagccgtgatcaacaccgtgccctacgacgtggtgcacagatggtacaccgcccacagaaccctgaccatcgagctgagaagacccgagaacgagttctgggtgaagctgaagcccggcagagtgctgttcatcgacaactggagagtgctgcacggcagagagtgcttcaccggctacagacagctgtgcggctgctacctgaccagagacgacgtgctgaacaccgccagactgctgggcctgcaggcctag

SEQ ID NO: 103357 - DNA, 1131 bp, synthetic construct
  misc_feature 1..1131: note = Description of Artificial Sequence: Synthetic coding sequence
  source 1..1131: mol_type = other DNA
atgtggtaccacagactgagccacctgcacagcagactgcaggacctgctgaagggcggcgtgatctaccccgccctgccccagcccaacttcaagagcctgctgcccctggccgtgcactggcaccacaccgccagcaagagcctgacctgcgcctggcagcagcacgaggaccacttcgagctgaagtacgccaacaccgtgatgagattcgactacgtgtggctgagagaccactgcagaagcgccagctgctacaacagcaagacccaccagagaagcctggacaccgccagcgtggacctgtgcatcaagcccaagaccatcagactggacgagaccaccctgttcttcacctggcccgacggccacgtgaccaagtacgacctgaactggctggtgaagaacagctacgagggccagaagcagaaggtgatccagcccagaatcctgtggaacgccgagatctaccagcaggcccaggtgcccagcgtggactgccagagcttcctggagaccaacgagggcctgaagaagttcctgcagaacttcctgctgtacggcatcgccttcgtggagaacgtgccccccacccaggagcacaccgagaagctggccgagagaatcagcctgatcagagagaccatctacggcagaatgtggtacttcaccagcgacttcagcagaggcgacaccgcctacaccaagctggccctggacagacacaccgacaccacctacttccaggagccctgcggcatccaggtgttccactgcctgaagcacgagggcaccggcggcagaaccctgctggtggacggcttctacgccgccgagcaggtgctgcagaaggcccccgaggagttcgagctgctgagcaaggtgcccctgaagcacgagtacatcgaggacgtgggcgagtgccacaaccacatgatcggcatcggccccgtgctgaacatctacccctggaacaaggagctgtacctgatcagactgttcaaggagaagcagaacaccgtgaacagacagtggaacagcagcctgcagtgcgacatccccgagagaatcctgacctacagacacttcgtgagcggcaccagcatcgagcacagaggcagcctgatctag

SEQ ID NO: 103358 - DNA, 5889 bp, synthetic construct
  misc_feature 1..5889: note = Description of Artificial Sequence: Synthetic coding sequence
  source 1..5889: mol_type = other DNA
atgagagagctggaggccaaggccaccaaggacgtggagagaaacctgagcagagacctggtgcaggaggaggagcagctgatggaggagaagaagaagaagaaggacgacaagaagaagaaggaggccgcccagaagaaggccaccgagcagaagatcaaggtgcccgagcagatcaagcccagcgtgagccagccccagcccgccaacagcaacaacggcaccagcaccgccaccagcaccaacaacaacgccaagagagccaccgccaacaaccagcagccccagcagcagcagcagcagcagcagccccagcagcagcagccccagcagcagccccagccccagccccagcagcagcagccccagcagcagccccaggccctgcccagataccccagagaggtgccccccagattcagacaccaggagcacaagcagctgctgaagagaggccagcacttccccgtgatcgccgccaacctgggcagcgccgtgaaggtgctgaacagccagagcgagagcagcgccctgaccaaccagcagccccagaacaacggcgaggtgcagaacagcaagaaccagagcgacatcaaccacagcaccagcggcagccactacgagaacagccagagaggccccgtgagcagcaccagcgacagcagcaccaactgcaagaacgccgtggtgagcgacctgagcgagaaggaggcctggcccagcgcccccggcagcgaccccgagctggccagcgagtgcatggacgccgacagcgccagcagcagcgagagcgagagaaacatcaccatcatggccagcggcaacaccggcggcgagaaggacggcctgagaaacagcaccggcctgggcagccagaacaagttcgtggtgggcagcagcagcaacaacgtgggccacggcagcagcaccggcccctggggcttcagccacggcgccatcatcagcacctgccaggtgagcgtggacgcccccgagagcaagagcgagagcagcaacaacagaatgaacgcctggggcaccgtgagcagcagcagcaacggcggcctgaaccccagcaccctgaacagcgccagcaaccacggcgcctggcccgtgctggagaacaacggcctggccctgaagggccccgtgggcagcggcagcagcggcatcaacatccagtgcagcaccatcggccagatgcccaacaaccagagcatcaacagcaaggtgagcggcggcagcacccacggcacctggggcagcctgcaggagacctgcgagagcgaggtgagcggcacccagaaggtgagcttcagcggccagccccagaacatcaccaccgagatgaccggccccaacaacaccaccaacttcatgaccagcagcctgcccaacagcggcagcgtgcagaacaacgagctgcccagcagcaacaccggcgcctggagagtgagcaccatgaaccacccccagatgcaggcccccagcggcatgaacggcaccagcctgagccacctgagcaacggcgagagcaagagcggcggcagctacggcaccacctggggcgcctacggcagcaactacagcggcgacaagtgcagcggccccaacggccaggccaacggcgacaccgtgaacgccaccctgatgcagcccggcgtgaacggccccatgggcaccaacttccaggtgaacaccaacaagggcggcggcgtgtgggagagcggcgccgccaacagccagagcaccagctggggcagcggcaacggcgccaacagcggcggcagcagaagaggctggggcacccccgcccagaacaccggcaccaacctgcccagcgtggagtggaacaagctgcccagcaaccagcacagcaacgacagcgccaacggcaacggcaagaccttcaccaacggctggaagagcaccgaggaggaggaccagggcagcgccaccagccagaccaacgagcagagcagcgtgtgggccaagaccggcggcaccgtggagagcgacggcagcaccgagagcaccggcagactggaggagaagggcaccggcgagagccagagcagagacagaagaaagatcgaccagcacaccctgctgcagagcatcgtgaacagaaccgacctggaccccagagtgctgagcaacagcggctggggccagacccccatcaagcagaacaccgcctgggacaccgagaccagccccagaggcgagagaaagaccgacaacggcaccgaggcctggggcagcagcgccacccagaccttcaacagcggcgcctgcatcgacaagaccagccccaacggcaacgacaccagcagcgtgagcggctggggcgaccccaagcccgccctgagatggggcgacagcaagggcagcaactgccagggcggctgggaggacgacagcgccgccaccggcatggtgaagagcaaccagtggggcaactgcaaggaggagaaggccgcctggaacgacagccagaagaacaagcagggctggggcgacggccagaagagcagccagggctggagcgtgagcgccagcgacaactggggcgagaccagcagaaacaaccactggggcgaggccaacaagaagagcagcagcggcggcagcgacagcgacagaagcgtgagcggctggaacgagctgggcaagaccagcagcttcacctggggcaacaacatcaaccccaacaacagcagcggctgggacgagagcagcaagcccacccccagccagggctggggcgacccccccaagagcaaccagagcctgggctggggcgacagcagcaagcccgtgagcagccccgactggaacaagcagcaggacatcgtgggcagctggggcatcccccccgccaccggcaagccccccggcaccggctggctgggcggccccatccccgcccccgccaaggaggaggagcccaccggctgggaggagcccagccccgagagcatcagaagaaagatggagatcgacgacggcaccagcgcctggggcgaccccagcaagtacaactacaagaacgtgaacatgtggaacaagaacgtgcccaacggcaacagcagaagcgaccagcaggcccaggtgcaccagctgctgacccccgccagcgccatcagcaacaaggaggccagcagcggcagcggctggggcgagccctggggcgagcccagcacccccgccaccaccgtggacaacggcaccagcgcctggggcaagcccatcgacagcggccccagctggggcgagcccatcgccgccgccagcagcaccagcacctggggcagcagcagcgtgggcccccaggccctgagcaagagcggccccaagagcatgcaggacggctggtgcggcgacgacatgcccctgcccggcaacagacccaccggctgggaggaggaggaggacgtggagatcggcatgtggaacagcaacagcagccaggagctgaacagcagcctgaactggcccccctacaccaagaagatgagcagcaagggcctgagcggcaagaagagaagaagagagagaggcatgatgaagggcggcaacaagcaggaggaggcctggatcaaccccttcgtgaagcagttcagcaacatcagcttcagcagagacagccccgaggagaacgtgcagagcaacaagatggacctgagcggcggcatgctgcaggacaagagaatggagatcgacaagcacagcctgaacatcggcgactacaacagaaccgtgggcaagggccccggcagcagaccccagatcagcaaggagagcagcatggagagaaacccctacttcgacaaggacggcatcgtggccgacgagagccagaacatgcagttcatgagcagccagagcatgaagctgccccccagcaacagcgccctgcccaaccaggccctgggcagcatcgccggcctgggcatgcagaacctgaacagcgtgagacagaacggcaaccccagcatgttcggcgtgggcaacaccgccgcccagcccagaggcatgcagcagccccccgcccagcccctgagcagcagccagcccaacctgagagcccaggtgcccccccccctgctgagcccccaggtgcccgtgagcctgctgaagtacgcccccaacaacggcggcctgaaccccctgttcggcccccagcaggtggccatgctgaaccagctgagccagctgaaccagctgagccagatcagccagctgcagagactgctggcccagcagcagagagcccagagccagagaagcgtgcccagcggcaacagaccccagcaggaccagcagggcagacccctgagcgtgcagcagcagatgatgcagcagagcagacagctggaccccaacctgctggtgaagcagcagaccccccccagccagcagcagcccctgcaccagcccgccatgaagagcttcctggacaacgtgatgccccacaccacccccgagctgcagaagggccccagccccatcaacgccttcagcaacttccccatcggcctgaacagcaacctgaacgtgaacatggacatgaacagcatcaaggagccccagagcagactgagaaagtggaccaccgtggacagcatcagcgtgaacaccagcctggaccagaacagcagcaagcacggcgccatcagcagcggcttcagactggaggagagccccttcgtgccctacgacttcatgaacagcagcaccagccccgccagcccccccggcagcatcggcgacggctggcccagagccaagagccccaacggcagcagcagcgtgaactggccccccgagttcagacccggcgagccctggaagggctaccccaacatcgaccccgagaccgacccctacgtgacccccggcagcgtgatcaacaacctgagcatcaacaccgtgagagaggtggaccacctgagagacagaaacagcggcagcagcagcagcctgaacaccaccctgcccagcaccagcgcctggagcagcatcagagccagcaactacaacgtgcccctgagcagcaccgcccagagcaccagcgccagaaacagcgacagcaagctgacctggagccccggcagcgtgaccaacaccagcctggcccacgagctgtggaaggtgcccctgccccccaagaacatcaccgcccccagcagacccccccccggcctgaccggccagaagccccccctgagcacctgggacaacagccccctgagaatcggcggcggctggggcaacagcgacgccagatacacccccggcagcagctggggcgagagcagcagcggcagaatcaccaactggctggtgctgaagaacctgaccccccagatcgacggcagcaccctgagaaccctgtgcatgcagcacggccccctgatcaccttccacctgaacctgccccacggcaacgccctggtgagatacagcagcaaggaggaggtggtgaaggcccagaagagcctgcacatgtgcgtgctgggcaacaccaccatcctggccgagttcgccagcgaggaggagatcagcagattcttcgcccagagccagagcctgacccccagccccggctggcagagcctgggcagcagccagagcagactgggcagcctggactgcagccacagcttcagcagcagaaccgacctgaaccactggaacggcgccggcctgagcggcaccaactgcggcgacctgcacggcaccagcctgtggggcaccccccactacagcaccagcctgtggggcccccccagcagcagcgaccccagaggcatcagcagccccagccccatcaacgccttcctgagcgtggaccacctgggcggcggcggcgagagcatgtag

SEQ ID NO: 103359 - DNA, 1323 bp, synthetic construct
  misc_feature 1..1323: note = Description of Artificial Sequence: Synthetic coding sequence
  source 1..1323: mol_type = other DNA
atggacatgaacagcatcaaggagccccagagcagactgagaaagtggaccaccgtggacagcatcagcgtgaacaccagcctggaccagaacagcagcaagcacggcgccatcagcagcggcttcagactggaggagagccccttcgtgccctacgacttcatgaacagcagcaccagccccgccagcccccccggcagcatcggcgacggctggcccagagccaagagccccaacggcagcagcagcgtgaactggccccccgagttcagacccggcgagccctggaagggctaccccaacatcgaccccgagaccgacccctacgtgacccccggcagcgtgatcaacaacctgagcatcaacaccgtgagagaggtggaccacctgagagacagaaacagcggcagcagcagcagcctgaacaccaccctgcccagcaccagcgcctggagcagcatcagagccagcaactacaacgtgcccctgagcagcaccgcccagagcaccagcgccagaaacagcgacagcaagctgacctggagccccggcagcgtgaccaacaccagcctggcccacgagctgtggaaggtgcccctgccccccaagaacatcaccgcccccagcagacccccccccggcctgaccggccagaagccccccctgagcacctgggacaacagccccctgagaatcggcggcggctggggcaacagcgacgccagatacacccccggcagcagctggggcgagagcagcagcggcagaatcaccaactggctggtgctgaagaacctgaccccccagatcgacggcagcaccctgagaaccctgtgcatgcagcacggccccctgatcaccttccacctgaacctgccccacggcaacgccctggtgagatacagcagcaaggaggaggtggtgaaggcccagaagagcctgcacatgtgcgtgctgggcaacaccaccatcctggccgagttcgccagcgaggaggagatcagcagattcttcgcccagagccagagcctgacccccagccccggctggcagagcctgggcagcagccagagcagactgggcagcctggactgcagccacagcttcagcagcagaaccgacctgaaccactggaacggcgccggcctgagcggcaccaactgcggcgacctgcacggcaccagcctgtggggcaccccccactacagcaccagcctgtggggcccccccagcagcagcgaccccagaggcatcagcagccccagccccatcaacgccttcctgagcgtggaccacctgggcggcggcggcgagagcatgtag

SEQ ID NO: 103360 - DNA, 5073 bp, synthetic construct
  misc_feature 1..5073: note = Description of Artificial Sequence: Synthetic coding sequence
  source 1..5073: mol_type = other DNA
atggccaccggcagcgcccagggcaacttcaccggccacaccaagaagaccaacggcaacaacggcaccaacggcgccctggtgcagagccccagcaaccagagcgccctgggcgccggcggcgccaacagcaacggcagcgccgccagagtgtggggcgtggccaccggcagcagcagcggcctggcccactgcagcgtgagcggcggcgacggcaagatggacaccatgatcggcgacggcagaagccagaactgctggggcgccagcaacagcaacgccggcatcaacctgaacctgaaccccaacgccaaccccgccgcctggcccgtgctgggccacgagggcaccgtggccaccggcaaccccagcagcatctgcagccccgtgagcgccatcggccagaacatgggcaaccagaacggcaaccccaccggcaccctgggcgcctggggcaacctgctgccccaggagagcaccgagccccagaccagcaccagccagaacgtgagcttcagcgcccagccccagaacctgaacaccgacggccccaacaacaccaaccccatgaacagcagccccaaccccatcaacgccatgcagaccaacggcctgcccaactggggcatggccgtgggcatgggcgccatcatccccccccacctgcagggcctgcccggcgccaacggcagcagcgtgagccaggtgagcggcggcagcgccgagggcatcagcaacagcgtgtggggcctgagccccggcaaccccgccaccggcaacagcaacagcggcttcagccagggcaacggcgacaccgtgaacagcgccctgagcgccaagcagaacggcagcagcagcgccgtgcagaaggagggcagcggcggcaacgcctgggacagcggcccccccgccggccccggcatcctggcctggggcagaggcagcggcaacaacggcgtgggcaacatccacagcggcgcctggggccaccccagcagaagcaccagcaacggcgtgaacggcgagtggggcaagccccccaaccagcacagcaacagcgacatcaacggcaagggcagcaccggctgggagagccccagcgtgaccagccagaaccccaccgtgcagcccggcggcgagcacatgaacagctgggccaaggccgccagcagcggcaccaccgccagcgagggcagcagcgacggcagcggcaaccacaacgagggcagcaccggcagagagggcaccggcgagggcagaagaagagacaagggcatcatcgaccagggccacatccagctgcccagaaacgacctggaccccagagtgctgagcaacaccggctggggccagacccccgtgaagcagaacaccgcctgggagttcgaggagagccccagaagcgagagaaagaacgacaacggcaccgaggcctggggctgcgccgccacccaggccagcaacagcggcggcaagaacgacggcagcatcatgaacagcaccaacaccagcagcgtgagcggctgggtgaacgccccccccgccgccgtgcccgccaacaccggctggggcgacagcaacaacaaggcccccagcggccccggcgtgtggggcgacagcatcagcagcaccgccgtgagcaccgccgccgccgccaagagcggccacgcctggagcggcgccgccaaccaggaggacaagagccccacctggggcgagccccccaagcccaagagccagcactggggcgacggccagagaagcaaccccgcctggagcgccggcggcggcgactgggccgacagcagcagcgtgctgggccacctgggcgacggcaagaagaacggcagcggctgggacgccgacagcaacagaagcggcagcggctggaacgacaccaccagaagcggcaacagcggctggggcaacagcaccaacaccaaggccaaccccggcaccaactggggcgagaccctgaagcccggcccccagcagaactgggccagcaagccccaggacaacaacgtgagcaactggggcggcgccgccagcgtgaagcagaccggcaccggctggatcggcggccccgtgcccgtgaagcagaaggacagcagcgaggccaccggctgggaggagcccagcccccccagcatcagaagaaagatggagatcgacgacggcaccagcgcctggggcgaccccagcaactacaacaacaagaccgtgaacatgtgggacagaaacaaccccgtgatccagagcagcaccaccaccaacaccaccaccaccaccaccaccaccaccagcaacaccacccacagagtggagaccccccccccccaccaggccggcacccagctgaacagaagccccctgctgggccccggcagaaaggtgagcagcggctggggcgagatgcccaacgtgcacagcaagaccgagaacagctggggcgagcccagcagccccagcaccctggtggacaacggcaccgccgcctggggcaagccccccagcagcggcagcggctggggcgaccaccccgccgagccccccgtggccttcggcagagccggcgcccccgtggccgccagcgccctgtgcaagcccgccagcaagagcatgcaggagggctggggcagcggcggcgacgagatgaacctgagcaccagccagtgggaggacgaggagggcgacgtgtggaacaacgccgccagccaggagagcaccagcagctgcagcagctggggcaacgcccccaagaagggcctgcagaagggcatgaagaccagcggcaagcaggacgaggcctggatcatgagcagactgatcaagcagctgaccgacatgggcttccccagagagcccgccgaggaggccctgaagagcaacaacatgaacctggaccaggccatgagcgccctgctggagaagaaggtggacgtggacaagagaggcctgggcgtgaccgaccacaacggcatggccgccaagcccctgggctgcagaccccccatcagcaaggagagcagcgtggacagacccaccttcctggacaaggacggcggcctggtggaggagcccacccccagccccttcctgcccagccccagcctgaagctgcccctgagccacagcgccctgcccagccaggccctgggcggcatcgccagcggcctgggcatgcagaacctgaacagcagcagacagatccccagcggcaacctgggcatgttcggcaacagcggcgccgcccaggccagaaccatgcagcagcccccccagccccccgtgcagcccctgaacagcagccagcccagcctgagagcccaggtgccccagttcctgagcccccaggtgcaggcccagctgctgcagttcgccgccaagaacatcggcctgaaccccgccctgctgaccagccccatcaacccccagcacatgaccatgctgaaccagctgtaccagctgcagctggcctaccagagactgcagatccagcagcagatgctgcaggcccagagaaacgtgagcggcagcatgagacagcaggagcagcaggtggccagaaccatcaccaacctgcagcagcagatccagcagcaccagagacagctggcccaggccctgctggtgaagcagcccccccccccccccccccccccccacctgagcctgcaccccagcgccggcaagagcgccatggacagcttccccagccacccccagacccccggcctgcccgacctgcagaccaaggagcagcagagcagccccaacaccttcgccccctaccccctggccggcctgaaccccaacatgaacgtgaacagcatggacatgaccggcggcctgagcgtgaaggaccccagccagagccagagcagactgccccagtggacccaccccaacagcatggacaacctgcccagcgccgccagccccctggagcagaaccccagcaagcacggcgccatccccggcggcctgagcatcggcccccccggcaagagcagcatcgacgacagctacggcagatacgacctgatccagaacagcgagagccccgccagcccccccgtggccgtgccccacagctggagcagagccaagagcgacagcgacaagatcagcaacggcagcagcatcaactggccccccgagttccaccccggcgtgccctggaagggcctgcagaacatcgaccccgagaacgaccccgacgtgacccccggcagcgtgcccaccggccccaccatcaacaccaccatccaggacgtgaacagatacctgctgaagagcggcggcaagctgagcgacatcaagagcacctggagcagcggccccaccagccacacccaggccagcctgagccacgagctgtggaaggtgcccagaaacagcaccgcccccaccagacccccccccggcctgaccaaccccaagcccagcagcacctggggcgccagccccctgggctggaccagcagctacagcagcggcagcgcctggagcaccgacaccagcggcagaaccagcagctggctggtgctgagaaacctgaccccccagatcgacggcagcaccctgagaaccctgtgcctgcagcacggccccctgatcaccttccacctgaacctgacccagggcaacgccgtggtgagatacagcagcaaggaggaggccgccaaggcccagaagagcctgcacatgtgcgtgctgggcaacaccaccatcctggccgagttcgccggcgaggaggaggtgaacagattcctggcccagggccaggccctgccccccaccagcagctggcagagcagcagcgccagcagccagcccagactgagcgccgccggcagcagccacggcctggtgagaagcgacgccggccactggaacgccccctgcctgggcggcaagggcagcagcgagctgctgtggggcggcgtgccccagtacagcagcagcctgtggggcccccccagcgccgacgacagcagagtgatcggcagccccacccccctgaccaccctgctgcccggcgacctgctgagcggcgagagcctgtag

SEQ ID NO: 103361 - DNA, 5181 bp, synthetic construct
  misc_feature 1..5181: note = Description of Artificial Sequence: Synthetic coding sequence
  source 1..5181: mol_type = other DNA
atggccaccggcagcgcccagggcaacttcaccggccacaccaagaagaccaacggcaacaacggcaccaacggcgccctggtgcagagccccagcaaccagagcgccctgggcgccggcggcgccaacagcaacggcagcgccgccagagtgtggggcgtggccaccggcagcagcagcggcctggcccactgcagcgtgagcggcggcgacggcaagatggacaccatgatcggcgacggcagaagccagaactgctggggcgccagcaacagcaacgccggcatcaacctgaacctgaaccccaacgccaaccccgccgcctggcccgtgctgggccacgagggcaccgtggccaccggcaaccccagcagcatctgcagccccgtgagcgccatcggccagaacatgggcaaccagaacggcaaccccaccggcaccctgggcgcctggggcaacctgctgccccaggagagcaccgagccccagaccagcaccagccagaacgtgagcttcagcgcccagccccagaacctgaacaccgacggccccaacaacaccaaccccatgaacagcagccccaaccccatcaacgccatgcagaccaacggcctgcccaactggggcatggccgtgggcatgggcgccatcatccccccccacctgcagggcctgcccggcgccaacggcagcagcgtgagccaggtgagcggcggcagcgccgagggcatcagcaacagcgtgtggggcctgagccccggcaaccccgccaccggcaacagcaacagcggcttcagccagggcaacggcgacaccgtgaacagcgccctgagcgccaagcagaacggcagcagcagcgccgtgcagaaggagggcagcggcggcaacgcctgggacagcggcccccccgccggccccggcatcctggcctggggcagaggcagcggcaacaacggcgtgggcaacatccacagcggcgcctggggccaccccagcagaagcaccagcaacggcgtgaacggcgagtggggcaagccccccaaccagcacagcaacagcgacatcaacggcaagggcagcaccggctgggagagccccagcgtgaccagccagaaccccaccgtgcagcccggcggcgagcacatgaacagctgggccaaggccgccagcagcggcaccaccgccagcgagggcagcagcgacggcagcggcaaccacaacgagggcagcaccggcagagagggcaccggcgagggcagaagaagagacaagggcatcatcgaccagggccacatccagctgcccagaaacgacctggaccccagagtgctgagcaacaccggctggggccagacccccgtgaagcagaacaccgcctgggagttcgaggagagccccagaagcgagagaaagaacgacaacggcaccgaggcctggggctgcgccgccacccaggccagcaacagcggcggcaagaacgacggcagcatcatgaacagcaccaacaccagcagcgtgagcggctgggtgaacgccccccccgccgccgtgcccgccaacaccggctggggcgacagcaacaacaaggcccccagcggccccggcgtgtggggcgacagcatcagcagcaccgccgtgagcaccgccgccgccgccaagagcggccacgcctggagcggcgccgccaaccaggaggacaagagccccacctggggcgagccccccaagcccaagagccagcactggggcgacggccagagaagcaaccccgcctggagcgccggcggcggcgactgggccgacagcagcagcgtgctgggccacctgggcgacggcaagaagaacggcagcggctgggacgccgacagcaacagaagcggcagcggctggaacgacaccaccagaagcggcaacagcggctggggcaacagcaccaacaccaaggccaaccccggcaccaactggggcgagaccctgaagcccggcccccagcagaactgggccagcaagccccaggacaacaacgtgagcaactggggcggcgccgccagcgtgaagcagaccggcaccggctggatcggcggccccgtgcccgtgaagcagaaggacagcagcgaggccaccggctgggaggagcccagcccccccagcatcagaagaaagatggagatcgacgacggcaccagcgcctggggcgaccccagcaactacaacaacaagaccgtgaacatgtgggacagaaacaaccccgtgatccagagcagcaccaccaccaacaccaccaccaccaccaccaccaccaccagcaacaccacccacagagtggagaccccccccccccaccaggccggcacccagctgaacagaagccccctgctgggccccgtgagcagcggctggggcgagatgcccaacgtgcacagcaagaccgagaacagctggggcgagcccagcagccccagcaccctggtggacaacggcaccgccgcctggggcaagccccccagcagcggcagcggctggggcgaccaccccgccgagccccccgtggccttcggcagagccggcgcccccgtggccgccagcgccctgtgcaagcccgccagcaagagcatgcaggagggctggggcagcggcggcgacgagatgaacctgagcaccagccagtgggaggacgaggagggcgacgtgtggaacaacgccgccagccaggagagcaccagcagctgcagcagctggggcaacgcccccaagaagggcctgcagaagggcatgaagaccagcggcaagcaggacgaggcctggatcatgagcagactgatcaagcagctgaccgacatgggcttccccagagagcccgccgaggaggccctgaagagcaacaacatgaacctggaccaggccatgagcgccctgctggagaagaaggtggacgtggacaagagaggcctgggcgtgaccgaccacaacggcatggccgccaagcccctgggctgcagaccccccatcagcaaggagagcagcgtggacagacccaccttcctggacaaggacggcggcctggtggaggagcccacccccagccccttcctgcccagccccagcctgaagctgcccctgagccacagcgccctgcccagccaggccctgggcggcatcgccagcggcctgggcatgcagaacctgaacagcagcagacagatccccagcggcaacctgggcatgttcggcaacagcggcgccgcccaggccagaaccatgcagcagcccccccagccccccgtgcagcccctgaacagcagccagcccagcctgagagcccaggtgccccagttcctgagcccccaggtgcaggcccagctgctgcagttcgccgccaagaacatcggcctgaaccccgccctgctgaccagccccatcaacccccagcacatgaccatgctgaaccagctgtaccagctgcagctggcctaccagagactgcagatccagcagcagatgctgcaggcccagagaaacgtgagcggcagcatgagacagcaggagcagcaggtggccagaaccatcaccaacctgcagcagcagatccagcagcaccagagacagctggcccaggccctgctggtgaagcagcccccccccccccccccccccccccacctgagcctgcaccccagcgccggcaagagcgccatggacagcttccccagccacccccagacccccggcctgcccgacctgcagaccaaggagcagcagagcagccccaacaccttcgccccctaccccctggccggcctgaaccccaacatgaacgtgaacagcatggacatgaccggcggcctgagcgtgaaggaccccagccagagccagagcagactgccccagtggacccaccccaacagcatggacaacctgcccagcgccgccagccccctggagcagaaccccagcaagcacggcgccatccccggcggcctgagcatcggcccccccggcaagagcagcatcgacgacagctacggcagatacgacctgatccagaacagcgagagccccgccagcccccccgtggccgtgccccacagctggagcagagccaagagcgacagcgacaagatcagcaacggcagcagcatcaactggccccccgagttccaccccggcgtgccctggaagggcctgcagaacatcgaccccgagaacgaccccgacgtgacccccggcagcgtgcccaccggccccaccatcaacaccaccatccaggacgtgaacagatacctgctgaagagcggcggcagcagcccccccagcagccagaacgccaccctgcccagcagcagcgcctggcccctgagcgccagcggctacagcagcagcttcagcagcatcgccagcgcccccagcgtggccggcaagctgagcgacatcaagagcacctggagcagcggccccaccagccacacccaggccagcctgagccacgagctgtggaaggtgcccagaaacagcaccgcccccaccagacccccccccggcctgaccaaccccaagcccagcagcacctggggcgccagccccctgggctggaccagcagctacagcagcggcagcgcctggagcaccgacaccagcggcagaaccagcagctggctggtgctgagaaacctgaccccccagatcgacggcagcaccctgagaaccctgtgcctgcagcacggccccctgatcaccttccacctgaacctgacccagggcaacgccgtggtgagatacagcagcaaggaggaggccgccaaggcccagaagagcctgcacatgtgcgtgctgggcaacaccaccatcctggccgagttcgccggcgaggaggaggtgaacagattcctggcccagggccaggccctgccccccaccagcagctggcagagcagcagcgccagcagccagcccagactgagcgccgccggcagcagccacggcctggtgagaagcgacgccggccactggaacgccccctgcctgggcggcaagggcagcagcgagctgctgtggggcggcgtgccccagtacagcagcagcctgtggggcccccccagcgccgacgacagcagagtgatcggcagccccacccccctgaccaccctgctgcccggcgacctgctgagcggcgagagcctgtag

SEQ ID NO: 103362 - DNA, 5181 bp, synthetic construct; identical to SEQ ID NO: 103361
  misc_feature 1..5181: note = Description of Artificial Sequence: Synthetic coding sequence
  source 1..5181: mol_type = other DNA

SEQ ID NO: 103363 - DNA, 5073 bp, synthetic construct; identical to SEQ ID NO: 103360
  misc_feature 1..5073: note = Description of Artificial Sequence: Synthetic coding sequence
  source 1..5073: mol_type = other DNA

SEQ ID NO: 103364 - DNA, 5073 bp, synthetic construct; identical to SEQ ID NO: 103360
  misc_feature 1..5073: note = Description of Artificial Sequence: Synthetic coding sequence
  source 1..5073: mol_type = other DNA

SEQ ID NO: 103365 - DNA, 5181 bp, synthetic construct; identical to SEQ ID NO: 103361
  misc_feature 1..5181: note = Description of Artificial Sequence: Synthetic coding sequence
  source 1..5181: mol_type = other DNA

SEQ ID NO: 103366 - DNA, 1959 bp, synthetic construct
  misc_feature 1..1959: note = Description of Artificial Sequence: Synthetic coding sequence
  source 1..1959: mol_type = other DNA
atgggcggctggaagggccccggccagagaagaggcaaggagggccccgaggccagaagaagagccgccgagagaggcggcggcggcggcggcggcggcgtgcccgcccccagaagccccgccagagagcccagacccagaagctgcctgctgctgccccccccctggggcgccgccatgacccccgacctgctgaacttcaagaagggctggatgagcatcctggacgagcccggcgagccccccagccccagcctgaccaccaccagcaccagccagtggaagaagcactggttcgtgctgaccgacagcagcctgaagtactacagagacagcaccgccgaggaggccgacgagctggacggcgagatcgacctgagaagctgcaccgacgtgaccgagtacgccgtgcagagaaactacggcttccagatccacaccaaggacgccgtgtacaccctgagcgccatgaccagcggcatcagaagaaactggatcgaggccctgagaaagaccgtgagacccaccagcgcccccgacgtgaccaagctgagcgacagcaacaaggagaacgccctgcacagctacagcacccagaagggccccctgaaggccggcgagcagagagccggcagcgaggtgatcagcagaggcggccccagaaaggccgacggccagagacaggccctggactacgtggagctgagccccctgacccaggccagcccccagagagccagaacccccgccagaacccccgacagactggccaagcaggaggagctggagagagacctggcccagagaagcgaggagagaagaaagtggttcgaggccaccgacagcagaacccccgaggtgcccgccggcgagggccccagaagaggcctgggcgcccccctgaccgaggaccagcagaacagactgagcgaggagatcgagaagaagtggcaggagctggagaagctgcccctgagagagaacaagagagtgcccctgaccgccctgctgaaccagagcagaggcgagagaagaggcccccccagcgacggccacgaggccctggagaaggaggtgcaggccctgagagcccagctggaggcctggagactgcagggcgaggccccccagagcgccctgagaagccaggaggacggccacatcccccccggctacatcagccaggaggcctgcgagagaagcctggccgagatggagagcagccaccagcaggtgatggaggagctgcagagacaccacgagagagagctgcagagactgcagcaggagaaggagtggctgctggccgaggagaccgccgccaccgccagcgccatcgaggccatgaagaaggcctaccaggaggagctgagcagagagctgagcaagaccagaagcctgcagcagggccccgacggcctgagaaagcagcaccagagcgacgtggaggccctgaagagagagctgcaggtgctgagcgagcagtacagccagaagtgcctggagatcggcgccctgatgagacaggccgaggagagagagcacaccctgagaagatgccagcaggagggccaggagctgctgagacacaaccaggagctgcacggcagactgagcgaggagatcgaccagctgagaggcttcatcgccagccagggcatgggcaacggctgcggcagaagcaacgagagaagcagctgcgagctggaggtgctgctgagagtgaaggagaacgagctgcagtacctgaagaaggaggtgcagtgcctgagagacgagctgcagatgatgcagaaggacaagagattcaccagcggcaagtaccaggacgtgtacgtggagctgagccacatcaagaccagaagcgagagagagatcgagcagctgaaggagcacctgagactggccatggccgccctgcaggagaaggagagcatgagaaacagcctggccgagtag

SEQ ID NO: 103367 - DNA, 7098 bp, synthetic construct
  misc_feature 1..7098: note = Description of Artificial Sequence: Synthetic coding sequence
  source 1..7098: mol_type = other DNA
atggaggaggtgcccggcgacgccctgtgcgagcacttcgaggccaacatcctgacccagaacagatgccagaactgcttccaccccgaggaggcccacggcgccagataccaggagctgagaagccccagcggcgccgaggtgccctactgcgacctgcccagatgcccccccgcccccgaggaccccctgagcgccagcaccagcggctgccagagcgtggtggaccccggcctgagacccggccccaagagaggccccagccccagcgccggcctgcccgaggagggccccaccgccgcccccagaagcagaagcagagagctggaggccgtgccctacctggagggcctgaccaccagcctgtgcggcagctgcaacgaggaccccggcagcgaccccaccagcagccccgacagcgccacccccgacgacaccagcaacagcagcagcgtggactgggacaccgtggagagacaggaggaggaggcccccagctgggacgagctggccgtgatgatccccagaagacccagagagggccccagagccgacagcagccagagagcccccagcctgctgaccagaagccccgtgggcggcgacgccgccggccagaagaaggaggacaccggcggcggcggcagaagcgccggccagcactgggccagactgagaggcgagagcggcctgagcctggagagacacagaagcaccctgacccaggccagcagcatgaccccccacagcggccccagaagcaccaccagccaggccagccccgcccagagagacaccgcccaggccgccagcaccagagagatccccagagccagcagcccccacagaatcacccagagagacaccagcagagccagcagcacccagcaggagatcagcagagccagcagcacccagcaggagaccagcagagccagcagcacccaggaggacacccccagagccagcagcacccaggaggacacccccagagccagcagcacccagtggaacacccccagagccagcagccccagcagaagcacccagctggacaaccccagaaccagcagcacccagcaggacaacccccagaccagcttccccacctgcaccccccagagagagaaccccagaaccccctgcgtgcagcaggacgaccccagagccagcagccccaacagaaccacccagagagagaacagcagaaccagctgcgcccagagagacaaccccaaggccagcagaaccagcagccccaacagagccaccagagacaaccccagaaccagctgcgcccagagagacaaccccagagccagcagccccagcagagccaccagagacaaccccaccaccagctgcgcccagagagacaaccccagagccagcagaaccagcagccccaacagagccaccagagacaaccccagaaccagctgcgcccagagagacaaccccagagccagcagccccagcagagccaccagagacaaccccaccaccagctgcgcccagagagacaaccccagagccagcagaaccagcagccccaacagagccaccagagacaaccccagaaccagctgcgcccagagagacaaccccagagccagcagccccaacagagccgccagagacaaccccaccaccagctgcgcccagagagacaaccccagagccagcagaaccagcagccccaacagagccaccagagacaaccccagaaccagctgcgcccagagagacaaccccagagccagcagccccaacagagccaccagagacaaccccaccaccagctgcgcccagagagacaaccccagagccagcagaaccagcagccccaacagagccaccagagacaaccccagaaccagctgcgcccagagagacaaccccagagccagcagccccaacagaaccacccagcaggacagccccagaaccagctgcgccagaagagacgaccccagagccagcagccccaacagaaccatccagcaggagaaccccagaaccagctgcgccctgagagacaaccccagagccagcagccccagcagaaccatccagcaggagaaccccagaaccagctgcgcccagagagacgaccccagagccagcagccccaacagaaccacccagcaggagaaccccagaaccagctgcgccagaagagacaaccccagagccagcagcagaaacagaaccatccagagagacaaccccagaaccagctgcgcccagagagacaaccccagagccagcagccccaacagaaccatccagcaggagaacctgagaaccagctgcaccagacaggacaaccccagaaccagcagccccaacagagccaccagagacaaccccagaaccagctgcgcccagagagacaacctgagagccagcagccccatcagagccacccagcaggacaaccccagaacctgcatccagcagaacatccccagaagcagcagcacccagcaggacaaccccaagaccagctgcaccaagagagacaacctgagacccacctgcacccagagagacagaacccagagcttcagcttccagagagacaaccccggcaccagcagcagccagtgctgcacccagaaggagaacctgagacccagcagcccccacagaagcacccagtggaacaaccccagaaacagcagcccccacagaaccaacaaggacatcccctgggccagcttccccctgagacccacccagagcgacggccccagaaccagcagccccagcagaagcaagcagagcgaggtgccctgggccagcatcgccctgagacccacccagggcgacagaccccagaccagcagccccagcagacccgcccagcacgaccccccccagagcagcttcggccccacccagtacaacctgcccagcagagccaccagcagcagccacaaccccggccaccagagcaccagcagaaccagcagccccgtgtaccccgccgcctacggcgcccccctgaccagccccgagcccagccagcccccctgcgccgtgtgcatcggccacagagacgcccccagagccagcagcccccccagatacctgcagcacgaccccttccccttcttccccgagcccagagcccccgagagcgagcccccccaccacgagcccccctacatcccccccgccgtgtgcatcggccacagagacgcccccagagccagcagcccccccagacacacccagttcgaccccttccccttcctgcccgacaccagcgacgccgagcaccagtgccagagcccccagcacgagcccctgcagctgcccgcccccgtgtgcatcggctacagagacgcccccagagccagcagcccccccagacaggcccccgagcccagcctgctgttccaggacctgcccagagccagcaccgagagcctggtgcccagcatggacagcctgcacgagtgcccccacatccccacccccgtgtgcatcggccacagagacgcccccagcttcagcagcccccccagacaggcccccgagcccagcctgttcttccaggacccccccggcaccagcatggagagcctggcccccagcaccgacagcctgcacggcagccccgtgctgatcccccaggtgtgcatcggccacagagacgcccccagagccagcagcccccccagacacccccccagcgacctggccttcctggcccccagccccagccccggcagcagcggcggcagcagaggcagcgccccccccggcgagaccagacacaacctggagagagaggagtacaccgtgctggccgacctgcccccccccagaagactggcccagagacagcccggcccccaggcccagtgcagcagcggcggcagaacccacagccccggcagagccgaggtggagagactgttcggccaggagagaagaaagagcgaggccgccggcgccttccaggcccaggacgagggcagaagccagcagcccagccagggccagagccagctgctgagaagacagagcagccccgcccccagcagacaggtgaccatgctgcccgccaagcaggccgagctgaccagaagaagccaggccgagcccccccacccctggagccccgagaagagacccgagggcgacagacagctgcagggcagccccctgccccccagaaccagcgccagaacccccgagagagagctgagaacccagagacccctggagagcggccaggccggccccagacagcccctgggcgtgtggcagagccaggaggagccccccggcagccagggcccccacagacacctggagagaagctggagcagccaggagggcggcctgggccccggcggctggtggggctgcggcgagcccagcctgggcgccgccaaggcccccgagggcgcctggggcggcaccagcagagagtacaaggagagctggggccagcccgaggcctgggaggagaagcccacccacgagctgcccagagagctgggcaagagaagccccctgaccagcccccccgagaactggggcggccccgccgagagcagccagagctggcacagcggcacccccaccgccgtgggctggggcgccgagggcgcctgcccctaccccagaggcagcgagagaagacccgagctggactggagagacctgctgggcctgctgagagcccccggcgagggcgtgtgggccagagtgcccagcctggactgggagggcctgctggagctgctgcaggccagactgcccagaaaggaccccgccggccacagagacgacctggccagagccctgggccccgagctgggcccccccggcaccaacgacgtgcccgagcaggagagccacagccagcccgagggctgggccgaggccacccccgtgaacggccacagccccgccctgcagagccagagccccgtgcagctgcccagccccgcctgcaccagcacccagtggcccaagatcaaggtgaccagaggccccgccaccgccaccctggccggcctggagcagaccggccccctgggcagcagaagcaccgccaagggccccagcctgcccgagctgcagttccagcccgaggagcccgaggagagcgagcccagcagaggccaggaccccctgaccgaccagaagcaggccgacagcgccgacaagagacccgccgagggcaaggccggcagccccctgaagggcagactggtgaccagctggagaatgcccggcgacagacccaccctgttcaaccccttcctgctgagcctgggcgtgctgagatggagaagacccgacctgctgaacttcaagaagggctggatgagcatcctggacgagcccggcgagccccccagccccagcctgaccaccaccagcaccagccagtggaagaagcactggttcgtgctgaccgacagcagcctgaagtactacagagacagcaccgccgaggaggccgacgagctggacggcgagatcgacctgagaagctgcaccgacgtgaccgagtacgccgtgcagagaaactacggcttccagatccacaccaaggacgccgtgtacaccctgagcgccatgaccagcggcatcagaagaaactggatcgaggccctgagaaagaccgtgagacccaccagcgcccccgacgtgaccaagctgagcgacagcaacaaggagaacgccctgcacagctacagcacccagaagggccccctgaaggccggcgagcagagagccggcagcgaggtgatcagcagaggcggccccagaaaggccgacggccagagacaggccctggactacgtggagctgagccccctgacccaggccagcccccagagagccagaacccccgccagaacccccgacagactggccaagcaggaggagctggagagagacctggcccagagaagcgaggagagaagaaagtggttcgaggccaccgacagcagaacccccgaggtgcccgccggcgagggccccagaagaggcctgggcgcccccctgaccgaggaccagcagaacagactgagcgaggagatcgagaagaagtggcaggagctggagaagctgcccctgagagagaacaagagagtgcccctgaccgccctgctgaaccagagcagaggcgagagaagaggcccccccagcgacggccacgaggccctggagaaggaggtgcaggccctgagagcccagctggaggcctggagactgcagggcgaggccccccagagcgccctgagaagccaggaggacggccacatcccccccggctacatcagccaggaggcctgcgagagaagcctggccgagatggagagcagccaccagcaggtgatggaggagctgcagagacaccacgagagagagctgcagagactgcagcaggagaaggagtggctgctggccgaggagaccgccgccaccgccagcgccatcgaggccatgaagaaggcctaccaggaggagctgagcagagagctgagcaagaccagaagcctgcagcagggccccgacggcctgagaaagcagcaccagagcgacgtggaggccctgaagagagagctgcaggtgctgagcgagcagtacagccagaagtgcctggagatcggcgccctgatgagacaggccgaggagagagagcacaccctgagaagatgccagcaggagggccaggagctgctgagacacaaccaggagctgcacggcagactgagcgaggagatcgaccagctgagaggcttcatcgccagccagggcatgggcaacggctgcggcagaagcaacgagagaagcagctgcgagctggaggtgctgctgagagtgaaggagaacgagctgcagtacctgaagaaggaggtgcagtgcctgagagacgagctgcagatgatgcagaaggacaagagattcaccagcggcaagtaccaggacgtgtacgtggagctgagccacatcaagaccagaagcgagagagagatcgagcagctgaaggagcacctgagactggccatggccgccctgcaggagaaggagagcatgagaaacagcctggccgagtag

SEQ ID NO: 103368 - DNA, 1296 bp, synthetic construct
  misc_feature 1..1296: note = Description of Artificial Sequence: Synthetic coding sequence
  source 1..1296: mol_type = other DNA
atgggcggctggaagggccccggccagagaagaggcaaggagggccccgaggccagaagaagagccgccgagagaggcggcggcggcggcggcggcggcgtgcccgcccccagaagccccgccagagagcccagacccagaagctgcctgctgctgccccccccctggggcgccgccatgacccccgacctgctgaacttcaagaagggctggatgagcatcctggacgagcccggcgagccccccagccccagcctgaccaccaccagcaccagccagtggaagaagcactggttcgtgctgaccgacagcagcctgaagtactacagagacagcaccgccgaggaggccgacgagctggacggcgagatcgacctgagaagctgcaccgacgtgaccgagtacgccgtgcagagaaactacggcttccagatccacaccaaggacgccgtgtacaccctgagcgccatgaccagcggcatcagaagaaactggatcgaggccctgagaaagaccgtgagacccaccagcgcccccgacgtgaccaagctgagcgacagcaacaaggagaacgccctgcacagctacagcacccagaagggccccctgaaggccggcgagcagagagccggcagcgaggtgatcagcagaggcggccccagaaaggccgacggccagagacaggccctggactacgtggagctgagccccctgacccaggccagcccccagagagccagaacccccgccagaacccccgacagactggccaagcaggaggagctggagagagacctggcccagagaagcgaggagagaagaaagtggttcgaggccaccgacagcagaacccccgaggtgcccgccggcgagggccccagaagaggcctgggcgcccccctgaccgaggaccagcagaacagactgagcgaggagatcgagaagaagtggcaggagctggagaagctgcccctgagagagaacaagagagtgcccctgaccgccctgctgaaccagagcagaggcgagagaagaggcccccccagcgacggccacgaggccctggagaaggaggtgcaggccctgagagcccagctggaggcctggagactgcagggcgaggccccccagagcgccctgagaagccaggaggacggccacatcccccccggctacatcagccagctggtgggcgtgatcaccgtgcccgtgctgcagaccagacccctgagcagcgagagactgtgcgacctgcccaaggtgaccccccccgccggcctgaagggcggcatctag

SEQ ID NO: 103369 - DNA, 5070 bp, synthetic construct
  misc_feature 1..5070: note = Description of Artificial Sequence: Synthetic coding sequence
  source 1..5070: mol_type = other DNA
atggaggaggtgcccggcgacgccctgtgcgagcacttcgaggccaacatcctgacccagaacagatgccagaactgcttccaccccgaggaggcccacggcgccagataccaggagctgagaagccccagcggcgccgaggtgccctactgcgacctgcccagatgcccccccgcccccgaggaccccctgagcgccagcaccagcggctgccagagcgtggtggaccccggcctgagacccggccccaagagaggccccagccccagcgccggcctgcccgaggagggccccaccgccgcccccagaagcagaagcagagagctggaggccgtgccctacctggagggcctgaccaccagcctgtgcggcagctgcaacgaggaccccggcagcgaccccaccagcagccccgacagcgccacccccgacgacaccagcaacagcagcagcgtggactgggacaccgtggagagacaggaggaggaggcccccagctgggacgagctggccgtgatgatccccagaagacccagagagggccccagagccgacagcagccagagagcccccagcctgctgaccagaagccccgtgggcggcgacgccgccggccagaagaaggaggacaccggcggcggcggcagaagcgccggccagcactgggccagactgagaggcgagagcggcctgagcctggagagacacagaagcaccctgacccaggccagcagcatgaccccccacagcggccccagaagcaccaccagccaggccagccccgcccagagagacaccgcccaggccgccagcaccagagagatccccagagccagcagcccccacagaatcacccagagagacaccagcagagccagcagcacccagcaggagatcagcagagccagcagcacccagcaggagaccagcagagccagcagcacccaggaggacacccccagagccagcagcacccaggaggacacccccagagccagcagcacccagtggaacacccccagagccagcagccccagcagaagcacccagctggacaaccccagaaccagcagcacccagcaggacaacccccagaccagcttccccacctgcaccccccagagagagaaccccagaaccccctgcgtgcagcaggacgaccccagagccagcagccccaacagaaccacccagagagagaacagcagaaccagctgcgcccagagagacaaccccaaggccagcagaaccagcagccccaacagagccaccagagacaaccccagaaccagctgcgcccagagagacaaccccagagccagcagccccagcagagccaccagagacaaccccaccaccagctgcgcccagagagacaaccccagagccagcagaaccagcagccccaacagagccaccagagacaaccccagaaccagctgcgcccagagagacaaccccagagccagcagccccagcagagccaccagagacaaccccaccaccagctgcgcccagagagacaaccccagagccagcagaaccagcagccccaacagagccaccagagacaaccccagaaccagctgcgcccagagagacaaccccagagccagcagccccaacagagccgccagagacaaccccaccaccagctgcgcccagagagacaaccccagagccagcagaaccagcagccccaacagagccaccagagacaaccccagaaccagctgcgcccagagagacaaccccagagccagcagccccaacagagccaccagagacaaccccaccaccagctgcgcccagagagacaaccccagagccagcagaaccagcagccccaacagagccaccagagacaaccccagaaccagctgcgcccagagagacaaccccagagccagcagccccaacagaaccacccagcaggacagccccagaaccagctgcgccagaagagacgaccccagagccagcagccccaacagaaccatccagcaggagaaccccagaaccagctgcgccctgagagacaaccccagagccagcagccccagcagaaccatccagcaggagaaccccagaaccagctgcgcccagagagacgaccccagagccagcagccccaacagaaccacccagcaggagaaccccagaaccagctgcgccagaagagacaaccccagagccagcagcagaaacagaaccatccagagagacaaccccagaaccagctgcgcccagagagacaaccccagagccagcagccccaacagaaccatccagcaggagaacctgagaaccagctgcaccagacaggacaaccccagaaccagcagccccaacagagccaccagagacaaccccagaaccagctgcgcccagagagacaacctgagagccagcagccccatcagagccacccagcaggacaaccccagaacctgcatccagcagaacatccccagaagcagcagcacccagcaggacaaccccaagaccagctgcaccaagagagacaacctgagacccacctgcacccagagagacagaacccagagcttcagcttccagagagacaaccccggcaccagcagcagccagtgctgcacccagaaggagaacctgagacccagcagcccccacagaagcacccagtggaacaaccccagaaacagcagcccccacagaaccaacaaggacatcccctgggccagcttccccctgagacccacccagagcgacggccccagaaccagcagccccagcagaagcaagcagagcgaggtgccctgggccagcatcgccctgagacccacccagggcgacagaccccagaccagcagccccagcagacccgcccagcacgaccccccccagagcagcttcggccccacccagtacaacctgcccagcagagccaccagcagcagccacaaccccggccaccagagcaccagcagaaccagcagccccgtgtaccccgccgcctacggcgcccccctgaccagccccgagcccagccagcccccctgcgccgtgtgcatcggccacagagacgcccccagagccagcagcccccccagatacctgcagcacgaccccttccccttcttccccgagcccagagcccccgagagcgagcccccccaccacgagcccccctacatcccccccgccgtgtgcatcggccacagagacgcccccagagccagcagcccccccagacacacccagttcgaccccttccccttcctgcccgacaccagcgacgccgagcaccagtgccagagcccccagcacgagcccctgcagctgcccgcccccgtgtgcatcggctacagagacgcccccagagccagcagcccccccagacaggcccccgagcccagcctgctgttccaggacctgcccagagccagcaccgagagcctggtgcccagcatggacagcctgcacgagtgcccccacatccccacccccgtgtgcatcggccacagagacgcccccagcttcagcagcccccccagacaggcccccgagcccagcctgttcttccaggacccccccggcaccagcatggagagcctggcccccagcaccgacagcctgcacggcagccccgtgctgatcccccaggtgtgcatcggccacagagacgcccccagagccagcagcccccccagacacccccccagcgacctggccttcctggcccccagccccagccccggcagcagcggcggcagcagaggcagcgccccccccggcgagaccagacacaacctggagagagaggagtacaccgtgctggccgacctgcccccccccagaagactggcccagagacagcccggcccccaggcccagtgcagcagcggcggcagaacccacagccccggcagagccgaggtggagagactgttcggccaggagagaagaaccatgctgcccgccaagcaggccgagctgaccagaagaagccaggccgagcccccccacccctggagccccgagaagagacccgagggcgacagacagctgcagggcagccccctgccccccagaaccagcgccagaacccccgagagagagctgagaacccagagacccctggagagcggccaggccggccccagacagcccctgggcgtgtggcagagccaggaggagccccccggcagccagggcccccacagacacctggagagaagctggagcagccaggagggcggcctgggccccggcggctggtggggctgcggcgagcccagcctgggcgccgccaaggcccccgagggcgcctggggcggcaccagcagagagtacaaggagagctggggccagcccgaggcctgggaggagaagcccacccacgagctgcccagagagctgggcaagagaagccccctgaccagcccccccgagaactggggcggccccgccgagagcagccagagctggcacagcggcacccccaccgccgtgggctggggcgccgagggcgcctgcccctaccccagaggcagcgagagaagacccgagctggactggagagacctgctgggcctgctgagagcccccggcgagggcgtgtgggccagagtgcccagcctggactgggagggcctgctggagctgctgcaggccagactgcccagaaaggaccccgccggccacagagacgacctggccagagccctgggccccgagctgggcccccccggcaccaacgacgtgcccgagcaggagagccacagccagcccgagggctgggccgaggccacccccgtgaacggccacagccccgccctgcagagccagagccccgtgcagctgcccagccccgcctgcaccagcacccagtggcccaagatcaaggtgaccagaggccccgccaccgccaccctggccggcctggagcagaccggccccctgggcagcagaagcaccgccaagggccccagcctgcccgagctgcagttccagcccgaggagcccgaggagagcgagcccagcagaggccaggaccccctgaccgaccagaagcaggccgacagctag

SEQ ID NO: 103370 - DNA, 771 bp, synthetic construct
  misc_feature 1..771: note = Description of Artificial Sequence: Synthetic coding sequence
  source 1..771: mol_type = other DNA
atgagcatcctggacgagcccggcgagccccccagccccagcctgaccaccaccagcaccagccagtggaagaagcactggttcgtgctgaccgacagcagcctgaagtactacagagacagcaccgccgaggaggccgacgagctggacggcgagatcgacctgagaagctgcaccgacgtgaccgagtacgccgtgcagagaaactacggcttccagatccacaccaaggacgccgtgtacaccctgagcgccatgaccagcggcatcagaagaaactggatcgaggccctgagaaagaccgtgagacccaccagcgcccccgacgtgaccaagctgagcgacagcaacaaggagaacgccctgcacagctacagcacccagaagggccccctgaaggccggcgagcagagagccggcagcgaggtgatcagcagaggcggccccagaaaggccgacggccagagacaggccctggactacgtggagctgagccccctgacccaggccagcccccagagagccagaacccccgccagaacccccgacagactggccaagcaggaggagctggagagagacctggcccagagaagcgaggagagaagaaagtggttcgaggccaccgacagcagaacccccgaggtgcccgccggcgagggccccagaagaggcctgggcgcccccctgaccgaggaccagcagaacagactgagcgaggagatcgagaagaagtggcaggagctggagaagctgcccctgagagagtag

SEQ ID NO: 103371 - DNA, 252 bp, synthetic construct
  misc_feature 1..252: note = Description of Artificial Sequence: Synthetic coding sequence
  source 1..252: mol_type = other DNA
atgagcatcctggacgagcccggcgagccccccagccccagcctgaccaccaccagcaccagccagtggaagaagcactggttcgtgctgaccgacagcagcctgaagtactacagagacagcaccgccgaggaggccgacgagctggacggcgagatcgacctgagaagctgcaccgacgtgaccgagtacgccgtgcagagaaactacggcttccagatccacaccaaggacgccgtgtacaccctgtag

SEQ ID NO: 103372 - DNA, 2577 bp, synthetic construct
  misc_feature 1..2577: note = Description of Artificial Sequence: Synthetic coding sequence
  source 1..2577: mol_type = other DNA
atggccgagctgagcgaggaggccctgctgagcgtgctgcccaccatcagagtgcccaaggccggcgacagagtgcacaaggacgagtgcgccttcagcttcgacacccccgagagcgagggcggcctgtacatctgcatgaacaccttcctgggcttcggcaagcagtacgtggagagacacttcaacaagaccggccagagagtgtacctgcacctgagaagaaccagaagacccaaggaggaggaccccgccaccggcaccggcgacccccccagaaagaagcccaccagactggccatcggcgtggagggcggcttcgacctgagcgaggagaagttcgagctggacgaggacgtgaagatcgtgatcctgcccgactacctggagatcgccagagacggcctgggcggcctgcccgacatcgtgagagacagagtgaccagcgccgtggaggccctgctgagcgccgacagcgccagcagaaagcaggaggtgcaggcctgggacggcgaggtgagacaggtgagcaagcacgccttcagcctgaagcagctggacaaccccgccagaatccccccctgcggctggaagtgcagcaagtgcgacatgagagagaacctgtggctgaacctgaccgacggcagcatcctgtgcggcagaagatacttcgacggcagcggcggcaacaaccacgccgtggagcactacagagagaccggctaccccctggccgtgaagctgggcaccatcacccccgacggcgccgacgtgtacagctacgacgaggacgacatggtgctggaccccagcctggccgagcacctgagccacttcggcatcgacatgctgaagatgcagaagaccgacaagaccatgaccgagctggagatcgacatgaaccagagaatcggcgagtgggagctgatccaggagagcggcgtgcccctgaagcccctgttcggccccggctacaccggcatcagaaacctgggcaacagctgctacctgaacagcgtggtgcaggtgctgttcagcatccccgacttccagagaaagtacgtggacaagctggagaagatcttccagaacgcccccaccgaccccacccaggacttcagcacccaggtggccaagctgggccacggcctgctgagcggcgagtacagcaagcccgtgcccgagagcggcgacggcgagagagtgcccgagcagaaggaggtgcaggacggcatcgcccccagaatgttcaaggccctgatcggcaagggccaccccgagttcagcaccaacagacagcaggacgcccaggagttcttcctgcacctgatcaacatggtggagagaaactgcagaagcagcgagaaccccaacgaggtgttcagattcctggtggaggagaagatcaagtgcctggccaccgagaaggtgaagtacacccagagagtggactacatcatgcagctgcccgtgcccatggacgccgccctgaacaaggaggagctgctggagtacgaggagaagaagagacaggccgaggaggagaagatggccctgcccgagctggtgagagcccaggtgcccttcagcagctgcctggaggcctacggcgcccccgagcaggtggacgacttctggagcaccgccctgcaggccaagagcgtggccgtgaagaccaccagattcgccagcttccccgactacctggtgatccagatcaagaagttcaccttcggcctggactgggtgcccaagaagctggacgtgagcatcgagatgcccgaggagctggacatcagccagctgagaggcaccggcctgcagcccggcgaggaggagctgcccgacatcgccccccccctggtgacccccgacgagcccaagggcagcctgggcttctacggcaacgaggacgaggacagcttctgcagcccccacttcagcagccccaccagccccatgctggacgagagcgtgatcatccagctggtggagatgggcttccccatggacgcctgcagaaaggccgtgtactacaccggcaacagcggcgccgaggccgccatgaactgggtgatgagccacatggacgaccccgacttcgccaaccccctgatcctgcccggcagcagcggccccggcagcaccagcgccgccgccgaccccccccccgaggactgcgtgaccaccatcgtgagcatgggcttcagcagagaccaggccctgaaggccctgagagccaccaacaacagcctggagagagccgtggactggatcttcagccacatcgacgacctggacgccgaggccgccatggacatcagcgagggcagaagcgccgccgacagcatcagcgagagcgtgcccgtgggccccaaggtgagagacggccccggcaagtaccagctgttcgccttcatcagccacatgggcaccagcaccatgtgcggccactacgtgtgccacatcaagaaggagggcagatgggtgatctacaacgaccagaaggtgtgcgccagcgagaagccccccaaggacctgggctacatctacttctaccagagagtggccagctag

SEQ ID NO: 103373 - DNA, 750 bp, synthetic construct
  misc_feature 1..750: note = Description of Artificial Sequence: Synthetic coding sequence
  source 1..750: mol_type = other DNA
atggcccccagcagaaagttcttcgtgggcggcaactggaagatgaacggcagaaagcagagcctgggcgagctgatcggcaccctgaacgccgccaaggtgcccgccgacaccgaggtggtgtgcgccccccccaccgcctacatcgacttcgccagacagaagctggaccccaagatcgccgtggccgcccagaactgctacaaggtgaccaacggcgccttcaccggcgagatcagccccggcatgatcaaggactgcggcgccacctgggtggtgctgggccacagcgagagaagacacgtgttcggcgagagcgacgagctgatcggccagaaggtggcccacgccctggccgagggcctgggcgtgatcgcctgcatcggcgagaagctggacgagagagaggccggcatcaccgagaaggtggtgttcgagcagaccaaggtgatcgccgacaacgtgaaggactggagcaaggtggtgctggcctacgagcccgtgtgggccatcggcaccggcaagaccgccaccccccagcaggcccaggaggtgcacgagaagctgagaggctggctgaagagcaacgtgagcgacgccgtggcccagagcaccagaatcatctacggcggcagcgtgaccggcgccacctgcaaggagctggccagccagcccgacgtggacggcttcctggtgggcggcgccagcctgaagcccgagttcgtggacatcatcaacgccaagcagtag

SEQ ID NO: 103374 - DNA, 504 bp, synthetic construct
  misc_feature 1..504: note = Description of Artificial Sequence: Synthetic coding sequence
  source 1..504: mol_type = other DNA
atgatcaaggactgcggcgccacctgggtggtgctgggccacagcgagagaagacacgtgttcggcgagagcgacgagctgatcggccagaaggtggcccacgccctggccgagggcctgggcgtgatcgcctgcatcggcgagaagctggacgagagagaggccggcatcaccgagaaggtggtgttcgagcagaccaaggtgatcgccgacaacgtgaaggactggagcaaggtggtgctggcctacgagcccgtgtgggccatcggcaccggcaagaccgccaccccccagcaggcccaggaggtgcacgagaagctgagaggctggctgaagagcaacgtgagcgacgccgtggcccagagcaccagaatcatctacggcggcagcgtgaccggcgccacctgcaaggagctggccagccagcccgacgtggacggcttcctggtgggcggcgccagcctgaagcccgagttcgtggacatcatcaacgccaagcagtag

SEQ ID NO: 103375 - DNA, 1233 bp, synthetic construct
  misc_feature 1..1233: note = Description of Artificial Sequence: Synthetic coding sequence
  source 1..1233: mol_type = other DNA
atggacgtgatggagctgctggaggaggacctgacctgccccatctgctgcagcctgttcgacgaccccagagtgctgccctgcagccacaacttctgcaagaagtgcctggagggcatcctggagggcagcgtgagaaacagcctgtggagacccgcccccttcaagtgccccacctgcagaaaggagaccagcgccaccggcatcaacagcctgcaggtgaactacagcctgaagggcatcgtggagaagtacaacaagatcaagatcagccccaagatgcccgtgtgcaagggccacctgggccagcccctgaacatcttctgcctgaccgacatgcagctgatctgcggcatctgcgccaccagaggcgagcacaccaagcacgtgttctgcagcatcgaggacgcctacgcccaggagagagacgccttcgagagcctgttccagagcttcgagacctggagaagaggcgacgccctgagcagactggacaccctggagaccagcaagagaaagagcctgcagctgctgaccaaggacagcgacaaggtgaaggagttcttcgagaagctgcagcacaccctggaccagaagaagaacgagatcctgagcgacttcgagaccatgaagctggccgtgatgcaggcctacgaccccgagatcaacaagctgaacaccatcctgcaggagcagagaatggccttcaacatcgccgaggccttcaaggacgtgagcgagcccatcgtgttcctgcagcagatgcaggagttcagagagaagatcaaggtgatcaaggagacccccctgccccccagcaacctgcccgccagccccctgatgaagaacttcgacaccagccagtgggaggacatcaagctggtggacgtggacaagctgagcctgccccaggacaccggcaccttcatcagcaagatcccctggagcttctacaagctgttcctgctgatcctgctgctgggcctggtgatcgtgttcggccccaccatgttcctggagtggagcctgttcgacgacctggccacctggaagggctgcctgagcaacttcagcagctacctgaccaagaccgccgacttcatcgagcagagcgtgttctactgggagcaggtgaccgacggcttcttcatcttcaacgagagattcaagaacttcaccctggtggtgctgaacaacgtggccgagttcgtgtgcaagtacaagctgctgtag

SEQ ID NO: 103376 - DNA, 1233 bp, synthetic construct; identical to SEQ ID NO: 103375
  misc_feature 1..1233: note = Description of Artificial Sequence: Synthetic coding sequence
  source 1..1233: mol_type = other DNA

SEQ ID NO: 103377 - DNA, 1224 bp, synthetic construct
  misc_feature 1..1224: note = Description of Artificial Sequence: Synthetic coding sequence
  source 1..1224: mol_type = other DNA
atggagctgctggaggaggacctgacctgccccatctgctgcagcctgttcgacgaccccagagtgctgccctgcagccacaacttctgcaagaagtgcctggagggcatcctggagggcagcgtgagaaacagcctgtggagacccgcccccttcaagtgccccacctgcagaaaggagaccagcgccaccggcatcaacagcctgcaggtgaactacagcctgaagggcatcgtggagaagtacaacaagatcaagatcagccccaagatgcccgtgtgcaagggccacctgggccagcccctgaacatcttctgcctgaccgacatgcagctgatctgcggcatctgcgccaccagaggcgagcacaccaagcacgtgttctgcagcatcgaggacgcctacgcccaggagagagacgccttcgagagcctgttccagagcttcgagacctggagaagaggcgacgccctgagcagactggacaccctggagaccagcaagagaaagagcctgcagctgctgaccaaggacagcgacaaggtgaaggagttcttcgagaagctgcagcacaccctggaccagaagaagaacgagatcctgagcgacttcgagaccatgaagctggccgtgatgcaggcctacgaccccgagatcaacaagctgaacaccatcctgcaggagcagagaatggccttcaacatcgccgaggccttcaaggacgtgagcgagcccatcgtgttcctgcagcagatgcaggagttcagagagaagatcaaggtgatcaaggagacccccctgccccccagcaacctgcccgccagccccctgatgaagaacttcgacaccagccagtgggaggacatcaagctggtggacgtggacaagctgagcctgccccaggacaccggcaccttcatcagcaagatcccctggagcttctacaagctgttcctgctgatcctgctgctgggcctggtgatcgtgttcggccccaccatgttcctggagtggagcctgttcgacgacctggccacctggaagggctgcctgagcaacttcagcagctacctgaccaagaccgccgacttcatcgagcagagcgtgttctactgggagcaggtgaccgacggcttcttcatcttcaacgagagattcaagaacttcaccctggtggtgctgaacaacgtggccgagttcgtgtgcaagtacaagctgctgtag

SEQ ID NO: 103378 - DNA, 801 bp, synthetic construct
  misc_feature 1..801: note = Description of Artificial Sequence: Synthetic coding sequence
  source 1..801: mol_type = other DNA
atggagctgctggaggaggacctgacctgccccatctgctgcagcctgttcgacgaccccagagtgctgccctgcagccacaacttctgcaagaagtgcctggagggcatcctggagggcagcgtgagaaacagcctgtggagacccgcccccttcaagtgccccacctgcagaaaggagaccagcgccaccggcatcaacagcctgcaggtgaactacagcctgaagggcatcgtggagaagtacaacaagatcaagatcagccccaagatgcccgtgtgcaagggccacctgggccagcccctgaacatcttctgcctgaccgacatgcagctgatctgcggcatctgcgccaccagaggcgagcacaccaagcacgtgttctgcagcatcgaggacgcctacgcccaggagagagacgccttcgagagcctgttccagagcttcgagacctggagaagaggcgacgccctgagcagactggacaccctggagaccagcaagagaaagagcctgcagctgctgaccaaggacagcgacaaggtgaaggagttcttcgagaagctgcagcacaccctggaccagaagaagaacgagatcctgagcgacttcgagaccatgaagctggccgtgatgcaggcctacgaccccgagatcaacaagctgaacaccatcctgcaggagcagagaatggccttcaacatcgccgaggccttcaaggacgtgagcgagcccatcgtgttcctgcagcagatgcaggagttcagagagaagatcaaggtgatcaaggagaccccctag

SEQ ID NO: 103379 - DNA, 1224 bp, synthetic construct; identical to SEQ ID NO: 103377
  misc_feature 1..1224: note = Description of Artificial Sequence: Synthetic coding sequence
  source 1..1224: mol_type = other DNA

SEQ ID NO: 103380 - DNA, 390 bp, synthetic construct
  misc_feature 1..390: note = Description of Artificial Sequence: Synthetic coding sequence
  source 1..390: mol_type = other DNA
atggagctgctggaggaggacctgacctgccccatctgctgcagcctgttcgacgaccccagagtgctgccctgcagccacaacttctgcaagaagtgcctggagggcatcctggagggcagcgtgagaaacagcctgtggagacccgcccccttcaagtgccccacctgcagaaaggagaccagcgccaccggcatcaacagcctgcaggtgaactacagcctgaagggcatcgtggagaagtacaacaagatcaagatcagccccaagatgcccgtgtgcaagggccacctgggccagcccctgaacatcttctgcctgaccgacatgcagctgatctgcggcatctgcgccaccagaggcgagcacaccaagcacgtgttctgctag

SEQ ID NO: 103381 - DNA, 1224 bp, synthetic construct; identical to SEQ ID NO: 103377
  misc_feature 1..1224: note = Description of Artificial Sequence: Synthetic coding sequence
  source 1..1224: mol_type = other DNA

SEQ ID NO: 103382 - DNA, 669 bp, synthetic construct
  misc_feature 1..669: note = Description of Artificial Sequence: Synthetic coding sequence
  source 1..669: mol_type = other DNA
atgaacgacctgagcaacagagtgtggagcatcagccaggagcccgaccccgtgcagagactgcaggcctacaccgccaccgagcaggagatgcagcagcagatgagcctgggcgagctgtgccaccccgtgcccctgagcttcgagcccgtgaagagcttcttcaagggcctggtggaggccgtggagagcaccctgcagacccccctggacatcagactgaaggagagcatcaactgccagctgagcgaccccagcagcaccaagcccggcaccctgctgaagaccagccccagccccgagagaagcctgctgctgaagagctgctgggccgcctggggcccctgcccctgctgcggcagcaccagaagcggcaagtgctggctggtgaccgccagcccccccgccgccaccaccggcagactgacctgcagaagaagagcccccgccggcggctgggccagacccaccccccccttcggcgccgccggccccagacccccccccgcctgggccgccaccgccagccccggcgccagcagcgccaccaccctgagcaccggccccagcaccaccgccagcgccgccgcctgcggccccgccaccaccagcaccggcagcgccagcagctggaccaccagacccgccagcagccccagcaccacctag

SEQ ID NO: 103383 - DNA, 1329 bp, synthetic construct
  misc_feature 1..1329: note = Description of Artificial Sequence: Synthetic coding sequence
  source 1..1329: mol_type = other DNA
atggccggcgccgccaccggcagcagaacccccggcagaagcgagctggtggagggctgcggctggagatgccccgagcacggcgacagagtggccgagctgttctgcagaagatgcagaagatgcgtgtgcgccctgtgccccgtgctgggcgcccacagaggccaccccgtgggcctggccctggaggccgccgtgcacgtgcagaagctgagccaggagtgcctgaagcagctggccatcaagaagcagcagcacatcgacaacatcacccagatcgaggacgccaccgagaagctgaaggccaacgccgagagcagcaagacctggctgaagggcaagttcaccgagctgagactgctgctggacgaggaggaggccctggccaagaagttcatcgacaagaacacccagctgaccctgcaggtgtacagagagcaggccgacagctgcagagagcagctggacatcatgaacgacctgagcaacagagtgtggagcatcagccaggagcccgaccccgtgcagagactgcaggcctacaccgccaccgagcaggagatgcagcagcagatgagcctgggcgagctgtgccaccccgtgcccctgagcttcgagcccgtgaagagcttcttcaagggcctggtggaggccgtggagagcaccctgcagacccccctggacatcagactgaaggagagcatcaactgccagctgagcgaccccagcagcaccaagcccggcaccctgctgaagaccagccccagccccgagagaagcctgctgctgaagtacgccagaacccccaccctggaccccgacaccatgcacgccagactgagactgagcgccgacagactgaccgtgagatgcggcctgctgggcagcctgggccccgtgcccgtgctgagattcgacgccctgtggcaggtgctggccagagactgcttcgccaccggcagacactactgggaggtggacgtgcaggaggccggcgccggctggtgggtgggcgccgcctacgccagcctgagaagaagaggcgccagcgccgccgccagactgggctgcaacagacagagctggtgcctgaagagatacgacctggagtactgggccttccacgacggccagagaagcagactgagacccagagacgacctggacagactgggcgtgttcctggactacgaggccggcgtgctggccttctacgacgtgaccggcggcatgagccacctgcacaccttcagagccaccttccaggagcccctgtaccccgccctgagactgtgggagggcgccatcagcatccccagactgccctag

SEQ ID NO: 103384 - DNA, 1329 bp, synthetic construct; identical to SEQ ID NO: 103383
  misc_feature 1..1329: note = Description of Artificial Sequence: Synthetic coding sequence
  source 1..1329: mol_type = other DNA

SEQ ID NO: 103385 - DNA, 1221 bp, synthetic construct
  misc_feature 1..1221: note = Description of Artificial Sequence: Synthetic coding sequence
  source 1..1221: mol_type = other DNA
atggccggcgccgccaccggcagcagaacccccggcagaagcgagctggtggagggctgcggctggagatgccccgagcacggcgacagagtggccgagctgttctgcagaagatgcagaagatgcgtgtgcgccctgtgccccgtgctgggcgcccacagaggccaccccgtgggcctggccctggaggccgccgtgcacgtgcagaagctgagccaggagtgcctgaagcagctggccatcaagaagcagcagcacatcgacaacatcacccagatcgaggacgccaccgagaagctgaaggccaacgccgagagcagcaagacctggctgaagggcaagttcaccgagctgagactgctgctggacgaggaggaggccctggccaagaagttcatcgacaagaacacccagctgaccctgcaggtgtacagagagcaggccgacagctgcagagagcagctggacatcatgaacgacctgagcaacagagtgtggagcatcagccaggagcccgaccccgtgcagagactgcaggcctacaccgccaccgagcaggagatgcagcagcagatgagcctgggcgagctgtgccaccccgtgcccctgagcttcgagcccgtgaagagcttcttcaagggcctggtggaggccgtggagagcaccctgcagacccccctggacatcagactgaaggagagcatcaactgccagctgagcgaccccagcagcaccaagcccggcaccctgctgaagaccagccccagccccgagagaagcctgctgctgaagtacgccagaacccccaccctggaccccgacaccatgcacgccagactgagactgagcgccgacagactgaccgtgagatgcggcctgctgggcagcctgggccccgtgcccgtgctgagattcgacgccctgtggcaggtgctggccagagactgcttcgccaccggcagacactactgggaggtggacgtgcaggaggccggcgccggctggtgggtgggcgccgcctacgccagcctgagaagaagaggcgccagcgccgccgccagactgggctgcaacagacagagctggtgcctgaagagatacgacctggagtactgggccttccacgacggccagagaagcgcctgcggccccgccaccaccagcaccggcagcgccagcagctggaccaccagacccgccagcagccccagcaccacctag

SEQ ID NO: 103386 - DNA, 762 bp, synthetic construct
  misc_feature 1..762: note = Description of Artificial Sequence: Synthetic coding sequence
  source 1..762: mol_type = other DNA
atggccggcgccgccaccggcagcagaacccccggcagaagcgagctggtggagggctgcggctggagatgccccgagcacggcgacagagtggccgagctgttctgcagaagatgcagaagatgcgtgtgcgccctgtgccccgtgctgggcgcccacagaggccaccccgtgggcctggccctggaggccgccgtgcacgtgcagaagctgagccaggagtgcctgaagcagctggccatcaagaagcagcagcacatcgacaacatcacccagatcgaggacgccaccgagaagctgaaggccaacgccgagagcagcaagacctggctgaagggcaagttcaccgagctgagactgctgctggacgaggaggaggccctggccaagaagttcatcgacaagaacacccagctgaccctgcaggtgtacagagagcaggccgacagctgcagagagcagctggacatcatgaacgacctgagcaacagagtgtggagcatcagccaggagcccgaccccgtgcagagactgcaggcctacaccgccaccgagcaggagatgcagcagcagatgagcctgggcgagctgtgccaccccgtgcccctgagcttcgagcccgtgaagagcttcttcaagggcctggtggaggccgtggagagcaccctgcagacccccctggacatcagactgagccccaccaaccacgcctacagcgccctgaaggtgagcagccccagactggtgagcaacagaccctag

SEQ ID NO: 103387 - DNA, 1329 bp, synthetic construct; identical to SEQ ID NO: 103383
  misc_feature 1..1329: note = Description of Artificial Sequence: Synthetic coding sequence
  source 1..1329: mol_type = other DNA

SEQ ID NO: 103388 - DNA, 672 bp, synthetic construct
  misc_feature 1..672: note = Description of Artificial Sequence: Synthetic coding sequence
  source 1..672: mol_type = other DNA
atgagcgccggcagcgacggcggcggcagacacttctgcggcggcatcaactgccagctgagcgaccccagcagcaccaagcccggcaccctgctgaagaccagccccagccccgagagaagcctgctgctgaagtacgccagaacccccaccctggaccccgacaccatgcacgccagactgagactgagcgccgacagactgaccgtgagatgcggcctgctgggcagcctgggccccgtgcccgtgctgagattcgacgccctgtggcaggtgctggccagagactgcttcgccaccggcagacactactgggaggtggacgtgcaggaggccggcgccggctggtgggtgggcgccgcctacgccagcctgagaagaagaggcgccagcgccgccgccagactgggctgcaacagacagagctggtgcctgaagagatacgacctggagtactgggccttccacgacggccagagaagcagactgagacccagagacgacctggacagactgggcgtgttcctggactacgaggccggcgtgctggccttctacgacgtgaccggcggcatgagccacctgcacaccttcagagccaccttccaggagcccctgtaccccgccctgagactgtgggagggcgccatcagcatccccagactgccctag

SEQ ID NO: 103389 - DNA, 2316 bp, synthetic construct
  misc_feature 1..2316: note = Description of Artificial Sequence: Synthetic coding sequence
  source 1..2316: mol_type = other DNA
atgcacagaagcggcagatacggcacccagcagcagagagccggcagcaagaccgccggccccccctgccagtggagcagaatggccagcgagggcaccaacatccccagccccgtggtgagacagatcgacaagcagttcctgatctgcagcatctgcctggagagatacaagaaccccaaggtgctgccctgcctgcacaccttctgcgagagatgcctgcagaactacatccccgcccacagcctgaccctgagctgccccgtgtgcagacagaccagcatcctgcccgagaagggcgtggccgccctgcagaacaacttcttcatcaccaacctgatggacgtgctgcagagaacccccggcagcaacgccgaggagagcagcatcctggagaccgtgaccgccgtggccgccggcaagcccctgagctgccccaaccacgacggcaacgtgatggagttctactgccagagctgcgagaccgccatgtgcagagagtgcaccgagggcgagcacgccgagcaccccaccgtgcccctgaaggacgtggtggagcagcacaaggccagcctgcaggtgcagctggacgccgtgaacaagagactgcccgagatcgacagcgccctgcagttcatcagcgagatcatccaccagctgaccaaccagaaggccagcatcgtggacgacatccacagcaccttcgacgagctgcagaagaccctgaacgtgagaaagagcgtgctgctgatggagctggaggtgaactacggcctgaagcacaaggtgctgcagagccagctggacaccctgctgcagggccaggagagcatcaagagctgcagcaacttcaccgcccaggccctgaaccacggcaccgagaccgaggtgctgctggtgaagaagcagatgagcgagaagctgaacgagctggccgaccaggacttccccctgcaccccagagagaacgaccagctggacttcatcgtggagaccgagggcctgaagaagagcatccacaacctgggcaccatcctgaccaccaacgccgtggccagcgagaccgtggccaccggcgagggcctgagacagaccatcatcggccagcccatgagcgtgaccatcaccaccaaggacaaggacggcgagctgtgcaagaccggcaacgcctacctgaccgccgagctgagcacccccgacggcagcgtggccgacggcgagatcctggacaacaagaacggcacctacgagttcctgtacaccgtgcagaaggagggcgacttcaccctgagcctgagactgtacgaccagcacatcagaggcagccccttcaagctgaaggtgatcagaagcgccgacgtgagccccaccaccgagggcgtgaagagaagagtgaagagccccggcagcggccacgtgaagcagaaggccgtgaagagacccgccagcatgtacagcaccggcaagagaaaggagaaccccatcgaggacgacctgatcttcagagtgggcaccaagggcagaaacaagggcgagttcaccaacctgcagggcgtggccgccagcaccaacggcaagatcctgatcgccgacagcaacaaccagtgcgtgcagatcttcagcaacgacggccagttcaagagcagattcggcatcagaggcagaagccccggccagctgcagagacccaccggcgtggccgtgcaccccagcggcgacatcatcatcgccgactacgacaacaagtgggtgagcatcttcagcagcgacggcaagttcaagaccaagatcggcagcggcaagctgatgggccccaagggcgtgagcgtggacagaaacggccacatcatcgtggtggacaacaaggcctgctgcgtgttcatcttccagcccaacggcaagatcgtgaccagattcggcagcagaggcaacggcgacagacagttcgccggcccccacttcgccgccgtgaacagcaacaacgagatcatcatcaccgacttccacaaccacagcgtgaaggtgttcaaccaggagggcgagttcatgctgaagttcggcagcaacggcgagggcaacggccagttcaacgcccccaccggcgtggccgtggacagcaacggcaacatcatcgtggccgactggggcaacagcagaatccaggtgttcgacggcagcggcagcttcctgagctacatcaacaccagcgccgaccccctgtacggcccccagggcctggccctgaccagcgacggccacgtggtggtggccgacagcggcaaccactgcttcaaggtgtacagatacctgcagtag

SEQ ID NO: 103390 - DNA, 2235 bp, synthetic construct
  misc_feature 1..2235: note = Description of Artificial Sequence: Synthetic coding sequence
  source 1..2235: mol_type = other DNA
atggccagcgagggcaccaacatccccagccccgtggtgagacagatcgacaagcagttcctgatctgcagcatctgcctggagagatacaagaaccccaaggtgctgccctgcctgcacaccttctgcgagagatgcctgcagaactacatccccgcccacagcctgaccctgagctgccccgtgtgcagacagaccagcatcctgcccgagaagggcgtggccgccctgcagaacaacttcttcatcaccaacctgatggacgtgctgcagagaacccccggcagcaacgccgaggagagcagcatcctggagaccgtgaccgccgtggccgccggcaagcccctgagctgccccaaccacgacggcaacgtgatggagttctactgccagagctgcgagaccgccatgtgcagagagtgcaccgagggcgagcacgccgagcaccccaccgtgcccctgaaggacgtggtggagcagcacaaggccagcctgcaggtgcagctggacgccgtgaacaagagactgcccgagatcgacagcgccctgcagttcatcagcgagatcatccaccagctgaccaaccagaaggccagcatcgtggacgacatccacagcaccttcgacgagctgcagaagaccctgaacgtgagaaagagcgtgctgctgatggagctggaggtgaactacggcctgaagcacaaggtgctgcagagccagctggacaccctgctgcagggccaggagagcatcaagagctgcagcaacttcaccgcccaggccctgaaccacggcaccgagaccgaggtgctgctggtgaagaagcagatgagcgagaagctgaacgagctggccgaccaggacttccccctgcaccccagagagaacgaccagctggacttcatcgtggagaccgagggcctgaagaagagcatccacaacctgggcaccatcctgaccaccaacgccgtggccagcgagaccgtggccaccggcgagggcctgagacagaccatcatcggccagcccatgagcgtgaccatcaccaccaaggacaaggacggcgagctgtgcaagaccggcaacgcctacctgaccgccgagctgagcacccccgacggcagcgtggccgacggcgagatcctggacaacaagaacggcacctacgagttcctgtacaccgtgcagaaggagggcgacttcaccctgagcctgagactgtacgaccagcacatcagaggcagccccttcaagctgaaggtgatcagaagcgccgacgtgagccccaccaccgagggcgtgaagagaagagtgaagagccccggcagcggccacgtgaagcagaaggccgtgaagagacccgccagcatgtacagcaccggcaagagaaaggagaaccccatcgaggacgacctgatcttcagagtgggcaccaagggcagaaacaagggcgagttcaccaacctgcagggcgtggccgccagcaccaacggcaagatcctgatcgccgacagcaacaaccagtgcgtgcagatcttcagcaacgacggccagttcaagagcagattcggcatcagaggcagaagccccggccagctgcagagacccaccggcgtggccgtgcaccccagcggcgacatcatcatcgccgactacgacaacaagtgggtgagcatcttcagcagcgacggcaagttcaagaccaagatcggcagcggcaagctgatgggccccaagggcgtgagcgtggacagaaacggccacatcatcgtggtggacaacaaggcctgctgcgtgttcatcttccagcccaacggcaagatcgtgaccagattcggcagcagaggcaacggcgacagacagttcgccggcccccacttcgccgccgtgaacagcaacaacgagatcatcatcaccgacttccacaaccacagcgtgaaggtgttcaaccaggagggcgagttcatgctgaagttcggcagcaacggcgagggcaacggccagttcaacgcccccaccggcgtggccgtggacagcaacggcaacatcatcgtggccgactggggcaacagcagaatccaggtgttcgacggcagcggcagcttcctgagctacatcaacaccagcgccgaccccctgtacggcccccagggcctggccctgaccagcgacggccacgtggtggtggccgacagcggcaaccactgcttcaaggtgtacagatacctgcagtag

SEQ ID NO: 103391 - DNA, 1428 bp, synthetic construct
  misc_feature 1..1428: note = Description of Artificial Sequence: Synthetic coding sequence
  source 1..1428: mol_type = other DNA
atggccagcgccgccagactgaccatgatgtgggaggaggtgacctgccccatctgcctggaccccttcgtggagcccgtgagcatcgagtgcggccacagcttctgccaggagtgcatcagccaggtgggcaagggcggcggcagcgtgtgccccgtgtgcagacagagattcctgctgaagaacctgagacccaacagacagctggccaacatggtgaacaacctgaaggagatcagccaggaggccagagagggcacccagggcgagagatgcgccgtgcacggcgagagactgcacctgttctgcgagaaggacggcaaggccctgtgctgggtgtgcgcccagagcagaaagcacagagaccacgccatggtgcccctggaggaggccgcccaggagtaccaggagaagctgcaggtggccctgggcgagctgagaagaaagcaggagctggccgagaagctggaggtggagatcgccatcaagagagccgactggaagaagaccgtggagacccagaagagcagaatccacgccgagttcgtgcagcagaagaacttcctggtggaggaggagcagagacagctgcaggagctggagaaggacgagagagagcagctgagaatcctgggcgagaaggaggccaagctggcccagcagagccaggccctgcaggagctgatcagcgagctggacagaagatgccacagcagcgccctggagctgctgcaggaggtgatcatcgtgctggagagaagcgagagctggaacctgaaggacctggacatcaccagccccgagctgagaagcgtgtgccacgtgcccggcctgaagaagatgctgagaacctgcgccgtgcacatcaccctggaccccgacaccgccaacccctggctgatcctgagcgaggacagaagacaggtgagactgggcgacacccagcagagcatccccggcaacgaggagagattcgacagctaccccatggtgctgggcgcccagcacttccacagcggcaagcactactgggaggtggacgtgaccggcaaggaggcctgggacctgggcgtgtgcagagacagcgtgagaagaaagggccacttcctgctgagcagcaagagcggcttctggaccatctggctgtggaacaagcagaagtacgaggccggcacctacccccagacccccctgcacctgcaggtgcccccctgccaggtgggcatcttcctggactacgaggccggcatggtgagcttctacaacatcaccgaccacggcagcctgatctacagcttcagcgagtgcgccttcaccggccccctgagacccttcttcagccccggcttcaacgacggcggcaagaacaccgcccccctgaccctgtgccccctgaacatcggcagccagggcagcaccgactactag

SEQ ID NO: 103392 - DNA, 1428 bp, synthetic construct
  misc_feature 1..1428: note = Description of Artificial Sequence: Synthetic coding sequence
  source 1..1428: mol_type = other DNA
atggccagcgccgccagactgaccatgatgtgggaggaggtgacctgccccatctgcctggaccccttcgtggagcccgtgagcatcgagtgcggccacagcttctgccaggagtgcatcagccaggtgggcaagggcggcggcagcgtgtgccccgtgtgcagacagagattcctgctgaagaacctgagacccaacagacagctggccaacatggtgaacaacctgaaggagatcagccaggaggccagagagggcacccagggcgagagatgcgccgtgcacggcgagagactgcacctgttctgcgagaaggacggcaaggccctgtgctgggtgtgcgcccagagcagaaagcacagagaccacgccatggtgcccctggaggaggccgcccaggagtaccaggagaagctgcaggtggccctgggcgagctgagaagaaagcaggagctggccgagaagctggaggtggagatcgccatcaagagagccgactggaagaagaccgtggagacccagaagagcagaatccacgccgagttcgtgcagcagaagaacttcctggtggaggaggagcagagacagctgcaggagctggagaaggacgagagagagcagctgagaatcctgggcgagaaggaggccaagctggcccagcagagccaggccctgcaggagctgatcagcgagctggacagaagatgccacagcagcgccctggagctgctgcaggaggtgatcgtgctgggccccagaagcgagagctggaacctgaaggacctggacatcaccagccccgagctgagaagcgtgtgccacgtgcccggcctgaagaagatgctgagaacctgcgccgtgcacatcaccctggaccccgacaccgccaacccctggctgatcctgagcgaggacagaagacaggtgagactgggcgacacccagcagagcatccccggcaacgaggagagattcgacagctaccccatggtgctgggcgcccagcacttccacagcggcaagcactactgggaggtggacgtgaccggcaaggaggcctgggacctgggcgtgtgcagagacagcgtgagaagaaagggccacttcctgctgagcagcaagagcggcttctggaccatctggctgtggaacaagcagaagtacgaggccggcacctacccccagacccccctgcacctgcaggtgcccccctgccaggtgggcatcttcctggactacgaggccggcatggtgagcttctacaacatcaccgaccacggcagcctgatctacagcttcagcgagtgcgccttcaccggccccctgagacccttcttcagccccggcttcaacgacggcggcaagaacaccgcccccctgaccctgtgccccctgaacatcggcagccagggcagcaccgactactag

SEQ ID NO: 103393 - DNA, 1497 bp, synthetic construct
  misc_feature 1..1497: note = Description of Artificial Sequence: Synthetic coding sequence
  source 1..1497: mol_type = other DNA
atggacttcagcgtgaaggtggacatcgagaaggaggtgacctgccccatctgcctggagctgctgaccgagcccctgagcctggactgcggccacagcttctgccaggcctgcatcaccgccaagatcaaggagagcgtgatcatcagcagaggcgagagcagctgccccgtgtgccagaccagattccagcccggcaacctgagacccaacagacacctggccaacatcgtggagagagtgaaggaggtgaagatgagcccccaggagggccagaagagagacgtgtgcgagcaccacggcaagaagctgcagatcttctgcaaggaggacggcaaggtgatctgctgggtgtgcgagctgagccaggagcaccagggccaccagaccttcagaatcaacgaggtggtgaaggagtgccaggagaagctgcaggtggccctgcagagactgatcaaggaggaccaggaggccgagaagctggaggacgacatcagacaggagagaaccgcctggaagaactacatccagatcgagagacagaagatcctgaagggcttcaacgagatgagagtgatcctggacaacgaggagcagagagagctgcagaagctggaggagggcgaggtgaacgtgctggacaacctggccgccgccaccgaccagctggtgcagcagagacaggacgccagcaccctgatcagcgacctgcagagaagactgagaggcagcagcgtggagatgctgcaggacgtgatcgacgtgatgaagagaagcgagagctggaccctgaagaagcccaagagcgtgagcaagaagctgaagagcgtgttcagagtgcccgacctgagcggcatgctgcaggtgctgaaggagctgaccgacgtgcagtactactgggtggacgtgatgctgaaccccggcagcgccaccagcaacgtggccatcagcgtggaccagagacaggtgaagaccgtgagaacctgcaccttcaagaacagcaacccctgcgacttcagcgccttcggcgtgttcggctgccagtacttcagcagcggcaagtactactgggaggtggacgtgagcggcaagatcgcctggatcctgggcgtgcacagcaagatcagcagcctgaacaagagaaagagcagcggcttcgccttcgaccccagcgtgaactacagcaaggtgtacagcagatacagaccccagtacggctactgggtgatcggcctgcagaacacctgcgagtacaacgccttcgaggacagcagcagcagcgaccccaaggtgctgaccctgttcatggccgtgcccccctgcagaatcggcgtgttcctggactacgaggccggcatcgtgagcttcttcaacgtgaccaaccacggcgccctgatctacaagttcagcggctgcagattcagcagacccgcctacccctacttcaacccctggaactgcctggtgcccatgaccgtgtgcccccccagcagctag

SEQ ID NO: 103394 - DNA, 684 bp, synthetic construct
  misc_feature 1..684: note = Description of Artificial Sequence: Synthetic coding sequence
  source 1..684: mol_type = other DNA
atggacttcagcgtgaaggtggacatcgagaaggaggtgacctgccccatctgcctggagctgctgaccgagcccctgagcctggactgcggccacagcttctgccaggcctgcatcaccgccaagatcaaggagagcgtgatcatcagcagaggcgagagcagctgccccgtgtgccagaccagattccagcccggcaacctgagacccaacagacacctggccaacatcgtggagagagtgaaggaggtgaagatgagcccccaggagggccagaagagagacgtgtgcgagcaccacggcaagaagctgcagatcttctgcaaggaggacggcaaggtgatctgctgggtgtgcgagctgagccaggagcaccagggccaccagaccttcagaatcaacgaggtggtgaaggagtgccaggagaagctgcaggtggccctgcagagactgatcaaggaggaccaggaggccgagaagctggaggacgacatcagacaggagagaaccgcctggaagaactacatccagatcgagagacagaagatcctgaagggcttcaacgagatgagagtgatcctggacaacgaggagcagagagagctgcagaagctggaggagggcgaggtgaacgtgctggacaacctggccgccgccaccgaccagctggtgcagcagagatag

SEQ ID NO: 103395 - DNA, 612 bp, synthetic construct
  misc_feature 1..612: note = Description of Artificial Sequence: Synthetic coding sequence
  source 1..612: mol_type = other DNA
atggacttcagcgtgaaggtggacatcgagaaggaggtgacctgccccatctgcctggagctgctgaccgagcccctgagcctggactgcggccacagcttctgccaggcctgcatcaccgccaagatcaaggagagcgtgatcatcagcagaggcgagagcagctgccccgtgtgccagaccagattccagcccggcaacctgagacccaacagacacctggccaacatcgtggagagagtgaaggaggtgaagatgagcccccaggagggccagaagagagacgtgtgcgagcaccacggcaagaagctgcagatcttctgcaaggaggacggcaaggtgatctgctgggtgtgcgagctgagccaggagcaccagggccaccagaccttcagaatcaacgaggtggtgaaggagtgccaggagaagctgcaggtggccctgcagagactgatcaaggaggaccaggaggccgagaagctggaggacgacatcagacaggagagaaccgcctggaagaactacatccagatcgagagacagaagatcctgaagggcttcaacgagatgagagtgatcctggacaacgaggagcagagagagctgcagtag

SEQ ID NO: 103396 - DNA, 1263 bp, synthetic construct
  misc_feature 1..1263: note = Description of Artificial Sequence: Synthetic coding sequence
  source 1..1263: mol_type = other DNA
atggacttcagcgtgaaggtggacatcgagaaggaggtgacctgccccatctgcctggagctgctgaccgagcccctgagcctggactgcggccacagcttctgccaggcctgcatcaccgccaagatcaaggagagcgtgatcatcagcagaggcgagagcagctgccccgtgtgccagaccagattccagcccggcaacctgagacccaacagacacctggccaacatcgtggagagagtgaaggaggtgaagatgagcccccaggagggccagaagagagacgtgtgcgagcaccacggcaagaagctgcagatcttctgcaaggaggacggcaaggtgatcctggacaacgaggagcagagagagctgcagaagctggaggagggcgaggtgaacgtgctggacaacctggccgccgccaccgaccagctggtgcagcagagacaggacgccagcaccctgatcagcgacctgcagagaagactgagaggcagcagcgtggagatgctgcaggacgtgatcgacgtgatgaagagaagcgagagctggaccctgaagaagcccaagagcgtgagcaagaagctgaagagcgtgttcagagtgcccgacctgagcggcatgctgcaggtgctgaaggagctgaccgacgtgcagtactactgggtggacgtgatgctgaaccccggcagcgccaccagcaacgtggccatcagcgtggaccagagacaggtgaagaccgtgagaacctgcaccttcaagaacagcaacccctgcgacttcagcgccttcggcgtgttcggctgccagtacttcagcagcggcaagtactactgggaggtggacgtgagcggcaagatcgcctggatcctgggcgtgcacagcaagatcagcagcctgaacaagagaaagagcagcggcttcgccttcgaccccagcgtgaactacagcaaggtgtacagcagatacagaccccagtacggctactgggtgatcggcctgcagaacacctgcgagtacaacgccttcgaggacagcagcagcagcgaccccaaggtgctgaccctgttcatggccgtgcccccctgcagaatcggcgtgttcctggactacgaggccggcatcgtgagcttcttcaacgtgaccaaccacggcgccctgatctacaagttcagcggctgcagattcagcagacccgcctacccctacttcaacccctggaactgcctggtgcccatgaccgtgtgcccccccagcagctag

SEQ ID NO: 103397 - DNA, 930 bp, synthetic construct
  misc_feature 1..930: note = Description of Artificial Sequence: Synthetic coding sequence
  source 1..930: mol_type = other DNA
atgagagtgatcctggacaacgaggagcagagagagctgcagaagctggaggagggcgaggtgaacgtgctggacaacctggccgccgccaccgaccagctggtgcagcagagacaggacgccagcaccctgatcagcgacctgcagagaagactgagaggcagcagcgtggagatgctgcaggacgtgatcgacgtgatgaagagaagcgagagctggaccctgaagaagcccaagagcgtgagcaagaagctgaagagcgtgttcagagtgcccgacctgagcggcatgctgcaggtgctgaaggagctgaccgacgtgcagtactactgggtggacgtgatgctgaaccccggcagcgccaccagcaacgtggccatcagcgtggaccagagacaggtgaagaccgtgagaacctgcaccttcaagaacagcaacccctgcgacttcagcgccttcggcgtgttcggctgccagtacttcagcagcggcaagtactactgggaggtggacgtgagcggcaagatcgcctggatcctgggcgtgcacagcaagatcagcagcctgaacaagagaaagagcagcggcttcgccttcgaccccagcgtgaactacagcaaggtgtacagcagatacagaccccagtacggctactgggtgatcggcctgcagaacacctgcgagtacaacgccttcgaggacagcagcagcagcgaccccaaggtgctgaccctgttcatggccgtgcccccctgcagaatcggcgtgttcctggactacgaggccggcatcgtgagcttcttcaacgtgaccaaccacggcgccctgatctacaagttcagcggctgcagattcagcagacccgcctacccctacttcaacccctggaactgcctggtgcccatgaccgtgtgcccccccagcagctag

SEQ ID NO: 103398 - DNA, 1893 bp, synthetic construct
  misc_feature 1..1893: note = Description of Artificial Sequence: Synthetic coding sequence
  source 1..1893: mol_type = other DNA
atggccgagctgtgccccctggccgaggagctgagctgcagcatctgcctggagcccttcaaggagcccgtgaccaccccctgcggccacaacttctgcggcagctgcctgaacgagacctgggccgtgcagggcagcccctacctgtgcccccagtgcagagccgtgtaccaggccagaccccagctgcacaagaacaccgtgctgtgcaacgtggtggagcagttcctgcaggccgacctggccagagagccccccgccgacgtgtggaccccccccgccagagccagcgcccccagccccaacgcccaggtggcctgcgaccactgcctgaaggaggccgccgtgaagacctgcctggtgtgcatggccagcttctgccaggagcacctgcagccccacttcgacagccccgccttccaggaccaccccctgcagccccccgtgagagacctgctgagaagaaagtgcagccagcacaacagactgagagagttcttctgccccgagcacagcgagtgcatctgccacatctgcctggtggagcacaagacctgcagccccgccagcctgagccaggccagcgccgacctggaggccaccctgagacacaagctgaccgtgatgtacagccagatcaacggcgccagcagagccctggacgacgtgagaaacagacagcaggacgtgagaatgaccgccaacagaaaggtggagcagctgcagcaggagtacaccgagatgaaggccctgctggacgccagcgagaccaccagcaccagaaagatcaaggaggaggagaagagagtgaacagcaagttcgacaccatctaccagatcctgctgaagaagaagagcgagatccagaccctgaaggaggagatcgagcagagcctgaccaagagagacgagttcgagttcctggagaaggccagcaagctgagaggcatcagcaccaagcccgtgtacatccccgaggtggagctgaaccacaagctgatcaagggcatccaccagagcaccatcgacctgaagaacgagctgaagcagtgcatcggcagactgcaggagcccacccccagcagcggcgaccccggcgagcacgaccccgccagcacccacaagagcaccagacccgtgaagaaggtgagcaaggaggagaagaagagcaagaagcccccccccgtgcccgccctgcccagcaagctgcccaccttcggcgcccccgagcagctggtggacctgaagcaggccggcctggaggccgccgccaaggccaccagcagccaccccaacagcaccagcctgaaggccaaggtgctggagaccttcctggccaagagcagacccgagctgctggagtactacatcaaggtgatcctggactacaacaccgcccacaacaaggtggccctgagcgagtgctacaccgtggccagcgtggccgagatgccccagaactacagaccccacccccagagattcacctactgcagccaggtgctgggcctgcactgctacaagaagggcatccactactgggaggtggagctgcagaagaacaacttctgcggcgtgggcatctgctacggcagcatgaacagacagggccccgagagcagactgggcagaaacagcgccagctggtgcgtggagtggttcaacaccaagatcagcgcctggcacaacaacgtggagaagaccctgcccagcaccaaggccaccagagtgggcgtgctgctgaactgcgaccacggcttcgtgatcttcttcgccgtggccgacaaggtgcacctgatgtacaagttcagagtggacttcaccgaggccctgtaccccgccttctgggtgttcagcgccggcgccaccctgagcatctgcagccccaagtag

SEQ ID NO: 103399 - DNA, 1893 bp, synthetic construct; identical to SEQ ID NO: 103398
  misc_feature 1..1893: note = Description of Artificial Sequence: Synthetic coding sequence
  source 1..1893: mol_type = other DNA

SEQ ID NO: 103400 - DNA, 1077 bp, synthetic construct
  misc_feature 1..1077: note = Description of Artificial Sequence: Synthetic coding sequence
  source 1..1077: mol_type = other DNA
atggccagcggcagcgtggccgagtgcctgcagcaggagaccacctgccccgtgtgcctgcagtacttcgccgagcccatgatgctggactgcggccacaacatctgctgcgcctgcctggccagatgctggggcaccgccgagaccaacgtgagctgcccccagtgcagagagaccttcccccagagacacatgagacccaacagacacctggccaacgtgacccagctggtgaagcagctgagaaccgagagacccagcggccccggcggcgagatgggcgtgtgcgagaagcacagagagcccctgaagctgtactgcgaggaggaccagatgcccatctgcgtggtgtgcgacagaagcagagagcacagaggccacagcgtgctgcccctggaggaggccgtggagggcttcaaggagcagatccagaaccagctggaccacctgaagagagtgaaggacctgaagaagagaagaagagcccagggcgagcaggccagagccgagctgctgagcctgacccagatggagagagagaagatcgtgtgggagttcgagcagctgtaccacagcctgaaggagcacgagtacagactgctggccagactggaggagctggacctggccatctacaacagcatcaacggcgccatcacccagttcagctgcaacatcagccacctgagcagcctgatcgcccagctggaggagaagcagcagcagcccaccagagagctgctgcaggacatcggcgacaccctgagcagagccgagagaatcagaatccccgagccctggatcaccccccccgacctgcaggagaagatccacatcttcgcccagaagtgcctgttcctgaccgagagcctgaagcagttcaccgagaagatgcagagcgacatggagaagatccaggagctgagagaggcccagctgtacagcgtggacgtgaccctggaccccgacaccgcctaccccagcctgatcctgagcgacaacctgagacaggtgagatacagctacctgcagcaggacctgcccgacaaccccgagagaagccccagcaccacctag

SEQ ID NO: 103401 - DNA, 1542 bp, synthetic construct
  misc_feature 1..1542: note = Description of Artificial Sequence: Synthetic coding sequence
  source 1..1542: mol_type = other DNA
atggccagcggcagcgtggccgagtgcctgcagcaggagaccacctgccccgtgtgcctgcagtacttcgccgagcccatgatgctggactgcggccacaacatctgctgcgcctgcctggccagatgctggggcaccgccgagaccaacgtgagctgcccccagtgcagagagaccttcccccagagacacatgagacccaacagacacctggccaacgtgacccagctggtgaagcagctgagaaccgagagacccagcggccccggcggcgagatgggcgtgtgcgagaagcacagagagcccctgaagctgtactgcgaggaggaccagatgcccatctgcgtggtgtgcgacagaagcagagagcacagaggccacagcgtgctgcccctggaggaggccgtggagggcttcaaggagcagatccagaaccagctggaccacctgaagagagtgaaggacctgaagaagagaagaagagcccagggcgagcaggccagagccgagctgctgagcctgacccagatggagagagagaagatcgtgtgggagttcgagcagctgtaccacagcctgaaggagcacgagtacagactgctggccagactggaggagctggacctggccatctacaacagcatcaacggcgccatcacccagttcagctgcaacatcagccacctgagcagcctgatcgcccagctggaggagaagcagcagcagcccaccagagagctgctgcaggacatcggcgacaccctgagcagagccgagagaatcagaatccccgagccctggatcaccccccccgacctgcaggagaagatccacatcttcgcccagaagtgcctgttcctgaccgagagcctgaagcagttcaccgagaagatgcagagcgacatggagaagatccaggagctgagagaggcccagctgtacagcgtggacgtgaccctggaccccgacaccgcctaccccagcctgatcctgagcgacaacctgagacaggtgagatacagctacctgcagcaggacctgcccgacaaccccgagagattcaacctgttcccctgcgtgctgggcagcccctgcttcatcgccggcagacactactgggaggtggaggtgggcgacaaggccaagtggaccatcggcgtgtgcgaggacagcgtgtgcagaaagggcggcgtgaccagcgccccccagaacggcttctgggccgtgagcctgtggtacggcaaggagtactgggccctgaccagccccatgaccgccctgcccctgagaacccccctgcagagagtgggcatcttcctggactacgacgccggcgaggtgagcttctacaacgtgaccgagagatgccacaccttcaccttcagccacgccaccttctgcggccccgtgagaccctacttcagcctgagctacagcggcggcaagagcgccgcccccctgatcatctgccccatgagcggcatcgacggcttcagcggccacgtgggcaaccacggccacagcatggagaccagcccctag

SEQ ID NO: 103402 - DNA, 1542 bp, synthetic construct; identical to SEQ ID NO: 103401
  misc_feature 1..1542: note = Description of Artificial Sequence: Synthetic coding sequence
  source 1..1542: mol_type = other DNA

SEQ ID NO: 103403 - DNA, 1077 bp, synthetic construct; identical to SEQ ID NO: 103400
  misc_feature 1..1077: note = Description of Artificial Sequence: Synthetic coding sequence
  source 1..1077: mol_type = other DNA

SEQ ID NO: 103404 - DNA, 747 bp, synthetic construct
  misc_feature 1..747: note = Description of Artificial Sequence: Synthetic coding sequence
  source 1..747: mol_type = other DNA
tgactgaagcagttcaccgagaagatgcagagcgacatggagaagatccaggagagcgccgacagcctggagggcggcatcctggacctgggcagcgtgctgagccacatcctgcccgtgagcgagctgagagaggcccagctgtacagcgtggacgtgaccctggaccccgacaccgcctaccccagcctgatcctgagcgacaacctgagacaggtgagatacagctacctgcagcaggacctgcccgacaaccccgagagattcaacctgttcccctgcgtgctgggcagcccctgcttcatcgccggcagacactactgggaggtggaggtgggcgacaaggccaagtggaccatcggcgtgtgcgaggacagcgtgtgcagaaagggcggcgtgaccagcgccccccagaacggcttctgggccgtgagcctgtggtacggcaaggagtactgggccctgaccagccccatgaccgccctgcccctgagaacccccctgcagagagtgggcatcttcctggactacgacgccggcgaggtgagcttctacaacgtgaccgagagatgccacaccttcaccttcagccacgccaccttctgcggccccgtgagaccctacttcagcctgagctacagcggcggcaagagcgccgcccccctgatcatctgccccatgagcggcatcgacggcttcagcggccacgtgggcaaccacggccacagcatggagaccagcccctag

SEQ ID NO: 103405 - DNA, 1077 bp, synthetic construct; identical to SEQ ID NO: 103400
  misc_feature 1..1077: note = Description of Artificial Sequence: Synthetic coding sequence
  source 1..1077: mol_type = other DNA

SEQ ID NO: 103406 - DNA, 747 bp, synthetic construct; identical to SEQ ID NO: 103404
  misc_feature 1..747: note = Description of Artificial Sequence: Synthetic coding sequence
  source 1..747: mol_type = other DNA

SEQ ID NO: 103407 - DNA, 1077 bp, synthetic construct; identical to SEQ ID NO: 103400
  misc_feature 1..1077: note = Description of Artificial Sequence: Synthetic coding sequence
  source 1..1077: mol_type = other DNA

SEQ ID NO: 103408 - DNA, 747 bp, synthetic construct; identical to SEQ ID NO: 103404
  misc_feature 1..747: note = Description of Artificial Sequence: Synthetic coding sequence
  source 1..747: mol_type = other DNA

SEQ ID NO: 103409 - DNA, 750 bp, synthetic construct
  misc_feature 1..750: note = Description of Artificial Sequence: Synthetic coding sequence
  source 1..750: mol_type = other DNA
atggccagcggcagcgtggccgagtgcctgcagcaggagaccacctgccccgtgtgcctgcagtacttcgccgagcccatgatgctggactgcggccacaacatctgctgcgcctgcctggccagatgctggggcaccgccgagaccaacgtgagctgcccccagtgcagagagaccttcccccagagacacatgagacccaacagacacctggccaacgtgacccagctggtgaagcagctgagaaccgagagacccagcggccccggcggcgagatgggcgtgtgcgagaagcacagagagcccctgaagctgtactgcgaggaggaccagatgcccatctgcgtggtgtgcgacagaagcagagagcacagaggccacagcgtgctgcccctggaggaggccgtggagggcttcaaggagcagatccagaaccagctggaccacctgaagagagtgaaggacctgaagaagagaagaagagcccagggcgagcaggccagagccgagctgctgagcctgacccagatggagagagagaagatcgtgtgggagttcgagcagctgtaccacagcctgaaggagcacgagtacagactgctggccagactggaggagctggacctggccatctacaacagcatcaacggcgccatcacccagttcagctgcaacatcagccacctgagcagcctgatcgcccagctggaggagaagcagcagcagcccaccagagagctgctgcagtag

SEQ ID NO: 103410 - DNA, 1542 bp, synthetic construct; identical to SEQ ID NO: 103401
  misc_feature 1..1542: note = Description of Artificial Sequence: Synthetic coding sequence
  source 1..1542: mol_type = other DNA

SEQ ID NO: 103411 - DNA, 1542 bp, synthetic construct; identical to SEQ ID NO: 103401
  misc_feature 1..1542: note = Description of Artificial Sequence: Synthetic coding sequence
  source 1..1542: mol_type = other DNA

SEQ ID NO: 103412 - DNA, 750 bp, synthetic construct; identical to SEQ ID NO: 103409
  misc_feature 1..750: note = Description of Artificial Sequence: Synthetic coding sequence
  source 1..750: mol_type = other DNA

SEQ ID NO: 103413 - DNA, 1542 bp, synthetic construct; identical to SEQ ID NO: 103401
  misc_feature 1..1542: note = Description of Artificial Sequence: Synthetic coding sequence
  source 1..1542: mol_type = other DNA

SEQ ID NO: 103414 - DNA, 744 bp, synthetic construct
  misc_feature 1..744: note = Description of Artificial Sequence: Synthetic coding sequence
  source 1..744: mol_type = other DNA
ctgaagcagttcaccgagaagatgcagagcgacatggagaagatccaggagagcgccgacagcctggagggcggcatcctggacctgggcagcgtgctgagccacatcctgcccgtgagcgagctgagagaggcccagctgtacagcgtggacgtgaccctggaccccgacaccgcctaccccagcctgatcctgagcgacaacctgagacaggtgagatacagctacctgcagcaggacctgcccgacaaccccgagagattcaacctgttcccctgcgtgctgggcagcccctgcttcatcgccggcagacactactgggaggtggaggtgggcgacaaggccaagtggaccatcggcgtgtgcgaggacagcgtgtgcagaaagggcggcgtgaccagcgccccccagaacggcttctgggccgtgagcctgtggtacggcaaggagtactgggccctgaccagccccatgaccgccctgcccctgagaacccccctgcagagagtgggcatcttcctggactacgacgccggcgaggtgagcttctacaacgtgaccgagagatgccacaccttcaccttcagccacgccaccttctgcggccccgtgagaccctacttcagcctgagctacagcggcggcaagagcgccgcccccctgatcatctgccccatgagcggcatcgacggcttcagcggccacgtgggcaaccacggccacagcatggagaccagcccctag

SEQ ID NO: 103415 - DNA, 750 bp, synthetic construct; identical to SEQ ID NO: 103409
  misc_feature 1..750: note = Description of Artificial Sequence: Synthetic coding sequence
  source 1..750: mol_type = other DNA

SEQ ID NO: 103416 - DNA, 159 bp, synthetic construct
  misc_feature 1..159: note = Description of Artificial Sequence: Synthetic coding sequence
  source 1..159: mol_type = other DNA
tgactgagagaggcccagctgtacagcgtggacgtgaccctggaccccgacaccgcctaccccagcctgatcctgagcgacaacctgagacaggtgagatacagctacctgcagcaggacctgcccgacaaccccgagagaagccccagcaccacctag

SEQ ID NO: 103417 - DNA, 696 bp, synthetic construct
  misc_feature 1..696: note = Description of Artificial Sequence: Synthetic coding sequence
  source 1..696: mol_type = other DNA
tgaagcgccgacagcctggagggcggcatcctggacctgggcagcgtgctgagccacatcctgcccgtgagcgagctgagagaggcccagctgtacagcgtggacgtgaccctggaccccgacaccgcctaccccagcctgatcctgagcgacaacctgagacaggtgagatacagctacctgcagcaggacctgcccgacaaccccgagagattcaacctgttcccctgcgtgctgggcagcccctgcttcatcgccggcagacactactgggaggtggaggtgggcgacaaggccaagtggaccatcggcgtgtgcgaggacagcgtgtgcagaaagggcggcgtgaccagcgccccccagaacggcttctgggccgtgagcctgtggtacggcaaggagtactgggccctgaccagccccatgaccgccctgcccctgagaacccccctgcagagagtgggcatcttcctggactacgacgccggcgaggtgagcttctacaacgtgaccgagagatgccacaccttcaccttcagccacgccaccttctgcggccccgtgagaccctacttcagcctgagctacagcggcggcaagagcgccgcccccctgatcatctgccccatgagcggcatcgacggcttcagcggccacgtgggcaaccacggccacagcatggagaccagcccctag

SEQ ID NO: 103418 - DNA, 624 bp, synthetic construct
  misc_feature 1..624: note = Description of Artificial Sequence: Synthetic coding sequence
  source 1..624: mol_type = other DNA
tgactgagagaggcccagctgtacagcgtggacgtgaccctggaccccgacaccgcctaccccagcctgatcctgagcgacaacctgagacaggtgagatacagctacctgcagcaggacctgcccgacaaccccgagagattcaacctgttcccctgcgtgctgggcagcccctgcttcatcgccggcagacactactgggaggtggaggtgggcgacaaggccaagtggaccatcggcgtgtgcgaggacagcgtgtgcagaaagggcggcgtgaccagcgccccccagaacggcttctgggccgtgagcctgtggtacggcaaggagtactgggccctgaccagccccatgaccgccctgcccctgagaacccccctgcagagagtgggcatcttcctggactacgacgccggcgaggtgagcttctacaacgtgaccgagagatgccacaccttcaccttcagccacgccaccttctgcggccccgtgagaccctacttcagcctgagctacagcggcggcaagagcgccgcccccctgatcatctgccccatgagcggcatcgacggcttcagcggccacgtgggcaaccacggccacagcatggagaccagcccctag

SEQ ID NO: 103419 - DNA, 1077 bp, synthetic construct; identical to SEQ ID NO: 103400
  misc_feature 1..1077: note = Description of Artificial Sequence: Synthetic coding sequence
  source 1..1077: mol_type = other DNA

SEQ ID NO: 103420 - DNA, 747 bp, synthetic construct; identical to SEQ ID NO: 103404
  misc_feature 1..747: note = Description of Artificial Sequence: Synthetic coding sequence
  source 1..747: mol_type = other DNA

SEQ ID NO: 103421 - DNA, 750 bp, synthetic construct; identical to SEQ ID NO: 103409
  misc_feature 1..750: note = Description of Artificial Sequence: Synthetic coding sequence
  source 1..750: mol_type = other DNA

SEQ ID NO: 103422 - DNA, 2202 bp, synthetic construct
  misc_feature 1..2202: note = Description of Artificial Sequence: Synthetic coding sequence
  source 1..2202: mol_type = other DNA
atggccaagagagaggacagccccggccccgaggtgcagcccatggacaagcagttcctggtgtgcagcatctgcctggacagataccagtgccccaaggtgctgccctgcctgcacaccttctgcgagagatgcctgcagaactacatccccgcccagagcctgaccctgagctgccccgtgtgcagacagaccagcatcctgcccgagcagggcgtgagcgccctgcagaacaacttcttcatcagcagcctgatggaggccatgcagcaggcccccgacggcgcccacgaccccgaggacccccaccccctgagcgtggtggccggcagacccctgagctgccccaaccacgagggcaagaccatggagttctactgcgaggcctgcgagaccgccatgtgcggcgagtgcagagccggcgagcacagagagcagcacaaggccgccctgcagagacagctggaggccgtgagaggcagactgccccagctgagcgccgccatcgccctggtgggcggcatcagccagcagctgcaggagagaaaggccgaggccctggcccagatcagcgccgccttcgaggacctggagcaggccctgcagcagagaaagcaggccctggtgagcgacctggagaccatctgcggcgccaagcagaaggtgctgcagagccagctggacaccctgagacagggccaggagcacatcggcagcagctgcagcttcgccgagcaggccctgagactgggcagcgcccccgaggtgctgctggtgagaaagcacatgagagagagactggccgccctggccgcccaggccttccccgagagaccccacgagaacgcccagctggagctggtgctggaggtggacggcctgagaagaagcgtgctgaacctgggcgccctgctgaccaccagcgccaccgcccacgagaccgtggccaccggcgagggcctgagacaggccctggtgggccagcccgccagcctgaccgtgaccaccaaggacaaggacggcagactggtgagaaccggcagcgccgagctgagagccgagatcaccggccccgacggcaccagactgcccgtgcccgtggtggaccacaagaacggcacctacgagctggtgtacaccgccagaaccgagggcgagctgctgctgagcgtgctgctgtacggccagcccgtgagaggcagccccttcagagtgagagccctgagacccggcgacctgccccccagccccgacgacgtgaagagaagagtgaagagccccggcggccccggcagccacgtgagacagaaggccgtgagaagacccagcagcatgtacagcaccggcggcaagagaaaggacaaccccatcgaggacgagctggtgttcagagtgggcagcagaggcagagagaagggcgagttcaccaacctgcagggcgtgagcgccgccagcagcggcagaatcgtggtggccgacagcaacaaccagtgcatccaggtgttcagcaacgagggccagttcaagttcagattcggcgtgagaggcagaagccccggccagctgcagagacccaccggcgtggccgtggacaccaacggcgacatcatcgtggccgactacgacaacagatgggtgagcatcttcagccccgagggcaagttcaagaccaagatcggcgccggcagactgatgggccccaagggcgtggccgtggacagaaacggccacatcatcgtggtggacaacaagagctgctgcgtgttcaccttccagcccaacggcaagctggtgggcagattcggcggcagaggcgccaccgacagacacttcgccggcccccacttcgtggccgtgaacaacaagaacgagatcgtggtgaccgacttccacaaccacagcgtgaaggtgtacagcgccgacggcgagttcctgttcaagttcggcagccacggcgagggcaacggccagttcaacgcccccaccggcgtggccgtggacagcaacggcaacatcatcgtggccgactggggcaacagcagaatccaggtgttcgacagcagcggcagcttcctgagctacatcaacaccagcgccgagcccctgtacggcccccagggcctggccctgaccagcgacggccacgtggtggtggccgacgccggcaaccactgcttcaaggcctacagatacctgcagtag

SEQ ID NO: 103423 - DNA, 2235 bp, synthetic construct
  misc_feature 1..2235: note = Description of Artificial Sequence: Synthetic coding sequence
  source 1..2235: mol_type = other DNA
atggccaagagagaggacagccccggccccgaggtgcagcccatggacaagcagttcctggtgtgcagcatctgcctggacagataccagtgccccaaggtgctgccctgcctgcacaccttctgcgagagatgcctgcagaactacatccccgcccagagcctgaccctgagctgccccgtgtgcagacagaccagcatcctgcccgagcagggcgtgagcgccctgcagaacaacttcttcatcagcagcctgatggaggccatgcagcaggcccccgacggcgcccacgaccccgaggacccccaccccctgagcgtggtggccggcagacccctgagctgccccaaccacgagggcaagaccatggagttctactgcgaggcctgcgagaccgccatgtgcggcgagtgcagagccggcgagcacagagagcacggcaccgtgctgctgagagacgtggtggagcagcacaaggccgccctgcagagacagctggaggccgtgagaggcagactgccccagctgagcgccgccatcgccctggtgggcggcatcagccagcagctgcaggagagaaaggccgaggccctggcccagatcagcgccgccttcgaggacctggagcaggccctgcagcagagaaagcaggccctggtgagcgacctggagaccatctgcggcgccaagcagaaggtgctgcagagccagctggacaccctgagacagggccaggagcacatcggcagcagctgcagcttcgccgagcaggccctgagactgggcagcgcccccgaggtgctgctggtgagaaagcacatgagagagagactggccgccctggccgcccaggccttccccgagagaccccacgagaacgcccagctggagctggtgctggaggtggacggcctgagaagaagcgtgctgaacctgggcgccctgctgaccaccagcgccaccgcccacgagaccgtggccaccggcgagggcctgagacaggccctggtgggccagcccgccagcctgaccgtgaccaccaaggacaaggacggcagactggtgagaaccggcagcgccgagctgagagccgagatcaccggccccgacggcaccagactgcccgtgcccgtggtggaccacaagaacggcacctacgagctggtgtacaccgccagaaccgagggcgagctgctgctgagcgtgctgctgtacggccagcccgtgagaggcagccccttcagagtgagagccctgagacccggcgacctgccccccagccccgacgacgtgaagagaagagtgaagagccccggcggccccggcagccacgtgagacagaaggccgtgagaagacccagcagcatgtacagcaccggcggcaagagaaaggacaaccccatcgaggacgagctggtgttcagagtgggcagcagaggcagagagaagggcgagttcaccaacctgcagggcgtgagcgccgccagcagcggcagaatcgtggtggccgacagcaacaaccagtgcatccaggtgttcagcaacgagggccagttcaagttcagattcggcgtgagaggcagaagccccggccagctgcagagacccaccggcgtggccgtggacaccaacggcgacatcatcgtggccgactacgacaacagatgggtgagcatcttcagccccgagggcaagttcaagaccaagatcggcgccggcagactgatgggccccaagggcgtggccgtggacagaaacggccacatcatcgtggtggacaacaagagctgctgcgtgttcaccttccagcccaacggcaagctggtgggcagattcggcggcagaggcgccaccgacagacacttcgccggcccccacttcgtggccgtgaacaacaagaacgagatcgtggtgaccgacttccacaaccacagcgtgaaggtgtacagcgccgacggcgagttcctgttcaagttcggcagccacggcgagggcaacggccagttcaacgcccccaccggcgtggccgtggacagcaacggcaacatcatcgtggccgactggggcaacagcagaatccaggtgttcgacagcagcggcagcttcctgagctacatcaacaccagcgccgagcccctgtacggcccccagggcctggccctgaccagcgacggccacgtggtggtggccgacgccggcaaccactgcttcaaggcctacagatacctgcagtag

SEQ ID NO: 103424 - DNA, 2235 bp, synthetic construct; identical to SEQ ID NO: 103423
  misc_feature 1..2235: note = Description of Artificial Sequence: Synthetic coding sequence
  source 1..2235: mol_type = other DNA

SEQ ID NO: 103425 - DNA, 2235 bp, synthetic construct; identical to SEQ ID NO: 103423
  misc_feature 1..2235: note = Description of Artificial Sequence: Synthetic coding sequence
  source 1..2235: mol_type = other DNA

SEQ ID NO: 103426 - DNA, 2229 bp, synthetic construct
  misc_feature 1..2229: note = Description of Artificial Sequence: Synthetic coding sequence
  source 1..2229: mol_type = other DNA
atggccaagagagaggacagccccggccccgaggtgcagcccatggacaagcagttcctggtgtgcagcatctgcctggacagataccagtgccccaaggtgctgccctgcctgcacaccttctgcgagagatgcctgcagaactacatccccgcccagagcctgaccctgagctgccccgtgtgcagacagaccagcatcctgcccgagcagggcgtgagcgccctgcagaacaacttcttcatcagcagcctgatggaggccatgcagcaggcccccgacggcgcccacgaccccgaggacccccaccccctgagcgtggtggccggcagacccctgagctgccccaaccacgagggcaagaccatggagttctactgcgaggcctgcgagaccgccatgtgcggcgagtgcagagccggcgagcacagagagcacggcaccgtgctgctgagagacgtggtggagcagcacaaggccgccctgcagagacagctggaggccgtgagaggcagactgccccagctgagcgccgccatcgccctggtgggcggcatcagccagcagctgcaggagagaaaggccgaggccctggcccagatcagcgccgccttcgaggacctggagcaggccctgcagcagagaaagcaggccctggtgagcgacctggagaccatctgcggcgccaagcagaaggtgctgcagagccagctggacaccctgagacagggccaggagcacatcggcagcagctgcagcttcgccgagcaggccctgagactgggcagcgcccccgaggtgctgctggtgagaaagcacatgagagagagactggccgccctggccgcccaggccttccccgagagaccccacgagaacgcccagctggagctggtgctggaggtggacggcctgagaagaagcgtgctgaacctgggcgccctgctgaccaccagcgccaccgcccacgagaccgtggccaccggcgagggcctgagacaggccctggtgggccagcccgccagcctgaccgtgaccaccaaggacaaggacggcagactggtgagaaccggcagcgccgagctgagagccgagatcaccggccccgacggcaccagactgcccgtgcccgtggtggaccacaagaacggcacctacgagctggtgtacaccgccagaaccgagggcgagctgctgctgagcgtgctgctgtacggccagcccgtgagaggcagccccttcagagtgagagccctgagacccggcgacctgccccccagccccgacgacgtgaagagaagagtgaagagccccggcggccccggcagccacgtgagacagaaggccgtgagaagacccagcagcatgtacagcaccggcggcaagagaaaggacaaccccatcgaggacgagctggtgttcagagtgggcagcagaggcagagagaagggcgagttcaccaacctgcagggcgtgagcgccgccagcagcggcagaatcgtggtggccgacagcaacaaccagtgcatccaggtgttcagcaacgagggccagttcaagttcagattcggcgtgagaggcagaagccccggccagctgcagagacccaccggcgtggccgtggacaccaacggcgacatcatcgtggccgactacgacaacagatgggtgagcatcttcagccccgagggcaagttcaagaccaagatcggcgccggcagactgatgggccccaagggcgtggccgtggacagaaacggccacatcatcgtggtggacaacaagagctgctgcgtgttcaccttccagcccaacggcaagctggtgggcagattcggcggcagaggcgccaccgacagacacttcgccggcccccacttcgtggccgtgaacaacaagaacgagatcgtggtgaccgacttccacaaccacagcgtgaaggtgtacagcgccgacggcgagttcctgttcaagttcggcagccacggcgagggcaacggccagttcaacgcccccaccggcgtggccgtggacagcaacggcaacatcatcgacgtgtgcagagccagcccctaccccagctacacccccccccacccctgccagagcgccccccacccccccgcctggggccagaacagcctgccccaggacagaagccccagcagctgcctgcccaccaccctgtacaccctgaccgagaccgccatcccccaccccccctactag

SEQ ID NO: 103427 - DNA, 1878 bp, synthetic construct
  misc_feature 1..1878: note = Description of Artificial Sequence: Synthetic coding sequence
  source 1..1878: mol_type = other DNA
atgaagaccatggagttctactgcgaggcctgcgagaccgccatgtgcggcgagtgcagagccggcgagcacagagagcacggcaccgtgctgctgagagacgtggtggagcagcacaaggccgccctgcagagacagctggaggccgtgagaggcagactgccccagctgagcgccgccatcgccctggtgggcggcatcagccagcagctgcaggagagaaaggccgaggccctggcccagatcagcgccgccttcgaggacctggagcaggccctgcagcagagaaagcaggccctggtgagcgacctggagaccatctgcggcgccaagcagaaggtgctgcagagccagctggacaccctgagacagggccaggagcacatcggcagcagctgcagcttcgccgagcaggccctgagactgggcagcgcccccgaggtgctgctggtgagaaagcacatgagagagagactggccgccctggccgcccaggccttccccgagagaccccacgagaacgcccagctggagctggtgctggaggtggacggcctgagaagaagcgtgctgaacctgggcgccctgctgaccaccagcgccaccgcccacgagaccgtggccaccggcgagggcctgagacaggccctggtgggccagcccgccagcctgaccgtgaccaccaaggacaaggacggcagactggtgagaaccggcagcgccgagctgagagccgagatcaccggccccgacggcaccagactgcccgtgcccgtggtggaccacaagaacggcacctacgagctggtgtacaccgccagaaccgagggcgagctgctgctgagcgtgctgctgtacggccagcccgtgagaggcagccccttcagagtgagagccctgagacccggcgacctgccccccagccccgacgacgtgaagagaagagtgaagagccccggcggccccggcagccacgtgagacagaaggccgtgagaagacccagcagcatgtacagcaccggcggcaagagaaaggacaaccccatcgaggacgagctggtgttcagagtgggcagcagaggcagagagaagggcgagttcaccaacctgcagggcgtgagcgccgccagcagcggcagaatcgtggtggccgacagcaacaaccagtgcatccaggtgttcagcaacgagggccagttcaagttcagattcggcgtgagaggcagaagccccggccagctgcagagacccaccggcgtggccgtggacaccaacggcgacatcatcgtggccgactacgacaacagatgggtgagcatcttcagccccgagggcaagttcaagaccaagatcggcgccggcagactgatgggccccaagggcgtggccgtggacagaaacggccacatcatcgtggtggacaacaagagctgctgcgtgttcaccttccagcccaacggcaagctggtgggcagattcggcggcagaggcgccaccgacagacacttcgccggcccccacttcgtggccgtgaacaacaagaacgagatcgtggtgaccgacttccacaaccacagcgtgaaggtgtacagcgccgacggcgagttcctgttcaagttcggcagccacggcgagggcaacggccagttcaacgcccccaccggcgtggccgtggacagcaacggcaacatcatcgtggccgactggggcaacagcagaatccaggtgttcgacagcagcggcagcttcctgagctacatcaacaccagcgccgagcccctgtacggcccccagggcctggccctgaccagcgacggccacgtggtggtggccgacgccggcaaccactgcttcaaggcctacagatacctgcagtag

SEQ ID NO: 103428 - DNA, 2001 bp, synthetic construct
  misc_feature 1..2001: note = Description of Artificial Sequence: Synthetic coding sequence
  source 1..2001: mol_type = other DNA
atggccaagagagaggacagccccggccccgaggtgcagcccatggacaagcagttcctggtgtgcagcatctgcctggacagataccagtgccccaaggtgctgccctgcctgcacaccttctgcgagagatgcctgcagaactacatccccgcccagagcctgaccctgagctgccccgtgtgcagacagaccagcatcctgcccgagcagggcgtgagcgccctgcagaacaacttcttcatcagcagcctgatggaggccatgcagcaggcccccgacggcgcccacgaccccgaggacccccaccccctgagcgtggtggccggcagacccctgagctgccccaaccacgagggcaagaccatggagttctactgcgaggcctgcgagaccgccatgtgcggcgagtgcagagccggcgagcacagagagcacggcaccgtgctgctgagagacgtggtggagcagcacaaggccgccctgcagagacagctggaggccgtgagaggcagactgccccagctgagcgccgccatcgccctggtgggcggcatcagccagcagctgcaggagagaaaggccgaggccctggcccagatcagcgccgccttcgaggacctggagcaggccctgcagcagagaaagcaggccctggtgagcgacctggtggacggcctgagaagaagcgtgctgaacctgggcgccctgctgaccaccagcgccaccgcccacgagaccgtggccaccggcgagggcctgagacaggccctggtgggccagcccgccagcctgaccgtgaccaccaaggacaaggacggcagactggtgagaaccggcagcgccgagctgagagccgagatcaccggccccgacggcaccagactgcccgtgcccgtggtggaccacaagaacggcacctacgagctggtgtacaccgccagaaccgagggcgagctgctgctgagcgtgctgctgtacggccagcccgtgagaggcagccccttcagagtgagagccctgagacccggcgacctgccccccagccccgacgacgtgaagagaagagtgaagagccccggcggccccggcagccacgtgagacagaaggccgtgagaagacccagcagcatgtacagcaccggcggcaagagaaaggacaaccccatcgaggacgagctggtgttcagagtgggcagcagaggcagagagaagggcgagttcaccaacctgcagggcgtgagcgccgccagcagcggcagaatcgtggtggccgacagcaacaaccagtgcatccaggtgttcagcaacgagggccagttcaagttcagattcggcgtgagaggcagaagccccggccagctgcagagacccaccggcgtggccgtggacaccaacggcgacatcatcgtggccgactacgacaacagatgggtgagcatcttcagccccgagggcaagttcaagaccaagatcggcgccggcagactgatgggccccaagggcgtggccgtggacagaaacggccacatcatcgtggtggacaacaagagctgctgcgtgttcaccttccagcccaacggcaagctggtgggcagattcggcggcagaggcgccaccgacagacacttcgccggcccccacttcgtggccgtgaacaacaagaacgagatcgtggtgaccgacttccacaaccacagcgtgaaggtgtacagcgccgacggcgagttcctgttcaagttcggcagccacggcgagggcaacggccagttcaacgcccccaccggcgtggccgtggacagcaacggcaacatcatcgtggccgactggggcaacagcagaatccaggtgttcgacagcagcggcagcttcctgagctacatcaacaccagcgccgagcccctgtacggcccccagggcctggccctgaccagcgacggccacgtggtggtggccgacgccggcaaccactgcttcaaggcctacagatacctgcagtag

SEQ ID NO: 103429 - DNA, 2226 bp, synthetic construct
  misc_feature 1..2226: note = Description of Artificial Sequence: Synthetic coding sequence
  source 1..2226: mol_type = other DNA
atggccaagagagaggacagccccggccccgaggtgcagcccatggacaagcagttcctggtgtgcagcatctgcctggacagataccagtgccccaaggtgctgccctgcctgcacaccttctgcgagagatgcctgcagaactacatccccgcccagagcctgaccctgagctgccccgtgtgcagacagaccagcatcctgcccgagcagggcgtgagcgccctgcagaacaacttcttcatcagcagcctgatggaggccatgcagcaggcccccgacggcgcccacgaccccgaggacccccaccccctgagcgtggtggccggcagacccctgagctgccccaaccacgagggcaagaccatggagttctactgcgaggcctgcgagaccgccatgtgcggcgagtgcagagccggcgagcacagagagcacggcaccgtgctgctgagagacgtggtggagcagcacaaggccgccctgcagagacagctggaggccgtgagaggcagactgccccagctgagcgccgccatcgccctggtgggcggcatcagccagcagctgcaggagagaaaggccgaggccctggcccagatcagcgccgccttcgaggacctggagcaggccctgcagcagagaaagcaggccctggtgagcgacctggagaccatctgcggcgccaagcagaaggtgctgcagagccagctggacaccctgagacagggccaggagcacatcggcagcagctgcagcttcgccgagcaggccctgagactgggcagcgcccccgaggtgctgctggtgagaaagcacatgagagagagactggccgccctggccgcccaggccttccccgagagaccccacgagaacgcccagctggagctggtgctggaggtggacggcctgagaagaagcgtgctgaacctgggcgccctgctgaccaccagcgccaccgcccacgagaccgtggccaccggcgagggcctgagacaggccctggtgggccagcccgccagcctgaccgtgaccaccaaggacaaggacggcagactggtgagaaccggcagcgccgagctgagagccgagatcaccggccccgacggcaccagactgcccgtgcccgtggtggaccacaagaacggcacctacgagctggtgtacaccgccagaaccgagggcgagctgctgctgagcgtgctgctgtacggccagcccgtgagaggcagccccttcagagtgagagccctgagacccggcgacctgccccccagccccgacgacgtgaagagaagagtgaagagccccggcggccccggcagccacgtgagacagaaggccgtgagaagacccagcagcatgtacagcaccggcggcaagagaaaggacaaccccatcgaggacgagctggtgttcagagtgggcagcagaggcagagagaagggcgagttcaccaacctgcagggcgtgagcgccgccagcagcggcagaatcgtggtggccgacagcaacaaccagtgcatccaggtgttcagcaacgagggccagttcaagttcagattcggcgtgagaggcagaagccccggccagctgcagagacccaccggcgtggccgtggacaccaacggcgacatcatcgtggccgactacgacaacagatgggtgagcatcttcagccccgagggcaagttcaagaccaagatcggcgccggcagactgatgggccccaagggcgtggccgtggacagaaacggccacatcatcgtggtggacaacaagagctgctgcgtgttcaccttccagcccaacggcaagctggtgggcagattcggcggcagaggcgccaccgacagacacttcgccggcccccacttcgtggccgtgaacaacaagaacgagatcgtggtgaccgacttccacaaccacagcgtgaaggtgtacagcgccgacggcgagttcctgttcaagttcggcagccacggcgagggcaacggccagttcaacgcccccaccggcgtggccgtggacagcaacggcaacatcatcgtgtgcagagccagcccctaccccagctacacccccccccacccctgccagagcgccccccacccccccgcctggggccagaacagcctgccccaggacagaagccccagcagctgcctgcccaccaccctgtacaccctgaccgagaccgccatcccccaccccccctactag

SEQ ID NO: 103430 - DNA, 1278 bp, synthetic construct
  misc_feature 1..1278: note = Description of Artificial Sequence: Synthetic coding sequence
  source 1..1278: mol_type = other DNA
atggccagcggccagttcgtgaacaagctgcaggaggaggtgatctgccccatctgcctggacatcctgcagaagcccgtgaccatcgactgcggccacaacttctgcctgaagtgcatcacccagatcggcgagaccagctgcggcttcttcaagtgccccctgtgcaagaccagcgtgagaaagaacgccatcagattcaacagcctgctgagaaacctggtggagaagatccaggccctgcaggccagcgaggtgcagagcaagagaaaggaggccacctgccccagacaccaggagatgttccactacttctgcgaggacgacggcaagttcctgtgcttcgtgtgctgcgagagcaaggaccacaagagccacaacgtgagcctgatcgaggaggccgcccagaactaccagggccagatccaggagcagatccaggtgctgcagcagaaggagaaggagaccgtgcaggtgaaggcccagggcgtgcacagagtggacgtgttcaccgaccaggtggagcacgagaagcagagaatcctgaccgagttcgagctgctgcaccaggtgctggaggaggagaagaacttcctgctgagcagaatctactggctgggccacgagggcaccgaggccggcaagcactacgtggccagcaccgagccccagctgaacgacctgaagaagctggtggacagcctgaagaccaagcagaacatgccccccagacagctgctggaggacatcaaggtggtgctgtgcagaagcgaggagttccagttcctgaaccccacccccgtgcccctggagctggagaagaagctgagcgaggccaagagcagacacgacagcatcaccggcagcctgaagaagttcaaggaccagctgcaggccgacagaaagaaggacgagaacagattcttcaagagcatgaacaagaacgacatgaagagctggggcctgctgcagaagaacaaccacaagatgaacaagaccagcgagcccggcagcagcagcgccggcggcagaaccaccagcggcccccccaaccaccacagcagcgcccccagccacagcctgttcagagccagcagcgccggcaaggtgaccttccccgtgtgcctgctggccagctacgacgagatcagcggccagggcgccagcagccaggacaccaagaccttcgacgtggccctgagcgaggagctgcacgccgccctgagcgagtggctgaccgccatcagagcctggttctgcgaggtgcccagcagctag

SEQ ID NO: 103431 - DNA, 1278 bp, synthetic construct
  misc_feature 1..1278: note = Description of Artificial Sequence: Synthetic coding sequence
  source 1..1278: mol_type = other DNA
atggccagcggccagttcgtgaacaagctgcaggaggaggtgatctgccccatctgcctggacatcctgcagaagcccgtgaccatcgactgcggccacaacttctgcctgaagtgcatcacccagatcggcgagaccagctgcggcttcttcaagtgccccctgtgcaagaccagcgtgagaaagaacgccatcagattcaacagcctgctgagaaacctggtggagaagatccaggccctgcaggccagcgaggtgcagagcaagagaaaggaggccacctgccccagacaccaggagatgttccactacttctgcgaggacgacggcaagttcctgtgcttcgtgtgcagagagagcaaggaccacaagagccacaacgtgagcctgatcgaggaggccgcccagaactaccagggccagatccaggagcagatccaggtgctgcagcagaaggagaaggagaccgtgcaggtgaaggcccagggcgtgcacagagtggacgtgttcaccgaccaggtggagcacgagaagcagagaatcctgaccgagttcgagctgctgcaccaggtgctggaggaggagaagaacttcctgctgagcagaatctactggctgggccacgagggcaccgaggccggcaagcactacgtggccagcaccgagccccagctgaacgacctgaagaagctggtggacagcctgaagaccaagcagaacatgccccccagacagctgctggagcccgcccagccccacctgcccagaagcgaggagttccagttcctgaaccccacccccgtgcccctggagctggagaagaagctgagcgaggccaagagcagacacgacagcatcaccggcagcctgaagaagttcaaggaccagctgcaggccgacagaaagaaggacgagaacagattcttcaagagcatgaacaagaacgacatgaagagctggggcctgctgcagaagaacaaccacaagatgaacaagaccagcgagcccggcagcagcagcgccggcggcagaaccaccagcggcccccccaaccaccacagcagcgcccccagccacagcctgttcagagccagcagcgccggcaaggtgaccttccccgtgtgcctgctggccagctacgacgagatcagcggccagggcgccagcagccaggacaccaagaccttcgacgtggccctgagcgaggagctgcacgccgccctgagcgagtggctgaccgccatcagagcctggttctgcgaggtgcccagcagctag

SEQ ID NO: 103432 - DNA, 1278 bp, synthetic construct
  misc_feature 1..1278: note = Description of Artificial Sequence: Synthetic coding sequence
  source 1..1278: mol_type = other DNA
atggccagcggccagttcgtgaacaagctgcaggaggaggtgatctgccccatctgcctggacatcctgcagaagcccgtgaccatcgactgcggccacaacttctgcctgaagtgcatcacccagatcggcgagaccagctgcggcttcttcaagtgccccctgtgcaagaccagcgtgagaaagaacgccatcagattcaacagcctgctgagaaacctggtggagaagatccaggccctgcaggccagcgaggtgcagagcaagagaaaggaggccacctgccccagacaccaggagatgttccactacttctgcgaggacgacggcaagttcctgtgcttcgtgtgcagagagagcaaggaccacaagagccacaacgtgagcctgatcgaggaggccgcccagaactaccagggccagatccaggagcagatccaggtgctgcagcagaaggagaaggagaccgtgcaggtgaaggcccagggcgtgcacagagtggacgtgttcaccgaccaggtggagcacgagaagcagagaatcctgaccgagttcgagctgctgcaccaggtgctggaggaggagaagaacttcctgctgagcagaatctactggctgggccacgagggcaccgaggccggcaagcactacgtggccagcaccgagccccagctgaacgacctgaagaagctggtggacagcctgaagaccaagcagaacatgccccccagacagctgctggaggacatcaaggtggtgctgtgcagaagcgaggagttccagttcctgaaccccacccccgtgcccctggagctggagaagaagctgagcgaggccaagagcagacacgacagcatcaccggcagcctgaagaagttcaaggaccagctgcaggccgacagaaagaaggacgagaacagattcttcaagagcatgaacaagaacgacatgaagagctggggcctgctgcagaagaacaaccacaagatgaacaagaccagcgagcccggcagcagcagcgccggcggcagaaccaccagcggcccccccaaccaccacagcagcgcccccagccacagcctgttcagagccagcagcgccggcaaggtgaccttccccgtgtgcctgctggccagctacgacgagatcagcggccagggcgccagcagccaggacaccaagaccttcgacgtggccctgagcgaggagctgcacgccgccctgagcgagtggctgaccgccatcagagcctggttctgcgaggtgcccagcagctag

SEQ ID NO: 103433 - DNA, 747 bp, synthetic construct
  misc_feature 1..747: note = Description of Artificial Sequence: Synthetic coding sequence
  source 1..747: mol_type = other DNA
atggccagcggccagttcgtgaacaagctgcaggaggaggtgatctgccccatctgcctggacatcctgcagaagcccgtgaccatcgactgcggccacaacttctgcctgaagtgcatcacccagatcggcgagaccagctgcggcttcttcaagtgccccctgtgcaagaccagcgtgagaaagaacgccatcagattcaacagcctgctgagaaacctggtggagaagatccaggccctgcaggccagcgaggtgcagagcaagagaaaggaggccacctgccccagacaccaggagatgttccactacttctgcgaggacgacggcaagttcctgtgcttcgtgtgcagagagagcaaggaccacaagagccacaacgtgagcctgatcgaggaggccgcccagaactaccagggccagatccaggagcagatccaggtgctgcagcagaaggagaaggagaccgtgcaggtgaaggcccagggcgtgcacagagtggacgtgttcaccgaccaggtggagcacgagaagcagagaatcctgaccgagttcgagctgctgcaccaggtgctggaggaggagaagaacttcctgctgagcagaatctactggctgggccacgagggcaccgaggccggcaagcactacgtggccagcaccgagccccagctgaacgacctgaagaagctggtggacagcctgaagaccaagcagaacatgccccccagacagctgctggagtag

SEQ ID NO: 103434 - DNA, 1278 bp, synthetic construct
  misc_feature 1..1278: note = Description of Artificial Sequence: Synthetic coding sequence
  source 1..1278: mol_type = other DNA
atggccagcggccagttcgtgaacaagctgcaggaggaggtgatctgccccatctgcctggacatcctgcagaagcccgtgaccatcgactgcggccacaacttctgcctgaagtgcatcacccagatcggcgagaccagctgcggcttcttcaagtgccccctgtgcaagaccagcgtgagaaagaacgccatcagattcaacagcctgctgagaaacctggtggagaagatccaggccctgcaggccagcgaggtgcagagcaagagaaaggaggccacctgccccagacaccaggagatgttccactacttctgcgaggacgacggcaagttcctgtgcttcgtgtgcagagagagcaaggaccacaagagccacaacgtgagcctgatcgaggaggccgcccagaactaccagggccagatccaggagcagatccaggtgctgcagcagaaggagaaggagaccgtgcaggtgaaggcccagggcgtgcacagagtggacgtgttcaccgaccaggtggagcacgagaagcagagaatcctgaccgagttcgagctgctgcaccaggtgctggaggaggagaagaacttcctgctgagcagaatctactggctgggccacgagggcaccgaggccggcaagcactacgtggccagcaccgagccccagctgaacgacctgaagaagctggtggacagcctgaagaccaagcagaacatgccccccagacagctgctggaggacatcaaggtggtgctgtgcagaagcgaggagttccagttcctgaaccccacccccgtgcccctggagctggagaagaagctgagcgaggccaagagcagacacgacagcatcaccggcagcctgaagaagttcaaggaccagctgcaggccgacagaaagaaggacgagaacagattcttcaagagcatgaacaagaacgacatgaagagctggggcctgctgcagaagaacaaccacaagatgaacaagaccagcgagcccggcagcagcagcgccggcggcagaaccaccagcggcccccccaaccaccacagcagcgcccccagccacagcctgttcagagccagcagcgccggcaaggtgaccttccccgtgtgcctgctggccagctacgacgagatcagcggccagggcgccagcagccaggacaccaagaccttcgacgtggccctgagcgaggagctgcacgccgccctgagcgagtggctgaccgccatcagagcctggttctgcaaggtgcccagcagctag

SEQ ID NO: 103435 - DNA, 1278 bp, synthetic construct; identical to SEQ ID NO: 103432
  misc_feature 1..1278: note = Description of Artificial Sequence: Synthetic coding sequence
  source 1..1278: mol_type = other DNA

SEQ ID NO: 103436 - DNA, 1278 bp, synthetic construct; identical to SEQ ID NO: 103432
  misc_feature 1..1278: note = Description of Artificial Sequence: Synthetic coding sequence
  source 1..1278: mol_type = other DNA

SEQ ID NO: 103437 - DNA, 1278 bp, synthetic construct; identical to SEQ ID NO: 103432
  misc_feature 1..1278: note = Description of Artificial Sequence: Synthetic coding sequence
  source 1..1278: mol_type = other DNA

SEQ ID NO: 103438 - DNA, 1278 bp, synthetic construct
  misc_feature 1..1278: note = Description of Artificial Sequence: Synthetic coding sequence
  source 1..1278: mol_type = other DNA
atggccagcggccagttcgtgaacaagctgcaggaggaggtgatctgccccatctgcctggacatcctgcagaagcccgtgaccatcgactgcggccacaacttctgcctgaagtgcatcacccagatcggcgagaccagctgcggcttcttcaagtgccccctgtgcaagaccagcgtgagaaagaacgccatcagattcaacagcctgctgagaaacctggtggagaagatccaggccctgcaggccagcgaggtgcagagcaagagaaaggaggccacctgccccagacaccaggagatgttccactacttctgcgaggacgacggcaagttcctgtgcttcgtgtgcagagagagcaaggaccacaagagccacaacgtgagcctgatcgaggaggccgcccagaactaccagggccagatccaggagcagatccaggtgctgcagcagaaggagaaggagaccgtgcaggtgaaggcccagggcgtgcacagagtggacgtgttcaccgaccaggtggagcacgagaagcagagaatcctgaccgagttcgagctgctgcaccaggtgctggaggaggagaagaacttcctgctgagcagaatctactggctgggccacgagggcaccgaggccggcaagcactacgtggccagcaccgagccccagctgaacgacctgaagaagctgatcgacagcctgaagaccaagcagaacatgccccccagacagctgctggaggacatcaaggtggtgctgtgcagaagcgaggagttccagttcctgaaccccacccccgtgcccctggagctggagaagaagctgagcgaggccaagagcagacacgacagcatcaccggcagcctgaagaagttcaaggaccagctgcaggccgacagaaagaaggacgagaacagattcttcaagagcatgaacaagaacgacatgaagagctggggcctgctgcagaagaacaaccacaagatgaacaagaccagcgagcccggcagcagcagcgccggcggcagaaccaccagcggcccccccaaccaccacagcagcgcccccagccacagcctgttcagagccagcagcgccggcaaggtgaccttccccgtgtgcctgctggccagctacgacgagatcagcggccagggcgccagcagccaggacaccaagaccttcgacgtggccctgagcgaggagctgcacgccgccctgagcgagtggctgaccgccatcagagcctggttctgcaaggtgcccagcagctag

SEQ ID NO: 103439 - DNA, 1278 bp, synthetic construct; identical to SEQ ID NO: 103432
  misc_feature 1..1278: note = Description of Artificial Sequence: Synthetic coding sequence
  source 1..1278: mol_type = other DNA

SEQ ID NO: 103440 - DNA, 1278 bp, synthetic construct; identical to SEQ ID NO: 103431
  misc_feature 1..1278: note = Description of Artificial Sequence: Synthetic coding sequence
  source 1..1278: mol_type = other DNA

SEQ ID NO: 103441 - DNA, 1278 bp, synthetic construct; identical to SEQ ID NO: 103434
  misc_feature 1..1278: note = Description of Artificial Sequence: Synthetic coding sequence
  source 1..1278: mol_type = other DNA

SEQ ID NO: 103442 - DNA, 1278 bp, synthetic construct; identical to SEQ ID NO: 103431
  misc_feature 1..1278: note = Description of Artificial Sequence: Synthetic coding sequence
  source 1..1278: mol_type = other DNA

SEQ ID NO: 103443 - DNA, 1278 bp, synthetic construct
  misc_feature 1..1278: note = Description of Artificial Sequence: Synthetic coding sequence
  source 1..1278: mol_type = other DNA
atggccagcggccagttcgtgaacaagctgcaggaggaggtgatctgccccatctgcctggacatcctgcagaagcccgtgaccatcgactgcggccacaacttctgcctgaagtgcatcacccagatcggcgagaccagctgcggcttcttcaagtgccccctgtgcaagaccagcgtgagaaagaacgccatcagattcaacagcctgctgagaaacctggtggagaagatccaggccctgcaggccagcgaggtgcagagcaagagaaaggaggccacctgccccagacaccaggagatgttccactacttctgcgaggacgacggcaagttcctgtgcttcgtgtgcagagagagcaaggaccacaagagccacaacgtgagcctgatcgaggaggccgcccagaactaccagggccagatccaggagcagatccaggtgctgcagcagaaggagaaggagaccgtgcaggtgaaggcccagggcgtgcacagagtggacgtgttcaccgaccaggtggagcacgagaagcagagaatcctgaccgagttcgagctgctgcaccaggtgctggaggaggagaagaacttcctgctgagcagaatctactggctgggccacgagggcaccgaggccggcaagcactacgtggccagcaccgagccccagctgaacgacctgaagaagctgatcgacagcctgaagaccaagcagaacatgccccccagacagctgctggagcccgcccagccccacctgcccagaagcgaggagttccagttcctgaaccccacccccgtgcccctggagctggagaagaagctgagcgaggccaagagcagacacgacagcatcaccggcagcctgaagaagttcaaggaccagctgcaggccgacagaaagaaggacgagaacagattcttcaagagcatgaacaagaacgacatgaagagctggggcctgctgcagaagaacaaccacaagatgaacaagaccagcgagcccggcagcagcagcgccggcggcagaaccaccagcggcccccccaaccaccacagcagcgcccccagccacagcctgttcagagccagcagcgccggcaaggtgaccttccccgtgtgcctgctggccagctacgacgagatcagcggccagggcgccagcagccaggacaccaagaccttcgacgtggccctgagcgaggagctgcacgccgccctgagcgagtggctgaccgccatcagagcctggttctgcaaggtgcccagcagctag

SEQ ID NO: 103444 - DNA, 1278 bp, synthetic construct
  misc_feature 1..1278: note = Description of Artificial Sequence: Synthetic coding sequence
  source 1..1278: mol_type = other DNA
atggccagcggccagttcgtgaacaagctgcaggaggaggtgatctgccccatctgcctggacatcctgcagaagcccgtgaccatcgactgcggccacaacttctgcctgaagtgcatcacccagatcggcgagaccagctgcggcttcttcaagtgccccctgtgcaagaccagcgtgagaaagaacgccatcagattcaacagcctgctgagaaacctggtggagaagatccaggccctgcaggccagcgaggtgcagagcaagagaaaggaggccacctgccccagacaccaggagatgttccactacttctgcgaggacgacggcaagttcctgtgcttcgtgtgctgcgagagcaaggaccacaagagccacaacgtgagcctgatcgaggaggccgcccagaactaccagggccagatccaggagcagatccaggtgctgcagcagaaggagaaggagaccgtgcaggtgaaggcccagggcgtgcacagagtggacgtgttcaccgaccaggtggagcacgagaagcagagaatcctgaccgagttcgagctgctgcaccaggtgctggaggaggagaagaacttcctgctgagcagaatctactggctgggccacgagggcaccgaggccggcaagcactacgtggccagcaccgagccccagctgaacgacctgaagaagctggtggacagcctgaagaccaagcagaacatgccccccagacagctgctggagcccgcccagccccacctgcccagaagcgaggagttccagttcctgaaccccacccccgtgcccctggagctggagaagaagctgagcgaggccaagagcagacacgacagcatcaccggcagcctgaagaagttcaaggaccagctgcaggccgacagaaagaaggacgagaacagattcttcaagagcatgaacaagaacgacatgaagagctggggcctgctgcagaagaacaaccacaagatgaacaagaccagcgagcccggcagcagcagcgccggcggcagaaccaccagcggcccccccaaccaccacagcagcgcccccagccacagcctgttcagagccagcagcgccggcaaggtgaccttccccgtgtgcctgctggccagctacgacgagatcagcggccagggcgccagcagccaggacaccaagaccttcgacgtggccctgagcgaggagctgcacgccgccctgagcgagtggctgaccgccatcagagcctggttctgcgaggtgcccagcagctag

SEQ ID NO: 103445 - DNA, 1278 bp, synthetic construct; identical to SEQ ID NO: 103432
  misc_feature 1..1278: note = Description of Artificial Sequence: Synthetic coding sequence
  source 1..1278: mol_type = other DNA

SEQ ID NO: 103446 - DNA, 1278 bp, synthetic construct; identical to SEQ ID NO: 103431
  misc_feature 1..1278: note = Description of Artificial Sequence: Synthetic coding sequence
  source 1..1278: mol_type = other DNA

SEQ ID NO: 103447 - DNA, 1278 bp, synthetic construct; identical to SEQ ID NO: 103430
  misc_feature 1..1278: note = Description of Artificial Sequence: Synthetic coding sequence
  source 1..1278: mol_type = other DNA

SEQ ID NO: 103448 - DNA, 1278 bp, synthetic construct; identical to SEQ ID NO: 103438
  misc_feature 1..1278: note = Description of Artificial Sequence: Synthetic coding sequence
  source 1..1278: mol_type = other DNA

SEQ ID NO: 103449 - DNA, 1278 bp, synthetic construct
  misc_feature 1..1278: note = Description of Artificial Sequence: Synthetic coding sequence
  source 1..1278: mol_type = other DNA
atggccagcggccagttcgtgaacaagctgcaggaggaggtgatctgccccatctgcctggacatcctgcagaagcccgtgaccatcgactgcggccacaacttctgcctgaagtgcatcacccagatcggcgagaccagctgcggcttcttcaagtgccccctgtgcaagaccagcgtgagaaagaacgccatcagattcaacagcctgctgagaaacctggtggagaagatccaggccctgcaggccagcgaggtgcagagcaagagaaaggaggccacctgccccagacaccaggagatgttccactacttctgcgaggacgacggcaagttcctgtgcttcgtgtgcagagagagcaaggaccacaagagccacaacgtgagcctgatcgaggaggccgcccagaactaccagggccagatccaggagcagatccaggtgctgcagcagaaggagaaggagaccgtgcaggtgaaggcccagggcgtgcacagagtggacgtgttcaccgaccaggtggagcacgagaagcagagaatcctgaccgagttcgagctgctgcaccaggtgctggaggaggagaagaacttcctgctgagcagaatctactggctgggccacgagggcaccgaggccggcaagcactacgtggccagcaccgagccccagctgaacgacctgaagaagctggtggacagcctgaagaccaagcagaacatgccccccagacagctgctggagcccgcccagccccacctgcccagaagcgaggagttccagttcctgaaccccacccccgtgcccctggagctggagaagaagctgagcgaggccaagagcagacacgacagcatcaccggcagcctgaagaagttcaaggaccagctgcaggccgacagaaagaaggacgagaacagattcttcaagagcatgaacaagaacgacatgaagagctggggcctgctgcagaagaacaaccacaagatgaacaagaccagcgagcccggcagcagcagcgccggcggcagaaccaccagcggcccccccaaccaccacagcagcgcccccagccacagcctgttcagagccagcagcgccggcaaggtgaccttccccgtgtgcctgctggccagctacgacgagatcagcggccagggcgccagcagccaggacaccaagaccttcgacgtggccctgagcgaggagctgcacgccgccctgagcgagtggctgaccgccatcagagcctggttctgcaaggtgcccagcagctag

SEQ ID NO: 103450 - DNA, 1278 bp, synthetic construct; identical to SEQ ID NO: 103432
  misc_feature 1..1278: note = Description of Artificial Sequence: Synthetic coding sequence
  source 1..1278: mol_type = other DNA

SEQ ID NO: 103451 - DNA, 1278 bp, synthetic construct; identical to SEQ ID NO: 103432
  misc_feature 1..1278: note = Description of Artificial Sequence: Synthetic coding sequence
  source 1..1278: mol_type = other DNA

SEQ ID NO: 103452 - DNA, 1962 bp, synthetic construct
  misc_feature 1..1962: note = Description of Artificial Sequence: Synthetic coding sequence
  source 1..1962: mol_type = other DNA
atggccgccgccgccgccagccacctgaacctggacgccctgagagaggtgctggagtgccccatctgcatggagagcttcaccgaggagcagctgagacccaagctgctgcactgcggccacaccatctgcagacagtgcctggagaagctgctggccagcagcatcaacggcgtgagatgccccttctgcagcaagatcaccagaatcaccagcctgacccagctgaccgacaacctgaccgtgctgaagatcatcgacaccgccggcctgagcgaggccgtgggcctgctgatgtgcagaagctgcggcagaagactgcccagacagttctgcagaagctgcggcctggtgctgtgcgagccctgcagagaggccgaccaccagccccccggccactgcaccctgcccgtgaaggaggccgccgaggagagaagaagagacttcggcgagaagctgaccagactgagagagctgatgggcgagctgcagagaagaaaggccgccctggagggcgtgagcaaggacctgcaggccagatacaaggccgtgctgcaggagtacggccacgaggagagaagagtgcaggacgagctggccagaagcagaaagttcttcaccggcagcctggccgaggtggagaagagcaacagccaggtggtggaggagcagagctacctgctgaacatcgccgaggtgcaggccgtgagcagatgcgactacttcctggccaagatcaagcaggccgacgtggccctgctggaggagaccgccgacgaggaggagcccgagctgaccgccagcctgcccagagagctgaccctgcaggacgtggagctgctgaaggtgggccacgtgggccccctgcagatcggccaggccgtgaagaagcccagaaccgtgaacgtggaggacagctgggccatggaggccaccgccagcgccgccagcaccagcgtgaccttcagagagatggacatgagccccgaggaggtggtggccagccccagagccagccccgccaagcagagaggccccgaggccgccagcaacatccagcagtgcctgttcctgaagaagatgggcgccaagggcagcacccccggcatgttcaacctgcccgtgagcctgtacgtgaccagccagggcgaggtgctggtggccgacagaggcaactacagaatccaggtgttcaccagaaagggcttcctgaaggagatcagaagaagccccagcggcatcgacagcttcgtgctgagcttcctgggcgccgacctgcccaacctgacccccctgagcgtggccatgaactgccagggcctgatcggcgtgaccgacagctacgacaacagcctgaaggtgtacaccctggacggccactgcgtggcctgccacagaagccagctgagcaagccctggggcatcaccgccctgcccagcggccagttcgtggtgaccgacgtggagggcggcaagctgtggtgcttcaccgtggacagaggcagcggcgtggtgaagtacagctgcctgtgcagcgccgtgagacccaagttcgtgacctgcgacgccgagggcaccgtgtacttcacccagggcctgggcctgaacctggagaacagacagaacgagcaccacctggagggcggcttcagcatcggcagcgtgggccccgacggccagctgggcagacagatcagccacttcttcagcgagaacgaggacttcagatgcatcgccggcatgtgcgtggacgccagaggcgacctgatcgtggccgacagcagcagaaaggagatcctgcacttccccaagggcggcggctacagcgtgctgatcagagagggcctgacctgccccgtgggcatcgccctgacccccaagggccagctgctggtgctggactgctgggaccactgcatcaagatctacagctaccacctgagaagatacagcaccccctag

SEQ ID NO: 103453 - DNA, 522 bp, synthetic construct
  misc_feature 1..522: note = Description of Artificial Sequence: Synthetic coding sequence
  source 1..522: mol_type = other DNA
atggccgccgccgccgccagccacctgaacctggacgccctgagagaggtgctggagtgccccatctgcatggagagcttcaccgaggagcagctgagacccaagctgctgcactgcggccacaccatctgcagacagtgcctggagaagctgctggccagcagcatcaacggcgtgagatgccccttctgcagcaagatcaccagaatcaccagcctgacccagctgaccgacaacctgaccgtgctgaagatcatcgacaccgccggcctgagcgaggccgtgggcctgctgatgtgcagaagctgcggcagaagactgcccagacagttctgcagaagctgcggcctggtgctgtgcgagccctgcagagaggccgaccaccagccccccggccactgcaccctgcccgtgaaggaggccgccgaggagagaagaagagacttcggcgagaagctgaccagactgagagagctgatgggcgagctgcagagaagaaaggccgccctggagggcgtgtag

SEQ ID NO: 103454 - DNA, 1962 bp, synthetic construct; identical to SEQ ID NO: 103452
  misc_feature 1..1962: note = Description of Artificial Sequence: Synthetic coding sequence
  source 1..1962: mol_type = other DNA

SEQ ID NO: 103455 - DNA, 3384 bp, synthetic construct
  misc_feature 1..3384: note = Description of Artificial Sequence: Synthetic coding sequence
  source 1..3384: mol_type = other DNA
atggccgagaacaagggcggcggcgaggccgagagcggcggcggcggcagcggcagcgcccccgtgaccgccggcgccgccggccccgccgcccaggaggccgagccccccctgaccgccgtgctggtggaggaggaggaggaggagggcggcagagccggcgccgagggcggcgccgccggccccgacgacggcggcgtggccgccgccagcagcggcagcgcccaggccgccagcagccccgccgccagcgtgggcaccggcgtggccggcggcgccgtgagcacccccgcccccgcccccgccagcgcccccgcccccggccccagcgccggccccccccccggcccccccgccagcctgctggacacctgcgccgtgtgccagcagagcctgcagagcagaagagaggccgagcccaagctgctgccctgcctgcacagcttctgcctgagatgcctgcccgagcccgagagacagctgagcgtgcccatccccggcggcagcaacggcgacatccagcaggtgggcgtgatcagatgccccgtgtgcagacaggagtgcagacagatcgacctggtggacaactacttcgtgaaggacaccagcgaggcccccagcagcagcgacgagaagagcgagcaggtgtgcaccagctgcgaggacaacgccagcgccgtgggcttctgcgtggagtgcggcgagtggctgtgcaagacctgcatcgaggcccaccagagagtgaagttcaccaaggaccacctgatcagaaagaaggaggacgtgagcgagagcgtgggcgccagcggccagagacccgtgttctgccccgtgcacaagcaggagcagctgaagctgttctgcgagacctgcgacagactgacctgcagagactgccagctgctggagcacaaggagcacagataccagttcctggaggaggccttccagaaccagaagggcgccatcgagaacctgctggccaagctgctggagaagaagaactacgtgcacttcgccgccacccaggtgcagaacagaatcaaggaggtgaacgagaccaacaagagagtggagcaggagatcaaggtggccatcttcaccctgatcaacgagatcaacaagaagggcaagagcctgctgcagcagctggagaacgtgaccaaggagagacagatgaagctgctgcagcagcagaacgacatcaccggcctgagcagacaggtgaagcacgtgatgaacttcaccaactgggccatcgccagcggcagcagcaccgccctgctgtacagcaagagactgatcaccttccagctgagacacatcctgaaggccagatgcgaccccgtgcccgccgccaacggcgccatcagattccactgcgaccccaccttctgggccaagaacgtggtgaacctgggcaacctggtgatcgagagcaagcccgcccccggctacacccccaacgtggtggtgggccaggtgccccccggcaccaaccacatcagcaagacccccggccagatcaacctggcccagctgagactgcagcacatgcagcagcaggtgtacgcccagaagcaccagcagctgcagcagatgagaatgcagcagccccccgcccccgtgcccaccaccaccaccaccacccagcagcaccccagacaggccgccccccagatgctgcagcagcagccccccagactgatcagcgtgcagaccatgcagagaggcaacatgaactgcggcgccttccaggcccaccagatgagactggcccagaacgccgccagaatccccggcatccccagacacagcggcccccagtacagcatgatgcagccccacctgcagagacagcacagcaaccccggccacgccggccccttccccgtggtgagcgtgcacaacaccaccatcaaccccaccagccccaccaccgccaccatggccaacgccaacagaggccccaccagccccagcgtgaccgccatcgagctgatccccagcgtgaccaaccccgagaacctgcccagcctgcccgacatcccccccatccagctggaggacgccggcagcagcagcctggacaacctgctgagcagatacatcagcggcagccacctgcccccccagcccaccagcaccatgaaccccagccccggccccagcgccctgagccccggcagcagcggcctgagcaacagccacacccccgtgagaccccccagcaccagcagcaccggcagcagaggcagctgcggcagcagcggcagaaccgccgagaagaccagcctgagcttcaagagcgaccaggtgaaggtgaagcaggagcccggcaccgaggacgagatctgcagcttcagcggcggcgtgaagcaggagaagaccgaggacggcagaagaagcgcctgcatgctgagcagccccgagagcagcctgaccccccccctgagcaccaacctgcacctggagagcgagctggacgccctggccagcctggagaaccacgtgaagatcgagcccgccgacatgaacgagagctgcaagcagagcggcctgagcagcctggtgaacggcaagagccccatcagaagcctgatgcacagaagcgccagaatcggcggcgacggcaacaacaaggacgacgaccccaacgaggactggtgcgccgtgtgccagaacggcggcgacctgctgtgctgcgagaagtgccccaaggtgttccacctgacctgccacgtgcccaccctgctgagcttccccagcggcgactggatctgcaccttctgcagagacatcggcaagcccgaggtggagtacgactgcgacaacctgcagcacagcaagaagggcaagaccgcccagggcctgagccccgtggaccagagaaagtgcgagagactgctgctgtacctgtactgccacgagctgagcatcgagttccaggagcccgtgcccgccagcatccccaactactacaagatcatcaagaagcccatggacctgagcaccgtgaagaagaagctgcagaagaagcacagccagcactaccagatccccgacgacttcgtggccgacgtgagactgatcttcaagaactgcgagagattcaacgagatgatgaaggtggtgcaggtgtacgccgacacccaggagatcaacctgaaggccgacagcgaggtggcccaggccggcaaggccgtggccctgtacttcgaggacaagctgaccgagatctacagcgacagaaccttcgcccccctgcccgagttcgagcaggaggaggacgacggcgaggtgaccgaggacagcgacgaggacttcatccagcccagaagaaagagactgaagagcgacgagagacccgtgcacatcaagtag

SEQ ID NO: 103456 - DNA, 3333 bp, synthetic construct
  misc_feature 1..3333: note = Description of Artificial Sequence: Synthetic coding sequence
  source 1..3333: mol_type = other DNA
atggccgagaacaagggcggcggcgaggccgagagcggcggcggcggcagcggcagcgcccccgtgaccgccggcgccgccggccccgccgcccaggaggccgagccccccctgaccgccgtgctggtggaggaggaggaggaggagggcggcagagccggcgccgagggcggcgccgccggccccgacgacggcggcgtggccgccgccagcagcggcagcgcccaggccgccagcagccccgccgccagcgtgggcaccggcgtggccggcggcgccgtgagcacccccgcccccgcccccgccagcgcccccgcccccggccccagcgccggccccccccccggcccccccgccagcctgctggacacctgcgccgtgtgccagcagagcctgcagagcagaagagaggccgagcccaagctgctgccctgcctgcacagcttctgcctgagatgcctgcccgagcccgagagacagctgagcgtgcccatccccggcggcagcaacggcgacatccagcaggtgggcgtgatcagatgccccgtgtgcagacaggagtgcagacagatcgacctggtggacaactacttcgtgaaggacaccagcgaggcccccagcagcagcgacgagaagagcgagcaggtgtgcaccagctgcgaggacaacgccagcgccgtgggcttctgcgtggagtgcggcgagtggctgtgcaagacctgcatcgaggcccaccagagagtgaagttcaccaaggaccacctgatcagaaagaaggaggacgtgagcgagagcgtgggcgccagcggccagagacccgtgttctgccccgtgcacaagcaggagcagctgaagctgttctgcgagacctgcgacagactgacctgcagagactgccagctgctggagcacaaggagcacagataccagttcctggaggaggccttccagaaccagaagggcgccatcgagaacctgctggccaagctgctggagaagaagaactacgtgcacttcgccgccacccaggtgcagaacagaatcaaggaggtgaacgagaccaacaagagagtggagcaggagatcaaggtggccatcttcaccctgatcaacgagatcaacaagaagggcaagagcctgctgcagcagctggagaacgtgaccaaggagagacagatgaagctgctgcagcagcagaacgacatcaccggcctgagcagacaggtgaagcacgtgatgaacttcaccaactgggccatcgccagcggcagcagcaccgccctgctgtacagcaagagactgatcaccttccagctgagacacatcctgaaggccagatgcgaccccgtgcccgccgccaacggcgccatcagattccactgcgaccccaccttctgggccaagaacgtggtgaacctgggcaacctggtgatcgagagcaagcccgcccccggctacacccccaacgtggtggtgggccaggtgccccccggcaccaaccacatcagcaagacccccggccagatcaacctggcccagctgagactgcagcacatgcagcagcaggtgtacgcccagaagcaccagcagctgcagcagatgagaatgcagcagccccccgcccccgtgcccaccaccaccaccaccacccagcagcaccccagacaggccgccccccagatgctgcagcagcagccccccagactgatcagcgtgcagaccatgcagagaggcaacatgaactgcggcgccttccaggcccaccagatgagactggcccagaacgccgccagaatccccggcatccccagacacagcggcccccagtacagcatgatgcagccccacctgcagagacagcacagcaaccccggccacgccggccccttccccgtggtgagcgtgcacaacaccaccatcaaccccaccagccccaccaccgccaccatggccaacgccaacagaggccccaccagccccagcgtgaccgccatcgagctgatccccagcgtgaccaaccccgagaacctgcccagcctgcccgacatcccccccatccagctggaggacgccggcagcagcagcctggacaacctgctgagcagatacatcagcggcagccacctgcccccccagcccaccagcaccatgaaccccagccccggccccagcgccctgagccccggcagcagcggcctgagcaacagccacacccccgtgagaccccccagcaccagcagcaccggcagcagaggcagctgcggcagcagcggcagaaccgccgagaagaccagcctgagcttcaagagcgaccaggtgaaggtgaagcaggagcccggcaccgaggacgagatctgcagcttcagcggcggcgtgaagcaggagaagaccgaggacggcagaagaagcgcctgcatgctgagcagccccgagagcagcctgaccccccccctgagcaccaacctgcacctggagagcgagctggacgccctggccagcctggagaaccacgtgaagatcgagcccgccgacatgaacgagagctgcaagcagagcggcctgagcagcctggtgaacggcaagagccccatcagaagcctgatgcacagaagcgccagaatcggcggcgacggcaacaacaaggacgacgaccccaacgaggactggtgcgccgtgtgccagaacggcggcgacctgctgtgctgcgagaagtgccccaaggtgttccacctgacctgccacgtgcccaccctgctgagcttccccagcggcgactggatctgcaccttctgcagagacatcggcaagcccgaggtggagtacgactgcgacaacctgcagcacagcaagaagggcaagaccgcccagggcctgagccccgtggaccagagaaagtgcgagagactgctgctgtacctgtactgccacgagctgagcatcgagttccaggagcccgtgcccgccagcatccccaactactacaagatcatcaagaagcccatggacctgagcaccgtgaagaagaagctgcagaagaagcacagccagcactaccagatccccgacgacttcgtggccgacgtgagactgatcttcaagaactgcgagagattcaacgaggccgacagcgaggtggcccaggccggcaaggccgtggccctgtacttcgaggacaagctgaccgagatctacagcgacagaaccttcgcccccctgcccgagttcgagcaggaggaggacgacggcgaggtgaccgaggacagcgacgaggacttcatccagcccagaagaaagagactgaagagcgacgagagacccgtgcacatcaagtag

SEQ ID NO: 103457 - DNA, 2667 bp, synthetic construct
  misc_feature 1..2667: note = Description of Artificial Sequence: Synthetic coding sequence
  source 1..2667: mol_type = other DNA
tgaagcgtgggcgccagcggccagagacccgtgttctgccccgtgcacaagcaggagcagctgaagctgttctgcgagacctgcgacagactgacctgcagagactgccagctgctggagcacaaggagcacagataccagttcctggaggaggccttccagaaccagaagggcgccatcgagaacctgctggccaagctgctggagaagaagaactacgtgcacttcgccgccacccaggtgcagaacagaatcaaggaggtgaacgagaccaacaagagagtggagcaggagatcaaggtggccatcttcaccctgatcaacgagatcaacaagaagggcaagagcctgctgcagcagctggagaacgtgaccaaggagagacagatgaagctgctgcagcagcagaacgacatcaccggcctgagcagacaggtgaagcacgtgatgaacttcaccaactgggccatcgccagcggcagcagcaccgccctgctgtacagcaagagactgatcaccttccagctgagacacatcctgaaggccagatgcgaccccgtgcccgccgccaacggcgccatcagattccactgcgaccccaccttctgggccaagaacgtggtgaacctgggcaacctggtgatcgagagcaagcccgcccccggctacacccccaacgtggtggtgggccaggtgccccccggcaccaaccacatcagcaagacccccggccagatcaacctggcccagctgagactgcagcacatgcagcagcaggtgtacgcccagaagcaccagcagctgcagcagatgagaatgcagcagccccccgcccccgtgcccaccaccaccaccaccacccagcagcaccccagacaggccgccccccagatgctgcagcagcagccccccagactgatcagcgtgcagaccatgcagagaggcaacatgaactgcggcgccttccaggcccaccagatgagactggcccagaacgccgccagaatccccggcatccccagacacagcggcccccagtacagcatgatgcagccccacctgcagagacagcacagcaaccccggccacgccggccccttccccgtggtgagcgtgcacaacaccaccatcaaccccaccagccccaccaccgccaccatggccaacgccaacagaggccccaccagccccagcgtgaccgccatcgagctgatccccagcgtgaccaaccccgagaacctgcccagcctgcccgacatcccccccatccaggccaacgtggtgcccatgatgcacagctggtacgagttcggcgccagagagaagacccaggaccagaacgtgctggaggacgccggcagcagcagcctggacaacctgctgagcagatacatcagcggcagccacctgcccccccagcccaccagcaccatgaaccccagccccggccccagcgccctgagccccggcagcagcggcctgagcaacagccacacccccgtgagaccccccagcaccagcagcaccggcagcagaggcagctgcggcagcagcggcagaaccgccgagaagaccagcctgagcttcaagagcgaccaggtgaaggtgaagcaggagcccggcaccgaggacgagatctgcagcttcagcggcggcgtgaagcaggagaagaccgaggacggcagaagaagcgcctgcatgctgagcagccccgagagcagcctgaccccccccctgagcaccaacctgcacctggagagcgagctggacgccctggccagcctggagaaccacgtgaagatcgagcccgccgacatgaacgagagctgcaagcagagcggcctgagcagcctggtgaacggcaagagccccatcagaagcctgatgcacagaagcgccagaatcggcggcgacggcaacaacaaggacgacgaccccaacgaggactggtgcgccgtgtgccagaacggcggcgacctgctgtgctgcgagaagtgccccaaggtgttccacctgacctgccacgtgcccaccctgctgagcttccccagcggcgactggatctgcaccttctgcagagacatcggcaagcccgaggtggagtacgactgcgacaacctgcagcacagcaagaagggcaagaccgcccagggcctgagccccgtggaccagagaaagtgcgagagactgctgctgtacctgtactgccacgagctgagcatcgagttccaggagcccgtgcccgccagcatccccaactactacaagatcatcaagaagcccatggacctgagcaccgtgaagaagaagctgcagaagaagcacagccagcactaccagatccccgacgacttcgtggccgacgtgagactgatcttcaagaactgcgagagattcaacgagatgatgaaggtggtgcaggtgtacgccgacacccaggagatcaacctgaaggccgacagcgaggtggcccaggccggcaaggccgtggccctgtacttcgaggacaagctgaccgagatctacagcgacagaaccttcgcccccctgcccgagttcgagcaggaggaggacgacggcgaggtgaccgaggacagcgacgaggacttcatccagcccagaagaaagagactgaagagcgacgagagacccgtgcacatcaagtag

SEQ ID NO: 103458 - DNA, 2280 bp, synthetic construct
  misc_feature 1..2280: note = Description of Artificial Sequence: Synthetic coding sequence
  source 1..2280: mol_type = other DNA
atgaagctgctgcagcagcagaacgacatcaccggcctgagcagacaggtgaagcacgtgatgaacttcaccaactgggccatcgccagcggcagcagcaccgccctgctgtacagcaagagactgatcaccttccagctgagacacatcctgaaggccagatgcgaccccgtgcccgccgccaacggcgccatcagattccactgcgaccccaccttctgggccaagaacgtggtgaacctgggcaacctggtgatcgagagcaagcccgcccccggctacacccccaacgtggtggtgggccaggtgccccccggcaccaaccacatcagcaagacccccggccagatcaacctggcccagctgagactgcagcacatgcagcagcaggtgtacgcccagaagcaccagcagctgcagcagatgagaatgcagcagccccccgcccccgtgcccaccaccaccaccaccacccagcagcaccccagacaggccgccccccagatgctgcagcagcagccccccagactgatcagcgtgcagaccatgcagagaggcaacatgaactgcggcgccttccaggcccaccagatgagactggcccagaacgccgccagaatccccggcatccccagacacagcggcccccagtacagcatgatgcagccccacctgcagagacagcacagcaaccccggccacgccggccccttccccgtggtgagcgtgcacaacaccaccatcaaccccaccagccccaccaccgccaccatggccaacgccaacagaggccccaccagccccagcgtgaccgccatcgagctgatccccagcgtgaccaaccccgagaacctgcccagcctgcccgacatcccccccatccaggccaacgtggtgcccatgatgcacagctggtacgagttcggcgccagagagaagacccaggaccagaacgtgctggaggacgccggcagcagcagcctggacaacctgctgagcagatacatcagcggcagccacctgcccccccagcccaccagcaccatgaaccccagccccggccccagcgccctgagccccggcagcagcggcctgagcaacagccacacccccgtgagaccccccagcaccagcagcaccggcagcagaggcagctgcggcagcagcggcagaaccgccgagaagaccagcctgagcttcaagagcgaccaggtgaaggtgaagcaggagcccggcaccgaggacgagatctgcagcttcagcggcggcgtgaagcaggagaagaccgaggacggcagaagaagcgcctgcatgctgagcagccccgagagcagcctgaccccccccctgagcaccaacctgcacctggagagcgagctggacgccctggccagcctggagaaccacgtgaagatcgagcccgccgacatgaacgagagctgcaagcagagcggcctgagcagcctggtgaacggcaagagccccatcagaagcctgatgcacagaagcgccagaatcggcggcgacggcaacaacaaggacgacgaccccaacgaggactggtgcgccgtgtgccagaacggcggcgacctgctgtgctgcgagaagtgccccaaggtgttccacctgacctgccacgtgcccaccctgctgagcttccccagcggcgactggatctgcaccttctgcagagacatcggcaagcccgaggtggagtacgactgcgacaacctgcagcacagcaagaagggcaagaccgcccagggcctgagccccgtggaccagagaaagtgcgagagactgctgctgtacctgtactgccacgagctgagcatcgagttccaggagcccgtgcccgccagcatccccaactactacaagatcatcaagaagcccatggacctgagcaccgtgaagaagaagctgcagaagaagcacagccagcactaccagatccccgacgacttcgtggccgacgtgagactgatcttcaagaactgcgagagattcaacgagatgatgaaggtggtgcaggtgtacgccgacacccaggagatcaacctgaaggccgacagcgaggtggcccaggccggcaaggccgtggccctgtacttcgaggacaagctgaccgagatctacagcgacagaaccttcgcccccctgcccgagttcgagcaggaggaggacgacggcgaggtgaccgaggacagcgacgaggacttcatccagcccagaagaaagagactgaagagcgacgagagacccgtgcacatcaagtag

SEQ ID NO: 103459 - DNA, 2529 bp, synthetic construct
  misc_feature 1..2529: note = Description of Artificial Sequence: Synthetic coding sequence
  source 1..2529: mol_type = other DNA
atgtgcggcagcgagagaatcctgcaggccggcaacatcctggagatcagagtgggccaggccggcgccagaagagtggccaccatgaccagccccgtgctggtggacatcagagaggaggtgacctgccccatctgcctggagctgctgaccgagcccctgagcatcgactgcggccacagcttctgccaggcctgcatcacccccaacggcagagagagcgtgatcggccaggagggcgagagaagctgccccgtgtgccagaccagctaccagcccggcaacctgagacccaacagacacctggccaacatcgtgagaagactgagagaggtggtgctgggccccggcaagcagctgaaggccgtgctgtgcgccgaccacggcgagaagctgcagctgttctgccaggaggacggcaaggtgatctgctggctgtgcgagagaagccaggagcacagaggccaccacaccttcctggtggaggaggtggcccaggagtaccaggagaagttccaggagagcctgaagaagctgaagaacgaggagcaggaggccgagaagctgaccgccttcatcagagagaagaagaccagctggaagaaccagatggagcccgagagatgcagaatccagaccgagttcaaccagctgagaaacatcctggacagagtggagcagagagagctgaagaagctggagcaggaggagaagaagggcctgagaatcatcgaggaggccgagaacgacctggtgcaccagacccagagcctgagagagctgatcagcgacctggagagaagatgccagggcagcaccatggagctgctgcaggacgtgagcgacgtgaccgagagaagcgagttctggaccctgagaaagcccgaggccctgcccaccaagctgagaagcatgttcagagcccccgacctgaagagaatgctgagagtgtgcagagagctgaccgacgtgcagagctactgggccatccagggcagcctgaccagaagagagagaagagccagcggcgtgagaaccagaagaagccagggcagcagcgccatggccagcaagatcctgctgaacgtgcaggaggaggtgacctgccccatctgcctggagctgctgaccgagcccctgagcctggactgcggccacagcctgtgcagagcctgcatcaccgtgagcaacaaggaggccgtgaccagcatgggcggcaagagcagctgccccgtgtgcggcatcagctacagcttcgagcacctgcaggccaaccagcacctggccaacatcgtggagagactgaaggaggtgaagctgagccccgacaacggcaagaagagagacctgtgcgaccaccacggcgagaagctgctgctgttctgcaaggaggacagaaaggtgatctgctggctgtgcgagagaagccaggagcacagaggccaccacaccgtgctgaccgaggaggtgttcaaggagtgccaggagaagctgcaggccgtgctgaagagactgaagaaggaggaggaggaggccgagaagctggaggccgacatcagagaggagaagaccagctggaagtaccaggtgcagaccgagagacagagaatccagaccgagttcgaccagctgagaagcatcctgaacaacgaggagcagagagagctgcagagactggaggaggaggagaagaagaccctggacaagttcgccgaggccgaggacgagctggtgcagcagaagcagctggtgagagagctgatcagcgacgtggagtgcagaagccagtggagcaccatggagctgctgcaggacatgagcggcatcatgaagtggagcgagatctggagactgaagaagcccaagatggtgagcaagaagctgaagaccgtgttccacgcccccgacctgagcagaatgctgcagatgttcagagagctgaccgccgtgagatgctactgggtggacgtgaccctgaacagcgtgaacctgaacctgaacctggtgctgagcgaggaccagagacaggtgatcagcgtgcccatctggcccttccagtgctacaactacggcgtgctgggcagccagtacttcagcagcggcaagcactactgggaggtggacgtgagcaagaagaccgcctggatcctgggcgtgtactgcagaacctacagcagacacatgaagtacgtggtgagaagatgcgccaacagacagaacctgtacaccaagtacagacccctgttcggctactgggtgatcggcctgcagaacaagtgcaagtacggcgtgttcgaggagagcctgagcagcgaccccgaggtgctgaccctgagcatggccgtgcccccctgcagagtgggcgtgttcctggactacgaggccggcatcgtgagcttcttcaacgtgaccagccacggcagcctgatctacaagttcagcaagtgctgcttcagccagcccgtgtacccctacttcaacccctggaactgccccgcccccatgaccctgtgcccccccagcagctag

SEQ ID NO: 103460 - DNA, 1467 bp, synthetic construct
  misc_feature 1..1467: note = Description of Artificial Sequence: Synthetic coding sequence
  source 1..1467: mol_type = other DNA
atggccagcaagatcctgctgaacgtgcaggaggaggtgacctgccccatctgcctggagctgctgaccgagcccctgagcctggactgcggccacagcctgtgcagagcctgcatcaccgtgagcaacaaggaggccgtgaccagcatgggcggcaagagcagctgccccgtgtgcggcatcagctacagcttcgagcacctgcaggccaaccagcacctggccaacatcgtggagagactgaaggaggtgaagctgagccccgacaacggcaagaagagagacctgtgcgaccaccacggcgagaagctgctgctgttctgcaaggaggacagaaaggtgatctgctggctgtgcgagagaagccaggagcacagaggccaccacaccgtgctgaccgaggaggtgttcaaggagtgccaggagaagctgcaggccgtgctgaagagactgaagaaggaggaggaggaggccgagaagctggaggccgacatcagagaggagaagaccagctggaagtaccaggtgcagaccgagagacagagaatccagaccgagttcgaccagctgagaagcatcctgaacaacgaggagcagagagagctgcagagactggaggaggaggagaagaagaccctggacaagttcgccgaggccgaggacgagctggtgcagcagaagcagctggtgagagagctgatcagcgacgtggagtgcagaagccagtggagcaccatggagctgctgcaggacatgagcggcatcatgaagtggagcgagatctggagactgaagaagcccaagatggtgagcaagaagctgaagaccgtgttccacgcccccgacctgagcagaatgctgcagatgttcagagagctgaccgccgtgagatgctactgggtggacgtgaccctgaacagcgtgaacctgaacctgaacctggtgctgagcgaggaccagagacaggtgatcagcgtgcccatctggcccttccagtgctacaactacggcgtgctgggcagccagtacttcagcagcggcaagcactactgggaggtggacgtgagcaagaagaccgcctggatcctgggcgtgtactgcagaacctacagcagacacatgaagtacgtggtgagaagatgcgccaacagacagaacctgtacaccaagtacagacccctgttcggctactgggtgatcggcctgcagaacaagtgcaagtacggcgtgttcgaggagagcctgagcagcgaccccgaggtgctgaccctgagcatggccgtgcccccctgcagagtgggcgtgttcctggactacgaggccggcatcgtgagcttcttcaacgtgaccagccacggcagcctgatctacaagttcagcaagtgctgcttcagccagcccgtgtacccctacttcaacccctggaactgccccgcccccatgaccctgtgcccccccagcagctag

SEQ ID NO: 103461 - DNA, 1467 bp, synthetic construct; identical to SEQ ID NO: 103460
  misc_feature 1..1467: note = Description of Artificial Sequence: Synthetic coding sequence
  source 1..1467: mol_type = other DNA

SEQ ID NO: 103462 - DNA, 1467 bp, synthetic construct; identical to SEQ ID NO: 103460
  misc_feature 1..1467: note = Description of Artificial Sequence: Synthetic coding sequence
  source 1..1467: mol_type = other DNA

SEQ ID NO: 103463 - DNA, 2187 bp, synthetic construct
  misc_feature 1..2187: note = Description of Artificial Sequence: Synthetic coding sequence
  source 1..2187: mol_type = other DNA
atgagcgagagcggcgagatgagcgagttcggctacatcatggagctgatcgccaagggcaaggtgaccatcaagaacatcgagagagagctgatctgccccgcctgcaaggagctgttcacccaccccctgatcctgccctgccagcacagcatctgccacaagtgcgtgaaggagctgctgctgaccctggacgacagcttcaacgacgtgggcagcgacaacagcaaccagagcagccccagactgagactgcccagccccagcatggacaagatcgacagaatcaacagacccggctggaagagaaacagcctgacccccagaaccaccgtgttcccctgccccggctgcgagcacgacgtggacctgggcgagagaggcatcaacggcctgttcagaaacttcaccctggagaccatcgtggagagatacagacaggccgccagagccgccaccgccatcatgtgcgacctgtgcaagccccccccccaggagagcaccaagagctgcatggactgcagcgccagctactgcaacgagtgcttcaagatccaccacccctggggcaccatcaaggcccagcacgagtacgtgggccccaccaccaacttcagacccaagatcctgatgtgccccgagcacgagaccgagagaatcaacatgtactgcgagctgtgcagaagacccgtgtgccacctgtgcaagctgggcggcaaccacgccaaccacagagtgaccaccatgagcagcgcctacaagaccctgaaggagaagctgagcaaggacatcgactacctgatcggcaaggagagccaggtgaagagccagatcagcgagctgaacctgctgatgaaggagaccgagtgcaacggcgagagagccaaggaggaggccatcacccacttcgagaagctgttcgaggtgctggaggagagaaagagcagcgtgctgaaggccatcgacagcagcaagaagctgagactggacaagttccagacccagatggaggagtaccagggcctgctggagaacaacggcctggtgggctacgcccaggaggtgctgaaggagaccgaccagagctgcttcgtgcagaccgccaagcagctgcacctgagaatccagaaggccaccgagagcctgaagagcttcagacccgccgcccagaccagcttcgaggactacgtggtgaacaccagcaagcagaccgagctgctgggcgagctgagcttcttcagcagcggcatcgacgtgcccgagatcaacgaggagcagagcaaggtgtacaacaacgccctgatcaactggcaccaccccgagaaggacaaggccgacagctacgtgctggagtacagaaagatcaacagagacgacgagatgagctggaacgagatcgaggtgtgcggcaccagcaagatcatccaggacctggagaacagcagcacctacgccttcagagtgagagcctacaagggcagcatctgcagcccctgcagcagagagctgatcctgcacaccccccccgcccccgtgttcagcttcctgttcgacgagaagtgcggctacaacaacgagcacctgctgctgaacctgaagagagacagagtggagagcagagccggcttcaacctgctgctggccgccgagagaatccaggtgggctactacaccagcctggactacatcatcggcgacaccggcatcaccaagggcaagcacttctgggccttcagagtggagccctacagctacctggtgaaggtgggcgtggccagcagcgacaagctgcaggagtggctgagaagccccagagacgccgtgagccccagatacgagcaggacagcggccacgacagcggcagcgaggacgcctgcttcgacagcagccagcccttcaccctggtgaccatcggcatgcagaagttcttcatccccaagagccccaccagcagcaacgagcccgagaacagagtgctgcccatgcccaccagcatcggcatcttcctggactgcgacaagggcaaggtggacttctacgacatggaccagatgaagtgcctgtacgagagacaggtggactgcagccacaccctgtaccccgccttcgccctgatgggcagcggcggcatccagctggaggagcccatcaccgccaagtacctggagtaccaggaggacatgtag

SEQ ID NO: 103464 - DNA, 186 bp, synthetic construct
  misc_feature 1..186: note = Description of Artificial Sequence: Synthetic coding sequence
  source 1..186: mol_type = other DNA
atgagcgagagcggcgagatgagcgagttcggctacatcatggagctgatcgccaagggcaaggccagcgccatgggcctgcagcagacccacgagcacagcagactgaccagcaagggcggcgaggccagatgccccttcgagatcagcgaggtgggcaagcagagcctgcccagaagaacctag

SEQ ID NO: 103465 - DNA, 183 bp, synthetic construct
  misc_feature 1..183: note = Description of Artificial Sequence: Synthetic coding sequence
  source 1..183: mol_type = other DNA
atgagcgagagcggcgagatgagcgagttcggctacatcatggagctgatcgccaagggcaagatgcccgactggagaagaggctacagatgcagacagggctgcggcaagaccaccgagctggccaccgccaccgacttcagccagaccggcaacaagagcggcaagcacttcaagacctag

SEQ ID NO: 103466 - DNA, 2895 bp, synthetic construct
  misc_feature 1..2895: note = Description of Artificial Sequence: Synthetic coding sequence
  source 1..2895: mol_type = other DNA
atggacgagcagagcgtggagagcatcgccgaggtgttcagatgcttcatctgcatggagaagctgagagacgccagactgtgcccccactgcagcaagctgtgctgcttcagctgcatcagaagatggctgaccgagcagagagcccagtgcccccactgcagagcccccctgcagctgagagagctggtgaactgcagatgggccgaggaggtgacccagcagctggacaccctgcagctgtgcagcctgaccaagcacgaggagaacgagaaggacaagtgcgagaaccaccacgagaagctgagcgtgttctgctggacctgcaagaagtgcatctgccaccagtgcgccctgtggggcggcatgcacggcggccacaccttcaagcccctggccgagatctacgagcagcacgtgaccaaggtgaacgaggaggtggccaagctgagaagaagactgatggagctgatcagcctggtgcaggaggtggagagaaacgtggaggccgtgagaaacgccaaggacgagagagtgagagagatcagaaacgccgtggagatgatgatcgccagactggacacccagctgaagaacaagctgatcaccctgatgggccagaagaccagcctgacccaggagaccgagctgctggagagcctgctgcaggaggtggagcaccagctgagaagctgcagcaagagcgagctgatcagcaagagcagcgagatcctgatgatgttccagcaggtgcacagaaagcccatggccagcttcgtgaccacccccgtgccccccgacttcaccagcgagctggtgcccagctacgacagcgccaccttcgtgctggagaacttcagcaccctgagacagagagccgaccccgtgtacagcccccccctgcaggtgagcggcctgtgctggagactgaaggtgtaccccgacggcaacggcgtggtgagaggctactacctgagcgtgttcctggagctgagcgccggcctgcccgagaccagcaagtacgagtacagagtggagatggtgcaccagagctgcaacgaccccaccaagaacatcatcagagagttcgccagcgacttcgaggtgggcgagtgctggggctacaacagattcttcagactggacctgctggccaacgagggctacctgaacccccagaacgacaccgtgatcctgagattccaggtgagaagccccaccttcttccagaagagcagagaccagcactggtacatcacccagctggaggccgcccagaccagctacatccagcagatcaacaacctgaaggagagactgaccatcgagctgagcagaacccagaagagcagagacctgagcccccccgacaaccacctgagcccccagaacgacgacgccctggagaccagagccaagaagagcgcctgcagcgacatgctgctggagggcggccccaccaccgccagcgtgagagaggccaaggaggacgaggaggacgaggagaagatccagaacgaggactaccaccacgagctgagcgacggcgacctggacctggacctggtgtacgaggacgaggtgaaccagctggacggcagcagcagcagcgccagcagcaccgccaccagcaacaccgaggagaacgacatcgacgaggagaccatgagcggcgagaacgacgtggagtacaacaacatggagctggaggagggcgagctgatggaggacgccgccgccgccggccccgccggcagcagccacggctacgtgggcagcagcagcagaatcagcagaagaacccacctgtgcagcgccgccaccagcagcctgctggacatcgaccccctgatcctgatccacctgctggacctgaaggacagaagcagcatcgagaacctgtggggcctgcagcccagaccccccgccagcctgctgcagcccaccgccagctacagcagaaaggacaaggaccagagaaagcagcaggccatgtggagagtgcccagcgacctgaagatgctgaagagactgaagacccagatggccgaggtgagatgcatgaagaccgacgtgaagaacaccctgagcgagatcaagagcagcagcgccgccagcggcgacatgcagaccagcctgttcagcgccgaccaggccgccctggccgcctgcggcaccgagaacagcggcagactgcaggacctgggcatggagctgctggccaagagcagcgtggccaactgctacatcagaaacagcaccaacaagaagagcaacagccccaagcccgccagaagcagcgtggccggcagcctgagcctgagaagagccgtggaccccggcgagaacagcagaagcaagggcgactgccagaccctgagcgagggcagccccggcagcagccagagcggcagcagacacagcagccccagagccctgatccacggcagcatcggcgacatcctgcccaagaccgaggacagacagtgcaaggccctggacagcgacgccgtggtggtggccgtgttcagcggcctgcccgccgtggagaagagaagaaagatggtgaccctgggcgccaacgccaagggcggccacctggagggcctgcagatgaccgacctggagaacaacagcgagaccggcgagctgcagcccgtgctgcccgagggcgccagcgccgcccccgaggagggcatgagcagcgacagcgacatcgagtgcgacaccgagaacgaggagcaggaggagcacaccagcgtgggcggcttccacgacagcttcatggtgatgacccagccccccgacgaggacacccacagcagcttccccgacggcgagcagatcggccccgaggacctgagcttcaacaccgacgagaacagcggcagatag

SEQ ID NO: 103467 - DNA, 2412 bp, synthetic construct
  misc_feature 1..2412: note = Description of Artificial Sequence: Synthetic coding sequence
  source 1..2412: mol_type = other DNA
atgcacggcggccacaccttcaagcccctggccgagatctacgagcagcacgtgaccaaggtgaacgaggaggtggccaagctgagaagaagactgatggagctgatcagcctggtgcaggaggtggagagaaacgtggaggccgtgagaaacgccaaggacgagagagtgagagagatcagaaacgccgtggagatgatgatcgccagactggacacccagctgaagaacaagctgatcaccctgatgggccagaagaccagcctgacccaggagaccgagctgctggagagcctgctgcaggaggtggagcaccagctgagaagctgcagcaagagcgagctgatcagcaagagcagcgagatcctgatgatgttccagcaggtgcacagaaagcccatggccagcttcgtgaccacccccgtgccccccgacttcaccagcgagctggtgcccagctacgacagcgccaccttcgtgctggagaacttcagcaccctgagacagagagccgaccccgtgtacagcccccccctgcaggtgagcggcctgtgctggagactgaaggtgtaccccgacggcaacggcgtggtgagaggctactacctgagcgtgttcctggagctgagcgccggcctgcccgagaccagcaagtacgagtacagagtggagatggtgcaccagagctgcaacgaccccaccaagaacatcatcagagagttcgccagcgacttcgaggtgggcgagtgctggggctacaacagattcttcagactggacctgctggccaacgagggctacctgaacccccagaacgacaccgtgatcctgagattccaggtgagaagccccaccttcttccagaagagcagagaccagcactggtacatcacccagctggaggccgcccagaccagctacatccagcagatcaacaacctgaaggagagactgaccatcgagctgagcagaacccagaagagcagagacctgagcccccccgacaaccacctgagcccccagaacgacgacgccctggagaccagagccaagaagagcgcctgcagcgacatgctgctggagggcggccccaccaccgccagcgtgagagaggccaaggaggacgaggaggacgaggagaagatccagaacgaggactaccaccacgagctgagcgacggcgacctggacctggacctggtgtacgaggacgaggtgaaccagctggacggcagcagcagcagcgccagcagcaccgccaccagcaacaccgaggagaacgacatcgacgaggagaccatgagcggcgagaacgacgtggagtacaacaacatggagctggaggagggcgagctgatggaggacgccgccgccgccggccccgccggcagcagccacggctacgtgggcagcagcagcagaatcagcagaagaacccacctgtgcagcgccgccaccagcagcctgctggacatcgaccccctgatcctgatccacctgctggacctgaaggacagaagcagcatcgagaacctgtggggcctgcagcccagaccccccgccagcctgctgcagcccaccgccagctacagcagaaaggacaaggaccagagaaagcagcaggccatgtggagagtgcccagcgacctgaagatgctgaagagactgaagacccagatggccgaggtgagatgcatgaagaccgacgtgaagaacaccctgagcgagatcaagagcagcagcgccgccagcggcgacatgcagaccagcctgttcagcgccgaccaggccgccctggccgcctgcggcaccgagaacagcggcagactgcaggacctgggcatggagctgctggccaagagcagcgtggccaactgctacatcagaaacagcaccaacaagaagagcaacagccccaagcccgccagaagcagcgtggccggcagcctgagcctgagaagagccgtggaccccggcgagaacagcagaagcaagggcgactgccagaccctgagcgagggcagccccggcagcagccagagcggcagcagacacagcagccccagagccctgatccacggcagcatcggcgacatcctgcccaagaccgaggacagacagtgcaaggccctggacagcgacgccgtggtggtggccgtgttcagcggcctgcccgccgtggagaagagaagaaagatggtgaccctgggcgccaacgccaagggcggccacctggagggcctgcagatgaccgacctggagaacaacagcgagaccggcgagctgcagcccgtgctgcccgagggcgccagcgccgcccccgaggaggacacccacagcagcttccccgacggcgagcagatcggccccgaggacctgagcttcaacaccgacgagaacagcggcagatag

SEQ ID NO: 103468 - DNA, 2793 bp, synthetic construct
  misc_feature 1..2793: note = Description of Artificial Sequence: Synthetic coding sequence
  source 1..2793: mol_type = other DNA
atggacgagcagagcgtggagagatggctgaccgagcagagagcccagtgcccccactgcagagcccccctgcagctgagagagctggtgaactgcagatgggccgaggaggtgacccagcagctggacaccctgcagctgtgcagcctgaccaagcacgaggagaacgagaaggacaagtgcgagaaccaccacgagaagctgagcgtgttctgctggacctgcaagaagtgcatctgccaccagtgcgccctgtggggcggcatgcacggcggccacaccttcaagcccctggccgagatctacgagcagcacgtgaccaaggtgaacgaggaggtggccaagctgagaagaagactgatggagctgatcagcctggtgcaggaggtggagagaaacgtggaggccgtgagaaacgccaaggacgagagagtgagagagatcagaaacgccgtggagatgatgatcgccagactggacacccagctgaagaacaagctgatcaccctgatgggccagaagaccagcctgacccaggagaccgagctgctggagagcctgctgcaggaggtggagcaccagctgagaagctgcagcaagagcgagctgatcagcaagagcagcgagatcctgatgatgttccagcaggtgcacagaaagcccatggccagcttcgtgaccacccccgtgccccccgacttcaccagcgagctggtgcccagctacgacagcgccaccttcgtgctggagaacttcagcaccctgagacagagagccgaccccgtgtacagcccccccctgcaggtgagcggcctgtgctggagactgaaggtgtaccccgacggcaacggcgtggtgagaggctactacctgagcgtgttcctggagctgagcgccggcctgcccgagaccagcaagtacgagtacagagtggagatggtgcaccagagctgcaacgaccccaccaagaacatcatcagagagttcgccagcgacttcgaggtgggcgagtgctggggctacaacagattcttcagactggacctgctggccaacgagggctacctgaacccccagaacgacaccgtgatcctgagattccaggtgagaagccccaccttcttccagaagagcagagaccagcactggtacatcacccagctggaggccgcccagaccagctacatccagcagatcaacaacctgaaggagagactgaccatcgagctgagcagaacccagaagagcagagacctgagcccccccgacaaccacctgagcccccagaacgacgacgccctggagaccagagccaagaagagcgcctgcagcgacatgctgctggagggcggccccaccaccgccagcgtgagagaggccaaggaggacgaggaggacgaggagaagatccagaacgaggactaccaccacgagctgagcgacggcgacctggacctggacctggtgtacgaggacgaggtgaaccagctggacggcagcagcagcagcgccagcagcaccgccaccagcaacaccgaggagaacgacatcgacgaggagaccatgagcggcgagaacgacgtggagtacaacaacatggagctggaggagggcgagctgatggaggacgccgccgccgccggccccgccggcagcagccacggctacgtgggcagcagcagcagaatcagcagaagaacccacctgtgcagcgccgccaccagcagcctgctggacatcgaccccctgatcctgatccacctgctggacctgaaggacagaagcagcatcgagaacctgtggggcctgcagcccagaccccccgccagcctgctgcagcccaccgccagctacagcagaaaggacaaggaccagagaaagcagcaggccatgtggagagtgcccagcgacctgaagatgctgaagagactgaagacccagatggccgaggtgagatgcatgaagaccgacgtgaagaacaccctgagcgagatcaagagcagcagcgccgccagcggcgacatgcagaccagcctgttcagcgccgaccaggccgccctggccgcctgcggcaccgagaacagcggcagactgcaggacctgggcatggagctgctggccaagagcagcgtggccaactgctacatcagaaacagcaccaacaagaagagcaacagccccaagcccgccagaagcagcgtggccggcagcctgagcctgagaagagccgtggaccccggcgagaacagcagaagcaagggcgactgccagaccctgagcgagggcagccccggcagcagccagagcggcagcagacacagcagccccagagccctgatccacggcagcatcggcgacatcctgcccaagaccgaggacagacagtgcaaggccctggacagcgacgccgtggtggtggccgtgttcagcggcctgcccgccgtggagaagagaagaaagatggtgaccctgggcgccaacgccaagggcggccacctggagggcctgcagatgaccgacctggagaacaacagcgagaccggcgagctgcagcccgtgctgcccgagggcgccagcgccgcccccgaggagggcatgagcagcgacagcgacatcgagtgcgacaccgagaacgaggagcaggaggagcacaccagcgtgggcggcttccacgacagcttcatggtgatgacccagccccccgacgaggacacccacagcagcttccccgacggcgagcagatcggccccgaggacctgagcttcaacaccgacgagaacagcggcagatag

SEQ ID NO: 103469 - DNA, 2895 bp, synthetic construct; identical to SEQ ID NO: 103466
  misc_feature 1..2895: note = Description of Artificial Sequence: Synthetic coding sequence
  source 1..2895: mol_type = other DNA

SEQ ID NO: 103470 - DNA, 1557 bp, synthetic construct
  misc_feature 1..1557: note = Description of Artificial Sequence: Synthetic coding sequence
  source 1..1557: mol_type = other DNA
atggccgagaccagcctgctggaggccggcgccagcgccgccagcaccgccgccgccctggagaacctgcaggtggaggccagctgcagcgtgtgcctggagtacctgaaggagcccgtgatcatcgagtgcggccacaacttctgcaaggcctgcatcaccagatggtgggaggacctggagagagacttcccctgccccgtgtgcagaaagaccagcagatacagaagcctgagacccaacagacagctgggcagcatggtggagatcgccaagcagctgcaggccgtgaagagaaagatcagagacgagagcctgtgcccccagcaccacgaggccctgagcctgttctgctacgaggaccaggaggccgtgtgcctgatctgcgccatcagccacacccacagagcccacaccgtggtgcccctggacgacgccacccaggagtacaaggagaagctgcagaagtgcctggagcccctggagcagaagctgcaggagatcaccagatgcaagagcagcgaggagaagaagcccggcgagctgaagagactggtggagagcagaagacagcagatcctgagagagttcgaggagctgcacagaagactggacgaggagcagcaggtgctgctgagcagactggaggaggaggagcaggacatcctgcagagactgagagagaacgccgcccacctgggcgacaagagaagagacctggcccacctggccgccgaggtggagggcaagtgcctgcagagcggcttcgagatgctgaaggacgtgaagagcaccctggagaagaacatccccagaaagttcggcggcagcctgagcaccatctgccccagagaccacaaggccctgctgggcctggtgaaggagatcaacagatgcgagaaggtgaagaccatggaggtgaccagcgtgagcatcgagctggagaagaacttcagcaacttccccagacagtacttcgccctgagaaagatcctgaagcagctgatcgccgacgtgaccctggaccccgagaccgcccaccccaacctggtgctgagcgaggacagaaagagcgtgaagttcgtggagaccagactgagagacctgcccgacacccccagaagattcaccttctacccctgcgtgctggccaccgagggcttcaccagcggcagacactactgggaggtggaggtgggcgacaagacccactgggccgtgggcgtgtgcagagacagcgtgagcagaaagggcgagctgacccccctgcccgagaccggctactggagagtgagactgtggaacggcgacaagtacgccgccaccaccacccccttcacccccctgcacatcaaggtgaagcccaagagagtgggcatcttcctggactacgaggccggcaccctgagcttctacaacgtgaccgacagaagccacatctacaccttcaccgacaccttcaccgagaagctgtggcccctgttctaccccggcatcagagccggcagaaagaacgccgcccccctgaccatcagaccccccaccgactgggagtag

SEQ ID NO: 103471 - DNA, 1467 bp, synthetic construct
  misc_feature 1..1467: note = Description of Artificial Sequence: Synthetic coding sequence
  source 1..1467: mol_type = other DNA
atggccgagaccagcctgctggaggccggcgccagcgccgccagcaccgccgccgccctggagaacctgcaggtggaggccagctgcagcgtgtgcctggagtacctgaaggagcccgtgatcatcgagtgcggccacaacttctgcaaggcctgcatcaccagatggtgggaggacctggagagagacttcccctgccccgtgtgcagaaagaccagcagatacagaagcctgagacccaacagacagctgggcagcatggtggagatcgccaagcagctgcaggccgtgaagagaaagatcagagacgagagcctgtgcccccagcaccacgaggccctgagcctgttctgctacgaggaccaggaggccgtgtgcctgatctgcgccatcagccacacccacagagcccacaccgtggtgcccctggacgacgccacccaggagtacaaggagaagctgcagaagtgcctggagcccctggagcagaagctgcaggagatcaccagatgcaagagcagcgaggagaagaagcccggcgagctgaagagactggtggagagcagaagacagcagatcctgagagagttcgaggagctgcacagaagactggacgaggagcagcaggtgctgctgagcagactggaggaggaggagcaggacatcctgcagagactgagagagaacgccgcccacctgggcgacaagagaagagacctggcccacctggccgccgaggtggagggcaagtgcctgcagagcggcttcgagatgctgaaggacgtgaagagcaccctggagaagtgcgagaaggtgaagaccatggaggtgaccagcgtgagcatcgagctggagaagaacttcagcaacttccccagacagtacttcgccctgagaaagatcctgaagcagctgatcgccgacgtgaccctggaccccgagaccgcccaccccaacctggtgctgagcgaggacagaaagagcgtgaagttcgtggagaccagactgagagacctgcccgacacccccagaagattcaccttctacccctgcgtgctggccaccgagggcttcaccagcggcagacactactgggaggtggaggtgggcgacaagacccactgggccgtgggcgtgtgcagagacagcgtgagcagaaagggcgagctgacccccctgcccgagaccggctactggagagtgagactgtggaacggcgacaagtacgccgccaccaccacccccttcacccccctgcacatcaaggtgaagcccaagagagtgggcatcttcctggactacgaggccggcaccctgagcttctacaacgtgaccgacagaagccacatctacaccttcaccgacaccttcaccgagaagctgtggcccctgttctaccccggcatcagagccggcagaaagaacgccgcccccctgaccatcagaccccccaccgactgggagtag

SEQ ID NO: 103472 - DNA, 1467 bp, synthetic construct; identical to SEQ ID NO: 103471
  misc_feature 1..1467: note = Description of Artificial Sequence: Synthetic coding sequence
  source 1..1467: mol_type = other DNA

SEQ ID NO: 103473 - DNA, 1557 bp, synthetic construct; identical to SEQ ID NO: 103470
  misc_feature 1..1557: note = Description of Artificial Sequence: Synthetic coding sequence
  source 1..1557: mol_type = other DNA

SEQ ID NO: 103474 - DNA, 1467 bp, synthetic construct; identical to SEQ ID NO: 103471
  misc_feature 1..1467: note = Description of Artificial Sequence: Synthetic coding sequence
  source 1..1467: mol_type = other DNA

SEQ ID NO: 103475 - DNA, 1557 bp, synthetic construct; identical to SEQ ID NO: 103470
  misc_feature 1..1557: note = Description of Artificial Sequence: Synthetic coding sequence
  source 1..1557: mol_type = other DNA

SEQ ID NO: 103476 - DNA, 1467 bp, synthetic construct; identical to SEQ ID NO: 103471
  misc_feature 1..1467: note = Description of Artificial Sequence: Synthetic coding sequence
  source 1..1467: mol_type = other DNA

SEQ ID NO: 103477 - DNA, 1467 bp, synthetic construct; identical to SEQ ID NO: 103471
  misc_feature 1..1467: note = Description of Artificial Sequence: Synthetic coding sequence
  source 1..1467: mol_type = other DNA

SEQ ID NO: 103478 - DNA, 1467 bp, synthetic construct; identical to SEQ ID NO: 103471
  misc_feature 1..1467: note = Description of Artificial Sequence: Synthetic coding sequence
  source 1..1467: mol_type = other DNA

SEQ ID NO: 103479 - DNA, 435 bp, synthetic construct
  misc_feature 1..435: note = Description of Artificial Sequence: Synthetic coding sequence
  source 1..435: mol_type = other DNA
atggccgagaccagcctgctggaggccggcgccagcgccgccagcaccgccgccgccctggagaacctgcaggtggaggccagctgcagcgtgtgcctggagtacctgaaggagcccgtgatcatcgagtgcggccacaacttctgcaaggcctgcatcaccagatggtgggaggacctggagagagacttcccctgccccgtgtgcagaaagaccagcagatacagaagcctgagacccaacagacagctgggcagcatggtggagatcgccaagcagctgcaggccgtgaagagaaagatcagagacgagagcctgtgcccccagcaccacgaggccctgagcctgttctgctacgaggaccaggaggccgtgtgcctgatctgcgccatcagccacacccacagagcccacaccgtggtgcccctggactag

SEQ ID NO: 103480 - DNA, 684 bp, synthetic construct
  misc_feature 1..684: note = Description of Artificial Sequence: Synthetic coding sequence
  source 1..684: mol_type = other DNA
tgaaccagcagatacagaagcctgagacccaacagacagctgggcagcatggtggagatcgccaagcagctgcaggccgtgaagagaaagatcagagacgagagcctgtgcccccagcaccacgaggccctgagcctgttctgctacgaggaccaggaggccgtgtgcctgatctgcgccatcagccacacccacagagcccacaccgtggtgcccctggacgacgccacccaggagtacaaggagaagctgcagaagtgcctggagcccctggagcagaagctgcaggagatcaccagatgcaagagcagcgaggagaagaagcccggcgagctgaagagactggtggagagcagaagacagcagatcctgagagagttcgaggagctgcacagaagactggacgaggagcagcaggtgctgctgagcagactggaggaggaggagcaggacatcctgcagagactgagagagaacgccgcccacctgggcgacaagagaagagacctggcccacctggccgccgaggtggagggcaagtgcctgcagagcggcttcgagatgctgaaggacgtgaagagcaccctggagaagtgcgagaaggtgaagaccatggaggtgaccagcaccaccccctgcaccagcctgcacagcgagatcaacgacaacgtgagaggcagatag

SEQ ID NO: 103481 - DNA, 225 bp, synthetic construct
  misc_feature 1..225: note = Description of Artificial Sequence: Synthetic coding sequence
  source 1..225: mol_type = other DNA
atggccgagaccagcctgctggaggccggcgccagcgccgccagcaccgccgccgccctggagaacctgcaggtggaggccagctgcagcgtgtgcctggagtacctgaaggagcccgtgatcatcgagtgcggccacaacttctgcaaggcctgcatcaccagatggtgggaggacctggagagagacttcccctgccccgtgtgcagaaagaccagcagatag

SEQ ID NO: 103482 - DNA, 1254 bp, synthetic construct
  misc_feature 1..1254: note = Description of Artificial Sequence: Synthetic coding sequence
  source 1..1254: mol_type = other DNA
atggtggagatcgccaagcagctgcaggccgtgaagagaaagatcagagacgagagcctgtgcccccagcaccacgaggccctgagcctgttctgctacgaggaccaggaggccgtgtgcctgatctgcgccatcagccacacccacagagcccacaccgtggtgcccctggacgacgccacccaggagtacaaggagaagctgcagaagtgcctggagcccctggagcagaagctgcaggagatcaccagatgcaagagcagcgaggagaagaagcccggcgagctgaagagactggtggagagcagaagacagcagatcctgagagagttcgaggagctgcacagaagactggacgaggagcagcaggtgctgctgagcagactggaggaggaggagcaggacatcctgcagagactgagagagaacgccgcccacctgggcgacaagagaagagacctggcccacctggccgccgaggtggagggcaagtgcctgcagagcggcttcgagatgctgaagcccgtgctgagcgccagagaggagtgcgagaaggtgaagaccatggaggtgaccagcgtgagcatcgagctggagaagaacttcagcaacttccccagacagtacttcgccctgagaaagatcctgaagcagctgatcgccgacgtgaccctggaccccgagaccgcccaccccaacctggtgctgagcgaggacagaaagagcgtgaagttcgtggagaccagactgagagacctgcccgacacccccagaagattcaccttctacccctgcgtgctggccaccgagggcttcaccagcggcagacactactgggaggtggaggccgcccactgcgtgctggcccaggaccccgagaaccaggccctggccagattctactgctacaccgagagaaccatcgccaagagactggtgctgagaagagaccccagcgtgaagagaaccctgtgcagaggctgcagcagcctgctggtgcccggcctgacctgcacccagagacagagaagatgcagaggccagagatggaccgtgcagacctgcctgacctgccagagaagccagagattcctgaacgaccccggccacctgctgtggggcgacagacccgaggcccagctgggcagccaggccgacagcaagcccctgcagcccctgcccaacaccgcccacagcatcagcgacagactgcccgaggagaagatgcagacccagggcagcagcaaccagtag

SEQ ID NO: 103483 - DNA, 1557 bp, synthetic construct; identical to SEQ ID NO: 103470
  misc_feature 1..1557: note = Description of Artificial Sequence: Synthetic coding sequence
  source 1..1557: mol_type = other DNA

SEQ ID NO: 103484 - DNA, 1467 bp, synthetic construct; identical to SEQ ID NO: 103471
  misc_feature 1..1467: note = Description of Artificial Sequence: Synthetic coding sequence
  source 1..1467: mol_type = other DNA

SEQ ID NO: 103485 - DNA, 435 bp, synthetic construct; identical to SEQ ID NO: 103479
  misc_feature 1..435: note = Description of Artificial Sequence: Synthetic coding sequence
  source 1..435: mol_type = other DNA

SEQ ID NO: 103486 - DNA, 225 bp, synthetic construct; identical to SEQ ID NO: 103481
  misc_feature 1..225: note = Description of Artificial Sequence: Synthetic coding sequence
  source 1..225: mol_type = other DNA

SEQ ID NO: 103487 - DNA, 147 bp, synthetic construct
  misc_feature 1..147: note = Description of Artificial Sequence: Synthetic coding sequence
  source 1..147: mol_type = other DNA
atggccgagaccagcctgctggaggccggcgccagcgccgccagcaccgccgccgccctggagaacctgcaggtggaggccagctgcagcgtgtgcctggagtacctgaaggagcccgtgatcatcgagtgcggccacaacttctag

SEQ ID NO: 103488 - DNA, 1467 bp, synthetic construct; identical to SEQ ID NO: 103471
  misc_feature 1..1467: note = Description of Artificial Sequence: Synthetic coding sequence
  source 1..1467: mol_type = other DNA

SEQ ID NO: 103489 - DNA, 684 bp, synthetic construct; identical to SEQ ID NO: 103480
  misc_feature 1..684: note = Description of Artificial Sequence: Synthetic coding sequence
  source 1..684: mol_type = other DNA

SEQ ID NO: 103490 - DNA, 147 bp, synthetic construct; identical to SEQ ID NO: 103487
  misc_feature 1..147: note = Description of Artificial Sequence: Synthetic coding sequence
  source 1..147: mol_type = other DNA

SEQ ID NO: 103491 - DNA, 147 bp, synthetic construct; identical to SEQ ID NO: 103487
  misc_feature 1..147: note = Description of Artificial Sequence: Synthetic coding sequence
  source 1..147: mol_type = other DNA

SEQ ID NO: 103492 - DNA, 180 bp, synthetic construct
  misc_feature 1..180: note = Description of Artificial Sequence: Synthetic coding sequence
  source 1..180: mol_type = other DNA
atggccgagaccagcctgctggaggccggcgccagcgccgccagcaccgccgccgccctggagaacctgcaggtggaggccagctgcagcgtgtgcctggagtacctgaaggagcccgtgatcatcgagtgcggccacaacttctgcaaggcctgcatcaccagatggtgggaggactag

SEQ ID NO: 103493 - DNA, 180 bp, synthetic construct; identical to SEQ ID NO: 103492
  misc_feature 1..180: note = Description of Artificial Sequence: Synthetic coding sequence
  source 1..180: mol_type = other DNA

SEQ ID NO: 103494 - DNA, 435 bp, synthetic construct; identical to SEQ ID NO: 103479
  misc_feature 1..435: note = Description of Artificial Sequence: Synthetic coding sequence
  source 1..435: mol_type = other DNA

SEQ ID NO: 103495 - DNA, 1557 bp, synthetic construct; identical to SEQ ID NO: 103470
  misc_feature 1..1557: note = Description of Artificial Sequence: Synthetic coding sequence
  source 1..1557: mol_type = other DNA

SEQ ID NO: 103496 - DNA, 684 bp, synthetic construct; identical to SEQ ID NO: 103480
  misc_feature 1..684: note = Description of Artificial Sequence: Synthetic coding sequence
  source 1..684: mol_type = other DNA

SEQ ID NO: 103497 - DNA, 684 bp, synthetic construct; identical to SEQ ID NO: 103480
  misc_feature 1..684: note = Description of Artificial Sequence: Synthetic coding sequence
  source 1..684: mol_type = other DNA

SEQ ID NO: 103498 - DNA, 147 bp, synthetic construct; identical to SEQ ID NO: 103487
  misc_feature 1..147: note = Description of Artificial Sequence: Synthetic coding sequence
  source 1..147: mol_type = other DNA

SEQ ID NO: 103499 - DNA, 1557 bp, synthetic construct; identical to SEQ ID NO: 103470
  misc_feature 1..1557: note = Description of Artificial Sequence: Synthetic coding sequence
  source 1..1557: mol_type = other DNA

SEQ ID NO: 103500 - DNA, 225 bp, synthetic construct; identical to SEQ ID NO: 103481
  misc_feature 1..225: note = Description of Artificial Sequence: Synthetic coding sequence
  source 1..225: mol_type = other DNA

SEQ ID NO: 103501 - DNA, 180 bp, synthetic construct; identical to SEQ ID NO: 103492
  misc_feature 1..180: note = Description of Artificial Sequence: Synthetic coding sequence
  source 1..180: mol_type = other DNA

SEQ ID NO: 103502 - DNA, 147 bp, synthetic construct; identical to SEQ ID NO: 103487
  misc_feature 1..147: note = Description of Artificial Sequence: Synthetic coding sequence
  source 1..147: mol_type = other DNA

SEQ ID NO: 103503 - DNA, 786 bp, synthetic construct
  misc_feature 1..786: note = Description of Artificial Sequence: Synthetic coding sequence
  source 1..786: mol_type = other DNA
atggccgagaccagcctgctggaggccggcgccagcgccgccagcaccgccgccgccctggagaacctgcaggtggaggccagctgcagcgtgtgcctggagtacctgaaggagcccgtgatcatcgagtgcggccacaacttctgcaaggcctgcatcaccagatggtgggaggacctggagagagacttcccctgccccgtgtgcagaaagaccagcagatacagaagcctgagacccaacagacagctgggcagcatggtggagatcgccaagcagctgcaggccgtgaagagaaagatcagagacgagagcctgtgcccccagcaccacgaggccctgagcctgttctgctacgaggaccaggaggccgtgtgcctgatctgcgccatcagccacacccacagagcccacaccgtggtgcccctggacgacgccacccaggagtacaaggagaagctgcagaagtgcctggagcccctggagcagaagctgcaggagatcaccagatgcaagagcagcgaggagaagaagcccggcgagctgaagagactggtggagagcagaagacagcagatcctgagagagttcgaggagctgcacagaagactggacgaggagcagcaggtgctgctgagcagactggaggaggaggagcaggacatcctgcagagactgagagagaacgccgcccacctgggcgacaagagaagagacctggcccacctggccgccgaggtggagggcaagtgcctgcagagcggcttcgagatgctgaaggtgtag

SEQ ID NO: 103504 - DNA, 180 bp, synthetic construct; identical to SEQ ID NO: 103492
  misc_feature 1..180: note = Description of Artificial Sequence: Synthetic coding sequence
  source 1..180: mol_type = other DNA

SEQ ID NO: 103505 - DNA, 435 bp, synthetic construct; identical to SEQ ID NO: 103479
  misc_feature 1..435: note = Description of Artificial Sequence: Synthetic coding sequence
  source 1..435: mol_type = other DNA

SEQ ID NO: 103506 - DNA, 1467 bp, synthetic construct; identical to SEQ ID NO: 103471
  misc_feature 1..1467: note = Description of Artificial Sequence: Synthetic coding sequence
  source 1..1467: mol_type = other DNA

SEQ ID NO: 103507 - DNA, 1467 bp, synthetic construct; identical to SEQ ID NO: 103471
  misc_feature 1..1467: note = Description of Artificial Sequence: Synthetic coding sequence
  source 1..1467: mol_type = other DNA

SEQ ID NO: 103508 - DNA, 786 bp, synthetic construct; identical to SEQ ID NO: 103503
  misc_feature 1..786: note = Description of Artificial Sequence: Synthetic coding sequence
  source 1..786: mol_type = other DNA

SEQ ID NO: 103509 - DNA, 1467 bp, synthetic construct; identical to SEQ ID NO: 103471
  misc_feature 1..1467: note = Description of Artificial Sequence: Synthetic coding sequence
  source 1..1467: mol_type = other DNA

SEQ ID NO: 103510 - DNA, 180 bp, synthetic construct; identical to SEQ ID NO: 103492
  misc_feature 1..180: note = Description of Artificial Sequence: Synthetic coding sequence
  source 1..180: mol_type = other DNA

SEQ ID NO: 103511 - DNA, 180 bp, synthetic construct; identical to SEQ ID NO: 103492
  misc_feature 1..180: note = Description of Artificial Sequence: Synthetic coding sequence
  source 1..180: mol_type = other DNA

SEQ ID NO: 103512 - DNA, 684 bp, synthetic construct; identical to SEQ ID NO: 103480
  misc_feature 1..684: note = Description of Artificial Sequence: Synthetic coding sequence
  source 1..684: mol_type = other DNA

SEQ ID NO: 103513 - DNA, 1467 bp, synthetic construct; identical to SEQ ID NO: 103471
  misc_feature 1..1467: note = Description of Artificial Sequence: Synthetic coding sequence
  source 1..1467: mol_type = other DNA

SEQ ID NO: 103514 - DNA, 225 bp, synthetic construct; identical to SEQ ID NO: 103481
  misc_feature 1..225: note = Description of Artificial Sequence: Synthetic coding sequence
  source 1..225: mol_type = other DNA

SEQ ID NO: 103515 - DNA, 684 bp, synthetic construct; identical to SEQ ID NO: 103480
  misc_feature 1..684: note = Description of Artificial Sequence: Synthetic coding sequence
  source 1..684: mol_type = other DNA

SEQ ID NO: 103516 - DNA, 1467 bp, synthetic construct; identical to SEQ ID NO: 103471
  misc_feature 1..1467: note = Description of Artificial Sequence: Synthetic coding sequence
  source 1..1467: mol_type = other DNA

SEQ ID NO: 103517 - DNA, 1467 bp, synthetic construct; identical to SEQ ID NO: 103471
  misc_feature 1..1467: note = Description of Artificial Sequence: Synthetic coding sequence
  source 1..1467: mol_type = other DNA

SEQ ID NO: 103518 - DNA, 786 bp, synthetic construct; identical to SEQ ID NO: 103503
  misc_feature 1..786: note = Description of Artificial Sequence: Synthetic coding sequence
  source 1..786: mol_type = other DNA

SEQ ID NO: 103519 - DNA, 225 bp, synthetic construct; identical to SEQ ID NO: 103481
  misc_feature 1..225: note = Description of Artificial Sequence: Synthetic coding sequence
  source 1..225: mol_type = other DNA

SEQ ID NO: 103520 - DNA, 180 bp, synthetic construct; identical to SEQ ID NO: 103492
  misc_feature 1..180: note = Description of Artificial Sequence: Synthetic coding sequence
  source 1..180: mol_type = other DNA

SEQ ID NO: 103521 - DNA, 786 bp, synthetic construct; identical to SEQ ID NO: 103503
  misc_feature 1..786: note = Description of Artificial Sequence: Synthetic coding sequence
  source 1..786: mol_type = other DNA

SEQ ID NO: 103522 - DNA, 1467 bp, synthetic construct; identical to SEQ ID NO: 103471
  misc_feature 1..1467: note = Description of Artificial Sequence: Synthetic coding sequence
  source 1..1467: mol_type = other DNA

SEQ ID NO: 103523 - DNA, 1557 bp, synthetic construct; identical to SEQ ID NO: 103470
  misc_feature 1..1557: note = Description of Artificial Sequence: Synthetic coding sequence
  source 1..1557: mol_type = other DNA

SEQ ID NO: 103524 - DNA, 1467 bp, synthetic construct; identical to SEQ ID NO: 103471
  misc_feature 1..1467: note = Description of Artificial Sequence: Synthetic coding sequence
  source 1..1467: mol_type = other DNA

SEQ ID NO: 103525 - DNA, 786 bp, synthetic construct; identical to SEQ ID NO: 103503
  misc_feature 1..786: note = Description of Artificial Sequence: Synthetic coding sequence
  source 1..786: mol_type = other DNA

SEQ ID NO: 103526 - DNA, 225 bp, synthetic construct; identical to SEQ ID NO: 103481
  misc_feature 1..225: note = Description of Artificial Sequence: Synthetic coding sequence
  source 1..225: mol_type = other DNA

SEQ ID NO: 103527 - DNA, 1236 bp, synthetic construct
  misc_feature 1..1236: note = Description of Artificial Sequence: Synthetic coding sequence
  source 1..1236: mol_type = other DNA
atggccgagaccagcctgctggaggccggcgccagcgccgccagcaccgccgccgccctggagaacctgcaggtggaggccagctgcagcgtgtgcctggagtacctgaaggagcccgtgatcatcgagtgcggccacaacttctgcaaggcctgcatcaccagatggtgggaggacctggagagagacttcccctgccccgtgtgcagaaagaccagcagatacagaagcctgagacccaacagacagctgggcagcatggtggagatcgccaagcagctgcaggccgtgaagagaaagatcagagacgagagcctgtgcccccagcaccacgaggccctgagcctgttctgctacgaggaccaggaggccgtgtgcctgatctgcgccatcagccacacccacagagcccacaccgtggtgcccctggacgacgccacccaggagtacaaggagaagctgcagaagtgcctggagcccctggagcagaagctgcaggagatcaccagatgcaagagcagcgaggagaagaagcccggcgagctgaagagactggtggagagcagaagacagcagatcctgagagagttcgaggagctgcacagaagactggacgaggagcagcaggtgctgctgagcagactggaggaggaggagcaggacatcctgcagagactgagagagaacgccgcccacctgggcgacaagagaagagacctggcccacctggccgccgaggtggagggcaagtgcctgcagagcggcttcgagatgctgaagcccgtgctgagcgccagagaggagtgcgagaaggtgaagaccatggaggtgaccagcgtgagcatcgagctggagaagaacttcagcaacttccccagacagtacttcgccctgagaaagatcctgaagcagctgatcgccgacgtgaccctggaccccgagaccgcccaccccaacctggtgctgagcgaggacagaaagagcgtgaagttcgtggagaccagactgagagacctgcccgacacccccagaagattcaccttctacccctgcgtgctggccaccgagggcttcaccagcggcagacactactgggaggtggaggtgggcgacaagacccactgggccgtgggcgtgtgcagagacagcgtgagcagaaagggcggctgcggctacggcatgggcaccaacatgcagccccccccccacctgctgcccctgtgcaccagcagatag

SEQ ID NO: 103528 - DNA, 1467 bp, synthetic construct; identical to SEQ ID NO: 103471
  misc_feature 1..1467: note = Description of Artificial Sequence: Synthetic coding sequence
  source 1..1467: mol_type = other DNA

SEQ ID NO: 103529 - DNA, 786 bp, synthetic construct; identical to SEQ ID NO: 103503
  misc_feature 1..786: note = Description of Artificial Sequence: Synthetic coding sequence
  source 1..786: mol_type = other DNA

SEQ ID NO: 103530 - DNA, 147 bp, synthetic construct; identical to SEQ ID NO: 103487
  misc_feature 1..147: note = Description of Artificial Sequence: Synthetic coding sequence
  source 1..147: mol_type = other DNA

SEQ ID NO: 103531 - DNA, 786 bp, synthetic construct; identical to SEQ ID NO: 103503
  misc_feature 1..786: note = Description of Artificial Sequence: Synthetic coding sequence
  source 1..786: mol_type = other DNA

SEQ ID NO: 103532 - DNA, 1467 bp, synthetic construct; identical to SEQ ID NO: 103471
  misc_feature 1..1467: note = Description of Artificial Sequence: Synthetic coding sequence
  source 1..1467: mol_type = other DNA

SEQ ID NO: 103533 - DNA, 225 bp, synthetic construct; identical to SEQ ID NO: 103481
  misc_feature 1..225: note = Description of Artificial Sequence: Synthetic coding sequence
  source 1..225: mol_type = other DNA

SEQ ID NO: 103534 - DNA, 1467 bp, synthetic construct; identical to SEQ ID NO: 103471
  misc_feature 1..1467: note = Description of Artificial Sequence: Synthetic coding sequence
  source 1..1467: mol_type = other DNA

SEQ ID NO: 103535 - DNA, 1557 bp, synthetic construct; identical to SEQ ID NO: 103470
  misc_feature 1..1557: note = Description of Artificial Sequence: Synthetic coding sequence
  source 1..1557: mol_type = other DNA

SEQ ID NO: 103536 - DNA, 1467 bp, synthetic construct; identical to SEQ ID NO: 103471
  misc_feature 1..1467: note = Description of Artificial Sequence: Synthetic coding sequence
  source 1..1467: mol_type = other DNA

SEQ ID NO: 103537 - DNA, 435 bp, synthetic construct; identical to SEQ ID NO: 103479
  misc_feature 1..435: note = Description of Artificial Sequence: Synthetic coding sequence
  source 1..435: mol_type = other DNA

SEQ ID NO: 103538 - DNA, 435 bp, synthetic construct; identical to SEQ ID NO: 103479
  misc_feature 1..435: note = Description of Artificial Sequence: Synthetic coding sequence
  source 1..435: mol_type = other DNA

SEQ ID NO: 103539 - DNA, 684 bp, synthetic construct; identical to SEQ ID NO: 103480
  misc_feature 1..684: note = Description of Artificial Sequence: Synthetic coding sequence
  source 1..684: mol_type = other DNA

SEQ ID NO: 103540 - DNA, 147 bp, synthetic construct; identical to SEQ ID NO: 103487
  misc_feature 1..147: note = Description of Artificial Sequence: Synthetic coding sequence
  source 1..147: mol_type = other DNA

SEQ ID NO: 103541 - DNA, 435 bp, synthetic construct; identical to SEQ ID NO: 103479
  misc_feature 1..435: note = Description of Artificial Sequence: Synthetic coding sequence
  source 1..435: mol_type = other DNA

SEQ ID NO: 103542 - DNA, 1467 bp, synthetic construct; identical to SEQ ID NO: 103471
  misc_feature 1..1467: note = Description of Artificial Sequence: Synthetic coding sequence
  source 1..1467: mol_type = other DNA

SEQ ID NO: 103543 - DNA, 1467 bp, synthetic construct
  misc_feature 1..1467: note = Description of Artificial Sequence: Synthetic coding sequence
  source 1..1467: mol_type = other DNA
atggccgagaccagcctgctggaggccggcgccagcgccgccagcaccgccgccgccctggagaacctgcaggtggaggccagctgcagcgtgtgcctggagtacctgaaggagcccgtgatcatcgagtgcggccacaacttctgcaaggcctgcatcaccagatggtgggaggacctggagagagacttcccctgccccgtgtgcagaaagaccagcagatacagaagcctgagacccaacagacagctgggcagcatggtggagatcgccaagcagctgcaggccgtgaagagaaagatcagagacgagagcctgtgcccccagcaccacgaggccctgagcctgttctgctacgaggaccaggaggccgtgtgcctgatctgcgccatcagccacacccacagagcccacaccgtggtgcccctggacgacgccacccaggagtacaaggagaagctgcagaagtgcctggagcccctggagcagaagctgcaggagatcaccagatgcaagagcagcgaggagaagaagcccggcgagctgaagagactggtggagagcagaagacagcagatcctgagagagttcgaggagctgcacagaagactggacgaggagcagcaggtgctgctgagcagactggaggaggaggagcaggacatcctgcagagactgagagagaacgccgcccacctgggcgacaagagaagagacctggcccacctggccgccgaggtggagggcaagtgcctgcagagcggcttcgagatgctgaagcccgtgctgagcgccagagaggagtgcgagaaggtgaagaccatggaggtgaccagcgtgagcatcgagctggagaagaacttcagcaacttccccagacagtacttcgccctgagaaagatcctgaagcagctgatcgccgacgtgaccctggaccccgagaccgcccaccccaacctggtgctgagcgaggacagaaagagcgtgaagttcgtggagaccagactgagagacctgcccgacacccccagaagattcaccttctacccctgcgtgctggccaccgagggcttcaccagcggcagacactactgggaggtggaggtgggcgacaagacccactgggccgtgggcgtgtgcagagacagcgtgagcagaaagggcgagctgacccccctgcccgagaccggctactggagagtgagactgtggaacggcgacaagtacgccgccaccaccacccccttcacccccctgcacatcaaggtgaagcccaagagagtgggcatcttcctggactacgaggccggcaccctgagcttctacaacgtgaccgacagaagccacatctacaccttcaccgacaccttcaccgagaagctgtggcccctgttctaccccggcatcagagccggcagaaagaacgccgcccccctgaccatcagaccccccaccgactgggagtag

SEQ ID NO: 103544 - DNA, 1557 bp, synthetic construct
  misc_feature 1..1557: note = Description of Artificial Sequence: Synthetic coding sequence
  source 1..1557: mol_type = other DNA
atggccgagaccagcctgctggaggccggcgccagcgccgccagcaccgccgccgccctggagaacctgcaggtggaggccagctgcagcgtgtgcctggagtacctgaaggagcccgtgatcatcgagtgcggccacaacttctgcaaggcctgcatcaccagatggtgggaggacctggagagagacttcccctgccccgtgtgcagaaagaccagcagatacagaagcctgagacccaacagacagctgggcagcatggtggagatcgccaagcagctgcaggccgtgaagagaaagatcagagacgagagcctgtgcccccagcaccacgaggccctgagcctgttctgctacgaggaccaggaggccgtgtgcctgatctgcgccatcagccacacccacagagcccacaccgtggtgcccctggacgacgccacccaggagtacaaggagaagctgcagaagtgcctggagcccctggagcagaagctgcaggagatcaccagatgcaagagcagcgaggagaagaagcccggcgagctgaagagactggtggagagcagaagacagcagatcctgagagagttcgaggagctgcacagaagactggacgaggagcagcaggtgctgctgagcagactggaggaggaggagcaggacatcctgcagagactgagagagaacgccgcccacctgggcgacaagagaagagacctggcccacctggccgccgaggtggagggcaagtgcctgcagagcggcttcgagatgctgaagcccgtgctgagcgccagagagaagaacatccccagaaagttcggcggcagcctgagcaccatctgccccagagaccacaaggccctgctgggcctggtgaaggagatcaacagatgcgagaaggtgaagaccatggaggtgaccagcgtgagcatcgagctggagaagaacttcagcaacttccccagacagtacttcgccctgagaaagatcctgaagcagctgatcgccgacgtgaccctggaccccgagaccgcccaccccaacctggtgctgagcgaggacagaaagagcgtgaagttcgtggagaccagactgagagacctgcccgacacccccagaagattcaccttctacccctgcgtgctggccaccgagggcttcaccagcggcagacactactgggaggtggaggtgggcgacaagacccactgggccgtgggcgtgtgcagagacagcgtgagcagaaagggcgagctgacccccctgcccgagaccggctactggagagtgagactgtggaacggcgacaagtacgccgccaccaccacccccttcacccccctgcacatcaaggtgaagcccaagagagtgggcatcttcctggactacgaggccggcaccctgagcttctacaacgtgaccgacagaagccacatctacaccttcaccgacaccttcaccgagaagctgtggcccctgttctaccccggcatcagagccggcagaaagaacgccgcccccctgaccatcagaccccccaccgactgggagtag

SEQ ID NO: 103545 - DNA, 1236 bp, synthetic construct; identical to SEQ ID NO: 103527
  misc_feature 1..1236: note = Description of Artificial Sequence: Synthetic coding sequence
  source 1..1236: mol_type = other DNA

SEQ ID NO: 103546 - DNA, 1557 bp, synthetic construct; identical to SEQ ID NO: 103544
  misc_feature 1..1557: note = Description of Artificial Sequence: Synthetic coding sequence
  source 1..1557: mol_type = other DNA

SEQ ID NO: 103547 - DNA, 1467 bp, synthetic construct; identical to SEQ ID NO: 103543
  misc_feature 1..1467: note = Description of Artificial Sequence: Synthetic coding sequence
  source 1..1467: mol_type = other DNA

SEQ ID NO: 103548 - DNA, 1557 bp, synthetic construct; identical to SEQ ID NO: 103470
  misc_feature 1..1557: note = Description of Artificial Sequence: Synthetic coding sequence
  source 1..1557: mol_type = other DNA

SEQ ID NO: 103549 - DNA, 1467 bp, synthetic construct; identical to SEQ ID NO: 103543
  misc_feature 1..1467: note = Description of Artificial Sequence: Synthetic coding sequence
  source 1..1467: mol_type = other DNA

SEQ ID NO: 103550 - DNA, 1467 bp, synthetic construct; identical to SEQ ID NO: 103543
  misc_feature 1..1467: note = Description of Artificial Sequence: Synthetic coding sequence
  source 1..1467: mol_type = other DNA

SEQ ID NO: 103551 - DNA, 1467 bp, synthetic construct; identical to SEQ ID NO: 103543
  misc_feature 1..1467: note = Description of Artificial Sequence: Synthetic coding sequence
  source 1..1467: mol_type = other DNA

SEQ ID NO: 103552 - DNA, 1557 bp, synthetic construct; identical to SEQ ID NO: 103470
  misc_feature 1..1557: note = Description of Artificial Sequence: Synthetic coding sequence
  source 1..1557: mol_type = other DNA

SEQ ID NO: 103553 - DNA, 1236 bp, synthetic construct; identical to SEQ ID NO: 103527
  misc_feature 1..1236: note = Description of Artificial Sequence: Synthetic coding sequence
  source 1..1236: mol_type = other DNA

SEQ ID NO: 103554 - DNA, 1557 bp, synthetic construct; identical to SEQ ID NO: 103544
  misc_feature 1..1557: note = Description of Artificial Sequence: Synthetic coding sequence
  source 1..1557: mol_type = other DNA

SEQ ID NO: 103555 - DNA, 1236 bp, synthetic construct; identical to SEQ ID NO: 103527
  misc_feature 1..1236: note = Description of Artificial Sequence: Synthetic coding sequence
  source 1..1236: mol_type = other DNA

SEQ ID NO: 103556 - DNA, 1236 bp, synthetic construct; identical to SEQ ID NO: 103527
  misc_feature 1..1236: note = Description of Artificial Sequence: Synthetic coding sequence
  source 1..1236: mol_type = other DNA

SEQ ID NO: 103557 - DNA, 1557 bp, synthetic construct; identical to SEQ ID NO: 103470
  misc_feature 1..1557: note = Description of Artificial Sequence: Synthetic coding sequence
  source 1..1557: mol_type = other DNA

SEQ ID NO: 103558 - DNA, 1557 bp, synthetic construct; identical to SEQ ID NO: 103544
  misc_feature 1..1557: note = Description of Artificial Sequence: Synthetic coding sequence
  source 1..1557: mol_type = other DNA

SEQ ID NO: 103559 - DNA, 1557 bp, synthetic construct; identical to SEQ ID NO: 103544
  misc_feature 1..1557: note = Description of Artificial Sequence: Synthetic coding sequence
  source 1..1557: mol_type = other DNA

SEQ ID NO: 103560 - DNA, 1557 bp, synthetic construct; identical to SEQ ID NO: 103470
  misc_feature 1..1557: note = Description of Artificial Sequence: Synthetic coding sequence
  source 1..1557: mol_type = other DNA

SEQ ID NO: 103561 - DNA, 1557 bp, synthetic construct; identical to SEQ ID NO: 103544
  misc_feature 1..1557: note = Description of Artificial Sequence: Synthetic coding sequence
  source 1..1557: mol_type = other DNA

SEQ ID NO: 103562 - DNA, 1254 bp, synthetic construct
  misc_feature 1..1254: note = Description of Artificial Sequence: Synthetic coding sequence
  source 1..1254: mol_type = other DNA
atggtggagatcgccaagcagctgcaggccgtgaagagaaagatcagagacgagagcctgtgcccccagcaccacgaggccctgagcctgttctgctacgaggaccaggaggccgtgtgcctgatctgcgccatcagccacacccacagagcccacaccgtggtgcccctggacgacgccacccaggagtacaaggagaagctgcagaagtgcctggagcccctggagcagaagctgcaggagatcaccagatgcaagagcagcgaggagaagaagcccggcgagctgaagagactggtggagagcagaagacagcagatcctgagagagttcgaggagctgcacagaagactggacgaggagcagcaggtgctgctgagcagactggaggaggaggagcaggacatcctgcagagactgagagagaacgccgcccacctgggcgacaagagaagagacctggcccacctggccgccgaggtggagggcaagtgcctgcagagcggcttcgagatgctgaagcccgtgctgagcgccagagaggagtgcgagaaggtgaagaccatggaggtgaccagcgtgagcatcgagctggagaagaacttcagcaacttccccagacagtacttcgccctgagaaagatcctgaagcagctgatcgccgacgtgaccctggaccccgagaccgcccaccccaacctggtgctgagcgaggacagaaagagcgtgaagttcgtggagaccagactgagagacctgcccgacacccccagaagattcaccttctacccctgcgtgctggccaccgagggcttcaccagcggcagacactactgggaggtggaggccgcccactgcgtgctggcccaggaccccgagaaccaggccctggccagattctactgctacaccgagagaaccatcgccaagagactggtgctgagaagagaccccagcgtgaagagaaccctgtgcagaggctgcagcagcctgctggtgcccggcctgacctgcacccacagacagagaagatgcagaggccagagatggaccgtgcagacctgcctgacctgccagagaagccagagattcctgaacgaccccggccacctgctgtggggcgacagacccgaggcccagctgggcagccaggccgacagcaagcccctgcagcccctgcccaacaccgcccacagcatcagcgacagactgcccgaggagaagatgcagacccagggcagcagcaaccagtag

SEQ ID NO: 103563 - DNA, 1254 bp, synthetic construct; identical to SEQ ID NO: 103562
  misc_feature 1..1254: note = Description of Artificial Sequence: Synthetic coding sequence
  source 1..1254: mol_type = other DNA

SEQ ID NO: 103564 - DNA, 1236 bp, synthetic construct; identical to SEQ ID NO: 103527
  misc_feature 1..1236: note = Description of Artificial Sequence: Synthetic coding sequence
  source 1..1236: mol_type = other DNA

SEQ ID NO: 103565 - DNA, 1254 bp, synthetic construct; identical to SEQ ID NO: 103562
  misc_feature 1..1254: note = Description of Artificial Sequence: Synthetic coding sequence
  source 1..1254: mol_type = other DNA

SEQ ID NO: 103566 - DNA, 1557 bp, synthetic construct; identical to SEQ ID NO: 103544
  misc_feature 1..1557: note = Description of Artificial Sequence: Synthetic coding sequence
  source 1..1557: mol_type = other DNA

SEQ ID NO: 103567 - DNA, 1254 bp, synthetic construct
  misc_feature 1..1254: note = Description of Artificial Sequence: Synthetic coding sequence
  source 1..1254: mol_type = other DNA
atggtggagatcgccaagcagctgcaggccgtgaagagaaagatcagagacgagagcctgtgcccccagcaccacgaggccctgagcctgttctgctacgaggaccaggaggccgtgtgcctgatctgcgccatcagccacacccacagagcccacaccgtggtgcccctggacgacgccacccaggagtacaaggagaagctgcagaagtgcctggagcccctggagcagaagctgcaggagatcaccagatgcaagagcagcgaggagaagaagcccggcgagctgaagagactggtggagagcagaagacagcagatcctgagagagttcgaggagctgcacagaagactggacgaggagcagcaggtgctgctgagcagactggaggaggaggagcaggacatcctgcagagactgagagagaacgccgcccacctgggcgacaagagaagagacctggcccacctggccgccgaggtggagggcaagtgcctgcagagcggcttcgagatgctgaagcccgtgctgagcgccagagaggagtgcgagaaggtgaagaccatggaggtgaccagcgtgagcatcgagctggagaagaacttcagcaacttccccagacagtacttcgccctgagaaagatcctgaagcagctgatcgccgacgtgaccctggaccccgagaccgcccaccccaacctggtgctgagcgaggacagaaagagcgtgaagttcgtggagaccagactgagagacctgcccgacacccccagaagattcaccttctacccctgcgtgctggccaccgagggcttcaccagcggcagacactactgggaggtggaggccgcccactgcgtgctggcccaggaccccgagaaccaggccctggccagattctactgctacaccgagagaaccatcgccaagagactggtgctgagaagagaccccagcgtgaagagaaccctgtgcagaggctgcagcagcctgctggtgcccggcctgacctgcacccagagacagagaagatgcagaggccagagatggaccgtgcagacctgcctgacctgccagagaagccagagattcctgaacgaccccggccacctgctgtggggcgacagacccgaggcccagctgggcagccaggccgacagcaagcccctgcagcccctgcccaacaccgcccacagcatcagcgacagactgcccgaggagaagatgcagaccaagggcagcagcaaccagtag

SEQ ID NO: 103568 - DNA, 1236 bp, synthetic construct; identical to SEQ ID NO: 103527
  misc_feature 1..1236: note = Description of Artificial Sequence: Synthetic coding sequence
  source 1..1236: mol_type = other DNA

SEQ ID NO: 103569 - DNA, 1254 bp, synthetic construct; identical to SEQ ID NO: 103482
  misc_feature 1..1254: note = Description of Artificial Sequence: Synthetic coding sequence
  source 1..1254: mol_type = other DNA

SEQ ID NO: 103570 - DNA, 1557 bp, synthetic construct; identical to SEQ ID NO: 103470
  misc_feature 1..1557: note = Description of Artificial Sequence: Synthetic coding sequence
  source 1..1557: mol_type = other DNA

SEQ ID NO: 103571 - DNA, 1557 bp, synthetic construct; identical to SEQ ID NO: 103470
  misc_feature 1..1557: note = Description of Artificial Sequence: Synthetic coding sequence
  source 1..1557: mol_type = other DNA

SEQ ID NO: 103572 - DNA, 1467 bp, synthetic construct; identical to SEQ ID NO: 103543
  misc_feature 1..1467: note = Description of Artificial Sequence: Synthetic coding sequence
  source 1..1467: mol_type = other DNA

SEQ ID NO: 103573 - DNA, 1467 bp, synthetic construct; identical to SEQ ID NO: 103543
  misc_feature 1..1467: note = Description of Artificial Sequence: Synthetic coding sequence
  source 1..1467: mol_type = other DNA

SEQ ID NO: 103574 - DNA, 1254 bp, synthetic construct; identical to SEQ ID NO: 103482
  misc_feature 1..1254: note = Description of Artificial Sequence: Synthetic coding sequence
  source 1..1254: mol_type = other DNA

SEQ ID NO: 103575 - DNA, 1893 bp, synthetic construct
  misc_feature 1..1893: note = Description of Artificial Sequence: Synthetic coding sequence
  source 1..1893: mol_type = other DNA
atggccgccgtggccatgacccccaaccccgtgcagaccctgcaggaggaggccgtgtgcgccatctgcctggactacttcaccgaccccgtgagcatcggctgcggccacaacttctgcagagtgtgcgtgacccagctgtggggcggcgaggacgaggaggacagagacgagctggacagagaggaggaggaggaggacggcgaggaggaggaggtggaggccgtgggcgccggcgccggctgggacacccccatgagagacgaggactacgagggcgacatggaggaggaggtggaggaggaggaggagggcgtgttctggaccagcggcatgagcagaagcagctgggacaacatggactacgtgtgggaggaggaggacgaggaggaggacctggactactacctgggcgacatggaggaggaggacctgagaggcgaggacgaggaggacgaggaggaggtgctggaggaggtggaggaggaggacctggaccccgtgacccccctgccccccccccccgcccccagaagatgcttcacctgcccccagtgcagaaagagcttccccagaagaagcttcagacccaacctgcagctggccaacatggtgcaggtgatcagacagatgcaccccacccccggcagaggcagcagagtgaccgaccagggcatctgccccaagcaccaggaggccctgaagctgttctgcgaggtggacgaggaggccatctgcgtggtgtgcagagagagcagaagccacaagcagcacagcgtggtgcccctggaggaggtggtgcaggagtacaaggccaagctgcagggccacgtggagcccctgagaaagcacctggaggccgtgcagaagatgaaggccaaggaggagagaagagtgaccgagctgaagagccagatgaagagcgagctggccgccgtggccagcgagttcggcagactgaccagattcctggccgaggagcaggccggcctggagagaagactgagagagatgcacgaggcccagctgggcagagccggcgccgccgccagcagactggccgagcaggccgcccagctgagcagactgctggccgaggcccaggagagaagccagcagggcggcctgagactgctgcaggacatcaaggagaccttcaacagatgcgaggaggtgcagctgcagccccccgaggtgtggagccccgacccctgccagccccacagccacgacttcctgaccgacgccatcgtgagaaagatgagcagaatgttctgccaggccgccagagtggacctgaccctggaccccgacaccgcccaccccgccctgatgctgagccccgacagaagaggcgtgagactggccgagagaagacaggaggtggccgaccaccccaagagattcagcgccgactgctgcgtgctgggcgcccagggcttcagaagcggcagacactactgggaggtggaggtgggcggcagaagaggctgggccgtgggcgccgccagagagagcacccaccacaaggagaaggtgggccccggcggcagcagcgtgggcagcggcgacgccagcagcagcagacaccaccacagaagaagaagactgcacctgccccagcagcccctgctgcagagagaggtgtggtgcgtgggcaccaacggcaagagataccaggcccagagcagcaccgagcagaccctgctgagccccagcgagaagcccagaagattcggcgtgtacctggactacgaggccggcagactgggcttctacaacgccgagaccctggcccacgtgcacaccttcagcgccgccttcctgggcgagagagtgttccccttcttcagagtgctgagcaagggcaccagaatcaagctgtgcccctag

SEQ ID NO: 103576 - DNA, 1557 bp, synthetic construct
  misc_feature 1..1557: note = Description of Artificial Sequence: Synthetic coding sequence
  source 1..1557: mol_type = other DNA
atggccgccgtggccatgacccccaaccccgtgcagaccctgcaggaggaggccgtgtgcgccatctgcctggactacttcaccgaccccgtgagcatcggctgcggccacaacttctgcagagtgtgcgtgacccagctgtggggcggcgaggacgaggaggacagagacgagctggacagagaggaggaggaggaggacggcgaggaggaggaggtggaggccgtgggcgccggcgccggctgggacacccccatgagagacgaggactacgagggcgacatggaggaggaggtggaggaggaggaggagggcgtgttctggaccagcggcatgagcagaagcagctgggacaacatggactacgtgtgggaggaggaggacgaggaggaggacctggactactacctgggcgacatggaggaggaggacctgagaggcgaggacgaggaggacgaggaggaggtgctggaggaggtggaggaggaggacctggaccccgtgacccccctgccccccccccccgcccccagaagatgcttcacctgcccccagtgcagaaagagcttccccagaagaagcttcagacccaacctgcagctggccaacatggtgcaggtgatcagacagatgcaccccacccccggcagaggcagcagagtgaccgaccagggcatctgccccaagcaccaggaggccctgaagctgttctgcgaggtggacgaggaggccatctgcgtggtgtgcagagagagcagaagccacaagcagcacagcgtggtgcccctggaggaggtggtgcaggagtacaaggccaagctgcagggccacgtggagcccctgagaaagcacctggaggccgtgcagaagatgaaggccaaggaggagagaagagtgaccgagctgaagagccagatgaagagcgagctggccgccgtggccagcgagttcggcagactgaccagattcctggccgaggagcaggccggcctggagagaagactgagagagatgcacgaggcccagctgggcagagccggcgccgccgccagcagactggccgagcaggccgcccagctgagcagactgctggccgaggcccaggagagaagccagcagggcggcctgagactgctgcaggacatcaaggagaccttcaacagatgcgaggaggtgcagctgcagccccccgaggtgtggagccccgacccctgccagccccacagccacgacttcctgaccgacgccatcgtgagaaagatgagcagaatgttctgccaggccgccagagtggacctgaccctggaccccgacaccgcccaccccgccctgatgctgagccccgacagaagaggcgtgagactggccgagagaagacaggaggtggccgaccaccccaagagattcagcgccgactgctgcgtgctgggcgcccagggcttcagaagcggcagacactactgggaggagcccaaggagcccagctggccccccgcccagcccagcctgacctactacgtgtgccccaccgacagacccgagttcagcttcacctag

SEQ ID NO: 103577 - DNA, 453 bp, synthetic construct
  misc_feature 1..453: note = Description of Artificial Sequence: Synthetic coding sequence
  source 1..453: mol_type = other DNA
ctgcaggaggaggccgtgtgcgccatctgcctggactacttcaccgaccccgtgagcatcggctgcggccacaacttctgcagagtgtgcgtgacccagctgtggggcagaagaggcggcggcagcggcggctaccccgtgacccccctgccccccccccccgcccccagaagatgcttcacctgcccccagtgcagaaagagcttccccagaagaagcttcagacccaacctgcagctggccaacatggtgcaggtgatcagacagatgcaccccacccccggcagaggcagcagagtgaccgaccagggcatctgccccaagcaccaggaggccctgaagctgttctgcgaggtggacgaggaggccatctgcgtggtgtgcagagagagcagaagccacaagcagcacagcgtggtgcccctggaggaggtggtgcaggagtacaagtag

SEQ ID NO: 103578 - DNA, 948 bp, synthetic construct
  misc_feature 1..948: note = Description of Artificial Sequence: Synthetic coding sequence
  source 1..948: mol_type = other DNA
atgaaggccaaggaggagagaagagtgaccgagctgaagagccagatgaagagcgagctggccgccgtggccagcgagttcggcagactgaccagattcctggccgaggagcaggccggcctggagagaagactgagagagatgcacgaggcccagctgggcagagccggcgccgccgccagcagactggccgagcaggccgcccagctgagcagactgctggccgaggcccaggagagaagccagcagggcggcctgagactgctgcagcaggacatcaaggagaccttcaacagatacgccatcgtgagaaagatgagcagaatgttctgccaggccgccagagtggacctgaccctggaccccgacaccgcccaccccgccctgatgctgagccccgacagaagaggcgtgagactggccgagagaagacaggaggtggccgaccaccccaagagattcagcgccgactgctgcgtgctgggcgcccagggcttcagaagcggcagacactactgggaggtggaggtgggcggcagaagaggctgggccgtgggcgccgccagagagagcacccaccacaaggagaaggtgggccccggcggcagcagcgtgggcagcggcgacgccagcagcagcagacaccaccacagaagaagaagactgcacctgccccagcagcccctgctgcagagagaggtgtggtgcgtgggcaccaacggcaagagataccaggcccagagcagcaccgagcagaccctgctgagccccagcgagaagcccagaagattcggcgtgtacctggactacgaggccggcagactgggcttctacaacgccgagaccctggcccacgtgcacaccttcagcgccgccttcctgggcgagagagtgttccccttcttcagagtgctgagcaagggcaccagaatcaagctgtgcccctag

SEQ ID NO: 103579 - DNA, 1035 bp, synthetic construct
  misc_feature 1..1035: note = Description of Artificial Sequence: Synthetic coding sequence
  source 1..1035: mol_type = other DNA
atggccagcggcgtgggcgccgccttcgaggagctgccccacgacggcacctgcgacgagtgcgagcccgacgaggcccccggcgccgaggaggtgtgcagagagtgcggcttctgctactgcagaagacacgccgaggcccacagacagaagttcctgagccaccacctggccgagtacgtgcacggcagccaggcctggaccccccccgccgacggcgagggcgccggcaaggaggaggccgaggtgaaggtggagcaggagagagagatcgagagcgaggccggcgaggagagcgagagcgaggaggagagcgagagcgaggaggagagcgagaccgaggaggagagcgaggacgagagcgacgaggagagcgaggaggacagcgaggaggagatggaggacgagcaggagagcgaggccgaggaggacaaccaggaggagggcgagagcgaggccgagggcgagaccgaggccgagagcgagttcgaccccgagatcgagatggaggccgagagagtggccaagagaaagtgccccgaccacggcctggacctgagcacctactgccaggaggacagacagctgatctgcgtgctgtgccccgtgatcggcgcccaccagggccaccagctgagcaccctggacgaggccttcgaggagctgagaagcaaggacagcggcggcctgaaggccgccatgatcgagctggtggagagactgaagttcaagagcagcgaccccaaggtgaccagagaccagatgaagatgttcatccagcaggagttcaagaaggtgcagaaggtgatcgccgacgaggagcagaaggccctgcacctggtggacatccaggaggccatggccaccgcccacgtgaccgagatcctggccgacatccagagccacatggacagactgatgacccagatggcccaggccaaggagcagctggacaccagcaacgagagcgccgagcccaaggccgagggcgacgaggagggccccagcggcgccagcgaggaggaggacacctag

SEQ ID NO: 103580 - DNA, 1743 bp, synthetic construct
  misc_feature 1..1743: note = Description of Artificial Sequence: Synthetic coding sequence
  source 1..1743: mol_type = other DNA
atgagcgagaacagaaagcccctgctgggcttcgtgagcaagctgaccagcggcaccgccctgggcaacagcggcaagacccactgccccctgtgcctgggcctgttcaaggcccccagactgctgccctgcctgcacaccgtgtgcaccacctgcctggagcagctggagcccttcagcgtggtggacatcagaggcggcgacagcgacaccagcagcgagggcagcatcttccaggagctgaagcccagaagcctgcagagccagatcggcatcctgtgccccgtgtgcgacgcccaggtggacctgcccatgggcggcgtgaaggccctgaccatcgaccacctggccgtgaacgacgtgatgctggagagcctgagaggcgagggccagggcctggtgtgcgacctgtgcaacgacagagaggtggagaagagatgccagacctgcaaggccaacctgtgccacttctgctgccaggcccacagaagacagaagaagaccacctaccacaccatggtggacctgaaggacctgaagggctacagcagaatcggcaagcccatcctgtgccccgtgcaccccgccgaggagctgagactgttctgcgagttctgcgacagacccgtgtgccaggactgcgtggtgggcgagcacagagagcacccctgcgacttcaccagcaacgtgatccacaagcacggcgacagcgtgtgggagctgctgaagggcacccagccccacgtggaggccctggaggaggccctggcccagatccacatcatcaacagcgccctgcagaagagagtggaggccgtggccgccgacgtgagaaccttcagcgagggctacatcaaggccatcgaggagcacagagacaagctgctgaagcagctggaggacatcagagcccagaaggagaacagcctgcagctgcagaaggcccagctggagcagctgctggccgacatgagaaccggcgtggagttcaccgagcacctgctgaccagcggcagcgacctggagatcctgatcaccaagagagtggtggtggagagactgagaaagctgaacaaggtgcagtacagcaccagacccggcgtgaacgacaagatcagattctgcccccaggagaaggccggccagtgcagaggctacgagatctacggcaccatcaacaccaaggaggtggaccccgccaagtgcgtgctgcagggcgaggacctgcacagagccagagagaagcagaccgccagcttcaccctgctgtgcaaggacgccgccggcgagatcatgggcagaggcggcgacaacgtgcaggtggccgtggtgcccaaggacaagaaggacagccccgtgagaaccatggtgcaggacaacaaggacggcacctactacatcagctacacccccaaggagcccggcgtgtacaccgtgtgggtgtgcatcaaggagcagcacgtgcagggcagccccttcaccgtgatggtgagaagaaagcacagaccccacagcggcgtgttccactgctgcaccttctgcagcagcggcggccagaagaccgccagatgcgcctgcggcggcaccatgcccggcggctacctgggctgcggccacggccacaagggccaccccggccacccccactggagctgctgcggcaagttcaacgagaagagcgagtgcacctggaccggcggccagagcgcccccagaagcctgctgagaaccgtggccctgtag

SEQ ID NO: 103581 - DNA, 1572 bp, synthetic construct
  misc_feature 1..1572: note = Description of Artificial Sequence: Synthetic coding sequence
  source 1..1572: mol_type = other DNA
atgctgagcggcgtgaccctggagggcggcggcgccagaagcggcgagggcagaagaagcagaaccgagctgaagcccagaagcctgcagagccagatcggcatcctgtgccccgtgtgcgacgcccaggtggacctgcccatgggcggcgtgaaggccctgaccatcgaccacctggccgtgaacgacgtgatgctggagagcctgagaggcgagggccagggcctggtgtgcgacctgtgcaacgacagagaggtggagaagagatgccagacctgcaaggccaacctgtgccacttctgctgccaggcccacagaagacagaagaagaccacctaccacaccatggtggacctgaaggacctgaagggctacagcagaatcggcaagcccatcctgtgccccgtgcaccccgccgaggagctgagactgttctgcgagttctgcgacagacccgtgtgccaggactgcgtggtgggcgagcacagagagcacccctgcgacttcaccagcaacgtgatccacaagcacggcgacagcgtgtgggagctgctgaagggcacccagccccacgtggaggccctggaggaggccctggcccagatccacatcatcaacagcgccctgcagaagagagtggaggccgtggccgccgacgtgagaaccttcagcgagggctacatcaaggccatcgaggagcacagagacaagctgctgaagcagctggaggacatcagagcccagaaggagaacagcctgcagctgcagaaggcccagctggagcagctgctggccgacatgagaaccggcgtggagttcaccgagcacctgctgaccagcggcagcgacctggagatcctgatcaccaagagagtggtggtggagagactgagaaagctgaacaaggtgcagtacagcaccagacccggcgtgaacgacaagatcagattctgcccccaggagaaggccggccagtgcagaggctacgagatctacggcaccatcaacaccaaggaggtggaccccgccaagtgcgtgctgcagggcgaggacctgcacagagccagagagaagcagaccgccagcttcaccctgctgtgcaaggacgccgccggcgagatcatgggcagaggcggcgacaacgtgcaggtggccgtggtgcccaaggacaagaaggacagccccgtgagaaccatggtgcaggacaacaaggacggcacctactacatcagctacacccccaaggagcccggcgtgtacaccgtgtgggtgtgcatcaaggagcagcacgtgcagggcagccccttcaccgtgatggtgagaagaaagcacagaccccacagcggcgtgttccactgctgcaccttctgcagcagcggcggccagaagaccgccagatgcgcctgcggcggcaccatgcccggcggctacctgggctgcggccacggccacaagggccaccccggccacccccactggagctgctgcggcaagttcaacgagaagagcgagtgcacctggaccggcggccagagcgcccccagaagcctgctgagaaccgtggccctgtag

SEQ ID NO: 103582 - DNA, 1689 bp, synthetic construct
  misc_feature 1..1689: note = Description of Artificial Sequence: Synthetic coding sequence
  source 1..1689: mol_type = other DNA
atgagcgagaacagaaagcccctgctgggcttcgtgagcaagctgaccagcggcaccgccctgggcaacagcggcaagacccactgccccctgtgcctgggcctgttcaaggcccccagactgctgccctgcctgcacaccgtgtgcaccacctgcctggagcagctggagcccttcagcgtggtggacatcagaggcggcgacagcgacaccagcagcgagggcagcatcttccaggagctgaagcccagaagcctgcagagccagatcggcatcctgtgccccgtgtgcgacgcccaggtggacctgcccatgggcggcgtgaaggccctgaccatcgaccacctggccgtgaacgacgtgatgctggagagcctgagaggcgagggccagggcctggtgtgcgacctgtgcaacgacagagaggtggagaagagatgccagacctgcaaggccaacctgtgccacttctgctgccaggcccacagaagacagaagaagaccacctaccacaccatggtggacctgaaggacctgaagggctacagcagaatcggcaagcccatcctgtgccccgtgcaccccgccgaggagctgagactgttctgcgagttctgcgacagacccgtgtgccaggactgcgtggtgggcgagcacagagagcacccctgcgacttcaccagcaacgtgatccacaagcacggcgacagcgtgtgggagctgctgaagggcacccagccccacgtggaggccctggaggaggccctggcccagatccacatcatcaacagcgccctgcagaagagagtggaggccgtggccgccgacgtgagaaccttcagcgagggctacatcaaggccatcgaggagcacagagacaagctgctgaagcagctggaggacatcagagcccagaaggagaacagcctgcagctgcagaaggcccagctggagcagctgctggccgacatgagaaccggcgtggagttcaccgagcacctgctgaccagcggcagcgacctggagatcctgatcaccaagagagtggtggtggagagactgagaaagctgaacaaggtgcagtacagcaccagacccggcgtgaacgacaagatcagattctgcccccaggagaaggccggccagtgcagaggctacgagatctacgacctgcacagagccagagagaagcagaccgccagcttcaccctgctgtgcaaggacgccgccggcgagatcatgggcagaggcggcgacaacgtgcaggtggccgtggtgcccaaggacaagaaggacagccccgtgagaaccatggtgcaggacaacaaggacggcacctactacatcagctacacccccaaggagcccggcgtgtacaccgtgtgggtgtgcatcaaggagcagcacgtgcagggcagccccttcaccgtgatggtgagaagaaagcacagaccccacagcggcgtgttccactgctgcaccttctgcagcagcggcggccagaagaccgccagatgcgcctgcggcggcaccatgcccggcggctacctgggctgcggccacggccacaagggccaccccggccacccccactggagctgctgcggcaagttcaacgagaagagcgagtgcacctggaccggcggccagagcgcccccagaagcctgctgagaaccgtggccctgtag

SEQ ID NO: 103583 - DNA, 1917 bp, synthetic construct
  misc_feature 1..1917: note = Description of Artificial Sequence: Synthetic coding sequence
  source 1..1917: mol_type = other DNA
atggacggcagcggccccttcagctgccccatctgcctggagcccctgagagagcccgtgaccctgccctgcggccacaacttctgcctggcctgcctgggcgccctgtggccccacagaggcgccagcggcgccggcggccccggcggcgccgccagatgccccctgtgccaggagcccttccccgacggcctgcagctgagaaagaaccacaccctgagcgagctgctgcagctgagacagggcagcggccccggcagcggccccggccccgcccccgccctggcccccgagcccagcgcccccagcgccctgcccagcgtgcccgagcccagcgccccctgcgcccccgagccctggcccgccggcgaggagcccgtgagatgcgacgcctgccccgagggcgccgccctgcccgccgccctgagctgcctgagctgcctggccagcttctgccccgcccacctgggcccccacgagagaagccccgccctgagaggccacagactggtgccccccctgagaagactggaggagagcctgtgccccagacacctgagacccctggagagatactgcagagccgagagagtgtgcctgtgcgaggcctgcgccgcccaggagcacagaggccacgagctggtgcccctggagcaggagagagccctgcaggaggccgagcagagcaaggtgctgagcgccgtggaggacagaatggacgagctgggcgccggcatcgcccagagcagaagaaccgtggccctgatcaagagcgccgccgtggccgagagagagagagtgagcagactgttcgccgacgccgccgccgccctgcagggcttccagacccaggtgctgggcttcatcgaggagggcgaggccgccatgctgggcagaagccagggcgacctgagaagacaggaggagcagagaagcagactgagcagagccagacagaacctgagccaggtgcccgaggccgacagcgtgagcttcctgcaggagctgctggccctgagactggccctggaggacggctgcggccccggccccggcccccccagagagctgagcttcaccaagagcagccaggccgtgagagccgtgagagacatgctggccgtggcctgcgtgaaccagtgggagcagctgagaggccccggcggcaacgaggacggcccccagaagctggacagcgaggccgacgccgagccccaggacctggagagcaccaacctgctggagagcgaggcccccagagactacttcctgaagttcgcctacatcgtggacctggacagcgacaccgccgacaagttcctgcagctgttcggcaccaagggcgtgaagagagtgctgtgccccatcaactaccccctgagccccaccagattcacccactgcgagcaggtgctgggcgagggcgccctggacagaggcacctactactgggaggtggagatcatcgagggctgggtgagcatgggcgtgatggccgaggacttcagcccccaggagccctacgacagaggcagactgggcagaaacgcccacagctgctgcctgcagtggaacggcagaagcttcagcgtgtggttccacggcctggaggcccccctgccccaccccttcagccccaccgtgggcgtgtgcctggagtacgccgacagagccctggccttctacgccgtgagagacggcaagatgagcctgctgagaagactgaaggccagcagacccagaagaggcggcatccccgccagccccatcgaccccttccagagcagactggacagccacttcgccggcctgttcacccacagactgaagcccgccttcttcctggagagcgtggacgcccacctgcagatcggccccctgaagaagagctgcatcagcgtgctgaagagaagatag

SEQ ID NO: 103584 - DNA, 1482 bp, synthetic construct
  misc_feature 1..1482: note = Description of Artificial Sequence: Synthetic coding sequence
  source 1..1482: mol_type = other DNA
atggccagcggcatcctggtgaacgtgaaggaggaggtgacctgccccatctgcctggagctgctgacccagcccctgagcctggactgcggccacagcttctgccaggcctgcctgaccgccaaccacaagaagagcatgctggacaagggcgagagcagctgccccgtgtgcagaatcagctaccagcccgagaacatcagacccaacagacacgtggccaacatcgtggagaagctgagagaggtgaagctgagccccgagggccagaaggtggaccactgcgccagacacggcgagaagctgctgctgttctgccaggaggacggcaaggtgatctgctggctgtgcgagagaagccaggagcacagaggccaccacaccttcctgaccgaggaggtggccagagagtaccaggtgaagctgcaggccgccctggagatgctgagacagaagcagcaggaggccgaggagctggaggccgacatcagagaggagaaggccagctggaagacccagatccagtacgacaagaccaacgtgctggccgacttcgagcagctgagagacatcctggactgggaggagagcaacgagctgcagaacctggagaaggaggaggaggacatcctgaagagcctgaccaacagcgagaccgagatggtgcagcagacccagagcctgagagagctgatcagcgacctggagcacagactgcagggcagcgtgatggagctgctgcagaaggtgagcggcaagatcctgagaaccgagaacgtgaccctgaagaagcccgagaccttccccaagaaccagagaagagtgttcagagcccccgacctgaagggcatgctggaggtgttcagagagctgaccgacgtgagaagatactgggtggacgtgaccgtggcccccaacaacatcagctgcgccgtgatcagcgaggacaagagacaggtgagcagccccaagccccagatcatctacggcgccagaggcaccagataccagaccttcgtgaacttcaactactgcaccggcatcctgggcagccagagcatcaccagcggcaagcactactgggaggtggacgtgagcaagaagaccgcctggatcctgggcgtgtgcgccggcttccagcccgacgccatgtgcaacatcgagaagaacgagaactaccagcccaagtacggctactgggtgatcggcctggaggagggcgtgaagtgcagcgccttccaggacagcagcttccacacccccagcgtgcccttcatcgtgcccctgagcgtgatcatctgccccgacagagtgggcgtgttcctggactacgaggcctgcaccgtgagcttcttcaacatcaccaaccacggcttcctgatctacaagttcagccactgcagcttcagccagcccgtgttcccctacctgaaccccagaaagtgcggcgtgcccatgaccctgtgcagccccagcagctag

SEQ ID NO: 103585 - DNA, 981 bp, synthetic construct
  misc_feature 1..981: note = Description of Artificial Sequence: Synthetic coding sequence
  source 1..981: mol_type = other DNA
atggccagcggcatcctggtgaacgtgaaggaggaggtgacctgccccatctgcctggagctgctgacccagcccctgagcctggactgcggccacagcttctgccaggcctgcctgaccgccaaccacaagaagagcatgctggacaagggcgagagcagctgccccgtgtgcagaatcagctaccagcccgagaacatcagacccaacagacacgtggccaacatcgtggagaagctgagagaggtgaagctgagccccgagggccagaaggtggaccactgcgccagacacggcgagaagctgctgctgttctgccaggaggacggcaaggtgatctgctggctgtgcgagagaagccaggagcacagaggccaccacaccttcctgaccgaggaggtggccagagagtaccaggtgaagctgcaggccgccctggagatgctgagacagaagcagcaggaggccgaggagctggaggccgacatcagagaggagaaggccagctggaagacccagatccagtacgacaagaccaacgtgctggccgacttcgagcagctgagagacatcctggactgggaggagagcaacgagctgcagaacctggagaaggaggaggaggacatcctgaagagcctgaccaacagcgagaccgagatggtgcagcagacccagagcctgagagagctgatcagcgacctggagcacagactgcagggcagcgtgatggagctgctgcagggcgtggacggcgtgatcaagagaaccgagaacgtgaccctgaagaagcccgagaccttccccaagaaccagagaagagtgttcagagcccccgacctgaagggcatgctggaggtgttcagagagctgaccgacgtgagaagatactggggctggagcgccatggccagaagcagattcaccgccaccagcaccagccagatccaggccatcctgctgccccagccccccaagtag

SEQ ID NO: 103586 - DNA, 1482 bp, synthetic construct
  misc_feature 1..1482: note = Description of Artificial Sequence: Synthetic coding sequence
  source 1..1482: mol_type = other DNA
atggccagcggcatcctggtgaacgtgaaggaggaggtgacctgccccatctgcctggagctgctgacccagcccctgagcctggactgcggccacagcttctgccaggcctgcctgaccgccaaccacaagaagagcatgctggacaagggcgagagcagctgccccgtgtgcagaatcagctaccagcccgagaacatcagacccaacagacacgtggccaacatcgtggagaagctgagagaggtgaagctgagccccgagggccagaaggtggaccactgcgccagacacggcgagaagctgctgctgttctgccaggaggacggcaaggtgatctgctggctgtgcgagagaagccaggagcacagaggccaccacaccttcctgaccgaggaggtggccagagagtaccaggtgaagctgcaggccgccctggagatgctgagacagaagcagcaggaggccgaggagctggaggccgacatcagagaggagaaggccagctggaagacccagatccagtacgacaagaccaacgtgctggccgacttcgagcagctgagagacatcctggactgggaggagagcaacgagctgcagaacctggagaaggaggaggaggacatcctgaagagcctgaccaacagcgagaccgagatggtgcagcagacccagagcctgagagagctgatcagcgacctggagcacagactgcagggcagcgtgatggagctgctgcagggcgtggacggcgtgatcaagagaaccgagaacgtgaccctgaagaagcccgagaccttccccaagaaccagagaagagtgttcagagcccccgacctgaagggcatgctggaggtgttcagagagctgaccgacgtgagaagatactgggtggacgtgaccgtggcccccaacaacatcagctgcgccgtgatcagcgaggacaagagacaggtgagcagccccaagccccagatcatctacggcgccagaggcaccagataccagaccttcgtgaacttcaactactgcaccggcatcctgggcagccagagcatcaccagcggcaagcactactgggaggtggacgtgagcaagaagaccgcctggatcctgggcgtgtgcgccggcttccagcccgacgccatgtgcaacatcgagaagaacgagaactaccagcccaagtacggctactgggtgatcggcctggaggagggcgtgaagtgcagcgccttccaggacagcagcttccacacccccagcgtgcccttcatcgtgcccctgagcgtgatcatctgccccgacagagtgggcgtgttcctggactacgaggcctgcaccgtgagcttcttcaacatcaccaaccacggcttcctgatctacaagttcagccactgcagcttcagccagcccgtgttcccctacctgaaccccagaaagtgcggcgtgcccatgaccctgtgcagccccagcagctag

SEQ ID NO: 103587 - DNA, 1044 bp, synthetic construct
  misc_feature 1..1044: note = Description of Artificial Sequence: Synthetic coding sequence
  source 1..1044: mol_type = other DNA
atggccagcggcatcctggtgaacgtgaaggaggaggtgacctgccccatctgcctggagctgctgacccagcccctgagcctggactgcggccacagcttctgccaggcctgcctgaccgccaaccacaagaagagcatgctggacaagggcgagagcagctgccccgtgtgcagaatcagctaccagcccgagaacatcagacccaacagacacgtggccaacatcgtggagaagctgagagaggtgaagctgagccccgagggccagaaggtggaccactgcgccagacacggcgagaagctgctgctgttctgccaggaggacggcaaggtgatctgctggctgtgcgagagaagccaggagcacagaggccaccacaccttcctgaccgaggaggtggccagagagtaccaggtgaagctgcaggccgccctggagatgctgagacagaagcagcaggaggccgaggagctggaggccgacatcagagaggagaaggccagctggaagacccagatccagtacgacaagaccaacgtgctggccgacttcgagcagctgagagacatcctggactgggaggagagcaacgagctgcagaacctggagaaggaggaggaggacatcctgaagagcctgaccaacagcgagaccgagatggtgcagcagacccagagcctgagagagctgatcagcgacctggagcacagactgcagggcagcgtgatggagctgctgcagggcgtggacggcgtgatcaagagaaccgagaacgtgaccctgaagaagcccgagaccttccccaagaaccagagaagagtgttcagagcccccgacctgaagggcatgctggaggtgttcagagagctgaccgacgtgagaagatactggggcaaggagaagagccactaccacaagcccccctgcggcctgagcctgctgctgagcctgagcttcagaatcctgtgcagcctgctgggcagctgcttcaagatctacgacagccccagcaagacccacatcacctaccccagcctgtag

SEQ ID NO: 103588 - DNA, 984 bp, synthetic construct
  misc_feature 1..984: note = Description of Artificial Sequence: Synthetic coding sequence
  source 1..984: mol_type = other DNA
atggccagcggcatcctggtgaacgtgaaggaggaggtgacctgccccatctgcctggagctgctgacccagcccctgagcctggactgcggccacagcttctgccaggcctgcctgaccgccaaccacaagaagagcatgctggacaagggcgagagcagctgccccgtgtgcagaatcagctaccagcccgagaacatcagacccaacagacacgtggccaacatcgtggagaagctgagagaggtgaagctgagccccgagggccagaaggtggaccactgcgccagacacggcgagaagctgctgctgttctgccaggaggacggcaaggtgatctgctggctgtgcgagagaagccaggagcacagaggccaccacaccttcctgaccgaggaggtggccagagagtaccaggtgaagctgcaggccgccctggagatgctgagacagaagcagcaggaggccgaggagctggaggccgacatcagagaggagaaggccagctggaagacccagatccagtacgacaagaccaacgtgctggccgacttcgagcagctgagagacatcctggactgggaggagagcaacgagctgcagaacctggagaaggaggaggaggacatcctgaagagcctgaccaacagcgagaccgagatggtgcagcagacccagagcctgagagagctgatcagcgacctggagcacagactgcagggcagcgtgatggagctgctgcaggccggcgtgcagtgcctgatcctgagaaccgagaacgtgaccctgaagaagcccgagaccttccccaagaaccagagaagagtgttcagagcccccgacctgaagggcatgctggaggtgttcagagagctgaccgacgtgagaagatactggggctggagcgccatggccagaagcagattcaccgccaccagcaccagccagatccaggccatcctgctgccccagccccccaagtag

SEQ ID NO: 103589 - DNA, 981 bp, synthetic construct; identical to SEQ ID NO: 103585
  misc_feature 1..981: note = Description of Artificial Sequence: Synthetic coding sequence
  source 1..981: mol_type = other DNA

SEQ ID NO: 103590 - DNA, 630 bp, synthetic construct
  misc_feature 1..630: note = Description of Artificial Sequence: Synthetic coding sequence
  source 1..630: mol_type = other DNA
atggccagcggcatcctggtgaacgtgaaggaggaggtgacctgccccatctgcctggagctgctgacccagcccctgagcctggactgcggccacagcttctgccaggcctgcctgaccgccaaccacaagaagagcatgctggacaagggcgagagcagctgccccgtgtgcagaatcagctaccagcccgagaacatcagacccaacagacacgtggccaacatcgtggagaagctgagagaggtgaagctgagccccgagggccagaaggtggaccactgcgccagacacggcgagaagctgctgctgttctgccaggaggacggcaaggtgatctgctggctgtgcgagagaagccaggagcacagaggccaccacaccttcctgaccgaggaggtggccagagagtaccaggtgaagctgcaggccgccctggagatgctgagacagaagcagcaggaggccgaggagctggaggccgacatcagagaggagaaggccagctggaagacccagatccagtacgacaagaccaacgtgctggccgacttcgagcagctgagagacatcctggactgggaggagagcaacgagctgcagaacctggagaaggaggaggaggactag

SEQ ID NO: 103591 - DNA, 219 bp, synthetic construct
  misc_feature 1..219: note = Description of Artificial Sequence: Synthetic coding sequence
  source 1..219: mol_type = other DNA
atggccagcggcatcctggtgaacgtgaaggaggaggtgacctgccccatctgcctggagctgctgacccagcccctgagcctggactgcggccacagcttctgccaggcctgcctgaccgccaaccacaagaagagcatgctggacaagggcgagagcagctgccccgtgtgcagaatcagctaccagcccgagaacatcagacccaacagacactag

SEQ ID NO: 103592 - DNA, 816 bp, synthetic construct
  misc_feature 1..816: note = Description of Artificial Sequence: Synthetic coding sequence
  source 1..816: mol_type = other DNA
atggccagcggcatcctggtgaacgtgaaggaggaggtgacctgccccatctgcctggagctgctgacccagcccctgagcctggactgcggccacagcttctgccaggcctgcctgaccgccaaccacaagaagagcatgctggacaagggcgagagcagctgccccgtgtgcagaatcagctaccagcccgagaacatcagacccaacagacacgtggccaacatcgtggagaagctgagagaggtgaagctgagccccgagggccagaaggtggaccactgcgccagacacggcgagaagctgctgctgttctgccaggaggacggcaaggtgatctgctggctgtgcgagagaagccaggagcacagaggccaccacaccttcctgaccgaggaggtggccagagagtaccaggtgaagctgcaggccgccctggagatgctgagacagaagcagcaggaggccgaggagctggaggccgacatcagagaggagaaggccagctggaagacccagatccagtacgacaagaccaacgtgctggccgacttcgagcagctgagagacatcctggactgggaggagagcaacgagctgcagaacctggagaaggaggaggaggacatcctgaagagcctgaccaacagcgagaccgagatggtgcagcagacccagagcctgagagagctgatcagcgacctggagcacagactgcagggcagcgtgatggagctgctgcaggacggcgagagagacctggaggaggccagaaacttcagcaagaagagcaaggagagcgtgagcagcagctag

SEQ ID NO: 103593 - DNA, 1464 bp, synthetic construct
  misc_feature 1..1464: note = Description of Artificial Sequence: Synthetic coding sequence
  source 1..1464: mol_type = other DNA
atggcctggcaggtgagcctgctggagctggaggactggctgcagtgccccatctgcctggaggtgttcaaggagcccctgatgctgcagtgcggccacagctactgcaagggctgcctggtgagcctgagctgccacctggacgccgagctgagatgccccgtgtgcagacaggccgtggacggcagcagcagcctgcccaacgtgagcctggccagagtgatcgaggccctgagactgcccggcgaccccgagcccaaggtgtgcgtgcaccacagaaaccccctgagcctgttctgcgagaaggaccaggagctgatctgcggcctgtgcggcctgctgggcagccaccagcaccaccccgtgacccccgtgagcaccgtgtacagcagaatgaaggaggagctggccgccctgatcagcgagctgaagcaggagcagaagaaggtggacgagctgatcgccaagctggtgaacaacagaaccagaatcgtgaacgagagcgacgtgttcagctgggtgatcagaagagagttccaggagctgcaccacctggtggacgaggagaaggccagatgcctggagggcatcggcggccacaccagaggcctggtggccagcctggacatgcagctggagcaggcccagggcaccagagagagactggcccaggccgagtgcgtgctggagcagttcggcaacgaggaccaccacaagttcatcagaaagttccacagcatggccagcagagccgagatgccccaggccagacccctggagggcgccttcagccccatcagcttcaagcccggcctgcaccaggccgacatcaagctgaccgtgtggaagagactgttcagaaaggtgctgcccgcccccgagcccctgaagctggaccccgccaccgcccaccccctgctggagctgagcaagggcaacaccgtggtgcagtgcggcctgctggcccagagaagagccagccagcccgagagattcgactacagcacctgcgtgctggccagcagaggcttcagctgcggcagacactactgggaggtggtggtgggcagcaagagcgactggagactgggcgtgatcaagggcaccgccagcagaaagggcaagctgaacagaagccccgagcacggcgtgtggctgatcggcctgaaggagggcagagtgtacgaggccttcgcctgccccagagtgcccctgcccgtggccggccacccccacagaatcggcctgtacctgcactacgagcagggcgagctgaccttcttcgacgccgacagacccgacgacctgagacccctgtacaccttccaggccgacttccagggcaagctgtaccccatcctggacacctgctggcacgagagaggcagcaacagcctgcccatggtgctgcccccccccagcggccccggccccctgagccccgagcagcccaccaagctgtag

SEQ ID NO: 103594 - DNA, 1464 bp, synthetic construct; identical to SEQ ID NO: 103593
  misc_feature 1..1464: note = Description of Artificial Sequence: Synthetic coding sequence
  source 1..1464: mol_type = other DNA

SEQ ID NO: 103595 - DNA, 1467 bp, synthetic construct
  misc_feature 1..1467: note = Description of Artificial Sequence: Synthetic coding sequence
  source 1..1467: mol_type = other DNA
atgaccagccccgtgctggtggacatcagagaggaggtgacctgccccatctgcctggagctgctgaccgagcccctgagcatcgactgcggccacagcttctgccaggcctgcatcacccccaacggcagagagagcgtgatcggccaggagggcgagagaagctgccccgtgtgccagaccagctaccagcccggcaacctgagacccaacagacacctggccaacatcgtgagaagactgagagaggtggtgctgggccccggcaagcagctgaaggccgtgctgtgcgccgaccacggcgagaagctgcagctgttctgccaggaggacggcaaggtgatctgctggctgtgcgagagaagccaggagcacagaggccaccacaccttcctggtggaggaggtggcccaggagtaccaggagaagttccaggagagcctgaagaagctgaagaacgaggagcaggaggccgagaagctgaccgccttcatcagagagaagaagaccagctggaagaaccagatggagcccgagagatgcagaatccagaccgagttcaaccagctgagaaacatcctggacagagtggagcagagagagctgaagaagctggagcaggaggagaagaagggcctgagaatcatcgaggaggccgagaacgacctggtgcaccagacccagagcctgagagagctgatcagcgacctggagagaagatgccagggcagcaccatggagctgctgcaggacgtgagcgacgtgaccgagagaagcgagttctggaccctgagaaagcccgaggccctgcccaccaagctgagaagcatgttcagagcccccgacctgaagagaatgctgagagtgtgcagagagctgaccgacgtgcagagctactgggtggacgtgaccctgaacccccacaccgccaacctgaacctggtgctggccaagaacagaagacaggtgagattcgtgggcgccaaggtgagcggccccagctgcctggagaagcactacgactgcagcgtgctgggcagccagcacttcagcagcggcaagcactactgggaggtggacgtggccaagaagaccgcctggatcctgggcgtgtgcagcaacagcctgggccccaccttcagcttcaaccacttcgcccagaaccacagcgcctacagcagataccagccccagagcggctactgggtgatcggcctgcagcacaaccacgagtacagagcctacgaggacagcagccccagcctgctgctgagcatgaccgtgccccccagaagagtgggcgtgttcctggactacgaggccggcaccgtgagcttctacaacgtgaccaaccacggcttccccatctacaccttcagcaagtactacttccccaccaccctgtgcccctacttcaacccctgcaactgcgtgatccccatgaccctgagaagacccagcagctag

SEQ ID NO: 103596 - DNA, 1551 bp, synthetic construct
  misc_feature 1..1551: note = Description of Artificial Sequence: Synthetic coding sequence
  source 1..1551: mol_type = other DNA
atgtgcggcagcgagagaatcctgcaggccggcaacatcctggagatcagagtgggccaggccggcgccagaagagtggccaccatgaccagccccgtgctggtggacatcagagaggaggtgacctgccccatctgcctggagctgctgaccgagcccctgagcatcgactgcggccacagcttctgccaggcctgcatcacccccaacggcagagagagcgtgatcggccaggagggcgagagaagctgccccgtgtgccagaccagctaccagcccggcaacctgagacccaacagacacctggccaacatcgtgagaagactgagagaggtggtgctgggccccggcaagcagctgaaggccgtgctgtgcgccgaccacggcgagaagctgcagctgttctgccaggaggacggcaaggtgatctgctggctgtgcgagagaagccaggagcacagaggccaccacaccttcctggtggaggaggtggcccaggagtaccaggagaagttccaggagagcctgaagaagctgaagaacgaggagcaggaggccgagaagctgaccgccttcatcagagagaagaagaccagctggaagaaccagatggagcccgagagatgcagaatccagaccgagttcaaccagctgagaaacatcctggacagagtggagcagagagagctgaagaagctggagcaggaggagaagaagggcctgagaatcatcgaggaggccgagaacgacctggtgcaccagacccagagcctgagagagctgatcagcgacctggagagaagatgccagggcagcaccatggagctgctgcaggacgtgagcgacgtgaccgagagaagcgagttctggaccctgagaaagcccgaggccctgcccaccaagctgagaagcatgttcagagcccccgacctgaagagaatgctgagagtgtgcagagagctgaccgacgtgcagagctactgggtggacgtgaccctgaacccccacaccgccaacctgaacctggtgctggccaagaacagaagacaggtgagattcgtgggcgccaaggtgagcggccccagctgcctggagaagcactacgactgcagcgtgctgggcagccagcacttcagcagcggcaagcactactgggaggtggacgtggccaagaagaccgcctggatcctgggcgtgtgcagcaacagcctgggccccaccttcagcttcaaccacttcgcccagaaccacagcgcctacagcagataccagccccagagcggctactgggtgatcggcctgcagcacaaccacgagtacagagcctacgaggacagcagccccagcctgctgctgagcatgaccgtgccccccagaagagtgggcgtgttcctggactacgaggccggcaccgtgagcttctacaacgtgaccaaccacggcttccccatctacaccttcagcaagtactacttccccaccaccctgtgcccctacttcaacccctgcaactgcgtgatccccatgaccctgagaagacccagcagctag

SEQ ID NO: 103597 - DNA, 1389 bp, synthetic construct
  misc_feature 1..1389: note = Description of Artificial Sequence: Synthetic coding sequence
  source 1..1389: mol_type = other DNA
atgaccagccccgtgctggtggacatcagagaggaggtgacctgccccatctgcctggagctgctgaccgagcccctgagcatcgactgcggccacagcttctgccaggcctgcatcacccccaacggcagagagagcgtgatcggccaggagggcgagagaagctgccccgtgtgccagaccagctaccagcccggcaacctgagacccaacagacacctggccaacatcgtgagaagactgagagaggaggacggcaaggtgatctgctggctgtgcgagagaagccaggagcacagaggccaccacaccttcctggtggaggaggtggcccaggagtaccaggagaagttccaggagagcctgaagaagctgaagaacgaggagcaggaggccgagaagctgaccgccttcatcagagagaagaagaccagctggaagaaccagatggagcccgagagatgcagaatccagaccgagttcaaccagctgagaaacatcctggacagagtggagcagagagagctgaagaagctggagcaggaggagaagaagggcctgagaatcatcgaggaggccgagaacgacctggtgcaccagacccagagcctgagagagctgatcagcgacctggagagaagatgccagggcagcaccatggagctgctgcaggacgtgagcgacgtgaccgagagaagcgagttctggaccctgagaaagcccgaggccctgcccaccaagctgagaagcatgttcagagcccccgacctgaagagaatgctgagagtgtgcagagagctgaccgacgtgcagagctactgggtggacgtgaccctgaacccccacaccgccaacctgaacctggtgctggccaagaacagaagacaggtgagattcgtgggcgccaaggtgagcggccccagctgcctggagaagcactacgactgcagcgtgctgggcagccagcacttcagcagcggcaagcactactgggaggtggacgtggccaagaagaccgcctggatcctgggcgtgtgcagcaacagcctgggccccaccttcagcttcaaccacttcgcccagaaccacagcgcctacagcagataccagccccagagcggctactgggtgatcggcctgcagcacaaccacgagtacagagcctacgaggacagcagccccagcctgctgctgagcatgaccgtgccccccagaagagtgggcgtgttcctggactacgaggccggcaccgtgagcttctacaacgtgaccaaccacggcttccccatctacaccttcagcaagtactacttccccaccaccctgtgcccctacttcaacccctgcaactgcgtgatccccatgaccctgagaagacccagcagctag

SEQ ID NO: 103598 - DNA, 1188 bp, synthetic construct
  misc_feature 1..1188: note = Description of Artificial Sequence: Synthetic coding sequence
  source 1..1188: mol_type = other DNA
atgtgcggcagcgagagaccctggagaaagaccgccgccctgctgagcggcggctgggagggccacctgctggcctgcgagagaagccaggagcacagaggccaccacaccttcctggtggaggaggtggcccaggagtaccaggagaagttccaggagagcctgaagaagctgaagaacgaggagcaggaggccgagaagctgaccgccttcatcagagagaagaagaccagctggaagaaccagatggagcccgagagatgcagaatccagaccgagttcaaccagctgagaaacatcctggacagagtggagcagagagagctgaagaagctggagcaggaggagaagaagggcctgagaatcatcgaggaggccgagaacgacctggtgcaccagacccagagcctgagagagctgatcagcgacctggagagaagatgccagggcagcaccatggagctgctgcaggacgtgagcgacgtgaccgagagaagcgagttctggaccctgagaaagcccgaggccctgcccaccaagctgagaagcatgttcagagcccccgacctgaagagaatgctgagagtgtgcagagagctgaccgacgtgcagagctactgggtggacgtgaccctgaacccccacaccgccaacctgaacctggtgctggccaagaacagaagacaggtgagattcgtgggcgccaaggtgagcggccccagctgcctggagaagcactacgactgcagcgtgctgggcagccagcacttcagcagcggcaagcactactgggaggtggacgtggccaagaagaccgcctggatcctgggcgtgtgcagcaacagcctgggccccaccttcagcttcaaccacttcgcccagaaccacagcgcctacagcagataccagccccagagcggctactgggtgatcggcctgcagcacaaccacgagtacagagcctacgaggacagcagccccagcctgctgctgagcatgaccgtgccccccagaagagtgggcgtgttcctggactacgaggccggcaccgtgagcttctacaacgtgaccaaccacggcttccccatctacaccttcagcaagtactacttccccaccaccctgtgcccctacttcaacccctgcaactgcgtgatccccatgaccctgagaagacccagcagctag

SEQ ID NO: 103599 - DNA, 942 bp, synthetic construct
  misc_feature 1..942: note = Description of Artificial Sequence: Synthetic coding sequence
  source 1..942: mol_type = other DNA
atggagcccgagagatgcagaatccagaccgagttcaaccagctgagaaacatcctggacagagtggagcagagagagctgaagaagctggagcaggaggagaagaagggcctgagaatcatcgaggaggccgagaacgacctggtgcaccagacccagagcctgagagagctgatcagcgacctggagagaagatgccagggcagcaccatggagctgctgcaggacgtgagcgacgtgaccgagagaagcgagttctggaccctgagaaagcccgaggccctgcccaccaagctgagaagcatgttcagagcccccgacctgaagagaatgctgagagtgtgcagagagctgaccgacgtgcagagctactgggtggacgtgaccctgaacccccacaccgccaacctgaacctggtgctggccaagaacagaagacaggtgagattcgtgggcgccaaggtgagcggccccagctgcctggagaagcactacgactgcagcgtgctgggcagccagcacttcagcagcggcaagcactactgggaggtggacgtggccaagaagaccgcctggatcctgggcgtgtgcagcaacagcctgggccccaccttcagcttcaaccacttcgcccagaaccacagcgcctacagcagataccagccccagagcggctactgggtgatcggcctgcagcacaaccacgagtacagagcctacgaggacagcagccccagcctgctgctgagcatgaccgtgccccccagaagagtgggcgtgttcctggactacgaggccggcaccgtgagcttctacaacgtgaccaaccacggcttccccatctacaccttcagcaagtactacttccccaccaccctgtgcccctacttcaacccctgcaactgcgtgatccccatgaccctgagaagacccagcagctag

SEQ ID NO: 103600 - DNA, 942 bp, synthetic construct; identical to SEQ ID NO: 103599
  misc_feature 1..942: note = Description of Artificial Sequence: Synthetic coding sequence
  source 1..942: mol_type = other DNA

SEQ ID NO: 103601 - DNA, 942 bp, synthetic construct; identical to SEQ ID NO: 103599
  misc_feature 1..942: note = Description of Artificial Sequence: Synthetic coding sequence
  source 1..942: mol_type = other DNA

SEQ ID NO: 103602 - DNA, 942 bp, synthetic construct; identical to SEQ ID NO: 103599
  misc_feature 1..942: note = Description of Artificial Sequence: Synthetic coding sequence
  source 1..942: mol_type = other DNA

SEQ ID NO: 103603 - DNA, 3651 bp, synthetic construct
  misc_feature 1..3651: note = Description of Artificial Sequence: Synthetic coding sequence
  source 1..3651: mol_type = other DNA
atggccagaaactgcagcgagtgcaaggagaagagagccgcccacatcctgtgcacctactgcaacagatggctgtgcagcagctgcaccgaggagcacagacacagccccgtgcccggcggccccttcttccccagagcccagaagggcagccccggcgtgaacggcggccccggcgacttcaccctgtactgccccctgcacacccaggaggtgctgaagctgttctgcgagacctgcgacatgctgacctgccacagctgcctggtggtggagcacaaggagcacagatgcagacacgtggaggaggtgctgcagaaccagagaatgctgctggagggcgtgaccacccaggtggcccacaagaagagcagcctgcagaccagcgccaagcagatcgaggacagaatcttcgaggtgaagcaccagcacagaaaggtggagaaccagatcaagatggccaagatggtgctgatgaacgagctgaacaagcaggccaacggcctgatcgaggagctggagggcatcaccaacgagagaaagagaaagctggagcagcagctgcagagcatcatggtgctgaacagacagttcgagcacgtgcagaacttcatcaactgggccgtgtgcagcaagaccagcgtgcccttcctgttcagcaaggagctgatcgtgttccagatgcagagactgctggagaccagctgcaacaccgaccccggcagcccctggagcatcagattcacctgggagcccaacttctggaccaagcagctggccagcctgggctgcatcaccaccgagggcggccagatgagcagagccgacgcccccgcctacggcggcctgcagggcagcagccccttctaccagagccaccagagccccgtggcccagcaggaggccctgagccaccccagccacaagttccagagccccgccgtgtgcagcagcagcgtgtgctgcagccactgcagccccgtgagccccagcctgaagggccaggtgcccccccccagcatccaccccgcccacagcttcagacagccccccgagatggtgccccagcagctgggcagcctgcagtgcagcgccctgctgcccagagagaaggagctggcctgcagcccccacccccccaagctgctgcagccctggctggagacccagccccccgtggagcaggagagcaccagccagagactgggccagcagctgaccagccagcccgtgtgcatcgtgcccccccaggacgtgcagcagggcgcccacgcccagcccaccctgcagacccccagcatccaggtgcagttcggccaccaccagaagctgaagctgagccacttccagcagcagccccagcagcagctgccccccccccccccccccctgccccacccccccccccccctgcccccccccccccagcagccccacccccccctgccccccagccagcacctggccagcagccagcacgagagcccccccggccccgcctgcagccagaacatggacatcatgcaccacaagttcgagctggaggagatgcagaaggacctggagctgctgctgcaggcccagcagcccagcctgcagctgagccagaccaagagcccccagcacctgcagcagaccatcgtgggccagatcaactacatcgtgagacagcccgcccccgtgcagagccagagccaggaggagaccctgcaggccaccgacgagccccccgccagccagggcagcaagcccgccctgcccctggacaagaacaccgccgccgccctgccccaggccagcggcgaggagacccccctgagcgtgccccccgtggacagcaccatccagcacagcagccccaacgtggtgagaaagcacagcaccagcctgagcatcatgggcttcagcaacaccctggagatggagctgagcagcaccagactggagagacccctggagccccagatccagagcgtgagcaacctgaccgccggcgccccccaggccgtgcccagcctgctgagcgccccccccaagatggtgagcagcctgaccagcgtgcagaaccaggccatgcccagcctgaccaccagccacctgcagaccgtgcccagcctggtgcacagcaccttccagagcatgcccaacctgatcagcgacagcccccaggccatggccagcctggccagcgaccacccccaggccggccccagcctgatgagcggccacacccaggccgtgcccagcctggccacctgccccctgcagagcatcccccccgtgagcgacatgcagcccgagaccggcagcagcagcagcagcggcagaaccagcggcagcctgtgccccagagacggcgccgaccccagcctggagaacgccctgtgcaaggtgaagctggaggagcccatcaacctgagcgtgaagaagccccccctggcccccgtggtgagcaccagcaccgccctgcagcagtaccagaaccccaaggagtgcgagaacttcgagcagggcgccctggagctggacgccaaggagaaccagagcatcagagccttcaacagcgagcacaagatcccctacgtgagactggagagactgaagatctgcgccgccagcagcggcgagatgcccgtgttcaagctgaagccccagaagaacgaccaggacggcagcttcctgctgatcatcgagtgcggcaccgagagcagcagcatgagcatcaaggtgagccaggacagactgagcgaggccacccaggcccccggcctggagggcagaaaggtgaccgtgaccagcctggccggccagagaccccccgaggtggagggcaccagccccgaggagcacagactgatccccagaacccccggcgccaagaagggcccccccgcccccatcgagaacgaggacttctgcgccgtgtgcctgaacggcggcgagctgctgtgctgcgacagatgccccaaggtgttccacctgagctgccacgtgcccgccctgctgagcttccccggcggcgagtgggtgtgcaccctgtgcagaagcctgacccagcccgagatggagtacgactgcgagaacgcctgctacaaccagcccggcatgagagccagccccggcctgagcatgtacgaccagaagaagtgcgagaagctggtgctgagcctgtgctgcaacaacctgagcctgcccttccacgagcccgtgagccccctggccagacactactaccagatcatcaagagacccatggacctgagcatcatcagaagaaagctgcagaagaaggaccccgcccactacaccacccccgaggaggtggtgagcgacgtgagactgatgttctggaactgcgccaagttcaactaccccgacagcgaggtggccgaggccggcagatgcctggaggtgttcttcgagggctggctgaaggagatctaccccgagaagagattcgcccagcccagacaggaggacagcgacagcgaggaggtgagcagcgagagcggctgcagcaccccccagggcttcccctggcccccctacatgcaggagggcatccagcccaagagaagaagaagacacatggagaacgagagagccaagagaatgagcttcagactggccaacagcatcagccaggtgtag

SEQ ID NO: 103604 - DNA, 1458 bp, synthetic construct
  misc_feature 1..1458: note = Description of Artificial Sequence: Synthetic coding sequence
  source 1..1458: mol_type = other DNA
atggaccccaccgccctggtggaggccatcgtggaggaggtggcctgccccatctgcatgaccttcctgagagagcccatgagcatcgactgcggccacagcttctgccacagctgcctgagcggcctgtgggagatccccggcgagagccagaactggggctacacctgccccctgtgcagagcccccgtgcagcccagaaacctgagacccaactggcagctggccaacgtggtggagaaggtgagactgctgagactgcaccccggcatgggcctgaagggcgacctgtgcgagagacacggcgagaagctgaagatgttctgcaaggaggacgtgctgatcatgtgcgaggcctgcagccagagccccgagcacgaggcccacagcgtggtgcccatggaggacgtggcctgggagtacaagtgggagctgcacgaggccctggagcacctgaagaaggagcaggaggaggcctggaagctggaggtgggcgagagaaagagaaccgccacctggaagatccaggtggagaccagaaagcagagcatcgtgtgggagttcgagaagtaccagagactgctggagaagaagcagcccccccacagacagctgggcgccgaggtggccgccgccctggccagcctgcagagagaggccgccgagaccatgcagaagctggagctgaaccacagcgagctgatccagcagagccaggtgctgtggagaatgatcgccgagctgaaggagagaagccagagacccgtgagatggatgctgcaggacatccaggaggtgctgaacagaagcaagagctggagcctgcagcagcccgagcccatcagcctggagctgaagaccgactgcagagtgctgggcctgagagagatcctgaagacctacgccgccgacgtgagactggaccccgacaccgcctacagcagactgatcgtgagcgaggacagaaagagagtgcactacggcgacaccaaccagaagctgcccgacaaccccgagagattctacagatacaacatcgtgctgggcagccagtgcatcagcagcggcagacactactgggaggtggaggtgggcgacagaagcgagtggggcctgggcgtgtgcaagcagaacgtggacagaaaggaggtggtgtacctgagcccccactacggcttctgggtgatcagactgagaaagggcaacgagtacagagccggcaccgacgagtaccccatcctgagcctgcccgtgccccccagaagagtgggcatcttcgtggactacgaggcccacgacatcagcttctacaacgtgaccgactgcggcagccacatcttcaccttccccagataccccttccccggcagactgctgccctacttcagcccctgctacagcatcggcaccaacaacaccgcccccctggccatctgcagcctggacggcgaggactag

SEQ ID NO: 103605 - DNA, 621 bp, synthetic construct
  misc_feature 1..621: note = Description of Artificial Sequence: Synthetic coding sequence
  source 1..621: mol_type = other DNA
atgcagaagctggagctgaagaccgactgcagagtgctgggcctgagagagatcctgaagacctacgccgccgacgtgagactggaccccgacaccgcctacagcagactgatcgtgagcgaggacagaaagagagtgcactacggcgacaccaaccagaagctgcccgacaaccccgagagattctacagatacaacatcgtgctgggcagccagtgcatcagcagcggcagacactactgggaggtggaggtgggcgacagaagcgagtggggcctgggcgtgtgcaagcagaacgtggacagaaaggaggtggtgtacctgagcccccactacggcttctgggtgatcagactgagaaagggcaacgagtacagagccggcaccgacgagtaccccatcctgagcctgcccgtgccccccagaagagtgggcatcttcgtggactacgaggcccacgacatcagcttctacaacgtgaccgactgcggcagccacatcttcaccttccccagataccccttccccggcagactgctgccctacttcagcccctgctacagcatcggcaccaacaacaccgcccccctggccatctgcagcctggacggcgaggactag

SEQ ID NO: 103606 - DNA, 1536 bp, synthetic construct
  misc_feature 1..1536: note = Description of Artificial Sequence: Synthetic coding sequence
  source 1..1536: mol_type = other DNA
atggccgccgtgggccccagaaccggccccggcaccggcgccgaggccctggccctggccgccgagctgcagggcgaggccacctgcagcatctgcctggagctgttcagagagcccgtgagcgtggagtgcggccacagcttctgcagagcctgcatcggcagatgctgggagagacccggcgccggcagcgtgggcgccgccaccagagccccccccttccccctgccctgcccccagtgcagagagcccgccagacccagccagctgagacccaacagacagctggccgccgtggccaccctgctgagaagattcagcctgcccgccgccgcccccggcgagcacggcagccaggccgccgccgccagagccgccgccgccagatgcggccagcacggcgagcccttcaagctgtactgccaggacgacggcagagccatctgcgtggtgtgcgacagagccagagagcacagagagcacgccgtgctgcccctggacgaggccgtgcaggaggccaaggagctgctggagagcagactgagagtgctgaagaaggagctggaggactgcgaggtgttcagaagcaccgagaagaaggagagcaaggagctgctgaagcagatggccgccgagcaggagaaggtgggcgccgagttccaggccctgagagccttcctggtggagcaggagggcagactgctgggcagactggaggagctgagcagagaggtggcccagaagcagaacgagaacctggcccagctgggcgtggagatcacccagctgagcaagctgagcagccagatccaggagaccgcccagaagcccgacctggacttcctgcaggagttcaagagcaccctgagcagatgcagcaacgtgcccggccccaagcccaccaccgtgagcagcgagatgaagaacaaggtgtggaacgtgagcctgaagaccttcgtgctgaagggcatgctgaagaagttcaaggaggacctgagaggcgagctggagaaggaggagaaggtggagctgaccctggaccccgacaccgccaaccccagactgatcctgagcctggacctgaagggcgtgagactgggcgagagagcccaggacctgcccaaccacccctgcagattcgacaccaacaccagagtgctggccagctgcggcttcagcagcggcagacaccactgggaggtggaggtgggcagcaaggacggctgggccttcggcgtggccagagagagcgtgagaagaaagggcctgacccccttcacccccgaggagggcgtgtgggccctgcagctgaacggcggccagtactgggccgtgaccagccccgagagaagccccctgagctgcggccacctgagcagagtgagagtggccctggacctggaggtgggcgccgtgagcttctacgccgtggaggacatgagacacctgtacaccttcagagtgaacttccaggagagagtgttccccctgttcagcgtgtgcagcaccggcacctacctgagaatctggccctag

SEQ ID NO: 103607 - DNA, 666 bp, synthetic construct
  misc_feature 1..666: note = Description of Artificial Sequence: Synthetic coding sequence
  source 1..666: mol_type = other DNA
atggccgccgtgggccccagaaccggccccggcaccggcgccgaggccctggccctggccgccgagctgcagggcgaggccacctgcagcatctgcctggagctgttcagagagcccgtgagcgtggagtgcggccacagcttctgcagagcctgcatcggcagatgctgggagagacccggcgccggcagcgtgggcgccgccaccagagccccccccttccccctgccctgcccccagtgcagagagcccgccagacccagccagctgagacccaacagacagctggccgccgtggccaccctgctgagaagattcagcctgcccgccgccgcccccggcgagcacggcagccaggccgccgccgccagagccgccgccgccagatgcggccagcacggcgagcccttcaagctgtactgccaggacgacggcagagccatctgcgtggtgtgcgacagagccagagagcacagagagcacgccgtgctgcccctggacgaggccgtgcaggaggccaaggagctgctggagagcagactgagagtgctgaagaaggagctggaggactgcgaggtgttcagaagcaccgagaagaaggagagcaaggagctgctggtgagccaggcccccgccggccccccctgggacatcaccgaggcctag

SEQ ID NO: 103608 - DNA, 912 bp, synthetic construct
  misc_feature 1..912: note = Description of Artificial Sequence: Synthetic coding sequence
  source 1..912: mol_type = other DNA
atggccgccgagcaggagaaggtgggcgccgagttccaggccctgagagccttcctggtggagcaggagggcagactgctgggcagactggaggagctgagcagagaggtggcccagaagcagaacgagaacctggcccagctgggcgtggagatcacccagctgagcaagctgagcagccagatccaggagaccgcccagaagcccgacctggacttcctgcaggagttcaagagcaccctgagcagatgcagcaacgtgcccggccccaagcccaccaccgtgagcagcgagatgaagaacaaggtgtggaacgtgagcctgaagaccttcgtgctgaagggcatgctgaagaagttcaaggaggacctgagaggcgagctggagaaggaggagaaggtggagctgaccctggaccccgacaccgccaaccccagactgatcctgagcctggacctgaagggcgtgagactgggcgagagagcccaggacctgcccaaccacccctgcagattcgacaccaacaccagagtgctggccagctgcggcttcagcagcggcagacaccactgggaggtggaggtgggcagcaaggacggctgggccttcggcgtggccagagagagcgtgagaagaaagggcctgacccccttcacccccgaggagggcgtgtgggccctgcagctgaacggcggccagtactgggccgtgaccagccccgagagaagccccctgagctgcggccacctgagcagagtgagagtggccctggacctggaggtgggcgccgtgagcttctacgccgtggaggacatgagacacctgtacaccttcagagtgaacttccaggagagagtgttccccctgttcagcgtgtgcagcaccggcacctacctgagaatctggccctag

SEQ ID NO: 103609 - DNA, 912 bp, synthetic construct; identical to SEQ ID NO: 103608
  misc_feature 1..912: note = Description of Artificial Sequence: Synthetic coding sequence
  source 1..912: mol_type = other DNA

SEQ ID NO: 103610 - DNA, 990 bp, synthetic construct
  misc_feature 1..990: note = Description of Artificial Sequence: Synthetic coding sequence
  source 1..990: mol_type = other DNA
atgacccaggccaccggccagatgctgtgcctgcacgtgcaggtgcccctgcagctgctgctgctgggccagaagcagatggccgccgagcaggagaaggtgggcgccgagttccaggccctgagagccttcctggtggagcaggagggcagactgctgggcagactggaggagctgagcagagaggtggcccagaagcagaacgagaacctggcccagctgggcgtggagatcacccagctgagcaagctgagcagccagatccaggagaccgcccagaagcccgacctggacttcctgcaggagttcaagagcaccctgagcagatgcagcaacgtgcccggccccaagcccaccaccgtgagcagcgagatgaagaacaaggtgtggaacgtgagcctgaagaccttcgtgctgaagggcatgctgaagaagttcaaggaggacctgagaggcgagctggagaaggaggagaaggtggagctgaccctggaccccgacaccgccaaccccagactgatcctgagcctggacctgaagggcgtgagactgggcgagagagcccaggacctgcccaaccacccctgcagattcgacaccaacaccagagtgctggccagctgcggcttcagcagcggcagacaccactgggaggtggaggtgggcagcaaggacggctgggccttcggcgtggccagagagagcgtgagaagaaagggcctgacccccttcacccccgaggagggcgtgtgggccctgcagctgaacggcggccagtactgggccgtgaccagccccgagagaagccccctgagctgcggccacctgagcagagtgagagtggccctggacctggaggtgggcgccgtgagcttctacgccgtggaggacatgagacacctgtacaccttcagagtgaacttccaggagagagtgttccccctgttcagcgtgtgcagcaccggcacctacctgagaatctggccctag

SEQ ID NO: 103611 - DNA, 912 bp, synthetic construct; identical to SEQ ID NO: 103608
  misc_feature 1..912: note = Description of Artificial Sequence: Synthetic coding sequence
  source 1..912: mol_type = other DNA

SEQ ID NO: 103612 - DNA, 1434 bp, synthetic construct
  misc_feature 1..1434: note = Description of Artificial Sequence: Synthetic coding sequence
  source 1..1434: mol_type = other DNA
atgagcgccgcccccggcctgctgcaccaggagctgagctgccccctgtgcctgcagctgttcgacgcccccgtgaccgccgagtgcggccacagcttctgcagagcctgcctgggcagagtggccggcgagcccgccgccgacggcaccgtgctgtgcccctgctgccaggcccccaccagaccccaggccctgagcaccaacctgcagctggccagactggtggagggcctggcccaggtgccccagggccactgcgaggagcacctggaccccctgagcatctactgcgagcaggacagagccctggtgtgcggcgtgtgcgccagcctgggcagccacagaggccacagactgctgcccgccgccgaggcccacgccagactgaagacccagctgccccagcagaagctgcagctgcaggaggcctgcatgagaaaggagaagagcgtggccgtgctggagcaccagctggtggaggtggaggagaccgtgagacagttcagaggcgccgtgggcgagcagctgggcaagatgagagtgttcctggccgccctggagggcagcctggacagagaggccgagagagtgagaggcgaggccggcgtggccctgagaagagagctgggcagcctgaacagctacctggagcagctgagacagatggagaaggtgctggaggaggtggccgacaagccccagaccgagttcctgatgaagtactgcctggtgaccagcagactgcagaagatcctggccgagagccccccccccgccagactggacatccagctgcccatcatcagcgacgacttcaagttccaggtgtggagaaagatgttcagagccctgatgcccgccctggaggagctgaccttcgaccccagcagcgcccaccccagcctggtggtgagcagcagcggcagaagagtggagtgcagcgagcagaaggccccccccgccggcgaggaccccagacagttcgacaaggccgtggccgtggtggcccaccagcagctgagcgagggcgagcactactgggaggtggacgtgggcgacaagcccagatgggccctgggcgtgatcgccgccgaggcccccagaagaggcagactgcacgccgtgcccagccagggcctgtggctgctgggcctgagagagggcaagatcctggaggcccacgtggaggccaaggagcccagagccctgagaagccccgagagaagacccaccagaatcggcctgtacctgagcttcggcgacggcgtgctgagcttctacgacgccagcgacgccgacgccctggtgcccctgttcgccttccacgagagactgcccagacccgtgtaccccttcttcgacgtgtgctggcacgacaagggcaagaacgcccagcccctgctgctggtgggccccgagggcgccgaggcctag

SEQ ID NO: 103613 - DNA, 753 bp, synthetic construct
  misc_feature 1..753: note = Description of Artificial Sequence: Synthetic coding sequence
  source 1..753: mol_type = other DNA
atggcctggcaggtgagcctgctggagctggaggacagactgcagtgccccatctgcctggaggtgttcaaggagagcctgatgctgcagtgcggccacagctactgcaagggctgcctggtgagcctgagctaccacctggacaccaaggtgagatgccccatgtgctggcaggtggtggacggcagcagcagcctgcccaacgtgagcctggcctgggtgatcgaggccctgagactgcccggcgaccccgagcccaaggtgtgcgtgcaccacagaaaccccctgagcctgttctgcgagaaggaccaggagctgatctgcggcctgtgcggcctgctgggcagccaccagcaccaccccgtgacccccgtgagcaccgtgtgcagcagaatgaaggaggagctggccgccctgttcagcgagctgaagcaggagcagaagaaggtggacgagctgatcgccaagctggtgaagaacagaaccagaatcgtgaacgagagcgacgtgttcagctgggtgatcagaagagagttccaggagctgagacaccccgtggacgaggagaaggccagatgcctggagggcatcggcggccacaccagaggcctggtggccagcctggacatgcagctggagcaggcccagggcaccagagagagactggcccaggccgagtgcgtgctggagcagttcggcaacgaggaccaccacgagttcatctggaagttccacagcatggccagcagatag

SEQ ID NO: 103614 - DNA, 849 bp, synthetic construct
  misc_feature 1..849: note = Description of Artificial Sequence: Synthetic coding sequence
  source 1..849: mol_type = other DNA
atggcctggcaggtgagcctgctggagctggaggacagactgcagtgccccatctgcctggaggtgttcaaggagagcctgatgctgcagtgcggccacagctactgcaagggctgcctggtgagcctgagctaccacctggacaccaaggtgagatgccccatgtgctggcaggtggtggacggcagcagcagcctgcccaacgtgagcctggcctgggtgatcgaggccctgagactgcccggcgaccccgagcccaaggtgtgcgtgcaccacagaaaccccctgagcctgttctgcgagaaggaccaggagctgatctgcggcctgtgcggcctgctgggcagccaccagcaccaccccgtgacccccgtgagcaccgtgtgcagcagaatgaaggaggagctggccgccctgttcagcgagctgaagcaggagcagaagaaggtggacgagctgatcgccaagctggtgaagaacagaaccagaatcgtgaacgagagcgacgtgttcagctgggtgatcagaagagagttccaggagctgagacaccccgtggacgaggagaaggccagatgcctggagggcatcggcggccacaccagaggcctggtggccagcctggacatgcagctggagcaggcccagggcaccagagagagactggcccaggccgagtgcgtgctggagcagttcggcaacgaggaccaccacgagttcatctggaagttccacagcatggccagcagactgaccaagaccgaggagctggagaagaagtggagaaacggcctggccgccagccacagcctgccccagcaggtgagaccccagagaagaaccccctag

SEQ ID NO: 103615 - DNA, 753 bp, synthetic construct; identical to SEQ ID NO: 103613
  misc_feature 1..753: note = Description of Artificial Sequence: Synthetic coding sequence
  source 1..753: mol_type = other DNA

SEQ ID NO: 103616 - DNA, 750 bp, synthetic construct
  misc_feature 1..750: note = Description of Artificial Sequence: Synthetic coding sequence
  source 1..750: mol_type = other DNA
atggcctggcaggtgagcctgctggagctggaggacagactgcagtgccccatctgcctggaggtgttcaaggagagcctgatgctgcagtgcggccacagctactgcaagggctgcctggtgagcctgagctaccacctggacaccaaggtgagatgccccatgtgctggcaggtggtggacggcagcagcagcctgcccaacgtgagcctggcctgggtgatcgaggccctgagactgcccggcgaccccgagcccaaggtgtgcgtgcaccacagaaaccccctgagcctgttctgcgagaaggaccaggagctgatctgcggcctgtgcggcctgctgggcagccaccagcaccaccccgtgacccccgtgagcaccgtgtgcagcagaatgaaggaggagctggccgccctgttcagcgagctgaagcaggagcagaagaaggtggacgagctgatcgccaagctggtgaagaacagaaccagaatcgtgaacgagagcgacgtgttcagctgggtgatcagaagagagttccaggagctgagacaccccgtggacgaggagaaggccagatgcctggagggcatcggcggccacaccagaggcctggtggccagcctggacatgcagctggagcaggcccagggcaccagagagagactggcccaggccgagtgcgtgctggagcagttcggcaacgaggaccaccacgagttcatctggttccacagcatggccagcagatag

SEQ ID NO: 103617 - DNA, 753 bp, synthetic construct
  misc_feature 1..753: note = Description of Artificial Sequence: Synthetic coding sequence
  source 1..753: mol_type = other DNA
atggcctggcaggtgagcctgctggagctggaggactggctgcagtgccccatctgcctggaggtgttcaaggagagcctgatgctgcagtgcggccacagctactgcaagggctgcctggtgagcctgagctaccacctggacaccaaggtgagatgccccatgtgctggcaggtggtggacggcagcagcagcctgcccaacgtgagcctggcctgggtgatcgaggccctgagactgcccggcgaccccgagcccaaggtgtgcgtgcaccacagaaaccccctgagcctgttctgcgagaaggaccaggagctgatctgcggcctgtgcggcctgctgggcagccaccagcaccaccccgtgacccccgtgagcaccgtgtgcagcagaatgaaggaggagctggccgccctgttcagcgagctgaagcaggagcagaagaaggtggacgagctgatcgccaagctggtgaagaacagaaccagaatcgtgaacgagagcgacgtgttcagctgggtgatcagaagagagttccaggagctgagacaccccgtggacgaggagaaggccagatgcctggagggcatcggcggccacaccagaggcctggtggccagcctggacatgcagctggagcaggcccagggcaccagagagagactggcccaggccgagtgcgtgctggagcagttcggcaacgaggaccaccacgagttcatctggaagttccacagcatggccagcagatag

SEQ ID NO: 103618 - DNA, 750 bp, synthetic construct
  misc_feature 1..750: note = Description of Artificial Sequence: Synthetic coding sequence
  source 1..750: mol_type = other DNA
atggcctggcaggtgagcctgctggagctggaggactggctgcagtgccccatctgcctggaggtgttcaaggagagcctgatgctgcagtgcggccacagctactgcaagggctgcctggtgagcctgagctaccacctggacaccaaggtgagatgccccatgtgctggcaggtggtggacggcagcagcagcctgcccaacgtgagcctggcctgggtgatcgaggccctgagactgcccggcgaccccgagcccaaggtgtgcgtgcaccacagaaaccccctgagcctgttctgcgagaaggaccaggagctgatctgcggcctgtgcggcctgctgggcagccaccagcaccaccccgtgacccccgtgagcaccgtgtgcagcagaatgaaggaggagctggccgccctgttcagcgagctgaagcaggagcagaagaaggtggacgagctgatcgccaagctggtgaagaacagaaccagaatcgtgaacgagagcgacgtgttcagctgggtgatcagaagagagttccaggagctgagacaccccgtggacgaggagaaggccagatgcctggagggcatcggcggccacaccagaggcctggtggccagcctggacatgcagctggagcaggcccagggcaccagagagagactggcccaggccgagtgcgtgctggagcagttcggcaacgaggaccaccacgagttcatctggttccacagcatggccagcagatag

SEQ ID NO: 103619 - DNA, 1656 bp, synthetic construct
  misc_feature 1..1656: note = Description of Artificial Sequence: Synthetic coding sequence
  source 1..1656: mol_type = other DNA
atggccgagaactggaagaactgcttcgaggaggagctgatctgccccatctgcctgcacgtgttcgtggagcccgtgcagctgccctgcaagcacaacttctgcagaggctgcatcggcgaggcctgggccaaggacagcggcctggtgagatgccccgagtgcaaccaggcctacaaccagaagcccggcctggagaagaacctgaagctgaccaacatcgtggagaagttcaacgccctgcacgtggagaagccccccgccgccctgcactgcgtgttctgcagaagaggcccccccctgcccgcccagaaggtgtgcctgagatgcgaggccccctgctgccagagccacgtgcagacccacctgcagcagcccagcaccgccagaggccacctgctggtggaggccgacgacgtgagagcctggagctgcccccagcacaacgcctacagactgtaccactgcgaggccgagcaggtggccgtgtgccagtactgctgctactacagcggcgcccaccagggccacagcgtgtgcgacgtggagatcagaagaaacgagatcagaaagatgctgatgaagcagcaggacagactggaggagagagagcaggacatcgaggaccagctgtacaagctggagagcgacaagagactggtggaggagaaggtgaaccagctgaaggaggaggtgagactgcagtacgagaagctgcaccagctgctggacgaggacctgagacagaccgtggaggtgctggacaaggcccaggccaagttctgcagcgagaacgccgcccaggccctgcacctgggcgagagaatgcaggaggccaagaagctgctgggcagcctgcagctgctgttcgacaagaccgaggacgtgagcttcatgaagaacaccaagagcgtgaagatcctgatggacagaacccagacctgcaccagcagcagcctgagccccaccaagatcggccacctgaacagcaagctgttcctgaacgaggtggccaagaaggagaagcagctgagaaagatgctggagggccccttcagcacccccgtgcccttcctgcagagcgtgcccctgtacccctgcggcgtgagcagcagcggcgccgagaagagaaagcacagcaccgccttccccgaggccagcttcctggagaccagcagcggccccgtgggcggccagtacggcgccgccggcaccgccagcggcgagggccagagcggccagcccctgggcccctgcagcagcacccagcacctggtggccctgcccggcggcgcccagcccgtgcacagcagccccgtgttcccccccagccagtaccccaacggcagcgccgcccagcagcccatgctgccccagtacggcggcagaaagatcctggtgtgcagcgtggacaactgctactgcagcagcgtggccaaccacggcggccaccagccctaccccagaagcggccacttcccctggaccgtgcccagccaggagtacagccaccccctgccccccacccccagcgtgccccagagcctgcccagcctggccgtgagagactggctggacgccagccagcagcccggccaccaggacttctacagagtgtacggccagcccagcaccaagcactacgtgaccagctag

SEQ ID NO: 103620 - DNA, 1653 bp, synthetic construct
  misc_feature 1..1653: note = Description of Artificial Sequence: Synthetic coding sequence
  source 1..1653: mol_type = other DNA
atggccgagaactggaagaactgcttcgaggaggagctgatctgccccatctgcctgcacgtgttcgtggagcccgtgcagctgccctgcaagcacaacttctgcagaggctgcatcggcgaggcctgggccaaggacagcggcctggtgagatgccccgagtgcaaccaggcctacaaccagaagcccggcctggagaagaacctgaagctgaccaacatcgtggagaagttcaacgccctgcacgtggagaagccccccgccgccctgcactgcgtgttctgcagaagaggcccccccctgcccgcccagaaggtgtgcctgagatgcgaggccccctgctgccagagccacgtgcagacccacctgcagcagcccagcaccgccagaggccacctgctggtggaggccgacgacgtgagagcctggagctgcccccagcacaacgcctacagactgtaccactgcgaggccgagcaggtggccgtgtgccagtactgctgctactacagcggcgcccaccagggccacagcgtgtgcgacgtggagatcagaagaaacgagatcagaatgctgatgaagcagcaggacagactggaggagagagagcaggacatcgaggaccagctgtacaagctggagagcgacaagagactggtggaggagaaggtgaaccagctgaaggaggaggtgagactgcagtacgagaagctgcaccagctgctggacgaggacctgagacagaccgtggaggtgctggacaaggcccaggccaagttctgcagcgagaacgccgcccaggccctgcacctgggcgagagaatgcaggaggccaagaagctgctgggcagcctgcagctgctgttcgacaagaccgaggacgtgagcttcatgaagaacaccaagagcgtgaagatcctgatggacagaacccagacctgcaccagcagcagcctgagccccaccaagatcggccacctgaacagcaagctgttcctgaacgaggtggccaagaaggagaagcagctgagaaagatgctggagggccccttcagcacccccgtgcccttcctgcagagcgtgcccctgtacccctgcggcgtgagcagcagcggcgccgagaagagaaagcacagcaccgccttccccgaggccagcttcctggagaccagcagcggccccgtgggcggccagtacggcgccgccggcaccgccagcggcgagggccagagcggccagcccctgggcccctgcagcagcacccagcacctggtggccctgcccggcggcgcccagcccgtgcacagcagccccgtgttcccccccagccagtaccccaacggcagcgccgcccagcagcccatgctgccccagtacggcggcagaaagatcctggtgtgcagcgtggacaactgctactgcagcagcgtggccaaccacggcggccaccagccctaccccagaagcggccacttcccctggaccgtgcccagccaggagtacagccaccccctgccccccacccccagcgtgccccagagcctgcccagcctggccgtgagagactggctggacgccagccagcagcccggccaccaggacttctacagagtgtacggccagcccagcaccaagcactacgtgaccagctag

SEQ ID NO: 103621 - DNA, 2133 bp, synthetic construct
  misc_feature 1..2133: note = Description of Artificial Sequence: Synthetic coding sequence
  source 1..2133: mol_type = other DNA
atggaggagatggaggaggagctgaagtgccccgtgtgcggcagcttctacagagagcccatcatcctgccctgcagccacaacctgtgccaggcctgcgccagaaacatcctggtgcagacccccgagagcgagagcccccagagccacagagccgccggcagcggcgtgagcgactacgactacctggacctggacaagatgagcctgtacagcgaggccgacagcggctacggcagctacggcggcttcgccagcgcccccaccaccccctgccagaagagccccaacggcgtgagagtgttcccccccgccatgcccccccccgccacccacctgagccccgccctggcccccgtgcccagaaacagctgcatcacctgcccccagtgccacagaagcctgatcctggacgacagaggcctgagaggcttccccaagaacagagtgctggagggcgtgatcgacagataccagcagagcaaggccgccgccctgaagtgccagctgtgcgagaaggcccccaaggaggccaccgtgatgtgcgagcagtgcgacgtgttctactgcgacccctgcagactgagatgccacccccccagaggccccctggccaagcacagactggtgccccccgcccagggcagagtgagcagaagactgagccccagaaaggtgagcacctgcaccgaccacgagctggagaaccacagcatgtactgcgtgcagtgcaagatgcccgtgtgctaccagtgcctggaggagggcaagcacagcagccacgaggtgaaggccctgggcgccatgtggaagctgcacaagagccagctgagccaggccctgaacggcctgagcgacagagccaaggaggccaaggagttcctggtgcagctgagaaacatggtgcagcagatccaggagaacagcgtggagttcgaggcctgcctggtggcccagtgcgacgccctgatcgacgccctgaacagaagaaaggcccagctgctggccagagtgaacaaggagcacgagcacaagctgaaggtggtgagagaccagatcagccactgcaccgtgaagctgagacagaccaccggcctgatggagtactgcctggaggtgatcaaggagaacgaccccagcggcttcctgcagatcagcgacgccctgatcagaagagtgcacctgaccgaggaccagtggggcaagggcaccctgacccccagaatgaccaccgacttcgacctgagcctggacaacagccccctgctgcagagcatccaccagctggacttcgtgcaggtgaaggccagcagccccgtgcccgccacccccatcctgcagctggaggagtgctgcacccacaacaacagcgccaccctgagctggaagcagccccccctgagcaccgtgcccgccgacggctacatcctggagctggacgacggcaacggcggccagttcagagaggtgtacgtgggcaaggagaccatgtgcaccgtggacggcctgcacttcaacagcacctacaacgccagagtgaaggccttcaacaagaccggcgtgagcccctacagcaagaccctggtgctgcagaccagcgaggtggcctggttcgccttcgaccccggcagcgcccacagcgacatcatcctgagcaacgacaacctgaccgtgacctgcagcagctacgacgacagagtggtgctgggcaagaccggcttcagcaagggcatccactactgggagctgaccgtggacagatacgacaaccaccccgaccccgccttcggcgtggccagaatggacgtgatgaaggacgtgatgctgggcaaggacgacaaggcctgggccatgtacgtggacaacaacagaagctggttcatgcacaacaacagccacaccaacagaaccgagggcggcatcaccaagggcgccaccatcggcgtgctgctggacctgaacagaaagaacctgaccttcttcatcaacgacgagcagcagggccccatcgccttcgacaacgtggagggcctgttcttccccgccgtgagcctgaacagaaacgtgcaggtgaccctgcacaccggcctgcccgtgcccgacttctacagcagcagagccagcatcgcctag

SEQ ID NO: 103622 - DNA, 2409 bp, synthetic construct
  misc_feature 1..2409: note = Description of Artificial Sequence: Synthetic coding sequence
  source 1..2409: mol_type = other DNA
atggaggagatggaggaggagctgaagtgccccgtgtgcggcagcttctacagagagcccatcatcctgccctgcagccacaacctgtgccaggcctgcgccagaaacatcctggtgcagacccccgagagcgagagcccccagagccacagagccgccggcagcggcgtgagcgactacgactacctggacctggacaagatgagcctgtacagcgaggccgacagcggctacggcagctacggcggcttcgccagcgcccccaccaccccctgccagaagagccccaacggcgtgagagtgttcccccccgccatgcccccccccgccacccacctgagccccgccctggcccccgtgcccagaaacagctgcatcacctgcccccagtgccacagaagcctgatcctggacgacagaggcctgagaggcttccccaagaacagagtgctggagggcgtgatcgacagataccagcagagcaaggccgccgccctgaagtgccagctgtgcgagaaggcccccaaggaggccaccgtgatgtgcgagcagtgcgacgtgttctactgcgacccctgcagactgagatgccacccccccagaggccccctggccaagcacagactggtgccccccgcccagggcagagtgagcagaagactgagccccagaaaggtgagcacctgcaccgaccacgagctggagaaccacagcatgtactgcgtgcagtgcaagatgcccgtgtgctaccagtgcctggaggagggcaagcacagcagccacgaggtgaaggccctgggcgccatgtggaagctgcacaagagccagctgagccaggccctgaacggcctgagcgacagagccaaggaggccaaggagttcctggtgcagctgagaaacatggtgcagcagatccaggagaacagcgtggagttcgaggcctgcctggtggcccagtgcgacgccctgatcgacgccctgaacagaagaaaggcccagctgctggccagagtgaacaaggagcacgagcacaagctgaaggtggtgagagaccagatcagccactgcaccgtgaagctgagacagaccaccggcctgatggagtactgcctggaggtgatcaaggagaacgaccccagcggcttcctgcagatcagcgacgccctgatcagaagagtgcacctgaccgaggaccagtggggcaagggcaccctgacccccagaatgaccaccgacttcgacctgagcctggacaacagccccctgctgcagagcatccaccagctggacttcgtgcaggtgaaggtgcccgccacccccatcctgcagctggaggagtgctgcacccacaacaacagcgccaccctgagctggaagcagccccccctgagcaccgtgcccgccgacggctacatcctggagctggacgacggcaacggcggccagttcagagaggtgtacgtgggcaaggagaccatgtgcaccgtggacggcctgcacttcaacagcacctacaacgccagagtgaaggccttcaacaagaccggcgtgagcccctacagcaagaccctggtgctgcagaccagcgaggacaccgacagcgaggagcagaccctgcccttccccgtgcccagcgagagactgcccctgagaagaatgagccccttcagcagcaccctgaacctgcagcccagcttccccggcagaagctacttcgacttcagaagcagcccccaccagctgagcctgcacagcagcctgcagagcctgaacgcccccggctgcaacttcgagacccagagcgccccctacagccagctggtggacatcaagaagctgctggccgtggcctggttcgccttcgaccccggcagcgcccacagcgacatcatcctgagcaacgacaacctgaccgtgacctgcagcagctacgacgacagagtggtgctgggcaagaccggcttcagcaagggcatccactactgggagctgaccgtggacagatacgacaaccaccccgaccccgccttcggcgtggccagaatggacgtgatgaaggacgtgatgctgggcaaggacgacaaggcctgggccatgtacgtggacaacaacagaagctggttcatgcacaacaacagccacaccaacagaaccgagggcggcatcaccaagggcgccaccatcggcgtgctgctggacctgaacagaaagaacctgaccttcttcatcaacgacgagcagcagggccccatcgccttcgacaacgtggagggcctgttcttccccgccgtgagcctgaacagaaacgtgcaggtgagcaccctgcccctgagactgaacagctgctgctggctgcccgtgcagagactgcccagagccgtgcagagcaacagaagagagggcagctag

SEQ ID NO: 103623 - DNA, 1653 bp, synthetic construct
  misc_feature 1..1653: note = Description of Artificial Sequence: Synthetic coding sequence
  source 1..1653: mol_type = other DNA
atggaggagatggaggaggagctgaagtgccccgtgtgcggcagcttctacagagagcccatcatcctgccctgcagccacaacctgtgccaggcctgcgccagaaacatcctggtgcagacccccgagagcgagagcccccagagccacagagccgccggcagcggcgtgagcgactacgactacctggacctggacaagatgagcctgtacagcgaggccgacagcggctacggcagctacggcggcttcgccagcgcccccaccaccccctgccagaagagccccaacggcgtgagagtgttcccccccgccatgcccccccccgccacccacctgagccccgccctggcccccgtgcccagaaacagctgcatcacctgcccccagtgccacagaagcctgatcctggacgacagaggcctgagaggcttccccaagaacagagtgctggagggcgtgatcgacagataccagcagagcaaggccgccgccctgaagtgccagctgtgcgagaaggcccccaaggaggccaccgtgatgtgcgagcagtgcgacgtgttctactgcgacccctgcagactgagatgccacccccccagaggccccctggccaagcacagactggtgccccccgcccagggcagagtgagcagaagactgagccccagaaaggtgagcacctgcaccgaccacgagctggagaaccacagcatgtactgcgtgcagtgcaagatgcccgtgtgctaccagtgcctggaggagggcaagcacagcagccacgaggtgaaggccctgggcgccatgtggaagctgcacaagagccagctgagccaggccctgaacggcctgagcgacagagccaaggaggccaaggagttcctggtgcagctgagaaacatggtgcagcagatccaggagaacagcgtggagttcgaggcctgcctggtggcccagtgcgacgccctgatcgacgccctgaacagaagaaaggcccagctgctggccagagtgaacaaggagcacgagcacaagctgaaggtggtgagagaccagatcagccactgcaccgtgaagctgagacagaccaccggcctgatggagtactgcctggaggtgatcaaggagaacgaccccagcggcttcctgcagatcagcgacgccctgatcagaagagtgcacctgaccgaggaccagtggggcaagggcaccctgacccccagaatgaccaccgacttcgacctgagcctggacaacagccccctgctgcagagcatccaccagctggacttcgtgcaggtgaaggccagcagccccgtgcccgccacccccatcctgcagctggaggagtgctgcacccacaacaacagcgccaccctgagctggaagcagccccccctgagcaccgtgcccgccgacggctacatcctggagctggacgacggcaacggcggccagttcagagaggtgtacgtgggcaaggagaccatgtgcaccgtggacggcctgcacttcaacagcacctacaacgccagagtgaaggccttcaacaagaccggcgtgagcccctacagcaagaccctggtgctgcagaccagcgagggcaaggccctgcagcagtaccccagcgagagagagctgagaggcatctag

SEQ ID NO: 103624 - DNA, 3750 bp, synthetic construct
  misc_feature 1..3750: note = Description of Artificial Sequence: Synthetic coding sequence
  source 1..3750: mol_type = other DNA
atggccaccgccgccaccgaggagcccttccccttccacggcctgctgcccaagaaggagaccggcgccgccagcttcctgtgcagataccccgagtacgacggcagaggcgtgctgatcgccgtgctggacaccggcgtggaccccggcgcccccggcatgcaggtgaccaccgacggcaagcccaagatcgtggacatcatcgacaccaccggcagcggcgacgtgaacaccgccaccgaggtggagcccaaggacggcgagatcgtgggcctgagcggcagagtgctgaagatccccgccagctggaccaaccccagcggcaagtaccacatcggcatcaagaacggctacgacttctaccccaaggccctgaaggagagaatccagaaggagagaaaggagaagatctgggaccccgtgcacagagtggccctggccgaggcctgcagaaagcaggaggagttcgacgtggccaacaacggcagcagccaggccaacaagctgatcaaggaggagctgcagagccaggtggagctgctgaacagcttcgagaagaagtacagcgaccccggccccgtgtacgactgcctggtgtggcacgacggcgaggtgtggagagcctgcatcgacagcaacgaggacggcgacctgagcaagagcaccgtgctgagaaactacaaggaggcccaggagtacggcagcttcggcaccgccgagatgctgaactacagcgtgaacatctacgacgacggcaacctgctgagcatcgtgaccagcggcggcgcccacggcacccacgtggccagcatcgccgccggccacttccccgaggagcccgagagaaacggcgtggcccccggcgcccagatcctgagcatcaagatcggcgacaccagactgagcaccatggagaccggcaccggcctgatcagagccatgatcgaggtgatcaaccacaagtgcgacctggtgaactacagctacggcgaggccacccactggcccaacagcggcagaatctgcgaggtgatcaacgaggccgtgtggaagcacaacatcatctacgtgagcagcgccggcaacaacggcccctgcctgagcaccgtgggctgccccggcggcaccaccagcagcgtgatcggcgtgggcgcctacgtgagccccgacatgatggtggccgagtacagcctgagagagaagctgcccgccaaccagtacacctggagcagcagaggccccagcgccgacggcgccctgggcgtgagcatcagcgcccccggcggcgccatcgccagcgtgcccaactggaccctgagaggcacccagctgatgaacggcaccagcatgagcagccccaacgcctgcggcggcatcgccctgatcctgagcggcctgaaggccaacaacatcgactacaccgtgcacagcgtgagaagagccctggagaacaccgccgtgaaggccgacaacatcgaggtgttcgcccagggccacggcatcatccaggtggacaaggcctacgactacctggtgcagaacaccagcttcgccaacaagctgggcttcaccgtgaccgtgggcaacaacagaggcatctacctgagagaccccgtgcaggtggccgcccccagcgaccacggcgtgggcatcgagcccgtgttccccgagaacaccgagaacagcgagaagatcagcctgcagctgcacctggccctgaccagcaacagcagctgggtgcagtgccccagccacctggagctgatgaaccagtgcagacacatcaacatcagagtggaccccagaggcctgagagagggcctgcactacaccgaggtgtgcggctacgacatcgccagccccaacgccggccccctgttcagagtgcccatcaccgccgtgatcgccgccaaggtgaacgagagcagccactacgacctggccttcaccgacgtgcacttcaagcccggccagatcagaagacacttcatcgaggtgcccgagggcgccacctgggccgaggtgaccgtgtgcagctgcagcagcgaggtgagcgccaagttcgtgctgcacgccgtgcagctggtgaagcagagagcctacagaagccacgagttctacaagttctgcagcctgcccgagaagggcaccctgaccgaggccttccccgtgctgggcggcaaggccatcgagttctgcatcgccagatggtgggccagcctgagcgacgtgaacatcgactacaccatcagcttccacggcatcgtgtgcaccgccccccagctgaacatccacgccagcgagggcatcaacagattcgacgtgcagagcagcctgaagtacgaggacctggccccctgcatcaccctgaagaactgggtgcagaccctgagacccgtgagcgccaagaccaagcccctgggcagcagagacgtgctgcccaacaacagacagctgtacgagatggtgctgacctacaacttccaccagcccaagagcggcgaggtgacccccagctgccccctgctgtgcgagctgctgtacgagagcgagttcgacagccagctgtggatcatcttcgaccagaacaagagacagatgggcagcggcgacgcctacccccaccagtacagcctgaagctggagaagggcgactacaccatcagactgcagatcagacacgagcagatcagcgacctggagagactgaaggacctgcccttcatcgtgagccacagactgagcaacaccctgagcctggacatccacgagaaccacagcttcgccctgctgggcaagaagaagagcagcaacctgaccctgccccccaagtacaaccagcccttcttcgtgaccagcctgcccgacgacaagatccccaagggcgccggccccggctgctacctggccggcagcctgaccctgagcaagaccgagctgggcaagaaggccgacgtgatccccgtgcactactacctgatccccccccccaccaagaccaagaacggcagcaaggacaaggagaaggacagcgagaaggagaaggacctgaaggaggagttcaccgaggccctgagagacctgaagatccagtggatgaccaagctggacagcagcgacatctacaacgagctgaaggagacctaccccaactacctgcccctgtacgtggccagactgcaccagctggacgccgagaaggagagaatgaagagactgaacgagatcgtggacgccgccaacgccgtgatcagccacatcgaccagaccgccctggccgtgtacatcgccatgaagaccgaccccagacccgacgccgccaccatcaagaacgacatggacaagcagaagagcaccctggtggacgccctgtgcagaaagggctgcgccctggccgaccacctgctgcacacccaggcccaggacggcgccatcagcaccgacgccgagggcaaggaggaggagggcgagagccccctggacagcctggccgagaccttctgggagaccaccaagtggaccgacctgttcgacaacaaggtgctgaccttcgcctacaagcacgccctggtgaacaagatgtacggcagaggcctgaagttcgccaccaagctggtggaggagaagcccaccaaggagaactggaagaactgcatccagctgatgaagctgctgggctggacccactgcgccagcttcaccgagaactggctgcccatcatgtacccccccgactactgcgtgttctag

SEQ ID NO: 103625 - DNA, 1791 bp, synthetic construct
  misc_feature 1..1791: note = Description of Artificial Sequence: Synthetic coding sequence
  source 1..1791: mol_type = other DNA
atgctgcccagccaggcccagggcctgctgtggtgggtgttccccctgttccccgccagcagcctgagctacccccccgtgagctacagagccgacggcctggccagaaacaccttcctgaaggcctgcagcgagagcagcagcagcagcaacatcagcaccatgctggtgacccacgactacaccgccgtgaaggaggacgagatcaacgtgtaccagggcgaggtggtgcagatcctggccagcaaccagcagaacatgttcctggtgttcagagccgccaccgaccagtgccccgccgccgagggctggatccccggcttcgtgctgggccacaccagcgccgtgatcgtggagaaccccgacggcaccctgaagaagagcaccagctggcacaccgccctgagactgagaaagaagagcgagaagaaggacaaggacggcaagagagagggcaagctggagaacggctacagaaagagcagagagggcctgagcaacaaggtgagcgtgaagctgctgaaccccaactacatctacgacgtgccccccgagttcgtgatccccctgagcgaggtgacctgcgagaccggcgagaccgtggtgctgagatgcagagtgtgcggcagacccaaggccagcatcacctggaagggccccgagcacaacaccctgaacaacgacggccactacagcatcagctacagcgacctgggcgaggccaccctgaagatcgtgggcgtgaccaccgaggacgacggcatctacacctgcatcgccgtgaacgacatgggcagcgccagcagcagcgccagcctgagagtgctgggccccggcatggacggcatcatggtgacctggaaggacaacttcgacagcttctacagcgaggtggccgagctgggcagaggcagattcagcgtggtgaagaagtgcgaccagaagggcaccaagagagccgtggccaccaagttcgtgaacaagaagctgatgaagagagaccaggtgacccacgagctgggcatcctgcagagcctgcagcaccccctgctggtgggcctgctggacaccttcgagacccccaccagctacatcctggtgctggagatggccgaccagggcagactgctggactgcgtggtgagatggggcagcctgaccgagggcaagatcagagcccacctgggcgaggtgctggaggccgtgagatacctgcacaactgcagaatcgcccacctggacctgaagcccgagaacatcctggtggacgagagcctggccaagcccaccatcaagctggccgacttcggcgacgccgtgcagctgaacaccacctactacatccaccagctgctgggcaaccccgagttcgccgcccccgagatcatcctgggcaaccccgtgagcctgaccagcgacacctggagcgtgggcgtgctgacctacgtgctgctgagcggcgtgagccccttcctggacgacagcgtggaggagacctgcctgaacatctgcagactggacttcagcttccccgacgactacttcaagggcgtgagccagaaggccaaggagttcgtgtgcttcctgctgcaggaggaccccgccaagagacccagcgccgccctggccctgcaggagcagtggctgcaggccggcaacggcagaagcaccggcgtgctggacaccagcagactgaccagcttcatcgagagaagaaagcaccagaacgacgtgagacccatcagaagcatcaagaacttcctgcagagcagactgctgcccagagtgtag

SEQ ID NO: 103626 - DNA, 9294 bp, synthetic construct
  misc_feature 1..9294: note = Description of Artificial Sequence: Synthetic coding sequence
  source 1..9294: mol_type = other DNA
atgagcggcagcagcggcggcgccgccgcccccgccgccagcagcggccccgccgccgccgccagcgccgccggcagcggctgcggcggcggcgccggcgagggcgccgaggaggccgccaaggacctggccgacatcgccgccttcttcagaagcggcttcagaaagaacgacgagatgaaggccatggacgtgctgcccatcctgaaggagaaggtggcctacctgagcggcggcagagacaagagaggcggccccatcctgaccttccccgccagaagcaaccacgacagaatcagacaggaggacctgagaagactgatcagctacctggcctgcatccccagcgaggaggtgtgcaagagaggcttcaccgtgatcgtggacatgagaggcagcaagtgggacagcatcaagcccctgctgaagatcctgcaggagagcttcccctgctgcatccacgtggccctgatcatcaagcccgacaacttctggcagaagcagagaaccaacttcggcagcagcaagttcgagttcgagaccaacatggtgagcctggagggcctgaccaaggtggtggaccccagccagctgacccccgagttcgacggctgcctggagtacaaccacgaggagtggatcgagatcagagtggccttcgaggactacatcagcaacgccacccacatgctgagcagactggaggagctgcaggacatcctggccaagaaggagctgccccaggacctggagggcgccagaaacatgatcgaggagcacagccagctgaagaagaaggtgatcaaggcccccatcgaggacctggacctggagggccagaagctgctgcagagaatccagagcagcgagagcttccccaagaagaacagcggcagcggcaacgccgacctgcagaacctgctgcccaaggtgagcaccatgctggacagactgcacagcaccagacagcacctgcaccagatgtggcacgtgagaaagctgaagctggaccagtgcttccagctgagactgttcgagcaggacgccgagaagatgttcgactggatcacccacaacaagggcctgttcctgaacagctacaccgagatcggcaccagccacccccacgccatggagctgcagacccagcacaaccacttcgccatgaactgcatgaacgtgtacgtgaacatcaacagaatcatgagcgtggccaacagactggtggagagcggccactacgccagccagcagatcagacagatcgccagccagctggagcaggagtggaaggccttcgccgccgccctggacgagagaagcaccctgctggacatgagcagcatcttccaccagaaggccgagaagtacatgagcaacgtggacagctggtgcaaggcctgcggcgaggtggacctgcccagcgagctgcaggacctggaggacgccatccaccaccaccagggcatctacgagcacatcaccctggcctacagcgaggtgagccaggacggcaagagcctgctggacaagctgcagagacccctgacccccggcagcagcgacagcctgaccgccagcgccaactacagcaaggccgtgcaccacgtgctggacgtgatccacgaggtgctgcaccaccagagacagctggagaacatctggcagcacagaaaggtgagactgcaccagagactgcagctgtgcgtgttccagcaggacgtgcagcaggtgctggactggatcgagaaccacggcgaggccttcctgagcaagcacaccggcgtgggcaagagcctgcacagagccagagccctgcagaagagacacgaggacttcgaggaggtggcccagaacacctacaccaacgccgacaagctgctggaggccgccgagcagctggcccagaccggcgagtgcgaccccgaggagatctaccaggccgcccaccagctggaggacagaatccaggacttcgtgagaagagtggagcagagaaagatcctgctggacatgagcgtgagcttccacacccacgtgaaggagctgtggacctggctggaggagctgcagaaggagctgctggacgacgtgtacgccgagagcgtggaggccgtgcaggacctgatcaagagattcggccagcagcagcagaccaccctgcaggtgaccgtgaacgtgatcaaggagggcgaggacctgatccagcagctgagagacagcgccatcagcagcaacaagaccccccacaacagcagcatcaaccacatcgagaccgtgctgcagcagctggacgaggcccagagccagatggaggagctgttccaggagagaaagatcaagctggagctgttcctgcagctgagaatcttcgagagagacgccatcgacatcatcagcgacctggagagctggaacgacgagctgagccagcagatgaacgacttcgacaccgaggacctgaccatcgccgagcagagactgcagcaccacgccgacaaggccctgaccatgaacaacctgaccttcgacgtgatccaccagggccaggacctgctgcagtacgtgaacgaggtgcaggccagcggcgtggagctgctgtgcgacagagacgtggacatggccaccagagtgcaggacctgctggagttcctgcacgagaagcagcaggagctggacctggccgccgagcagcacagaaagcacctggagcagtgcgtgcagctgagacacctgcaggccgaggtgaagcaggtgctgggctggatcagaaacggcgagagcatgctgaacgccggcctgatcaccgccagcagcctgcaggaggccgagcagctgcagagagagcacgagcagttccagcacgccatcgagaagacccaccagagcgccctgcaggtgcagcagaaggccgaggccatgctgcaggccaaccactacgacatggacatgatcagagactgcgccgagaaggtggccagccactggcagcagctgatgctgaagatggaggacagactgaagctggtgaacgccagcgtggccttctacaagaccagcgagcaggtgtgcagcgtgctggagagcctggagcaggagtacaagagagaggaggactggtgcggcggcgccgacaagctgggccccaacagcgagaccgaccacgtgacccccatgatcagcaagcacctggagcagaaggaggccttcctgaaggcctgcaccctggccagaagaaacgccgacgtgttcctgaagtacctgcacagaaacagcgtgaacatgcccggcatggtgacccacatcaaggcccccgagcagcaggtgaagaacatcctgaacgagctgttccagagagagaacagagtgctgcactactggaccatgagaaagagaagactggaccagtgccagcagtacgtggtgttcgagagaagcgccaagcaggccctggagtggatccacgacaacggcgagttctacctgagcacccacaccagcaccggcagcagcatccagcacacccaggagctgctgaaggagcacgaggagttccagatcaccgccaagcagaccaaggagagagtgaagctgctgatccagctggccgacggcttctgcgagaagggccacgcccacgccgccgagatcaagaagtgcgtgaccgccgtggacaagagatacagagacttcagcctgagaatggagaagtacagaaccagcctggagaaggccctgggcatcagcagcgacagcaacaagagcagcaagagcctgcagctggacatcatccccgccagcatccccggcagcgaggtgaagctgagagacgccgcccacgagctgaacgaggagaagagaaagagcgccagaagaaaggagttcatcatggccgagctgatccagaccgagaaggcctacgtgagagacctgagagagtgcatggacacctacctgtgggagatgaccagcggcgtggaggagatcccccccggcatcgtgaacaaggagctgatcatcttcggcaacatgcaggagatctacgagttccacaacaacatcttcctgaaggagctggagaagtacgagcagctgcccgaggacgtgggccactgcttcgtgacctgggccgacaagttccagatgtacgtgacctactgcaagaacaagcccgacagcacccagctgatcctggagcacgccggcagctacttcgacgagatccagcagagacacggcctggccaacagcatcagcagctacctgatcaagcccgtgcagagaatcaccaagtaccagctgctgctgaaggagctgctgacctgctgcgaggagggcaagggcgagatcaaggacggcctggaggtgatgctgagcgtgcccaagagagccaacgacgccatgcacctgagcatgctggagggcttcgacgagaacatcgagagccagggcgagctgatcctgcaggagagcttccaggtgtgggaccccaagaccctgatcagaaagggcagagagagacacctgttcctgttcgagatgagcctggtgttcagcaaggaggtgaaggacagcagcggcagaagcaagtacctgtacaagagcaagctgttcaccagcgagctgggcgtgaccgagcacgtggagggcgacccctgcaagttcgccctgtgggtgggcagaacccccaccagcgacaacaagatcgtgctgaaggccagcagcatcgagaacaagcaggactggatcaagcacatcagagaggtgatccaggagagaaccatccacctgaagggcgccctgaaggagcccatccacatccccaagaccgcccccgccaccagacagaagggcagaagagacggcgaggacctggacagccagggcgacggcagcagccagcccgacaccatcagcatcgccagcagaaccagccagaacaccctggacagcgacaagctgagcggcggctgcgagctgaccgtggtgatccacgacttcaccgcctgcaacagcaacgagctgaccatcagaagaggccagaccgtggaggtgctggagagaccccacgacaagcccgactggtgcctggtgagaaccaccgacagaagccccgccgccgagggcctggtgccctgcggcagcctgtgcatcgcccacagcagaagcagcatggagatggagggcatcttcaaccacaaggacagcctgagcgtgagcagcaacgacgccagcccccccgccagcgtggccagcctgcagccccacatgatcggcgcccagagcagccccggccccaagagacccggcaacaccctgagaaagtggctgaccagccccgtgagaagactgagcagcggcaaggccgacggccacgtgaagaagctggcccacaagcacaagaagagcagagaggtgagaaagagcgccgacgccggcagccagaaggacagcgacgacagcgccgccaccccccaggacgagaccgtggaggagagaggcagaaacgagggcctgagcagcggcaccctgagcaagagcagcagcagcggcatgcagagctgcggcgaggaggagggcgaggagggcgccgacgccgtgcccctgcccccccccatggccatccagcagcacagcctgctgcagcccgacagccaggacgacaaggccagcagcagactgctggtgagacccaccagcagcgagacccccagcgccgccgagctggtgagcgccatcgaggagctggtgaagagcaagatggccctggaggacagacccagcagcctgctggtggaccagggcgacagcagcagccccagcttcaaccccagcgacaacagcctgctgagcagcagcagccccatcgacgagatggaggagagaaagagcagcagcctgaagagaagacactacgtgctgcaggagctggtggagaccgagagagactacgtgagagacctgggctacgtggtggagggctacatggccctgatgaaggaggacggcgtgcccgacgacatgaagggcaaggacaagatcgtgttcggcaacatccaccagatctacgactggcacagagacttcttcctgggcgagctggagaagtgcctggaggaccccgagaagctgggcagcctgttcgtgaagcacgagagaagactgcacatgtacatcgcctactgccagaacaagcccaagagcgagcacatcgtgagcgagtacatcgacaccttcttcgaggacctgaagcagagactgggccacagactgcagctgaccgacctgctgatcaagcccgtgcagagaatcatgaagtaccagctgctgctgaaggacttcctgaagtacagcaagaaggccagcctggacaccagcgagctggagagagccgtggaggtgatgtgcatcgtgcccagaagatgcaacgacatgatgaacgtgggcagactgcagggcttcgacggcaagatcgtggcccagggcaagctgctgctgcaggacaccttcctggtgaccgaccaggacgccggcctgctgcccagatgcagagagagaagaatcttcctgttcgagcagatcgtgatcttcagcgagcccctggacaagaagaagggcttcagcatgcccggcttcctgttcaagaacagcatcaaggtgagctgcctgtgcctggaggagaacgtggagaacgacccctgcaagttcgccctgaccagcagaaccggcgacgtggtggagaccttcatcctgcacagcagcagccccagcgtgagacagacctggatccacgagatcaaccagatcctggagaaccagagaaacttcctgaacgccctgaccagccccatcgagtaccagagaaaccacagcggcggcggcggcggcggcggcagcggcggcagcggcggcggcggcggcagcggcggcggcggcgcccccagcggcggcagcggccacagcggcggccccagcagctgcggcggcgcccccagcaccagcagaagcagacccagcagaatcccccagcccgtgagacaccacccccccgtgctggtgagcagcgccgccagcagccaggccgaggccgacaagatgagcggcaccagcacccccggccccagcctgcccccccccggcgccgcccccgaggccggccccagcgcccccagcagaagaccccccggcgccgacgccgagggcagcgagagagaggccgagcccatccccaagatgaaggtgctggagagccccagaaagggcgccgccaacgccagcggcagcagccccgacgcccccgccaaggacgccagagccagcctgggcaccctgcccctgggcaagcccagagccggcgccgccagccccctgaacagccccctgagcagcgccgtgcccagcctgggcaaggagcccttcccccccagcagccccctgcagaagggcggcagcttctggagcagcatccccgccagccccgccagcagacccggcagcttcaccttccccggcgacagcgacagcctgcagagacagacccccagacacgccgcccccggcaaggacaccgacagaatgagcacctgcagcagcgccagcgagcagagcgtgcagagcacccagagcaacggcagcgagagcagcagcagcagcaacatcagcaccatgctggtgacccacgactacaccgccgtgaaggaggacgagatcaacgtgtaccagggcgaggtggtgcagatcctggccagcaaccagcagaacatgttcctggtgttcagagccgccaccgaccagtgccccgccgccgagggctggatccccggcttcgtgctgggccacaccagcgccgtgatcgtggagaaccccgacggcaccctgaagaagagcaccagctggcacaccgccctgagactgagaaagaagagcgagaagaaggacaaggacggcaagagagagggcaagctggagaacggctacagaaagagcagagagggcctgagcaacaaggtgagcgtgaagctgctgaaccccaactacatctacgacgtgccccccgagttcgtgatccccctgagcgaggtgacctgcgagaccggcgagaccgtggtgctgagatgcagagtgtgcggcagacccaaggccagcatcacctggaagggccccgagcacaacaccctgaacaacgacggccactacagcatcagctacagcgacctgggcgaggccaccctgaagatcgtgggcgtgaccaccgaggacgacggcatctacacctgcatcgccgtgaacgacatgggcagcgccagcagcagcgccagcctgagagtgctgggccccggcatggacggcatcatggtgacctggaaggacaacttcgacagcttctacagcgaggtggccgagctgggcagaggcagattcagcgtggtgaagaagtgcgaccagaagggcaccaagagagccgtggccaccaagttcgtgaacaagaagctgatgaagagagaccaggtgacccacgagctgggcatcctgcagagcctgcagcaccccctgctggtgggcctgctggacaccttcgagacccccaccagctacatcctggtgctggagatggccgaccagggcagactgctggactgcgtggtgagatggggcagcctgaccgagggcaagatcagagcccacctgggcgaggtgctggaggccgtgagatacctgcacaactgcagaatcgcccacctggacctgaagcccgagaacatcctggtggacgagagcctggccaagcccaccatcaagctggccgacttcggcgacgccgtgcagctgaacaccacctactacatccaccagctgctgggcaaccccgagttcgccgcccccgagatcatcctgggcaaccccgtgagcctgaccagcgacacctggagcgtgggcgtgctgacctacgtgctgctgagcggcgtgagccccttcctggacgacagcgtggaggagacctgcctgaacatctgcagactggacttcagcttccccgacgactacttcaagggcgtgagccagaaggccaaggagttcgtgtgcttcctgctgcaggaggaccccgccaagagacccagcgccgccctggccctgcaggagcagtggctgcaggccggcaacggcagaagcaccggcgtgctggacaccagcagactgaccagcttcatcgagagaagaaagcaccagaacgacgtgagacccatcagaagcatcaagaacttcctgcagagcagactgctgcccagagtgtag

SEQ ID NO: 103627 - DNA, 7503 bp, synthetic construct
  misc_feature 1..7503: note = Description of Artificial Sequence: Synthetic coding sequence
  source 1..7503: mol_type = other DNA
atgctggacagactgcacagcaccagacagcacctgcaccagatgtggcacgtgagaaagctgaagctggaccagtgcttccagctgagactgttcgagcaggacgccgagaagatgttcgactggatcacccacaacaagggcctgttcctgaacagctacaccgagatcggcaccagccacccccacgccatggagctgcagacccagcacaaccacttcgccatgaactgcatgaacgtgtacgtgaacatcaacagaatcatgagcgtggccaacagactggtggagagcggccactacgccagccagcagatcagacagatcgccagccagctggagcaggagtggaaggccttcgccgccgccctggacgagagaagcaccctgctggacatgagcagcatcttccaccagaaggccgagaagtacatgagcaacgtggacagctggtgcaaggcctgcggcgaggtggacctgcccagcgagctgcaggacctggaggacgccatccaccaccaccagggcatctacgagcacatcaccctggcctacagcgaggtgagccaggacggcaagagcctgctggacaagctgcagagacccctgacccccggcagcagcgacagcctgaccgccagcgccaactacagcaaggccgtgcaccacgtgctggacgtgatccacgaggtgctgcaccaccagagacagctggagaacatctggcagcacagaaaggtgagactgcaccagagactgcagctgtgcgtgttccagcaggacgtgcagcaggtgctggactggatcgagaaccacggcgaggccttcctgagcaagcacaccggcgtgggcaagagcctgcacagagccagagccctgcagaagagacacgaggacttcgaggaggtggcccagaacacctacaccaacgccgacaagctgctggaggccgccgagcagctggcccagaccggcgagtgcgaccccgaggagatctaccaggccgcccaccagctggaggacagaatccaggacttcgtgagaagagtggagcagagaaagatcctgctggacatgagcgtgagcttccacacccacgtgaaggagctgtggacctggctggaggagctgcagaaggagctgctggacgacgtgtacgccgagagcgtggaggccgtgcaggacctgatcaagagattcggccagcagcagcagaccaccctgcaggtgaccgtgaacgtgatcaaggagggcgaggacctgatccagcagctgagagacagcgccatcagcagcaacaagaccccccacaacagcagcatcaaccacatcgagaccgtgctgcagcagctggacgaggcccagagccagatggaggagctgttccaggagagaaagatcaagctggagctgttcctgcagctgagaatcttcgagagagacgccatcgacatcatcagcgacctggagagctggaacgacgagctgagccagcagatgaacgacttcgacaccgaggacctgaccatcgccgagcagagactgcagcaccacgccgacaaggccctgaccatgaacaacctgaccttcgacgtgatccaccagggccaggacctgctgcagtacgtgaacgaggtgcaggccagcggcgtggagctgctgtgcgacagagacgtggacatggccaccagagtgcaggacctgctggagttcctgcacgagaagcagcaggagctggacctggccgccgagcagcacagaaagcacctggagcagtgcgtgcagctgagacacctgcaggccgaggtgaagcaggtgctgggctggatcagaaacggcgagagcatgctgaacgccggcctgatcaccgccagcagcctgcaggaggccgagcagctgcagagagagcacgagcagttccagcacgccatcgagaagacccaccagagcgccctgcaggtgcagcagaaggccgaggccatgctgcaggccaaccactacgacatggacatgatcagagactgcgccgagaaggtggccagccactggcagcagctgatgctgaagatggaggacagactgaagctggtgaacgccagcgtggccttctacaagaccagcgagcaggtgtgcagcgtgctggagagcctggagcaggagtacaagagagaggaggactggtgcggcggcgccgacaagctgggccccaacagcgagaccgaccacgtgacccccatgatcagcaagcacctggagcagaaggaggccttcctgaaggcctgcaccctggccagaagaaacgccgacgtgttcctgaagtacctgcacagaaacagcgtgaacatgcccggcatggtgacccacatcaaggcccccgagcagcaggtgaagaacatcctgaacgagctgttccagagagagaacagagtgctgcactactggaccatgagaaagagaagactggaccagtgccagcagtacgtggtgttcgagagaagcgccaagcaggccctggagtggatccacgacaacggcgagttctacctgagcacccacaccagcaccggcagcagcatccagcacacccaggagctgctgaaggagcacgaggagttccagatcaccgccaagcagaccaaggagagagtgaagctgctgatccagctggccgacggcttctgcgagaagggccacgcccacgccgccgagatcaagaagtgcgtgaccgccgtggacaagagatacagagacttcagcctgagaatggagaagtacagaaccagcctggagaaggccctgggcatcagcagcgacagcaacaagagcagcaagagcctgcagctggacatcatccccgccagcatccccggcagcgaggtgaagctgagagacgccgcccacgagctgaacgaggagaagagaaagagcgccagaagaaaggagttcatcatggccgagctgatccagaccgagaaggcctacgtgagagacctgagagagtgcatggacacctacctgtgggagatgaccagcggcgtggaggagatcccccccggcatcgtgaacaaggagctgatcatcttcggcaacatgcaggagatctacgagttccacaacaacatcttcctgaaggagctggagaagtacgagcagctgcccgaggacgtgggccactgcttcgtgacctgggccgacaagttccagatgtacgtgacctactgcaagaacaagcccgacagcacccagctgatcctggagcacgccggcagctacttcgacgagatccagcagagacacggcctggccaacagcatcagcagctacctgatcaagcccgtgcagagaatcaccaagtaccagctgctgctgaaggagctgctgacctgctgcgaggagggcaagggcgagatcaaggacggcctggaggtgatgctgagcgtgcccaagagagccaacgacgccatgcacctgagcatgctggagggcttcgacgagaacatcgagagccagggcgagctgatcctgcaggagagcttccaggtgtgggaccccaagaccctgatcagaaagggcagagagagacacctgttcctgttcgagatgagcctggtgttcagcaaggaggtgaaggacagcagcggcagaagcaagtacctgtacaagagcaagctgttcaccagcgagctgggcgtgaccgagcacgtggagggcgacccctgcaagttcgccctgtgggtgggcagaacccccaccagcgacaacaagatcgtgctgaaggccagcagcatcgagaacaagcaggactggatcaagcacatcagagaggtgatccaggagagaaccatccacctgaagggcgccctgaaggagcccatccacatccccaagaccgcccccgccaccagacagaagggcagaagagacggcgaggacctggacagccagggcgacggcagcagccagcccgacaccatcagcatcgccagcagaaccagccagaacaccctggacagcgacaagctgagcggcggctgcgagctgaccgtggtgatccacgacttcaccgcctgcaacagcaacgagctgaccatcagaagaggccagaccgtggaggtgctggagagaccccacgacaagcccgactggtgcctggtgagaaccaccgacagaagccccgccgccgagggcctggtgccctgcggcagcctgtgcatcgcccacagcagaagcagcatggagatggagggcatcttcaaccacaaggacagcctgagcgtgagcagcaacgacgccagcccccccgccagcgtggccagcctgcagccccacatgatcggcgcccagagcagccccggccccaagagacccggcaacaccctgagaaagtggctgaccagccccgtgagaagactgagcagcggcaaggccgacggccacgtgaagaagctggcccacaagcacaagaagagcagagaggtgagaaagagcgccgacgccggcagccagaaggacagcgacgacagcgccgccaccccccaggacgagaccgtggaggagagaggcagaaacgagggcctgagcagcggcaccctgagcaagagcagcagcagcggcatgcagagctgcggcgaggaggagggcgaggagggcgccgacgccgtgcccctgcccccccccatggccatccagcagcacagcctgctgcagcccgacagccaggacgacaaggccagcagcagactgctggtgagacccaccagcagcgagacccccagcgccgccgagctggtgagcgccatcgaggagctggtgaagagcaagatggccctggaggacagacccagcagcctgctggtggaccagggcgacagcagcagccccagcttcaaccccagcgacaacagcctgctgagcagcagcagccccatcgacgagatggaggagagaaagagcagcagcctgaagagaagacactacgtgctgcaggagctggtggagaccgagagagactacgtgagagacctgggctacgtggtggagggctacatggccctgatgaaggaggacggcgtgcccgacgacatgaagggcaaggacaagatcgtgttcggcaacatccaccagatctacgactggcacagagacttcttcctgggcgagctggagaagtgcctggaggaccccgagaagctgggcagcctgttcgtgaagcacgagagaagactgcacatgtacatcgcctactgccagaacaagcccaagagcgagcacatcgtgagcgagtacatcgacaccttcttcgaggacctgaagcagagactgggccacagactgcagctgaccgacctgctgatcaagcccgtgcagagaatcatgaagtaccagctgctgctgaaggacttcctgaagtacagcaagaaggccagcctggacaccagcgagctggagagagccgtggaggtgatgtgcatcgtgcccagaagatgcaacgacatgatgaacgtgggcagactgcagggcttcgacggcaagatcgtggcccagggcaagctgctgctgcaggacaccttcctggtgaccgaccaggacgccggcctgctgcccagatgcagagagagaagaatcttcctgttcgagcagatcgtgatcttcagcgagcccctggacaagaagaagggcttcagcatgcccggcttcctgttcaagaacagcatcaaggtgagctgcctgtgcctggaggagaacgtggagaacgacccctgcaagttcgccctgaccagcagaaccggcgacgtggtggagaccttcatcctgcacagcagcagccccagcgtgagacagacctggatccacgagatcaaccagatcctggagaaccagagaaacttcctgaacgccctgaccagccccatcgagtaccagagaaaccacagcggcggcggcggcggcggcggcagcggcggcagcggcggcggcggcggcagcggcggcggcggcgcccccagcggcggcagcggccacagcggcggccccagcagctgcggcggcgcccccagcaccagcagaagcagacccagcagaatcccccagcccgtgagacaccacccccccgtgctggtgagcagcgccgccagcagccaggccgaggccgacaagatgagcggcaccagcacccccggccccagcctgcccccccccggcgccgcccccgaggccggccccagcgcccccagcagaagaccccccggcgccgacgccgagggcagcgagagagaggccgagcccatccccaagatgaaggtgctggagagccccagaaagggcgccgccaacgccagcggcagcagccccgacgcccccgccaaggacgccagagccagcctgggcaccctgcccctgggcaagcccagagccggcgccgccagccccctgaacagccccctgagcagcgccgtgcccagcctgggcaaggagcccttcccccccagcagccccctgcagaagggcggcagcttctggagcagcatccccgccagccccgccagcagacccggcagcttcaccttccccggcgacagcgacagcctgcagagacagacccccagacacgccgcccccggcaaggacaccgacagaatgagcacctgcagcagcgccagcgagcagagcgtgcagagcacccagagcaacggcagcgagagcagcagcagcagcaacatcagcaccatgctggtgacccacgactacaccgccgtgaaggaggacgagatcaacgtgtaccagggcgaggtggtgcagatcctggccagcaaccagcagaacatgttcctggtgttcagagccgccaccgaccagtgccccgccgccgagggctggatccccggcttcgtgctgggccacaccagcgccgtgatcgtggagaaccccgacggcaccctgaagaagagcaccagctggcacaccgccctgagactgagaaagaagagcgagaagaaggacaaggacggcaagagagagggcaagctggagaacggctacagaaagagcagagagggcctgagcaacaaggtgagcgtgaagctgctgaaccccaactacatctacgacgtgccccccgagttcgtgatccccctgagcgaggtgacctgcgagaccggcgagaccgtggtgctgagatgcagagtgtgcggcagacccaaggccagcatcacctggaagggccccgagcacaacaccctgaacaacgacggccactacagcatcagctacagcgacctgggcgaggccaccctgaagatcgtgggcgtgaccaccgaggacgacggcatctacacctgcatcgccgtgaacgacatgggcagcgccagcagcagcgccagcctgagagtgctgggccccggcatggacggcatcatggtgacctggaaggacaacttcgacagcttctacagcgaggtggccgagctgggcagagccaactggaacaactggagcccctactag

SEQ ID NO: 103628 - DNA, 8766 bp, synthetic construct
  misc_feature 1..8766: note = Description of Artificial Sequence: Synthetic coding sequence
  source 1..8766: mol_type = other DNA
atgagcggcagcagcggcggcgccgccgcccccgccgccagcagcggccccgccgccgccgccagcgccgccggcagcggctgcggcggcggcgccggcgagggcgccgaggaggccgccaaggacctggccgacatcgccgccttcttcagaagcggcttcagaaagaacgacgagatgaaggccatggacgtgctgcccatcctgaaggagaaggtggcctacctgagcggcggcagagacaagagaggcggccccatcctgaccttccccgccagaagcaaccacgacagaatcagacaggaggacctgagaagactgatcagctacctggcctgcatccccagcgaggaggtgtgcaagagaggcttcaccgtgatcgtggacatgagaggcagcaagtgggacagcatcaagcccctgctgaagatcctgcaggagagcttcccctgctgcatccacgtggccctgatcatcaagcccgacaacttctggcagaagcagagaaccaacttcggcagcagcaagttcgagttcgagaccaacatggtgagcctggagggcctgaccaaggtggtggaccccagccagctgacccccgagttcgacggctgcctggagtacaaccacgaggagtggatcgagatcagagtggccttcgaggactacatcagcaacgccacccacatgctgagcagactggaggagctgcaggacatcctggccaagaaggagctgccccaggacctggagggcgccagaaacatgatcgaggagcacagccagctgaagaagaaggtgatcaaggcccccatcgaggacctggacctggagggccagaagctgctgcagagaatccagagcagcgagagcttccccaagaagaacagcggcagcggcaacgccgacctgcagaacctgctgcccaaggtgagcaccatgctggacagactgcacagcaccagacagcacctgcaccagatgtggcacgtgagaaagctgaagctggaccagtgcttccagctgagactgttcgagcaggacgccgagaagatgttcgactggatcacccacaacaagggcctgttcctgaacagctacaccgagatcggcaccagccacccccacgccatggagctgcagacccagcacaaccacttcgccatgaactgcatgaacgtgtacgtgaacatcaacagaatcatgagcgtggccaacagactggtggagagcggccactacgccagccagcagatcagacagatcgccagccagctggagcaggagtggaaggccttcgccgccgccctggacgagagaagcaccctgctggacatgagcagcatcttccaccagaaggccgagaagtacatgagcaacgtggacagctggtgcaaggcctgcggcgaggtggacctgcccagcgagctgcaggacctggaggacgccatccaccaccaccagggcatctacgagcacatcaccctggcctacagcgaggtgagccaggacggcaagagcctgctggacaagctgcagagacccctgacccccggcagcagcgacagcctgaccgccagcgccaactacagcaaggccgtgcaccacgtgctggacgtgatccacgaggtgctgcaccaccagagacagctggagaacatctggcagcacagaaaggtgagactgcaccagagactgcagctgtgcgtgttccagcaggacgtgcagcaggtgctggactggatcgagaaccacggcgaggccttcctgagcaagcacaccggcgtgggcaagagcctgcacagagccagagccctgcagaagagacacgaggacttcgaggaggtggcccagaacacctacaccaacgccgacaagctgctggaggccgccgagcagctggcccagaccggcgagtgcgaccccgaggagatctaccaggccgcccaccagctggaggacagaatccaggacttcgtgagaagagtggagcagagaaagatcctgctggacatgagcgtgagcttccacacccacgtgaaggagctgtggacctggctggaggagctgcagaaggagctgctggacgacgtgtacgccgagagcgtggaggccgtgcaggacctgatcaagagattcggccagcagcagcagaccaccctgcaggtgaccgtgaacgtgatcaaggagggcgaggacctgatccagcagctgagagacagcgccatcagcagcaacaagaccccccacaacagcagcatcaaccacatcgagaccgtgctgcagcagctggacgaggcccagagccagatggaggagctgttccaggagagaaagatcaagctggagctgttcctgcagctgagaatcttcgagagagacgccatcgacatcatcagcgacctggagagctggaacgacgagctgagccagcagatgaacgacttcgacaccgaggacctgaccatcgccgagcagagactgcagcaccacgccgacaaggccctgaccatgaacaacctgaccttcgacgtgatccaccagggccaggacctgctgcagtacgtgaacgaggtgcaggccagcggcgtggagctgctgtgcgacagagacgtggacatggccaccagagtgcaggacctgctggagttcctgcacgagaagcagcaggagctggacctggccgccgagcagcacagaaagcacctggagcagtgcgtgcagctgagacacctgcaggccgaggtgaagcaggtgctgggctggatcagaaacggcgagagcatgctgaacgccggcctgatcaccgccagcagcctgcaggaggccgagcagctgcagagagagcacgagcagttccagcacgccatcgagaagacccaccagagcgccctgcaggtgcagcagaaggccgaggccatgctgcaggccaaccactacgacatggacatgatcagagactgcgccgagaaggtggccagccactggcagcagctgatgctgaagatggaggacagactgaagctggtgaacgccagcgtggccttctacaagaccagcgagcaggtgtgcagcgtgctggagagcctggagcaggagtacaagagagaggaggactggtgcggcggcgccgacaagctgggccccaacagcgagaccgaccacgtgacccccatgatcagcaagcacctggagcagaaggaggccttcctgaaggcctgcaccctggccagaagaaacgccgacgtgttcctgaagtacctgcacagaaacagcgtgaacatgcccggcatggtgacccacatcaaggcccccgagcagcaggtgaagaacatcctgaacgagctgttccagagagagaacagagtgctgcactactggaccatgagaaagagaagactggaccagtgccagcagtacgtggtgttcgagagaagcgccaagcaggccctggagtggatccacgacaacggcgagttctacctgagcacccacaccagcaccggcagcagcatccagcacacccaggagctgctgaaggagcacgaggagttccagatcaccgccaagcagaccaaggagagagtgaagctgctgatccagctggccgacggcttctgcgagaagggccacgcccacgccgccgagatcaagaagtgcgtgaccgccgtggacaagagatacagagacttcagcctgagaatggagaagtacagaaccagcctggagaaggccctgggcatcagcagcgacagcaacaagagcagcaagagcctgcagctggacatcatccccgccagcatccccggcagcgaggtgaagctgagagacgccgcccacgagctgaacgaggagaagagaaagagcgccagaagaaaggagttcatcatggccgagctgatccagaccgagaaggcctacgtgagagacctgagagagtgcatggacacctacctgtgggagatgaccagcggcgtggaggagatcccccccggcatcgtgaacaaggagctgatcatcttcggcaacatgcaggagatctacgagttccacaacaacatcttcctgaaggagctggagaagtacgagcagctgcccgaggacgtgggccactgcttcgtgacctgggccgacaagttccagatgtacgtgacctactgcaagaacaagcccgacagcacccagctgatcctggagcacgccggcagctacttcgacgagatccagcagagacacggcctggccaacagcatcagcagctacctgatcaagcccgtgcagagaatcaccaagtaccagctgctgctgaaggagctgctgacctgctgcgaggagggcaagggcgagatcaaggacggcctggaggtgatgctgagcgtgcccaagagagccaacgacgccatgcacctgagcatgctggagggcttcgacgagaacatcgagagccagggcgagctgatcctgcaggagagcttccaggtgtgggaccccaagaccctgatcagaaagggcagagagagacacctgttcctgttcgagatgagcctggtgttcagcaaggaggtgaaggacagcagcggcagaagcaagtacctgtacaagagcaagctgttcaccagcgagctgggcgtgaccgagcacgtggagggcgacccctgcaagttcgccctgtgggtgggcagaacccccaccagcgacaacaagatcgtgctgaaggccagcagcatcgagaacaagcaggactggatcaagcacatcagagaggtgatccaggagagaaccatccacctgaagggcgccctgaaggagcccatccacatccccaagaccgcccccgccaccagacagaagggcagaagagacggcgaggacctggacagccagggcgacggcagcagccagcccgacaccatcagcatcgccagcagaaccagccagaacaccctggacagcgacaagctgagcggcggctgcgagctgaccgtggtgatccacgacttcaccgcctgcaacagcaacgagctgaccatcagaagaggccagaccgtggaggtgctggagagaccccacgacaagcccgactggtgcctggtgagaaccaccgacagaagccccgccgccgagggcctggtgccctgcggcagcctgtgcatcgcccacagcagaagcagcatggagatggagggcatcttcaaccacaaggacagcctgagcgtgagcagcaacgacgccagcccccccgccagcgtggccagcctgcagccccacatgatcggcgcccagagcagccccggccccaagagacccggcaacaccctgagaaagtggctgaccagccccgtgagaagactgagcagcggcaaggccgacggccacgtgaagaagctggcccacaagcacaagaagagcagagaggtgagaaagagcgccgacgccggcagccagaaggacagcgacgacagcgccgccaccccccaggacgagaccgtggaggagagaggcagaaacgagggcctgagcagcggcaccctgagcaagagcagcagcagcggcatgcagagctgcggcgaggaggagggcgaggagggcgccgacgccgtgcccctgcccccccccatggccatccagcagcacagcctgctgcagcccgacagccaggacgacaaggccagcagcagactgctggtgagacccaccagcagcgagacccccagcgccgccgagctggtgagcgccatcgaggagctggtgaagagcaagatggccctggaggacagacccagcagcctgctggtggaccagggcgacagcagcagccccagcttcaaccccagcgacaacagcctgctgagcagcagcagccccatcgacgagatggaggagagaaagagcagcagcctgaagagaagacactacgtgctgcaggagctggtggagaccgagagagactacgtgagagacctgggctacgtggtggagggctacatggccctgatgaaggaggacggcgtgcccgacgacatgaagggcaaggacaagatcgtgttcggcaacatccaccagatctacgactggcacagagacttcttcctgggcgagctggagaagtgcctggaggaccccgagaagctgggcagcctgttcgtgaagcacgagagaagactgcacatgtacatcgcctactgccagaacaagcccaagagcgagcacatcgtgagcgagtacatcgacaccttcttcgaggacctgaagcagagactgggccacagactgcagctgaccgacctgctgatcaagcccgtgcagagaatcatgaagtaccagctgctgctgaaggacttcctgaagtacagcaagaaggccagcctggacaccagcgagctggagagagccgtggaggtgatgtgcatcgtgcccagaagatgcaacgacatgatgaacgtgggcagactgcagggcttcgacggcaagatcgtggcccagggcaagctgctgctgcaggacaccttcctggtgaccgaccaggacgccggcctgctgcccagatgcagagagagaagaatcttcctgttcgagcagatcgtgatcttcagcgagcccctggacaagaagaagggcttcagcatgcccggcttcctgttcaagaacagcatcaaggtgagctgcctgtgcctggaggagaacgtggagaacgacccctgcaagttcgccctgaccagcagaaccggcgacgtggtggagaccttcatcctgcacagcagcagccccagcgtgagacagacctggatccacgagatcaaccagatcctggagaaccagagaaacttcctgaacgccctgaccagccccatcgagtaccagagaaaccacagcggcggcggcggcggcggcggcagcggcggcagcggcggcggcggcggcagcggcggcggcggcgcccccagcggcggcagcggccacagcggcggccccagcagctgcggcggcgcccccagcaccagcagaagcagacccagcagaatcccccagcccgtgagacaccacccccccgtgctggtgagcagcgccgccagcagccaggccgaggccgacaagatgagcgagagcgagagcagcagcagcagcaacatcagcaccatgctggtgacccacgactacaccgccgtgaaggaggacgagatcaacgtgtaccagggcgaggtggtgcagatcctggccagcaaccagcagaacatgttcctggtgttcagagccgccaccgaccagtgccccgccgccgagggctggatccccggcttcgtgctgggccacaccagcgccgtgatcgtggagaaccccgacggcaccctgaagaagagcaccagctggcacaccgccctgagactgagaaagaagagcgagaagaaggacaaggacggcaagagagagggcaagctggagaacggctacagaaagagcagagagggcctgagcaacaaggtgagcgtgaagctgctgaaccccaactacatctacgacgtgccccccgagttcgtgatccccctgagcgaggtgacctgcgagaccggcgagaccgtggtgctgagatgcagagtgtgcggcagacccaaggccagcatcacctggaagggccccgagcacaacaccctgaacaacgacggccactacagcatcagctacagcgacctgggcgaggccaccctgaagatcgtgggcgtgaccaccgaggacgacggcatctacacctgcatcgccgtgaacgacatgggcagcgccagcagcagcgccagcctgagagtgctgggccccggcatggacggcatcatggtgacctggaaggacaacttcgacagcttctacagcgaggtggccgagctgggcagaggcagattcagcgtggtgaagaagtgcgaccagaagggcaccaagagagccgtggccaccaagttcgtgaacaagaagctgatgaagagagaccaggtgacccacgagctgggcatcctgcagagcctgcagcaccccctgctggtgggcctgctggacaccttcgagacccccaccagctacatcctggtgctggagatggccgaccagggcagactgctggactgcgtggtgagatggggcagcctgaccgagggcaagatcagagcccacctgggcgaggtgctggaggccgtgagatacctgcacaactgcagaatcgcccacctggacctgaagcccgagaacatcctggtggacgagagcctggccaagcccaccatcaagctggccgacttcggcgacgccgtgcagctgaacaccacctactacatccaccagctgctgggcaaccccgagttcgccgcccccgagatcatcctgggcaaccccgtgagcctgaccagcgacacctggagcgtgggcgtgctgacctacgtgctgctgagcggcgtgagccccttcctggacgacagcgtggaggagacctgcctgaacatctgcagactggacttcagcttccccgacgactacttcaagggcgtgagccagaaggccaaggagttcgtgtgcttcctgctgcaggaggaccccgccaagagacccagcgccgccctggccctgcaggagcagtggctgcaggccggcaacggcagaagcaccggcgtgctggacaccagcagactgaccagcttcatcgagagaagaaagcaccagaacgacgtgagacccatcagaagcatcaagaacttcctgcagagcagactgctgcccagagtgtag

SEQ ID NO: 103629 - DNA, 768 bp, synthetic construct
  misc_feature 1..768: note = Description of Artificial Sequence: Synthetic coding sequence
  source 1..768: mol_type = other DNA
atggccctggaggacagacccagcagcctgctggtggaccagggcgacagcagcagccccagcttcaaccccagcgacaacagcctgctgagcagcagcagccccatcgacgagatggaggagagaaagagcagcagcctgaagagaagacactacgtgctgcaggagctggtggagaccgagagagactacgtgagagacctgggctacgtggtggagggctacatggccctgatgaaggaggacggcgtgcccgacgacatgaagggcaaggacaagatcgtgttcggcaacatccaccagatctacgactggcacagagacttcttcctgggcgagctggagaagtgcctggaggaccccgagaagctgggcagcctgttcgtgaagcacgagagaagactgcacatgtacatcgcctactgccagaacaagcccaagagcgagcacatcgtgagcgagtacatcgacaccttcttcgaggacctgaagcagagactgggccacagactgcagctgaccgacctgctgatcaagcccgtgcagagaatcatgaagtaccagctgctgctgaaggacttcctgaagtacagcaagaaggccagcctggacaccagcgagctggagagagccgtggaggtgatgtgcatcgtgcccagaagatgcaacgacatgatgaacgtgggcagactgcagggcttcgacggcagagtggtggccctgtgccacagattcaaggagaccttcagagagatctgctggttctag

SEQ ID NO: 103630 - DNA, 1203 bp, synthetic construct
  misc_feature 1..1203: note = Description of Artificial Sequence: Synthetic coding sequence
  source 1..1203: mol_type = other DNA
atgaacggccagctggacctgagcggcaagctgatcatcaaggcccagctgggcgaggacatcagaagaatccccatccacaacgaggacatcacctacgacgagctggtgctgatgatgcagagagtgttcagaggcaagctgctgagcaacgacgaggtgaccatcaagtacaaggacgaggacggcgacctgatcaccatcttcgacagcagcgacctgagcttcgccatccagtgcagcagaatcctgaagctgaccctgttcgtgaacggccagcccagacccctggagagcagccaggtgaagtacctgagaagagagctgatcgagctgagaaacaaggtgaacagactgctggacagcctggagccccccggcgagcccggccccagcaccaacatccccgagaacgacaccgtggacggcagagaggagaagagcgccagcgacagcagcggcaagcagagcacccaggtgatggccgccagcatgagcgccttcgaccccctgaagaaccaggacgagatcaacaagaacgtgatgagcgccttcggcctgaccgacgaccaggtgagcggcccccccagcgcccccgccgaggacagaagcggcacccccgacagcatcgccagcagcagcagcgccgcccacccccccggcgtgcagccccagcagcccccctacaccggcgcccagacccaggccggccagatcgagggccagatgtaccagcagtaccagcagcaggccggctacggcgcccagcagccccaggcccccccccagcagccccagcagtacggcatccagtacagcgccagctacagccagcagaccggcccccagcagccccagcagttccagggctacggccagcagcccaccagccaggcccccgcccccgccttcagcggccagccccagcagctgcccgcccagcccccccagcagtaccaggccagcaactaccccgcccagacctacaccgcccagaccagccagcccaccaactacaccgtggcccccgccagccagcccggcatggcccccagccagcccggcgcctaccagcccagacccggcttcaccagcctgcccggcagcaccatgacccccccccccagcggccccaacccctacgccagaaacagaccccccttcggccagggctacacccagcccggccccggctacagatag

SEQ ID NO: 103631 - DNA, 1101 bp, synthetic construct
  misc_feature 1..1101: note = Description of Artificial Sequence: Synthetic coding sequence
  source 1..1101: mol_type = other DNA
atgaacggccagctggacctgagcggcaagctgatcatcaaggcccagctgggcgaggacatcagaagaatccccatccacaacgaggacatcacctacgacgagctggtgctgatgatgcagagagtgttcagaggcaagctgctgagcaacgacgaggtgaccatcaagtacaaggacgaggacggcgacctgatcaccatcttcgacagcagcgacctgagcttcgccatccagtgcagcagaatcctgaagctgaccctgttcgtgaacggccagcccagacccctggagagcagccaggtgaagtacctgagaagagagctgatcgagctgagaaacaaggtgaacagactgctggacagcctggagccccccggcgagcccggccccagcaccaacatccccgagaacgacaccgtggacggcagagaggagaagagcgccagcgacagcagcggcaagcagagcacccaggtgatggccgccagcatgagcgccttcgaccccctgaagaaccaggacgagatcaacaagaacgtgatgagcgccttcggcctgaccgacgaccaggtgagcggcccccccagcgcccccgccgaggacagaagcggcacccccgacagcatcgccagcagcagcagcgccgcccacccccccggcgtgcagccccagcagcccccctacaccggcgcccagacccaggccggccagatgtaccagcagtacagcaacagacccgccatggtgcacagcagcagaagactgcacctgagcagcctgaacagcatggtgttcagcatccagcaggccatcgtgagcagactggacctgaacaacctgagcagcagcagagacatggccagcaaccagctgcccagacaccagctgctgcccttcctggtgagcctgaacaactgcctgctgagcagacacagcagcaccagaagagccatcatcctgcacaagctgaccctgcccaagctgctgagcctgctgatcatcctgtggctgctgcccctgaacctggagtggctgcaggccaacctgggccccatcaaccaggaccaggtgctgctgcacttcctggaggtgccctag

SEQ ID NO: 103632 - DNA, 474 bp, synthetic construct
  misc_feature 1..474: note = Description of Artificial Sequence: Synthetic coding sequence
  source 1..474: mol_type = other DNA
atgaacggccagctggacctgagcggcaagctgatcatcaaggcccagctgggcgaggacatcagaagaatccccatccacaacgaggacatcacctacgacgagctggtgctgatgatgcagagagtgttcagaggcaagctgctgagcaacgacgaggtgaccatcaagtacaaggacgaggacggcgacctgatcaccatcttcgacagcagcgacctgagcttcgccatccagtgcagcagaatcctgaagctgaccctgttcgtgaacggccagcccagacccctggagagcagccaggtgaagtacctgagaagagagctgatcgagctgagaaacaaggtgaacagactgctggacagcctggagccccccggcgagcccggccccagcaccaacatccccgagaacgacaccgtggacggcagagaggagaagagcgccagcgacagcagcggcaagcagagctag

SEQ ID NO: 103633 - DNA, 387 bp, synthetic construct
  misc_feature 1..387: note = Description of Artificial Sequence: Synthetic coding sequence
  source 1..387: mol_type = other DNA
atgaacggccagctggacctgagcggcaagctgatcatcaaggcccagctgggcgaggacatcagaagaatccccatccacaacgaggacatcacctacgacgagctggtgctgatgatgcagagagtgttcagaggcaagctgctgagcaacgacgaggtgaccatcaagtacaaggacgaggacggcgacctgatcaccatcttcgacagcagcgacctgagcttcgccatccagtgcagcagaatcctgaagctgaccctgttcgtgaacggccagcccagacccctggagagcagccaggtgaagtacctgagaagagagctgatcgagctgagaaacaaggtgaacagactgctggacagcctggagccccccggcgagtag

SEQ ID NO: 103634 - DNA, 546 bp, synthetic construct
  misc_feature 1..546: note = Description of Artificial Sequence: Synthetic coding sequence
  source 1..546: mol_type = other DNA
atgaacggccagctggacctgagcggcaagctgatcatcaaggcccagctgggcgaggacatcagaagaatccccatccacaacgaggacatcacctacgacgagctggtgctgatgatgcagagagtgttcagaggcaagctgctgagcaacgacgaggtgaccatcaagtacaaggacgaggacggcgacctgatcaccatcttcgacagcagcgacctgagcttcgccatccagtgcagcagaatcctgaagctgaccctgttcgtgaacggccagcccagacccctggagagcagccaggtgaagtacctgagaagagagctgatcgagctgagaaacaaggtgaacagactgctggacagcctggagccccccggcgagcccggccccagcaccaacatccccgagaacgacaccgtggacggcagagaggagaagagcgccagcgacagcagcggcaagcagagcacccaggtgatggccgccagcatgagcgccttcgaccccctgaagaaccaggacgagatcaacaagaacgtgtag

SEQ ID NO: 103635 - DNA, 1203 bp, synthetic construct; identical to SEQ ID NO: 103630
  misc_feature 1..1203: note = Description of Artificial Sequence: Synthetic coding sequence
  source 1..1203: mol_type = other DNA

SEQ ID NO: 103636 - DNA, 1191 bp, synthetic construct
  misc_feature 1..1191: note = Description of Artificial Sequence: Synthetic coding sequence
  source 1..1191: mol_type = other DNA
atgaacggccagctggacctgagcggcaagctgatcatcaaggcccagctgggcgaggacatcagaagaatccccatccacaacgaggacatcacctacgacgagctggtgctgatgatgcagagagtgttcagaggcaagctgctgagcaacgacgaggtgaccatcaagtacaaggacgaggacggcgacctgatcaccatcttcgacagcagcgacctgagcttcgccatccagtgcagcagaatcctgaagctgaccctgttcgtgaacggccagcccagacccctggagagcagccaggtgaagtacctgagaagagagctgatcgagctgagaaacaaggtgaacagactgctggacagcctggagccccccggcgagcccggccccagcaccaacatccccgagaacgacaccgtggacggcagagaggagaagagcgccagcgacagcagcggcaagcagagcacccaggtgatggccgccagcatgagcgccttcgaccccctgaagaaccaggacgagatcaacaagaacgtgatgagcgccttcggcctgaccgacgaccaggtgagcggcccccccagcgcccccgccgaggacagaagcggcacccccgacagcatcgccagcagcagcagcgccgcccacccccccggcgtgcagccccagcagcccccctacaccggcgcccagacccaggccggccagatgtaccagcagtaccagcagcaggccggctacggcgcccagcagccccaggcccccccccagcagccccagcagtacggcatccagtacagcgccagctacagccagcagaccggcccccagcagccccagcagttccagggctacggccagcagcccaccagccaggcccccgcccccgccttcagcggccagccccagcagctgcccgcccagcccccccagcagtaccaggccagcaactaccccgcccagacctacaccgcccagaccagccagcccaccaactacaccgtggcccccgccagccagcccggcatggcccccagccagcccggcgcctaccagcccagacccggcttcaccagcctgcccggcagcaccatgacccccccccccagcggccccaacccctacgccagaaacagaccccccttcggccagggctacacccagcccggccccggctacagatag

SEQ ID NO: 103637 - DNA, 729 bp, synthetic construct
  misc_feature 1..729: note = Description of Artificial Sequence: Synthetic coding sequence
  source 1..729: mol_type = other DNA
atgggcgaggccagcccccccgcccccgccagaagacacctgctggtgctgctgctgctgctgagcaccctggtgatccccagcgccgccgcccccatccacgacgccgacgcccaggagagcagcctgggcctgaccggcctgcagagcctgctgcagggcttcagcagactgttcctgaagggcaacctgctgagaggcatcgacagcctgttcagcgcccccatggacttcagaggcctgcccggcaactaccacaaggaggagaaccaggagcaccagctgggcaacaacaccctgagcagccacctgcagatcgacaagatgaccgacaacaagaccggcgaggtgctgatcagcgagaacgtggtggccagcatccagcccgccgagggcagcttcgagggcgacctgaaggtgcccagaatggaggagaaggaggccctggtgcccatccagaaggccaccgacagcttccacaccgagctgcaccccagagtggccttctggatcatcaagctgcccagaagaagaagccaccaggacgccctggagggcggccactggctgagcgagaagagacacagactgcaggccatcagagacggcctgagaaagggcacccacaaggacgtgctggaggagggcaccgagagcagcagccacagcagactgagccccagaaagacccacctgctgtacatcctgagacccagcagacagctgtag

SEQ ID NO: 103638 - DNA, 1980 bp, synthetic construct
  misc_feature 1..1980: note = Description of Artificial Sequence: Synthetic coding sequence
  source 1..1980: mol_type = other DNA
atgcagggcagcagcctgtggctgagcctgaccttcagaagcgccagagtgctgagcagagccagattcttcgagtggcagagccccggcctgcccaacaccgccgccatggagaacggcaccggcccctacggcgaggagagacccagagaggtgcaggagaccaccgtgaccgagggcgccgccaagatcgccttccccagcgccaacgaggtgttctacaaccccgtgcaggagttcaacagagacctgacctgcgccgtgatcaccgagttcgccagaatccagctgggcgccaagggcatccagatcaaggtgcccggcgagaaggacacccagaaggtggtggtggacctgagcgagcaggaggaggagaaggtggagctgaaggagagcgagaacctggccagcggcgaccagcccagaaccgccgccgtgggcgagatctgcgaggagggcctgcacgtgctggagggcctggccgccagcggcctgagaagcatcagattcgccctggaggtgcccggcctgagaagcgtggtggccaacgacgccagcaccagagccgtggacctgatcagaagaaacgtgcagctgaacgacgtggcccacctggtgcagcccagccaggccgacgccagaatgctgatgtaccagcaccagagagtgagcgagagattcgacgtgatcgacctggacccctacggcagccccgccaccttcctggacgccgccgtgcaggccgtgagcgagggcggcctgctgtgcgtgacctgcaccgacatggccgtgctggccggcaacagcggcgagacctgctacagcaagtacggcgccatggccctgaagagcagagcctgccacgagatggccctgagaatcgtgctgcacagcctggacctgagagccaactgctaccagagattcgtggtgcccctgctgagcatcagcgccgacttctacgtgagagtgttcgtgagagtgttcaccggccaggccaaggtgaaggccagcgccagcaagcaggccctggtgttccagtgcgtgggctgcggcgccttccacctgcagagactgggcaaggccagcggcgtgcccagcggcagagccaagttcagcgccgcctgcggcccccccgtgacccccgagtgcgagcactgcggccagagacaccagctgggcggccccatgtgggccgagcccatccacgacctggacttcgtgggcagagtgctggaggccgtgagcgccaaccccggcagattccacaccagcgagagaatcagaggcgtgctgagcgtgatcaccgaggagctgcccgacgtgcccctgtactacaccctggaccagctgagcagcaccatccactgcaacacccccagcctgctgcagctgagaagcgccctgctgcacgccgacttcagagtgagcctgagccacgcctgcaagaacgccgtgaagaccgacgcccccgccagcgccctgtgggacatcatgagatgctgggagaaggagtgccccgtgaagagagagagactgagcgagaccagccccgccttcagaatcctgagcgtggagcccagactgcaggccaacttcaccatcagagaggacgccaaccccagcagcagacagagaggcctgaagagattccaggccaaccccgaggccaactggggccccagacccagagccagacccggcggcaaggccgccgacgaggccatggaggagagaagaagactgctgcagaacaagagaaaggagccccccgaggacgtggcccagagagccgccagactgaagaccttcccctgcaagagattcaaggagggcacctgccagagaggcgaccagtgctgctacagccacagcccccccacccccagagtgagcgccgacgccgcccccgactgccccgagaccagcaaccagaccccccccggccccggcgccgccgccggccccggcatcgactag

SEQ ID NO: 103639 - DNA, 1980 bp, synthetic construct; identical to SEQ ID NO: 103638
  misc_feature 1..1980: note = Description of Artificial Sequence: Synthetic coding sequence
  source 1..1980: mol_type = other DNA

SEQ ID NO: 103640 - DNA, 1878 bp, synthetic construct
  misc_feature 1..1878: note = Description of Artificial Sequence: Synthetic coding sequence
  source 1..1878: mol_type = other DNA
atgagcgagaacctggacaacgagggccccaagcccatggagagctgcggccaggagagcagcagcgccctgagctgccccaccgtgagcgtgccccccgccgcccccgccgccctggaggaggtggagaaggagggcgccggcgccgccaccggccccggcccccagcccggcctgtacagctacatcagagacgacctgttcaccagcgagatcttcaagctggagctgcagaacgtgcccagacacgccagcttcagcgacgtgagaagattcctgggcagattcggcctgcagccccacaagaccaagctgttcggccagcccccctgcgccttcgtgaccttcagaagcgccgccgagagagacaaggccctgagagtgctgcacggcgccctgtggaagggcagacccctgagcgtgagactggccagacccaaggccgaccccatggccagaagaagaagacaggagggcgagagcgagccccccgtgaccagagtggccgacgtggtgacccccctgtggaccgtgccctacgccgagcagctggagagaaagcagctggagtgcgagcaggtgctgcagaagctggccaaggagatcggcagcaccaacagagccctgctgccctggctgctggagcagagacacaagcacaacaaggcctgctgccccctggagggcgtgagacccagcccccagcagaccgagtacagaaacaagtgcgagttcctggtgggcgtgggcgtggacggcgaggacaacaccgtgggctgcagactgggcaagtacaagggcggcacctgcgccgtggccgcccccttcgacaccgtgcacatccccgaggccaccaagcaggtggtgaaggccttccaggagttcatcagaagcaccccctacagcgcctacgaccccgagacctacaccggccactggaagcagctgaccgtgagaaccagcagaagacaccaggccatggccatcgcctacttccacccccagaagctgagccccgaggagctggccgagctgaagaccagcctggcccagcacttcaccgccggccccggcagagccagcggcgtgacctgcctgtacttcgtggaggagggccagagaaagacccccagccaggagggcctgcccctggagcacgtggccggcgacagatgcatccacgaggacctgctgggcctgaccttcagaatcagcccccacgccttcttccaggtgaacacccccgccgccgaggtgctgtacaccgtgatccaggactgggcccagctggacgccggcagcatggtgctggacgtgtgctgcggcaccggcaccatcggcctggccctggccagaaaggtgaagagagtgatcggcgtggagctgtgccccgaggccgtggaggacgccagagtgaacgcccaggacaacgagctgagcaacgtggagttccactgcggcagagccgaggacctggtgcccaccctggtgagcagactggccagccagcacctggtggccatcctggacccccccagagccggcctgcacagcaaggtgatcctggccatcagaagagccaagaacctgagaagactgctgtacgtgagctgcaaccccagagccgccatgggcaacttcgtggacctgtgcagagcccccagcaacagagtgaagggcatccccttcagacccgtgaaggccgtggccgtggacctgttcccccagaccccccactgcgagatgctgatcctgttcgagagagtggagcaccccaacggcaccggcgtgctgggcccccacagcccccccgcccagcccacccccggcccccccgacaacaccctgcaggagaccggcaccttccccagcagctag

SEQ ID NO: 103641 - DNA, 1878 bp, synthetic construct; identical to SEQ ID NO: 103640
  misc_feature 1..1878: note = Description of Artificial Sequence: Synthetic coding sequence
  source 1..1878: mol_type = other DNA

SEQ ID NO: 103642 - DNA, 1689 bp, synthetic construct
  misc_feature 1..1689: note = Description of Artificial Sequence: Synthetic coding sequence
  source 1..1689: mol_type = other DNA
atgagcgagaacctggacaacgagggccccaagcccatggagagctgcggccaggagagcagcagcgccctgagctgccccaccgtgagcgtgccccccgccgcccccgccgccctggaggaggtggagaaggagggcgccggcgccgccaccggccccggcccccagcccggcctgtacagctacatcagagacgacctgttcaccagcgagatcttcaagctggagctgcagaacgtgcccagacacgccagcttcagcgacgtgagaagattcctgggcagattcggcctgcagccccacaagaccaagctgttcggccagcccccctgcgccttcgtgaccttcagaagcgccgccgagagagacaaggccctgagagtgctgcacggcgccctgtggaagggcagacccctgagcgtgagactggccagacccaaggccgaccccatggccagaagaagaagacaggagggcgagagcgagccccccgtgaccagagtggccgacgtggtgacccccctgtggaccgtgccctacgccgagcagctggagagaaagcagctggagtgcgagcaggtgctgcagaagctggccaaggagatcggcagcaccaacagagccctgctgccctggctgctggagcagagacacaagcacaacaaggcctgctgccccctggagggcgtgagacccagcccccagcagaccgagtacagaaacaagtgcgagttcctggtgggcgtgggcgtggacggcgaggacaacaccgtgggctgcagactgggcaagtacaagggcggcacctgcgccgtggccgcccccttcgacaccgtgcacatccccgaggccaccaagcaggtggtgaaggccttccaggagttcatcagaagcaccccctacagcgcctacgaccccgagacctacaccggccactggaagcagctgaccgtgagaaccagcagaagacaccaggccatggccatcgcctacttccacccccagaagctgagccccgaggagctggccgagctgaagaccagcctggcccagcacttcaccgccggccccggcagagccagcggcgtgacctgcctgtacttcgtggaggagggccagagaaagacccccagccaggagggcctgcccctggagcacgtggccggcgacagatgcatccacgaggacctgctgggcctgaccttcagaatcagcccccacgccttcttccaggtgaacacccccgccgccgaggtgctgtacaccgtgatccaggactgggcccagctggacgccggcagcatggtgctggacgtgtgctgcggcaccggcaccatcggcctggccctggccagaaaggtgaagagagtgatcggcgtggagctgtgccccgaggccgtggaggacgccagagtgaacgcccaggacaacgagctgagcaacgtggagttccactgcggcagagccgaggacctggtgcccaccctggtgagcagactggccagccagcacctggtggccatcctggacccccccagagccggcctgcacagcaaggtgatcctggccatcagaagagccaagaacctgagaagactgctgtacgtgagctgcaaccccagagccgccatgggcaacttcgtggacgcccccctgttccccccccagcccctgcagagccccatctag

SEQ ID NO: 103643 - DNA, 1530 bp, synthetic construct
  misc_feature 1..1530: note = Description of Artificial Sequence: Synthetic coding sequence
  source 1..1530: mol_type = other DNA
atggtgctgtggatcctgtggagacccttcggcttcagcggcagattcctgaagctggagagccacagcatcaccgagagcaagagcctgatccccgtggcctggaccagcctgacccagatgctgctggaggcccccggcatcttcctgctgggccagagaaagagattcagcaccatgcccgagaccgagacccacgagagagagaccgagctgttcagcccccccagcgacgtgagaggcatgaccaagctggacagaaccgccttcaagaagaccgtgaacatccccgtgctgaaggtgagaaaggagatcgtgagcaagctgatgagaagcctgaagagagccgccctgcagagacccggcatcagaagagtgatcgaggaccccgaggacaaggagagcagactgatcatgctggacccctacaagatcttcacccacgacagcttcgagaaggccgagctgagcgtgctggagcagctgaacgtgagcccccagatcagcaagtacaacctggagctgacctacgagcacttcaagagcgaggagatcctgagagccgtgctgcccgagggccaggacgtgaccagcggcttcagcagaatcggccacatcgcccacctgaacctgagagaccaccagctgagcttcaagcacctgatcggccaggtgatgatcgacaagaaccccggcatcaccagcgccgtgaacaagatcaacaacatcgacaacatgtacagaaacttccagatggaggtgctgagcggcgagcagaacatgatgaccaaggtgagagagaacaactacacctacgagttcgacttcagcaaggtgtactggaaccccagactgagcaccgagcacagcagaatcaccgagctgctgaagcccggcgacgtgctgttcgacgtgttcgccggcgtgggccccttcgccatccccgtggccaagaagaactgcaccgtgttcgccaacgacctgaaccccgagagccacaagtggctgctgtacaactgcaagctgaacaaggtggaccagaaggtgaaggtgttcaacctggacggcaaggacttcctgcagggccccgtgaaggaggagctgatgcagctgctgggcctgagcaaggagagaaagcccagcgtgcacgtggtgatgaacctgcccgccaaggccatcgagttcctgagcgccttcaagtggctgctggacggccagccctgcagcagcgagttcctgcccatcgtgcactgctacagcttcagcaaggacgccaaccccgccgaggacgtgagacagagagccggcgccgtgctgggcatcagcctggaggcctgcagcagcgtgcacctggtgagaaacgtggcccccaacaaggagatgctgtgcatcaccttccagatccccgccagcgtgctgtacaagaaccagaccagaaaccccgagaaccacgaggacccccccctgaagagacagagaaccgccgaggccttcagcgacgagaagacccagatcgtgagcaacacctag

SEQ ID NO: 103644 - DNA, 1266 bp, synthetic construct
  misc_feature 1..1266: note = Description of Artificial Sequence: Synthetic coding sequence
  source 1..1266: mol_type = other DNA
atgcaggccctgagacacgtggtgtgcgccctgagcggcggcgtggacagcgccgtggccgccctgctgctgagaagaagaggctaccaggtgaccggcgtgttcatgaagaactgggacagcctggacgagcacggcgtgtgcaccgccgacaaggactgcgaggacgcctacagagtgtgccagatcctggacatccccttccaccaggtgagctacgtgaaggagtactggaacgacgtgttcagcgacttcctgaacgagtacgagaagggcagaacccccaaccccgacatcgtgtgcaacaagcacatcaagttcagctgcttcttccactacgccgtggacaacctgggcgccgacgccatcgccaccggccactacgccagaaccagcctggaggacgaggaggtgttcgagcagaagcacgtgaagaagcccgagggcctgttcagaaacagattcgaggtgagaaacgccgtgaagctgctgcaggccgccgacagcttcaaggaccagaccttcttcctgagccaggtgagccaggacgccctgagaagaaccatcttccccctgggcggcctgaccaaggagttcgtgaagaagatcgccgccgagaacagactgcaccacgtgctgcagaagaaggagagcatgggcatgtgcttcatcggcaagagaaacttcgagcacttcctgctgcagtacctgcagcccagacccggccacttcatcagcatcgaggacaacaaggtgctgggcacccacaagggctggttcctgtacaccctgggccagagagccaacatcggcggcctgagagagccctggtacgtggtggagaaggacagcgtgaagggcgacgtgttcgtggcccccagaaccgaccaccccgccctgtacagagacctgctgagaaccagcagagtgcactggatcgccgaggagccccccgccgccctggtgagagacaagatgatggagtgccacttcagattcagacaccagatggccctggtgccctgcgtgctgaccctgaaccaggacggcaccgtgtgggtgaccgccgtgcaggccgtgagagccctggccaccggccagttcgccgtgttctacaagggcgacgagtgcctgggcagcggcaagatcctgagactgggccccagcgcctacaccctgcagaagggccagagaagagccggcatggccaccgagagccccagcgacagccccgaggacggccccggcctgagccccctgctgtag

SEQ ID NO: 103645 - DNA, 300 bp, synthetic construct
  misc_feature 1..300: note = Description of Artificial Sequence: Synthetic coding sequence
  source 1..300: mol_type = other DNA
atgcaggccctgagacacgtggtgtgcgccctgagcggcggcgtggacagcgccgtggccgccctgctgctgagaagaagaggctaccaggtgaccggcgtgttcatgaagaactgggacagcctggacgagcacggcgtgtgcaccgccgacaaggactgcgaggacgcctacagagtgtgccagatcctggacatccccttccaccaggtgagctacgtgaaggagtactggaacgacgtgttcagaggcagatgccactgccacagaagcctgtgcaagaacttccccggcagatag

SEQ ID NO: 103646 - DNA, 396 bp, synthetic construct
  misc_feature 1..396: note = Description of Artificial Sequence: Synthetic coding sequence
  source 1..396: mol_type = other DNA
atgaagaactgggacagcctggacgagcacggcgtgtgcaccgccgacaaggactgcgaggacgcctacagagtgtgccagatcctggacatccccttccaccaggtgagctacgtgaaggagtactggaacgacgtgttcagcgacttcctgaacgagtacgagaagggcagaacccccaaccccgacatcgtgtgcaacaagcacatcaagttcagctgcttcttccactacgccgtggacaacctgggcgccgacgccatcgccaccggccactacgccagaaccagcctggaggacgaggaggtgttcgagcagaagcacgtgaagaagcccgagggcctgttcagaaacagattcgaggtgagaaacgccagattccccagaatgccctag

SEQ ID NO: 103647 - DNA, 300 bp, synthetic construct; identical to SEQ ID NO: 103645
  misc_feature 1..300: note = Description of Artificial Sequence: Synthetic coding sequence
  source 1..300: mol_type = other DNA

SEQ ID NO: 103648 - DNA, 300 bp, synthetic construct; identical to SEQ ID NO: 103645
  misc_feature 1..300: note = Description of Artificial Sequence: Synthetic coding sequence
  source 1..300: mol_type = other DNA

SEQ ID NO: 103649 - DNA, 300 bp, synthetic construct; identical to SEQ ID NO: 103645
  misc_feature 1..300: note = Description of Artificial Sequence: Synthetic coding sequence
  source 1..300: mol_type = other DNA

SEQ ID NO: 103650 - DNA, 501 bp, synthetic construct
  misc_feature 1..501: note = Description of Artificial Sequence: Synthetic coding sequence
  source 1..501: mol_type = other DNA
atgcaggccctgagacacgtggtgtgcgccctgagcggcggcgtggacagcgccgtggccgccctgctgctgagaagaagaggctaccaggtgaccggcgtgttcatgaagaactgggacagcctggacgagcacggcgtgtgcaccgccgacaaggactgcgaggacgcctacagagtgtgccagatcctggacatccccttccaccaggtgagctacgtgaaggagtactggaacgacgtgttcagcgacttcctgaacgagtacgagaagggcagaacccccaaccccgacatcgtgtgcaacaagcacatcaagttcagctgcttcttccactacgccgtggacaacctgggcgccgacgccatcgccaccggccactacgccagaaccagcctggaggacgaggaggtgttcgagcagaagcacgtgaagaagcccgagggcctgttcagaaacagattcgaggtgagaaacgccagattccccagaatgccctag

SEQ ID NO: 103651 - DNA, 1038 bp, synthetic construct
  misc_feature 1..1038: note = Description of Artificial Sequence: Synthetic coding sequence
  source 1..1038: mol_type = other DNA
atggagcccctgagagtgctggagctgtacagcggcgtgggcggcatgcaccacgccctgagagagagctgcatccccgcccaggtggtggccgccatcgacgtgaacaccgtggccaacgaggtgtacaagtacaacttcccccacacccagctgctggccaagaccatcgagggcatcaccctggaggagttcgacagactgagcttcgacatgatcctgatgagccccccctgccagcccttcaccagagacctgctgatccagaccatcgagaactgcggcttccagtaccaggagttcctgctgagccccaccagcctgggcatccccaacagcagactgagatacttcctgatcgccaagctgcagagcgagcccctgcccttccaggcccccggccaggtgctgatggagttccccaagatcgagagcgtgcacccccagaagtacgccatggacgtggagaacaagatccaggagaagaacgtggagcccaacatcagcttcgacggcagcatccagtgcagcggcaaggacgccatcctgttcaagctggagaccgccgaggagatccacagaaagaaccagcaggacagcgacctgagcgtgaagatgctgaaggacttcctggaggacgacaccgacgtgaaccagtacctgctgccccccaagagcctgctgagatacgccctgctgctggacatcgtgcagcccacctgcagaagaagcgtgtgcttcaccaagggctacggcagctacatcgagggcaccggcagcgtgctgcagaccgccgaggacgtgcaggtggagaacatctacaagagcctgaccaacctgagccaggaggagcagatcaccaagctgctgatcctgaagctgagatacttcacccccaaggagatcgccaacctgctgggcttcccccccgagttcggcttccccgagaagatcaccgtgaagcagagatacagactgctgggcaacagcctgaacgtgcacgtggtggccaagctgatcaagatcctgtacgagtag

SEQ ID NO: 103652 - DNA, 216 bp, synthetic construct
  misc_feature 1..216: note = Description of Artificial Sequence: Synthetic coding sequence
  source 1..216: mol_type = other DNA
atggagcccctgagagtgctggagctgtacagcggcgtgggcggcatgcaccacgccctgagagagagctgcatccccgcccaggtggtggccgccatcgacgtgaacaccgtggccaacgaggtgtacaagtacaacttcccccacacccagctgctggccaagaccatcgagatcaccaagatcaccaaggtgtacagcttcggcaagtgctag

SEQ ID NO: 103653 - DNA, 354 bp, synthetic construct
  misc_feature 1..354: note = Description of Artificial Sequence: Synthetic coding sequence
  source 1..354: mol_type = other DNA
atggagcccctgagagtgctggagctgtacagcggcgtgggcggcatgcaccacgccctgagagagagctgcatccccgcccaggtggtggccgccatcgacgtgaacaccgtggccaacgaggtgtacaagtacaacttcccccacacccagctgctggccaagaccatcgagagacccctggacaccaacaacagaaagctgtggctgagcgtgcccagagtgagcatcatcagcaacctgagctggcacagcaagttcaaggccaccatcttcagctactgcaaggccagcgtgagagccatcaccctgagcagcccctggagcggcaccgacggcgtgccccagaactag

SEQ ID NO: 103654 - DNA, 1176 bp, synthetic construct
  misc_feature 1..1176: note = Description of Artificial Sequence: Synthetic coding sequence
  source 1..1176: mol_type = other DNA
atggagcccctgagagtgctggagctgtacagcggcgtgggcggcatgcaccacgccctgagagagagctgcatccccgcccaggtggtggccgccatcgacgtgaacaccgtggccaacgaggtgtacaagtacaacttcccccacacccagctgctggccaagaccatcgagggcatcaccctggaggagttcgacagactgagcttcgacatgatcctgatgagccccccctgccagcccttcaccagaatcggcagacagggcgacatgaccgacagcagaaccaacagcttcctgcacatcctggacatcctgcccagactgcagaagctgcccaagtacatcctgctggagaacgtgaagggcttcgaggtgagcagcaccagagacctgctgatccagaccatcgagaactgcggcttccagtaccaggagttcctgctgagccccaccagcctgggcatccccaacagcagactgagatacttcctgatcgccaagctgcagagcgagcccctgcccttccaggcccccggccaggtgctgatggagttccccaagatcgagagcgtgcacccccagaagtacgccatggacgtggagaacaagatccaggagaagaacgtggagcccaacatcagcttcgacggcagcatccagtgcagcggcaaggacgccatcctgttcaagctggagaccgccgaggagatccacagaaagaaccagcaggacagcgacctgagcgtgaagatgctgaaggacttcctggaggacgacaccgacgtgaaccagtacctgctgccccccaagagcctgctgagatacgccctgctgctggacatcgtgcagcccacctgcagaagaagcgtgtgcttcaccaagggctacggcagctacatcgagggcaccggcagcgtgctgcagaccgccgaggacgtgcaggtggagaacatctacaagagcctgaccaacctgagccaggaggagcagatcaccaagctgctgatcctgaagctgagatacttcacccccaaggagatcgccaacctgctgggcttcccccccgagttcggcttccccgagaagatcaccgtgaagcagagatacagactgctgggcaacagcctgaacgtgcacgtggtggccaagctgatcaagatcctgtacgagtag

SEQ ID NO: 103655 - DNA, 1104 bp, synthetic construct
  misc_feature 1..1104: note = Description of Artificial Sequence: Synthetic coding sequence
  source 1..1104: mol_type = other DNA
atggagcccctgagagtgctggagctgtacagcggcgtgggcggcatgcaccacgccctgagagagagctgcatccccgcccaggtggtggccgccatcgacgtgaacaccgtggccaacgaggtgtacaagtacaacttcccccacacccagctgctggccaagaccatcgagggcatcaccctggaggagttcgacagactgagcttcgacatgatcctgatgagccccccctgccagcccttcaccagactgcagaagctgcccaagtacatcctgctggagaacgtgaagggcttcgaggtgagcagcaccagagacctgctgatccagaccatcgagaactgcggcttccagtaccaggagttcctgctgagccccaccagcctgggcatccccaacagcagactgagatacttcctgatcgccaagctgcagagcgagcccctgcccttccaggcccccggccaggtgctgatggagttccccaagatcgagagcgtgcacccccagaagtacgccatggacgtggagaacaagatccaggagaagaacgtggagcccaacatcagcttcgacggcagcatccagtgcagcggcaaggacgccatcctgttcaagctggagaccgccgaggagatccacagaaagaaccagcaggacagcgacctgagcgtgaagatgctgaaggacttcctggaggacgacaccgacgtgaaccagtacctgctgccccccaagagcctgctgagatacgccctgctgctggacatcgtgcagcccacctgcagaagaagcgtgtgcttcaccaagggctacggcagctacatcgagggcaccggcagcgtgctgcagaccgccgaggacgtgcaggtggagaacatctacaagagcctgaccaacctgagccaggaggagcagatcaccaagctgctgatcctgaagctgagatacttcacccccaaggagatcgccaacctgctgggcttcccccccgagttcggcttccccgagaagatcaccgtgaagcagagatacagactgctgggcaacagcctgaacgtgcacgtggtggccaagctgatcaagatcctgtacgagtag

SEQ ID NO: 103656 - DNA, 933 bp, synthetic construct
  misc_feature 1..933: note = Description of Artificial Sequence: Synthetic coding sequence
  source 1..933: mol_type = other DNA
atgagcaccctgagcctgatgaagtacaccagcatcatcttcctgacccacagctacctgcccagaagactgaagatcggcagacagggcgacatgaccgacagcagaaccaacagcttcctgcacatcctggacatcctgcccagagacctgctgatccagaccatcgagaactgcggcttccagtaccaggagttcctgctgagccccaccagcctgggcatccccaacagcagactgagatacttcctgatcgccaagctgcagagcgagcccctgcccttccaggcccccggccaggtgctgatggagttccccaagatcgagagcgtgcacccccagaagtacgccatggacgtggagaacaagatccaggagaagaacgtggagcccaacatcagcttcgacggcagcatccagtgcagcggcaaggacgccatcctgttcaagctggagaccgccgaggagatccacagaaagaaccagcaggacagcgacctgagcgtgaagatgctgaaggacttcctggaggacgacaccgacgtgaaccagtacctgctgccccccaagagcctgctgagatacgccctgctgctggacatcgtgcagcccacctgcagaagaagcgtgtgcttcaccaagggctacggcagctacatcgagggcaccggcagcgtgctgcagaccgccgaggacgtgcaggtggagaacatctacaagagcctgaccaacctgagccaggaggagcagatcaccaagctgctgatcctgaagctgagatacttcacccccaaggagatcgccaacctgctgggcttcccccccgagttcggcttccccgagaagatcaccgtgaagcagagatacagactgctgggcaacagcctgaacgtgcacgtggtggccaagctgatcaagatcctgtacgagtag

SEQ ID NO: 103657 - DNA, 1305 bp, synthetic construct
  misc_feature 1..1305: note = Description of Artificial Sequence: Synthetic coding sequence
  source 1..1305: mol_type = other DNA
atgctgagatgcctgtaccactggcacagacccgtgctgaacagaagatggagcagactgtgcctgcccaagcagtacctgttcaccatgaagctgcagagccccgagttccagagcctgttcaccgagggcctgaagagcctgaccgagctgttcgtgaaggagaaccacgagctgagaatcgccggcggcgccgtgagagacctgctgaacggcgtgaagccccaggacatcgacttcgccaccaccgccacccccacccagatgaaggagatgttccagagcgccggcatcagaatgatcaacaacagaggcgagaagcacggcaccatcaccgccagactgcacgaggagaacttcgagatcaccaccctgagaatcgacgtgaccaccgacggcagacacgccgaggtggagttcaccaccgactggcagaaggacgccgagagaagagacctgaccatcaacagcatgttcctgggcttcgacggcaccctgttcgactacttcaacggctacgaggacctgaagaacaagaaggtgagattcgtgggccacgccaagcagagaatccaggaggactacctgagaatcctgagatacttcagattctacggcagaatcgtggacaagcccggcgaccacgaccccgagaccctggaggccatcgccgagaacgccaagggcctggccggcatcagcggcgagagaatctgggtggagctgaagaagatcctggtgggcaaccacgtgaaccacctgatccacctgatctacgacctggacgtggccccctacatcggcctgcccgccaacgccagcctggaggagttcgacaaggtgagcaagaacgtggacggcttcagccccaagcccgtgaccctgctggccagcctgttcaaggtgcaggacgacgtgaccaagctggacctgagactgaagatcgccaaggaggagaagaacctgggcctgttcatcgtgaagaacagaaaggacctgatcaaggccaccgacagcagcgaccccctgaagccctaccaggacttcatcatcgacagcagagagcccgacgccaccaccagagtgtgcgagctgctgaagtaccagggcgagcactgcctgctgaaggagatgcagcagtggagcatcccccccttccccgtgagcggccacgacatcagaaaggtgggcatcagcagcggcaaggagatcggcgccctgctgcagcagctgagagagcagtggaagaagagcggctaccagatggagaaggacgagctgctgagctacatcaagaagacctag

SEQ ID NO: 103658 - DNA, 1245 bp, synthetic construct
  misc_feature 1..1245: note = Description of Artificial Sequence: Synthetic coding sequence
  source 1..1245: mol_type = other DNA
atgctgagatgcctgtaccactggcacagacccgtgctgaacagaagatggagcagactgtgcctgcccaagcagtacctgttcaccatgaagctgcagagccccgagttccagagcctgttcaccgagggcctgaagagcctgaccgagctgttcgtgaaggagaaccacgagctgagaatcgccggcggcgccgtgagagacctgctgaacggcgtgaagccccaggacatcgacttcgccaccaccgccacccccacccagatgaaggagatgttccagagcgccggcatcagaatgatcaacaacagaggcgagaagcacggcaccatcaccgccagactgcacgaggagaacttcgagatcaccaccctgagaatcgacgtgaccaccgacggcagacacgccgaggtggagttcaccaccgactggcagaaggacgccgagagaagagacctgaccatcaacagcatgttcctgggcttcgacggcaccctgttcgactacttcaacggctacgaggacctgaagaacaagaaggtgagattcgtgggccacgccaagcagagaatccaggaggactacctgagaatcctgagatacttcagattctacggcagaatcgtggacaagcccggcgaccacgaccccgagaccctggaggccatcgccgagaacgccaagggcctggccggcatcagcggcgagagaatctgggtggagctgaagaagatcctggtgggcctgcccgccaacgccagcctggaggagttcgacaaggtgagcaagaacgtggacggcttcagccccaagcccgtgaccctgctggccagcctgttcaaggtgcaggacgacgtgaccaagctggacctgagactgaagatcgccaaggaggagaagaacctgggcctgttcatcgtgaagaacagaaaggacctgatcaaggccaccgacagcagcgaccccctgaagccctaccaggacttcatcatcgacagcagagagcccgacgccaccaccagagtgtgcgagctgctgaagtaccagggcgagcactgcctgctgaaggagatgcagcagtggagcatcccccccttccccgtgagcggccacgacatcagaaaggtgggcatcagcagcggcaaggagatcggcgccctgctgcagcagctgagagagcagtggaagaagagcggctaccagatggagaaggacgagctgctgagctacatcaagaagacctag

SEQ ID NO: 103659 - DNA, 174 bp, synthetic construct
  misc_feature 1..174: note = Description of Artificial Sequence: Synthetic coding sequence
  source 1..174: mol_type = other DNA
atgctgagatgcctgtaccactggcacagacccgtgctgaacagaagatggagcagactgtgcctgcccaagcagtacctgttcaccatgaagctgcagagccccgagttccagagcctgttcaccgagggcctgaagagcctgaccggcatcaacgccttccacgagaactag

SEQ ID NO: 103660 - DNA, 174 bp, synthetic construct; identical to SEQ ID NO: 103659
  misc_feature 1..174: note = Description of Artificial Sequence: Synthetic coding sequence
  source 1..174: mol_type = other DNA

SEQ ID NO: 103661 - DNA, 189 bp, synthetic construct
  misc_feature 1..189: note = Description of Artificial Sequence: Synthetic coding sequence
  source 1..189: mol_type = other DNA
atgctgagatgcctgtaccactggcacagacccgtgctgaacagaagatggagcagactgtgcctgcccaagcagtacctgttcaccatgaagctgcagagccccgagttccagagcctgttcaccgagggcctgaagagcctgaccgagctgttcgtgaaggagaaccacgagctgagaatcgcctag

SEQ ID NO: 103662 - DNA, 174 bp, synthetic construct; identical to SEQ ID NO: 103659
  misc_feature 1..174: note = Description of Artificial Sequence: Synthetic coding sequence
  source 1..174: mol_type = other DNA

SEQ ID NO: 103663 - DNA, 1305 bp, synthetic construct; identical to SEQ ID NO: 103657
  misc_feature 1..1305: note = Description of Artificial Sequence: Synthetic coding sequence
  source 1..1305: mol_type = other DNA

SEQ ID NO: 103664 - DNA, 762 bp, synthetic construct
  misc_feature 1..762: note = Description of Artificial Sequence: Synthetic coding sequence
  source 1..762: mol_type = other DNA
atgaacttcagcggcggcggcagacaggaggccgccggcagcagaggcagaagagcccccagacccagagagcaggacagagacgtgcagctgagcaaggccctgagctacgccctgagacacggcgccctgaagctgggcctgcccatgggcgccgacggcttcgtgcccctgggcaccctgctgcagctgccccagttcagaggcttcagcgccgaggacgtgcagagagtggtggacaccaacagaaagcagagattcgccctgcagctgggcgaccccagcaccggcctgctgatcagagccaaccagggccacagcctgcaggtgcccaagctggagctgatgcccctggagaccccccaggccctgccccccatgctggtgcacggcaccttctggaagcactggcccagcatcctgctgaagggcctgagctgccagggcagaacccacatccacctggcccccggcctgcccggcgaccccggcatcatcagcggcatgagaagccactgcgagatcgccgtgttcatcgacggccccctggccctggccgacggcatccccttcttcagaagcgccaacggcgtgatcctgacccccggcaacaccgacggcttcctgctgcccaagtacttcaaggaggccctgcagctgagacccaccagaaagcccctgagcctggccggcgacgaggagaccgagtgccagagcagccccaagcacagcagcagagagagaagaagaatccagcagtag

SEQ ID NO: 103665 - DNA, 768 bp, synthetic construct
  misc_feature 1..768: note = Description of Artificial Sequence: Synthetic coding sequence
  source 1..768: mol_type = other DNA
atgaacttcagcggcggcggcagacaggaggccgccggcagcagaggcagaagagcccccagacccagagagcaggacagagacgtgcagctgagcaaggccctgagctacgccctgagacacggcgccctgaagctgggcctgcccatgggcgccgacggcttcgtgcccctgggcaccctgctgcagctgccccagttcagaggcttcagcgccgaggacgtgcagagagtggtggacaccaacagaaagcagagattcgccctgcagctgggcgaccccagcaccggcctgctgatcagagccaaccagggccacagcctgcaggtgggcgtgcccaagctggagctgatgcccctggagaccccccaggccctgccccccatgctggtgcacggcaccttctggaagcactggcccagcatcctgctgaagggcctgagctgccagggcagaacccacatccacctggcccccggcctgcccggcgaccccggcatcatcagcggcatgagaagccactgcgagatcgccgtgttcatcgacggccccctggccctggccgacggcatccccttcttcagaagcgccaacggcgtgatcctgacccccggcaacaccgacggcttcctgctgcccaagtacttcaaggaggccctgcagctgagacccaccagaaagcccctgagcctggccggcgacgaggagaccgagtgccagagcagccccaagcacagcagcagagagagaagaagaatccagcagtag

SEQ ID NO: 103666 - DNA, 615 bp, synthetic construct
  misc_feature 1..615: note = Description of Artificial Sequence: Synthetic coding sequence
  source 1..615: mol_type = other DNA
atgggcgccgacggcttcgtgcccctgggcaccctgctgcagctgccccagttcagaggcttcagcgccgaggacgtgcagagagtggtggacaccaacagaaagcagagattcgccctgcagctgggcgaccccagcaccggcctgctgatcagagccaaccagggccacagcctgcaggtgcccaagctggagctgatgcccctggagaccccccaggccctgccccccatgctggtgcacggcaccttctggaagcactggcccagcatcctgctgaagggcctgagctgccagggcagaacccacatccacctggcccccggcctgcccggcgaccccggcatcatcagcggcatgagaagccactgcgagatcgccgtgttcatcgacggccccctggccctggccgacggcatccccttcttcagaagcgccaacggcgtgatcctgacccccggcaacaccgacggcttcctgctgcccaagtacttcaaggaggccctgcagctgagacccaccagaaagcccctgagcctggccggcgacgaggagaccgagtgccagagcagccccaagcacagcagcagagagagaagaagaatccagcagtag

SEQ ID NO: 103667 - DNA, 651 bp, synthetic construct
  misc_feature 1..651: note = Description of Artificial Sequence: Synthetic coding sequence
  source 1..651: mol_type = other DNA
atgaacttcagcggcggcggcagacaggaggccgccggcagcagaggcagaagagcccccagacccagagagcaggacagagacgtgcagctgagcaaggccctgagctacgccctgagacacggcgccctgaagctgggcctgcccatgggcgccgacggcttcgtgcccctgggcaccctgctgcagctgccccagttcagaggcttcagcgccgaggacgtgcagagagtggtggacaccaacagaaagcagagattcgccctgcagctgggcgaccccagcaccggcctgctgatcagagccaaccagggccacagcctgcaggtgcccaagctggagctgatgcccctggagaccccccaggccctgccccccatgctggtgcacggcaccttctggaagcactggcccagcatcctgctgaagggcctgagctgccagggcagaacccacatccacctggcccccggcctgcccggcgaccccggcatcatcagcggcatgagaagccactgcgagatcgccgtgttcatcgacggccccctggccctggccggcaagcccctgagcctggccggcgacgaggagaccgagtgccagagcagccccaagcacagcagcagagagagaagaagaatccagcagtag

SEQ ID NO: 103668 - DNA, 504 bp, synthetic construct
  misc_feature 1..504: note = Description of Artificial Sequence: Synthetic coding sequence
  source 1..504: mol_type = other DNA
atgggcgccgacggcttcgtgcccctgggcaccctgctgcagctgccccagttcagaggcttcagcgccgaggacgtgcagagagtggtggacaccaacagaaagcagagattcgccctgcagctgggcgaccccagcaccggcctgctgatcagagccaaccagggccacagcctgcaggtgcccaagctggagctgatgcccctggagaccccccaggccctgccccccatgctggtgcacggcaccttctggaagcactggcccagcatcctgctgaagggcctgagctgccagggcagaacccacatccacctggcccccggcctgcccggcgaccccggcatcatcagcggcatgagaagccactgcgagatcgccgtgttcatcgacggccccctggccctggccggcaagcccctgagcctggccggcgacgaggagaccgagtgccagagcagccccaagcacagcagcagagagagaagaagaatccagcagtag

SEQ ID NO: 103669 - DNA, 516 bp, synthetic construct
  misc_feature 1..516: note = Description of Artificial Sequence: Synthetic coding sequence
  source 1..516: mol_type = other DNA
atggaggagagaggcgacagcgagcccacccccggctgcagcggcctgggccccggcggcgtgagaggcttcggcgacggcggcggcgcccccagctgggcccccgaggacgcctggatgggcacccaccccaagtacctggagatgatggagctggacatcggcgacgccacccaggtgtacgtggccttcctggtgtacctggacctgatggagagcaagagctggcacgaggtgaactgcgtgggcctgcccgagctgcagctgatctgcctggtgggcaccgagatcgagggcgagggcctgcagaccgtggtgcccacccccatcaccgccagcctgagccacaacagaatcagagagatcctgaaggccagcagaaagctgcagggcgaccccgacctgcccatgagcttcaccctggccatcgtggagagcgacagcaccatcgtgtactacaagctgaccgacggcttcatgctgcccgacccccagaacatcagcctgagaagatag

SEQ ID NO: 103670 - DNA, 390 bp, synthetic construct
  misc_feature 1..390: note = Description of Artificial Sequence: Synthetic coding sequence
  source 1..390: mol_type = other DNA
atggaggagagaggcgacagcgagcccacccccggctgcagcggcctgggccccggcggcgtgagaggcttcggcgacggcggcggcgcccccagctgggcccccgaggacgcctggatgggcacccaccccaagtacctggagatgatggagctggacatcggcgacgccacccaggtgtacgtggccttcctggtgtacctggacctgatggagagcaagagctggcacgaggtgaactgcgtgggcctgcccgagctgcagctgatctgcctggtgggcaccgagatcgagggcgagggcctgcagaccgtggtgcccacccccatcaccgccagcctgagccacaacagaatcttcctgctggaggacgacatccacgtgagctag

SEQ ID NO: 103671 - DNA, 1398 bp, synthetic construct
  misc_feature 1..1398: note = Description of Artificial Sequence: Synthetic coding sequence
  source 1..1398: mol_type = other DNA
atggccgaggccgtgttccacgcccccaagagaaagagaagagtgtacgagacctacgagagccccctgcccatccccttcggccaggaccacggccccctgaaggagttcaagatcttcagagccgagatgatcaacaacaacgtgatcgtgagaaacgccgaggacatcgagcagctgtacggcaagggctacttcggcaagggcatcctgagcagaagcagacccagcttcaccatcagcgaccccaagctggtggccaagtggaaggacatgaagaccaacatgcccatcatcaccagcaagagataccagcacagcgtggagtgggccgccgagctgatgagaagacagggccaggacgagagcaccgtgagaagaatcctgaaggactacaccaagcccctggagcacccccccgtgaagagaaacgaggaggcccaggtgcacgacaagctgaacagcggcatggtgagcaacatggagggcaccgccggcggcgagagacccagcgtggtgaacggcgacagcggcaagagcggcggcgtgggcgaccccagagagcccctgggctgcctgcaggagggcagcggctgccaccccaccaccgagagcttcgagaagagcgtgagagaggacgccagccccctgccccacgtgtgctgctgcaagcaggacgccctgatcctgcagagaggcctgcaccacgaggacggcagccagcacatcggcctgctgcaccccggcgacagaggccccgaccacgagtacgtgctggtggaggaggccgagtgcgccatgagcgagagagaggccgcccccaacgaggagctggtgcagagaaacagactgatctgcagaagaaacccctacagaatcttcgagtacctgcagctgagcctggaggaggccttcttcctggtgtacgccctgggctgcctgagcatctactacgagaaggagcccctgaccatcgtgaagctgtggaaggccttcaccgtggtgcagcccaccttcagaaccacctacatggcctaccactacttcagaagcaagggctgggtgcccaaggtgggcctgaagtacggcaccgacctgctgctgtacagaaagggcccccccttctaccacgccagctacagcgtgatcatcgagctggtggacgaccacttcgagggcagcctgagaagacccctgagctggaagagcctggccgccctgagcagagtgagcgtgaacgtgagcaaggagctgatgctgtgctacctgatcaagcccagcaccatgaccgacaaggagatggagagccccgagtgcatgaagagaatcaaggtgcaggaggtgatcctgagcagatgggtgagcagcagagagagaagcgaccaggacgacctgtag

SEQ ID NO: 103672 - DNA, 1320 bp, synthetic construct
  misc_feature 1..1320: note = Description of Artificial Sequence: Synthetic coding sequence
  source 1..1320: mol_type = other DNA
atggccgaggccgtgttccacgcccccaagagaaagagaagagtgtacgagacctacgagagccccctgcccatccccttcggccaggaccacggccccctgaaggagttcaagatcttcagagccgagatgatcaacaacaacgtgatcgtgagaaacgccgaggacatcgagcagctgtacggcaagggctacttcggcaagggcatcctgagcagaagcagacccagcttcaccatcagcgaccccaagctggtggccaagtggaaggacatgaagaccaacatgcccatcatcaccagcaagagataccagcacagcgtggagtgggccgccgagctgatgagaagacagggccaggacgagagcaccgtgagaagaatcctgaaggactacaccaagcccctggagcacccccccgtgaagagaaacgaggaggcccaggtgcacgacaagctgaacagcggcatggtgagcaacatggagggcaccgccggcggcgagagacccagcgtggtgaacggcgacagcggcaagagcggcggcgtgggcgaccccagagagcccctgggctgcctgcaggagggcagcggctgccaccccaccaccgagagcttcgagaagagcgtgagagaggacgccagccccctgccccacgtgtgctgctgcaagcaggacgccctgatcctgcagagaggcctgcaccacgaggacggcagccagcacatcggcctgctgcaccccggcgacagaggccccgaccacgagtacgtgctggtggaggaggccgagtgcgccatgagcgagagagaggccgcccccaacgaggaggccttcttcctggtgtacgccctgggctgcctgagcatctactacgagaaggagcccctgaccatcgtgaagctgtggaaggccttcaccgtggtgcagcccaccttcagaaccacctacatggcctaccactacttcagaagcaagggctgggtgcccaaggtgggcctgaagtacggcaccgacctgctgctgtacagaaagggcccccccttctaccacgccagctacagcgtgatcatcgagctggtggacgaccacttcgagggcagcctgagaagacccctgagctggaagagcctggccgccctgagcagagtgagcgtgaacgtgagcaaggagctgatgctgtgctacctgatcaagcccagcaccatgaccgacaaggagatggagagccccgagtgcatgaagagaatcaaggtgcaggaggtgatcctgagcagatgggtgagcagcagagagagaagcgaccaggacgacctgtag

SEQ ID NO: 103673 - DNA, 1347 bp, synthetic construct
  misc_feature 1..1347: note = Description of Artificial Sequence: Synthetic coding sequence
  source 1..1347: mol_type = other DNA
atggccgaggccgtgttccacgcccccaagagaaagagaagagtgtacgagacctacgagagccccctgcccatccccttcggccaggaccacggccccctgaaggagttcaagatcttcagagccgagatgatcaacaacaacgtgatcgtgagaaacgccgaggacatcgagcagctgtacggcaagggctacttcggcaagggcatcctgagcagaagcagacccagcttcaccatcagcgaccccaagctggtggccaagtggaaggacatgaagaccaacatgcccatcatcaccagcaagagataccagcacagcgtggagtgggccgccgagctgatgagaagacagggccaggacgagagcaccgtgagaagaatcctgaaggactacaccaagcccctggagcacccccccgtgaagagaaacgaggaggcccaggtgcacgacaagctgaacagcggcatggtgagcaacatggagggcaccgccggcggcgagagacccagcgtggtgaacggcgacagcggcaagagcggcggcgtgggcgaccccagagagcccctgggctgcctgcaggagggcagcggctgccaccccaccaccgagagcttcgagaagagcgtgagagaggacgccagccccctgccccacgtgtgctgctgcaagcaggacgccctgatcctgcagagaggcctgcaccacgaggacggcagccagcacatcggcctgctgcaccccggcgacagaggccccgaccacgagtacgtgctggtggaggaggccgagtgcgccatgagcgagagagaggccgcccccaacgaggagctggtgcagagaaacagactgatctgcagaagaaacccctacagaatcttcgagtacctgcagctgagcctggaggaggagcccctgaccatcgtgaagctgtggaaggccttcaccgtggtgcagcccaccttcagaaccacctacatggcctaccactacttcagaagcaagggctgggtgcccaaggtgggcctgaagtacggcaccgacctgctgctgtacagaaagggcccccccttctaccacgccagctacagcgtgatcatcgagctggtggacgaccacttcgagggcagcctgagaagacccctgagctggaagagcctggccgccctgagcagagtgagcgtgaacgtgagcaaggagctgatgctgtgctacctgatcaagcccagcaccatgaccgacaaggagatggagagccccgagtgcatgaagagaatcaaggtgcaggaggtgatcctgagcagatgggtgagcagcagagagagaagcgaccaggacgacctgtag

SEQ ID NO: 103674 - DNA, 1398 bp, synthetic construct; identical to SEQ ID NO: 103671
  misc_feature 1..1398: note = Description of Artificial Sequence: Synthetic coding sequence
  source 1..1398: mol_type = other DNA

SEQ ID NO: 103675 - DNA, 1320 bp, synthetic construct; identical to SEQ ID NO: 103672
  misc_feature 1..1320: note = Description of Artificial Sequence: Synthetic coding sequence
  source 1..1320: mol_type = other DNA

SEQ ID NO: 103676 - DNA, 1209 bp, synthetic construct
  misc_feature 1..1209: note = Description of Artificial Sequence: Synthetic coding sequence
  source 1..1209: mol_type = other DNA
atggccgaggccgtgttccacgcccccaagagaaagagaagagtgtacgagacctacgagagccccctgcccatccccttcggccaggaccacggccccctgaaggagttcaagatcttcagagccgagatgatcaacaacaacgtgatcgtgagaaacgccgaggacatcgagcagctgtacggcaagggctacttcggcaagggcatcctgagcagaagcagacccagcttcaccatcagcgaccccaagctggtggccaagtggaaggacatgaagaccaacatgcccatcatcaccagcaagagataccagcacagcgtggagtgggccgccgagctgatgagaagacagggccaggacgagagcaccgtgagaagaatcctgaaggactacaccaagcccctggagcacccccccgtgaagagaaacgaggaggcccaggtgcacgacaagctgaacagcggcatggtgagcaacatggagggcaccgccggcggcgagagacccagcgtggtgaacggcgacagcggcaagagcggcggcgtgggcgaccccagagagcccctgggctgcctgcaggagggcagcggctgccaccccaccaccgagagcttcgagaagagcgtgagagaggacgccagccccctgccccacgtgtgctgctgcaagcaggacgccctgatcctgcagagaggcctgcaccacgaggacggcagccagcacatcggcctgctgcaccccggcgacagaggccccgaccacgagtacgtgctggtggaggaggccgagtgcgccatgagcgagagagaggccgcccccaacgaggaggccttcttcctggtgtacgccctgggctgcctgagcatctactacgagaaggagcccctgaccatcgtgaagctgtggaaggccttcaccgtggtgcagcccaccttcagaaccacctacatggcctaccactacttcagaagcaagggctgggtgcccaaggtgggcctgaagtacggcaccgacctgctgctgtacagaaagggcccccccttctaccacgccagctacagcgtgatcatcgagctggtggacgaccacttcgagggcagcctgagaagacccctgagctggaagagcctggccgccctgagcagagtgagcgtgaacgtgagcaaggtgacccagcaccagctgtgccactggagcgtgacctag

SEQ ID NO: 103677 - DNA, 1137 bp, synthetic construct
  misc_feature 1..1137: note = Description of Artificial Sequence: Synthetic coding sequence
  source 1..1137: mol_type = other DNA
atggccgaggccgtgttccacgcccccaagagaaagagaagagtgtacgagacctacgagagccccctgcccatccccttcggccaggaccacggccccctgaaggagttcaagatcttcagagccgagatgatcaacaacaacgtgatcgtgagaaacgccgaggacatcgagcagctgtacggcaagggctacttcggcaagggcatcctgagcagaagcagacccagcttcaccatcagcgaccccaagctggtggccaagtggaaggacatgaagaccaacatgcccatcatcaccagcaagagataccagcacagcgtggagtgggccgccgagctgatgagaagacagggccaggacgagagcaccgtgagaagaatcctgaaggactacaccaagcccctggagcacccccccgtgaagagaaacgaggaggcccaggtgcacgacaagctgaacagcggcatggtgagcaacatggagggcaccgccggcggcgagagacccagcgtggtgaacggcgacagcggcaagagcggcggcgtgggcgaccccagagagcccctgggctgcctgcaggagggcagcggctgccaccccaccaccgagagcttcgagaagagcgtgagagaggacgccagccccctgccccacgtgtgctgctgcaagcaggacgccctgatcctgcagagaggcctgcaccacgaggacggcagccagcacatcggcctgctgcaccccggcgacagaggccccgaccacgagtacgtgctggtggaggaggccgagtgcgccatgagcgagagagaggccgcccccaacgaggagctggtgcagagaaacagactgatctgcagaagaaacccctacagaatcttcgagtacctgcagctgagcctggaggaggccttcttcctggtgtacgccctgggctgcctgagcatctactacgagaaggagcccctgaccatcgtgaagctgtggaaggccttcaccgtggtgcagcccaccttcagaaccacctacatggcctaccactacttcagaagcaagggctgggtgcccaaggtgggcctgaagtacggcaccgacctgctgctgtacagaaagggcccccccttctaccacgcctag

SEQ ID NO: 103678 - DNA, 1317 bp, synthetic construct
  misc_feature 1..1317: note = Description of Artificial Sequence: Synthetic coding sequence
  source 1..1317: mol_type = other DNA
atggccgaggccgtgttccacgcccccaagagaaagagaagagtgtacgagacctacgagagccccctgcccatccccttcggccaggaccacggccccctgaaggagttcaagatcttcagagccgagatgatcaacaacaacgtgatcgtgagaaacgccgaggacatcgagcagctgtacggcaaggacatgaagaccaacatgcccatcatcaccagcaagagataccagcacagcgtggagtgggccgccgagctgatgagaagacagggccaggacgagagcaccgtgagaagaatcctgaaggactacaccaagcccctggagcacccccccgtgaagagaaacgaggaggcccaggtgcacgacaagctgaacagcggcatggtgagcaacatggagggcaccgccggcggcgagagacccagcgtggtgaacggcgacagcggcaagagcggcggcgtgggcgaccccagagagcccctgggctgcctgcaggagggcagcggctgccaccccaccaccgagagcttcgagaagagcgtgagagaggacgccagccccctgccccacgtgtgctgctgcaagcaggacgccctgatcctgcagagaggcctgcaccacgaggacggcagccagcacatcggcctgctgcaccccggcgacagaggccccgaccacgagtacgtgctggtggaggaggccgagtgcgccatgagcgagagagaggccgcccccaacgaggagctggtgcagagaaacagactgatctgcagaagaaacccctacagaatcttcgagtacctgcagctgagcctggaggaggccttcttcctggtgtacgccctgggctgcctgagcatctactacgagaaggagcccctgaccatcgtgaagctgtggaaggccttcaccgtggtgcagcccaccttcagaaccacctacatggcctaccactacttcagaagcaagggctgggtgcccaaggtgggcctgaagtacggcaccgacctgctgctgtacagaaagggcccccccttctaccacgccagctacagcgtgatcatcgagctggtggacgaccacttcgagggcagcctgagaagacccctgagctggaagagcctggccgccctgagcagagtgagcgtgaacgtgagcaaggagctgatgctgtgctacctgatcaagcccagcaccatgaccgacaaggagatggagagccccgagtgcatgaagagaatcaaggtgcaggaggtgatcctgagcagatgggtgagcagcagagagagaagcgaccaggacgacctgtag

SEQ ID NO: 103679 - DNA, 1221 bp, synthetic construct
  misc_feature 1..1221: note = Description of Artificial Sequence: Synthetic coding sequence
  source 1..1221: mol_type = other DNA
atggccgaggccgtgttccacgcccccaagagaaagagaagagtgtacgagacctacgagagccccctgcccatccccttcggccaggaccacggccccctgaaggagttcaagatcttcagagccgagatgatcaacaacaacgtgatcgtgagaaacgccgaggacatcgagcagctgtacggcaagggctacttcggcaagggcatcctgagcagaagcagacccagcttcaccatcagcgaccccaagctggtggccaagtggaaggacatgaagaccaacatgcccatcatcaccagcaagagataccagcacagcgtggagtgggccgccgagctgatgagaagacagggccaggacgagagcaccgtgagaagaatcctgaaggactacaccaagcccctggagcacccccccgtgaagagaaacgaggaggcccaggtgcacgacaagctgaacagcggcatggtgagcaacatggagggcaccgccggcggcgagagacccagcgtgagaggcctgcaccacgaggacggcagccagcacatcggcctgctgcaccccggcgacagaggccccgaccacgagtacgtgctggtggaggaggccgagtgcgccatgagcgagagagaggccgcccccaacgaggagctggtgcagagaaacagactgatctgcagaagaaacccctacagaatcttcgagtacctgcagctgagcctggaggaggccttcttcctggtgtacgccctgggctgcctgagcatctactacgagaaggagcccctgaccatcgtgaagctgtggaaggccttcaccgtggtgcagcccaccttcagaaccacctacatggcctaccactacttcagaagcaagggctgggtgcccaaggtgggcctgaagtacggcaccgacctgctgctgtacagaaagggcccccccttctaccacgccagctacagcgtgatcatcgagctggtggacgaccacttcgagggcagcctgagaagacccctgagctggaagagcctggccgccctgagcagagtgagcgtgaacgtgagcaaggagctgatgctgtgctacctgatcaagcccagcaccatgaccgacaaggagatggagagccccgagtgcatgaagagaatcaaggtgcaggaggtgatcctgagcagatgggtgagcagcagagagagaagcgaccaggacgacctgtag

SEQ ID NO: 103680 - DNA, 933 bp, synthetic construct
  misc_feature 1..933: note = Description of Artificial Sequence: Synthetic coding sequence
  source 1..933: mol_type = other DNA
atgctggtggtggaggtggccaacggcagaagcctggtgtggggcgccgaggccgtgcaggccctgagagagagactgggcgtgggcggcagaaccgtgggcgccctgcccagaggccccagacagaacagcagactgggcctgcccctgctgctgatgcccgaggaggccagactgctggccgagatcggcgccgtgaccctggtgagcgcccccagacccgacagcagacaccacagcctggccctgaccagcttcaagagacagcaggaggagagcttccaggagcagagcgccctggccgccgaggccagagagaccagaagacaggagctgctggagaagatcaccgagggccaggccgccaagaagcagaagctggagcaggccagcggcgccagcagcagccaggaggccggcagcagccaggccgccaaggaggacgagaccagcgacggccaggccagcggcgagcaggaggaggccggccccagcagcagccaggccggccccagcaacggcgtggcccccctgcccagaagcgccctgctggtgcagctggccaccgccagacccagacccgtgaaggccagacccctggactggagagtgcagagcaaggactggccccacgccggcagacccgcccacgagctgagatacagcatctacagagacctgtgggagagaggcttcttcctgagcgccgccggcaagttcggcggcgacttcctggtgtaccccggcgaccccctgagattccacgcccactacatcgcccagtgctgggcccccgaggacaccatccccctgcaggacctggtggccgccggcagactgggcaccagcgtgagaaagaccctgctgctgtgcagcccccagcccgacggcaaggtggtgtacaccagcctgcagtgggccagcctgcagtag

SEQ ID NO: 103681 - DNA, 933 bp, synthetic construct; identical to SEQ ID NO: 103680
  misc_feature 1..933: note = Description of Artificial Sequence: Synthetic coding sequence
  source 1..933: mol_type = other DNA

SEQ ID NO: 103682 - DNA, 933 bp, synthetic construct; identical to SEQ ID NO: 103680
  misc_feature 1..933: note = Description of Artificial Sequence: Synthetic coding sequence
  source 1..933: mol_type = other DNA

SEQ ID NO: 103683 - DNA, 939 bp, synthetic construct
  misc_feature 1..939: note = Description of Artificial Sequence: Synthetic coding sequence
  source 1..939: mol_type = other DNA
atgctggtggtggaggtggccaacggcagaagcctggtgtggggcgccgaggccgtgcaggccctgagagagagactgggcgtgggcggcagaaccgtgggcgccctgcccagaggccccagacagaacagcagactgggcctgcccctgctgctgatgcccgaggaggccagactgctggccgagatcggcgccgtgaccctggtgagcgcccccagacccgacagcagacaccacagcctggccctgaccagcttcaagagacagcaggaggagagcttccaggagcagagcgccctggccgccgaggccagagagaccagaagacaggagctgctggagaagatcaccgagggccaggccgccaagaagcagaagctggagcaggccagcggcgccagcagcagccaggaggccggcagcagccaggccgccaaggaggacgagaccagcgacggccaggccagcggcgagcaggaggaggccggccccagcagcagccaggccggccccagcaacggcgtggcccccctgcccagaagcgccctgctggtgcagctggccaccgccagacccagacccgtgaaggccagacccctggactggagagtgcagagcaaggactggccccacgccggcagacccgcccacgagctgagatacagcatctacagagacctgtgggagagaggcttcttcctgagcgccgccggcaagttcggcggcgacttcctggtgtaccccggcgaccccctgagattccacgcccactacatcgcccagtgctgggcccccgaggacaccatccccctgcaggacctggtggccgccggcagactgggcaccagcgtgagaaagaccctgctgctgtgcagcccccagcccgacggcttcaagagccaggaggtgagcatcaacctggtgtacaagtgcagctag

SEQ ID NO: 103684 - DNA, 729 bp, synthetic construct
  misc_feature 1..729: note = Description of Artificial Sequence: Synthetic coding sequence
  source 1..729: mol_type = other DNA
atgctggtggtggaggtggccaacggcagaagcctggtgtggggcgccgaggccgtgcaggccctgagagagagactgggcgtgggcggcagaaccgtgggcgccctgcccagaggccccagacagaacagcagactgggcctgcccctgctgctgatgcccgaggaggccagactgctggccgagatcggcgccgtgaccctggtgagcgcccccagacccgacagcagacaccacagcctggccctgaccagcttcaagagacagcaggaggagagcttccaggagcagagcgccctggccgccgaggccagagagaccagaagacaggagctgctggagaagatcaccgagggccaggccgccaagaagcagaagctggagcaggccagcggcgccagcagcagccaggaggccggcagcagccaggccgccaaggaggacgagaccagcgacggccaggccagcggcgagcaggaggaggccggccccagcagcagccaggccggccccagcaacggcgtggcccccctgcccagaagcgccctgctggtgcagctggccaccgccagacccagacccgtgaaggccagacccctggactggagagtgcagagcaaggactggccccacgccggcagacccgcccacgagctgagatacagcatctacagagacctgtgggagagaggcttcttcctgagcgccgccggcaagttcggcggctag

SEQ ID NO: 103685 - DNA, 1581 bp, synthetic construct
  misc_feature 1..1581: note = Description of Artificial Sequence: Synthetic coding sequence
  source 1..1581: mol_type = other DNA
atggagcccgagcccgagcccgccgccgtggaggtgcccgccggcagagtgctgagcgccagagagctgttcgccgccagaagcagaagccagaagctgccccagagaagccacggccccaaggacttcctgcccgacggcagcgccgcccaggccgagagactgagaagatgcagagaggagctgtggcagctgctggccgagcagagagtggagagactgggcagcctggtggccgccgagtggagacccgaggagggcttcgtggagctgaagagccccgccggcaagttctggcagaccatgggcttcagcgagcagggcagacagagactgcaccccgaggaggccctgtacctgctggagtgcggcagcatccacctgttccaccaggacctgcccctgagcatccaggaggcctaccagctgctgctgaccgaccacaccgtgaccttcctgcagtaccaggtgttcagccacctgaagagactgggctacgtggtgagaagattccagcccagcagcgtgctgagcccctacgagagacagctgaacctggacgccagcgtgcagcacctggaggacggcgacggcaagagaaagagaagcagcagcagccccagaagcatcaacaagaaggccaaggccctggacaacagcctgcagcccaagagcctggccgccagcagcccccccccctgcagccagcccagccagtgccccgaggagaagccccaggagagcagccccatgaagggccccggcggccccttccagctgctgggcagcctgggccccagccccggccccgccagagagggcgtgggctgcagctgggagagcggcagagccgagaacggcgtgaccggcgccggcaagagaagatggaacttcgagcagatcagcttccccaacatggccagcgacagcagacacaccctgctgagagcccccgcccccgagctgctgcccgccaacgtggccggcagagagaccgacgccgagagctggtgccagaagctgaaccagagaaaggagaagctgagcagaagagagagagagcaccacgccgaggccgcccagttccaggaggacgtgaacgccgaccccgaggtgcagagatgcagcagctggagagagtacaaggagctgctgcagagaagacaggtgcagagaagccagagaagagccccccacctgtggggccagcccgtgacccccctgctgagccccggccaggccagcagccccgccgtggtgctgcagcacatcagcgtgctgcagaccacccacctgcccgacggcggcgccagactgctggagaagagcggcggcctggagatcatcttcgacgtgtaccaggccgacgccgtggccaccttcagaaagaacaaccccggcaagccctacgccagaatgtgcatcagcggcttcgacgagcccgtgcccgacctgtgcagcctgaagagactgagctaccagagcggcgacgtgcccctgatcttcgccctggtggaccacggcgacatcagcttctacagcttcagagacttcaccctgccccaggacgtgggccactag

SEQ ID NO: 103686 - DNA, 594 bp, synthetic construct
  misc_feature 1..594: note = Description of Artificial Sequence: Synthetic coding sequence
  source 1..594: mol_type = other DNA
atgggcttcagcgagcagggcagacagagactgcaccccgaggaggccctgtacctgctggagtgcggcagcatccacctgttccaccaggacctgcccctgagcatccaggaggcctaccagctgctgctgaccgaccacaccgtgaccttcctgcagtaccaggtgttcagccacctgaagagactgggctacgtggtgagaagattccagcccagcagcgtgctgagcccctacgagagacagctgaacctggacgccagcgtgcagcacctggaggacggcgacggcaagagaaagagaagcagcagcagccccagaagcatcaacaagaaggccaaggccctggacaacagcctgcagcccaagagcctggccgccagcagcccccccagcggcaccagcagatgccccagaatgtggggcaccgacctgaccgccctgcagagaatggagctggcccccggcgacagagactgcctgttcagcggcaccatcagcgccgccagctgcacccagaccctgacctgcagcttcagaggccagagcggcccctggccctgggtgagcgacacccacagagtgaagctgtag

SEQ ID NO: 103687 - DNA, 534 bp, synthetic construct
  misc_feature 1..534: note = Description of Artificial Sequence: Synthetic coding sequence
  source 1..534: mol_type = other DNA
atggagcccgagcccgagcccgccgccgtggaggtgcccgccggcagagtgctgagcgccagagagctgttcgccgccagaagcagaagccagaagctgccccagagaagccacggccccaaggacttcctgcccgacggcagcgccgcccaggccgagagactgagaagatgcagagaggagctgtggcagctgctggccgagcagagagtggagagactgggcagcctggtggccgccgagtggagacccgaggagggcttcgtggagctgaagagccccgccggcaagttctggcagaccatgggcttcagcgagcagggcagacagagactgcaccccgaggaggccctgtacctgctggagtgcggcagcatccacctgttccaccaggacctgcccctgagcatccaggaggcctaccagctgctgctgaccgaccacaccgtgaccttcctgcagtaccagccccccgaggaggtgggcctgtgcggcagcaccatccccaccaagctgtgccccgtgcccgtgtag

SEQ ID NO: 103688 - DNA, 4296 bp, synthetic construct
  misc_feature 1..4296: note = Description of Artificial Sequence: Synthetic coding sequence
  source 1..4296: mol_type = other DNA
atggacagaagaaacgactacggctacagagtgcccctgttccagggccccctgcccccccccggcagcctgggcctgcccttcccccccgacatccagaccgagaccaccgaggaggacagcgtgctgctgatgcacaccctgctggccgccaccaaggacagcctggccatggacccccccgtggtgaacagacccaagaagagcaagaccaagaaggcccccatcaagaccatcaccaaggccgcccccgccgccccccccgtgcccgccgccaacgagatcgccaccaacaagcccaagatcacctggcaggccctgaacctgcccgtgatcacccagatcagccaggccctgcccaccaccgaggtgaccaacacccaggccagcagcgtgaccgcccagcccaagaaggccaacaagatgaagagagtgaccgccaaggccgcccagggcagccagagccccaccggccacgagggcggcaccatccagctgaagagccccctgcaggtgctgaagctgcccgtgatcagccagaacatccacgcccccatcgccaacgagagcgccagcagccaggccctgatcaccagcatcaagcccaagaaggccagcaaggccaagaaggccgccaacaaggccatcgccagcgccaccgaggtgagcctggccgccaccgccacccacaccgccaccacccagggccagatcaccaacgagaccgccagcatccacaccaccgccgccagcatcagaaccaagaaggccagcaaggccagaaagaccatcgccaaggtgatcaacaccgacaccgagcacatcgaggccctgaacgtgaccgacgccgccaccagacagatcgaggccagcgtggtggccatcagacccaagaagagcaagggcaagaaggccgccagcagaggccccaacagcgtgagcgagatcagcgaggcccccctggccacccagatcgtgaccaaccaggccctggccgccaccctgagagtgaagagaggcagcagagccagaaaggccgccaccaaggccagagccaccgagagccagacccccaacgccgaccagggcgcccaggccaagatcgccagcgcccagaccaacgtgagcgccctggagacccaggtggccgccgccgtgcaggccctggccgacgactacctggcccagctgagcctggagcccaccaccagaaccagaggcaagagaaacagaaagagcaagcacctgaacggcgacgagagaagcggcagcaactacagaagaatcccctggggcagaagacccgccccccccagagacgtggccatcctgcaggagagagccaacaagctggtgaagtacctgctggtgaaggaccagaccaagatccccatcaagagaagcgacatgctgagagacgtgatccaggagtacgacgagtacttccccgagatcatcgagagagccagctacaccctggagaagatgttcagagtgaacctgaaggagatcgacaagcagagcagcctgtacatcctgatcagcacccaggagagcagcgccggcatcctgggcaccaccaaggacacccccaagctgggcctgctgatggtgatcctgagcgtgatcttcatgaacggcaacaaggccagcgaggccgtgatctgggaggtgctgagaaagctgggcctgagacccggcgtgagacacagcctgttcggcgaggtgagaaagctgatcaccgacgagttcgtgaagcagaagtacctggagtacaagagagtgcccaacagcagaccccccgagtacgagttcttctggggcctgagaagctaccacgagaccagcaagatgaaggtgctgaagttcgcctgcagagtgcagaagaaggaccccaaggactgggccgtgcagtacagagaggccgtggagatggaggtgcaggccgccgccgtggccgtggccgaggccgaggccagagccgaggccagagcccagatgggcatcggcgaggaggccgtggccggcccctggaactgggacgacatggacatcgactgcctgaccagagaggagctgggcgacgacgcccaggcctggagcagattcagcttcgagatcgaggccagagcccaggagaacgccgacgccagcaccaacgtgaacttcagcagaggcgccagcaccagagccggcttcagcgacggcgccagcatcagcttcaacggcgcccccagcagcagcggcggcttcagcggcggccccggcatcaccttcggcgtggcccccagcaccagcgccagcttcagcaacaccgccagcatcagcttcggcggcaccctgagcaccagcagcagcttcagcagcgccgccagcatcagcttcggctgcgcccacagcaccagcaccagcttcagcagcgaggccagcatcagcttcggcggcatgccctgcaccagcgccagcttcagcggcggcgtgagcagcagcttcagcggccccctgagcaccagcgccaccttcagcggcggcgccagcagcggcttcggcggcaccctgagcaccaccgccggcttcagcggcgtgctgagcaccagcaccagcttcggcagcgcccccaccaccagcaccgtgttcagcagcgccctgagcaccagcaccggcttcggcggcatcctgagcaccagcgtgtgcttcggcggcagccccagcagcagcggcagcttcggcggcaccctgagcaccagcatctgcttcggcggcagcccctgcaccagcaccggcttcggcggcaccctgagcaccagcgtgagcttcggcggcagcagcagcaccagcgccaacttcggcggcaccctgagcaccagcatctgcttcgacggcagccccagcaccggcgccggcttcggcggcgccctgaacaccagcgccagcttcggcagcgtgctgaacaccagcaccggcttcggcggcgccatgagcaccagcgccgacttcggcggcaccctgagcaccagcgtgtgcttcggcggcagccccggcaccagcgtgagcttcggcagcgccctgaacaccaacgccggctacggcggcgccgtgagcaccaacaccgacttcggcggcaccctgagcaccagcgtgtgcttcggcggcagccccagcaccagcgccggcttcggcggcgccctgaacaccaacgccagcttcggctgcgccgtgagcaccagcgccagcttcagcggcgccgtgagcaccagcgcctgcttcagcggcgcccccatcaccaaccccggcttcggcggcgccttcagcaccagcgccggcttcggcggcgccctgagcaccgccgccgacttcggcggcacccccagcaacagcatcggcttcggcgccgcccccagcaccagcgtgagcttcggcggcgcccacggcaccagcctgtgcttcggcggcgcccccagcaccagcctgtgcttcggcagcgccagcaacaccaacctgtgcttcggcggcccccccagcaccagcgcctgcttcagcggcgccaccagccccagcttctgcgacggccccagcaccagcaccggcttcagcttcggcaacggcctgagcaccaacgccggcttcggcggcggcctgaacaccagcgccggcttcggcggcggcctgggcaccagcgccggcttcagcggcggcctgagcaccagcagcggcttcgacggcggcctgggcaccagcgccggcttcggcggcggccccggcaccagcaccggcttcggcggcggcctgggcaccagcgccggcttcagcggcggcctgggcaccagcgccggcttcggcggcggcctggtgaccagcgacggcttcggcggcggcctgggcaccaacgccagcttcggcagcaccctgggcaccagcgccggcttcagcggcggcctgagcaccagcgacggcttcggcagcagacccaacgccagcttcgacagaggcctgagcaccatcatcggcttcggcagcggcagcaacaccagcaccggcttcaccggcgagcccagcaccagcaccggcttcagcagcggccccagcagcatcgtgggcttcagcggcggccccagcaccggcgtgggcttctgcagcggccccagcaccagcggcttcagcggcggccccagcaccggcgccggcttcggcggcggccccaacaccggcgccggcttcggcggcggccccagcaccagcgccggcttcggcagcggcgccgccagcctgggcgcctgcggcttcagctacggctag

SEQ ID NO: 103689 - DNA, 2121 bp, synthetic construct
  misc_feature 1..2121: note = Description of Artificial Sequence: Synthetic coding sequence
  source 1..2121: mol_type = other DNA
atggacagaagaaacgactacggctacagagtgcccctgttccagggccccctgcccccccccggcagcctgggcctgcccttcccccccgacatccagaccgagaccaccgaggaggacagcgtgctgctgatgcacaccctgctggccgccaccaaggacagcctggccatggacccccccgtggtgaacagacccaagaagagcaagaccaagaaggcccccatcaagaccatcaccaaggccgcccccgccgccccccccgtgcccgccgccaacgagatcgccaccaacaagcccaagatcacctggcaggccctgaacctgcccgtgatcacccagatcagccaggccctgcccaccaccgaggtgaccaacacccaggccagcagcgtgaccgcccagcccaagaaggccaacaagatgaagagagtgaccgccaaggccgcccagggcagccagagccccaccggccacgagggcggcaccatccagctgaagagccccctgcaggtgctgaagctgcccgtgatcagccagaacatccacgcccccatcgccaacgagagcgccagcagccaggccctgatcaccagcatcaagcccaagaaggccagcaaggccaagaaggccgccaacaaggccatcgccagcgccaccgaggtgagcctggccgccaccgccacccacaccgccaccacccagggccagatcaccaacgagaccgccagcatccacaccaccgccgccagcatcagaaccaagaaggccagcaaggccagaaagaccatcgccaaggtgatcaacaccgacaccgagcacatcgaggccctgaacgtgaccgacgccgccaccagacagatcgaggccagcgtggtggccatcagacccaagaagagcaagggcaagaaggccgccagcagaggccccaacagcgtgagcgagatcagcgaggcccccctggccacccagatcgtgaccaaccaggccctggccgccaccctgagagtgaagagaggcagcagagccagaaaggccgccaccaaggccagagccaccgagagccagacccccaacgccgaccagggcgcccaggccaagatcgccagcgcccagaccaacgtgagcgccctggagacccaggtggccgccgccgtgcaggccctggccgacgactacctggcccagctgagcctggagcccaccaccagaaccagaggcaagagaaacagaaagagcaagcacctgaacggcgacgagagaagcggcagcaactacagaagaatcccctggggcagaagacccgccccccccagagacgtggccatcctgcaggagagagccaacaagctggtgaagtacctgctggtgaaggaccagaccaagatccccatcaagagaagcgacatgctgagagacgtgatccaggagtacgacgagtacttccccgagatcatcgagagagccagctacaccctggagaagatgttcagagtgaacctgaaggagatcgacaagcagagcagcctgtacatcctgatcagcacccaggagagcagcgccggcatcctgggcaccaccaaggacacccccaagctgggcctgctgatggtgatcctgagcgtgatcttcatgaacggcaacaaggccagcgaggccgtgatctgggaggtgctgagaaagctgggcctgagacccggcgtgagacacagcctgttcggcgaggtgagaaagctgatcaccgacgagttcgtgaagcagaagtacctggagtacaagagagtgcccaacagcagaccccccgagtacgagttcttctggggcctgagaagctaccacgagaccagcaagatgaaggtgctgaagttcgcctgcagagtgcagaagaaggaccccaaggactgggccgtgcagtacagagaggccgtggagatggaggtgcaggccgccgccgtggccgtggccgaggccgaggccagagccgagatctacagcccctgcctgcagatccccctgatcaactgcagcagccccagccacggcgccaaggtgcacccctggaacctgtgcccccacagcagccagggcagctacggccagagcgccgagggcgtgatgtag

SEQ ID NO: 103690 - DNA, 1074 bp, synthetic construct
  misc_feature 1..1074: note = Description of Artificial Sequence: Synthetic coding sequence
  source 1..1074: mol_type = other DNA
atggacagaagaaacgactacggctacagagtgcccctgttccagagcaagcacctgaacggcgacgagagaagcggcagcaactacagaagaatcccctggggcagaagacccgccccccccagagacgtggccatcctgcaggagagagccaacaagctggtgaagtacctgctggtgaaggaccagaccaagatccccatcaagagaagcgacatgctgagagacgtgatccaggagtacgacgagtacttccccgagatcatcgagagagccagctacaccctggagaagatgttcagagtgaacctgaaggagatcgacaagcagagcagcctgtacatcctgatcagcacccaggagagcagcgccggcatcctgggcaccaccaaggacacccccaagctgggcctgctgatggtgatcctgagcgtgatcttcatgaacggcaacaaggccagcgaggccgtgatctgggaggtgctgagaaagctgggcctgagacccggcgtgagacacagcctgttcggcgaggtgagaaagctgatcaccgacgagttcgtgaagcagaagtacctggagtacaagagagtgcccaacagcagaccccccgagtacgagttcttctggggcctgagaagctaccacgagaccagcaagatgaaggtgctgaagttcgcctgcagagtgcagaagaaggaccccaaggactgggccgtgcagtacagagaggccgtggagatggaggtgcagctgcagctgtggctgtggctgagactgaagcccggcctgagcggcagcaacaccagcaccggcttcaccggcgagcccagcaccagcaccggcttcagcagcggccccagcagcatcgtgggcttcagcggcggccccagcaccggcgtgggcttctgcagcggccccagcaccagcggcttcagcggcggccccagcaccggcgccggcttcggcggcggccccaacaccggcgccggcttcggcggcggccccagcaccagcgccggcttcggcagcggcgccgccagcctgggcgcctgcggcttcagctacggctag

SEQ ID NO: 103691 - DNA, 2121 bp, synthetic construct; identical to SEQ ID NO: 103689
  misc_feature 1..2121: note = Description of Artificial Sequence: Synthetic coding sequence
  source 1..2121: mol_type = other DNA

SEQ ID NO: 103692 - DNA, 3105 bp, synthetic construct
  misc_feature 1..3105: note = Description of Artificial Sequence: Synthetic coding sequence
  source 1..3105: mol_type = other DNA
atggacagaagaaacgactacggctacagagtgcccctgttccagagcaagcacctgaacggcgacgagagaagcggcagcaactacagaagaatcccctggggcagaagacccgccccccccagagacgtggccatcctgcaggagagagccaacaagctggtgaagtacctgctggtgaaggaccagaccaagatccccatcaagagaagcgacatgctgagagacgtgatccaggagtacgacgagtacttccccgagatcatcgagagagccagctacaccctggagaagatgttcagagtgaacctgaaggagatcgacaagcagagcagcctgtacatcctgatcagcacccaggagagcagcgccggcatcctgggcaccaccaaggacacccccaagctgggcctgctgatggtgatcctgagcgtgatcttcatgaacggcaacaaggccagcgaggccgtgatctgggaggtgctgagaaagctgggcctgagacccggcgtgagacacagcctgttcggcgaggtgagaaagctgatcaccgacgagttcgtgaagcagaagtacctggagtacaagagagtgcccaacagcagaccccccgagtacgagttcttctggggcctgagaagctaccacgagaccagcaagatgaaggtgctgaagttcgcctgcagagtgcagaagaaggaccccaaggactgggccgtgcagtacagagaggccgtggagatggaggtgcaggccgccgccgtggccgtggccgaggccgaggccagagccgaggccagagcccagatgggcatcggcgaggaggccgtggccggcccctggaactgggacgacatggacatcgactgcctgaccagagaggagctgggcgacgacgcccaggcctggagcagattcagcttcgagatcgaggccagagcccaggagaacgccgacgccagcaccaacgtgaacttcagcagaggcgccagcaccagagccggcttcagcgacggcgccagcatcagcttcaacggcgcccccagcagcagcggcggcttcagcggcggccccggcatcaccttcggcgtggcccccagcaccagcgccagcttcagcaacaccgccagcatcagcttcggcggcaccctgagcaccagcagcagcttcagcagcgccgccagcatcagcttcggctgcgcccacagcaccagcaccagcttcagcagcgaggccagcatcagcttcggcggcatgccctgcaccagcgccagcttcagcggcggcgtgagcagcagcttcagcggccccctgagcaccagcgccaccttcagcggcggcgccagcagcggcttcggcggcaccctgagcaccaccgccggcttcagcggcgtgctgagcaccagcaccagcttcggcagcgcccccaccaccagcaccgtgttcagcagcgccctgagcaccagcaccggcttcggcggcatcctgagcaccagcgtgtgcttcggcggcagccccagcagcagcggcagcttcggcggcaccctgagcaccagcatctgcttcggcggcagcccctgcaccagcaccggcttcggcggcaccctgagcaccagcgtgagcttcggcggcagcagcagcaccagcgccaacttcggcggcaccctgagcaccagcatctgcttcgacggcagccccagcaccggcgccggcttcggcggcgccctgaacaccagcgccagcttcggcagcgtgctgaacaccagcaccggcttcggcggcgccatgagcaccagcgccgacttcggcggcaccctgagcaccagcgtgtgcttcggcggcagccccggcaccagcgtgagcttcggcagcgccctgaacaccaacgccggctacggcggcgccgtgagcaccaacaccgacttcggcggcaccctgagcaccagcgtgtgcttcggcggcagccccagcaccagcgccggcttcggcggcgccctgaacaccaacgccagcttcggctgcgccgtgagcaccagcgccagcttcagcggcgccgtgagcaccagcgcctgcttcagcggcgcccccatcaccaaccccggcttcggcggcgccttcagcaccagcgccggcttcggcggcgccctgagcaccgccgccgacttcggcggcacccccagcaacagcatcggcttcggcgccgcccccagcaccagcgtgagcttcggcggcgcccacggcaccagcctgtgcttcggcggcgcccccagcaccagcctgtgcttcggcagcgccagcaacaccaacctgtgcttcggcggcccccccagcaccagcgcctgcttcagcggcgccaccagccccagcttctgcgacggccccagcaccagcaccggcttcagcttcggcaacggcctgagcaccaacgccggcttcggcggcggcctgaacaccagcgccggcttcggcggcggcctgggcaccagcgccggcttcagcggcggcctgagcaccagcagcggcttcgacggcggcctgggcaccagcgccggcttcggcggcggccccggcaccagcaccggcttcggcggcggcctgggcaccagcgccggcttcagcggcggcctgggcaccagcgccggcttcggcggcggcctggtgaccagcgacggcttcggcggcggcctgggcaccaacgccagcttcggcagcaccctgggcaccagcgccggcttcagcggcggcctgagcaccagcgacggcttcggcagcagacccaacgccagcttcgacagaggcctgagcaccatcatcggcttcggcagcggcagcaacaccagcaccggcttcaccggcgagcccagcaccagcaccggcttcagcagcggccccagcagcatcgtgggcttcagcggcggccccagcaccggcgtgggcttctgcagcggccccagcaccagcggcttcagcggcggccccagcaccggcgccggcttcggcggcggccccaacaccggcgccggcttcggcggcggccccagcaccagcgccggcttcggcagcggcgccgccagcctgggcgcctgcggcttcagctacggctag

SEQ ID NO: 103693 - DNA, 693 bp, synthetic construct
  misc_feature 1..693: note = Description of Artificial Sequence: Synthetic coding sequence
  source 1..693: mol_type = other DNA
atgcacaccctgctggccgccaccaaggacagcctggccatggacccccccgtggtgaacagacccaagaagagcaagaccaagaaggcccccatcaagaccatcaccaaggccgcccccgccgccccccccgtgcccgccgccaacgagatcgccaccaacaagcccaagatcacctggcaggccctgaacctgcccgtgatcacccagatcagccaggccctgcccaccaccgaggtgaccaacacccaggccagcagcgtgaccgcccagcccaagaaggccaacaagatgaagagagtgaccgccaaggccgcccagggcagccagagccccaccggccacgagggcggcaccatccagctgaagagccccctgcaggtgctgaagctgcccgtgatcagccagaacatccacgcccccatcgccaacgagagcgccagcagccaggccctgatcaccagcatcaagcccaagaaggccagcaaggccaagaaggccgccaacaaggccatcgccagcgccaccgaggtgagcctggccgccaccgccacccacaccgccaccacccagggccagatcaccaacgagaccgccagcatccacaccaccgccgccagcatcagaaccaagaaggccagcaaggccagaaagaccatcgccaaggtgatcaacaccgacaccgagcactag

SEQ ID NO: 103694 - DNA, 510 bp, synthetic construct
  misc_feature 1..510: note = Description of Artificial Sequence: Synthetic coding sequence
  source 1..510: mol_type = other DNA
atggacagaagaaacgactacggctacagagtgcccctgttccagggccccctgcccccccccggcagcctgggcctgcccttcccccccgacatccagaccgagaccaccgaggaggacagcgtgctgctgatgcacaccctgctggccgccaccaaggacagcctggccatggacccccccgtggtgaacagacccaagaagagcaagaccaagaaggcccccatcaagaccatcaccaaggccgcccccgccgccccccccgtgcccgccgccaacgagatcgccaccaacaagcccaagatcacctggcaggccctgaacctgcccgtgatcacccagatcagccaggccctgcccaccaccgaggtgaccaacacccaggccagcagcgtgaccgcccagcccaagaaggccaacaagatgaagagagtgaccgccaaggccgcccagggcagccagagccccaccggccacgagggcggcaccatccagctgaagagcccctag

SEQ ID NO: 103695 - DNA, 2889 bp, synthetic construct
  misc_feature 1..2889: note = Description of Artificial Sequence: Synthetic coding sequence
  source 1..2889: mol_type = other DNA
atgctgagagacgtgatccaggagtacgacgagtacttccccgagatcatcgagagagccagctacaccctggagaagatgttcagagtgaacctgaaggagatcgacaagcagagcagcctgtacatcctgatcagcacccaggagagcagcgccggcatcctgggcaccaccaaggacacccccaagctgggcctgctgatggtgatcctgagcgtgatcttcatgaacggcaacaaggccagcgaggccgtgatctgggaggtgctgagaaagctgggcctgagacccggcgtgagacacagcctgttcggcgaggtgagaaagctgatcaccgacgagttcgtgaagcagaagtacctggagtacaagagagtgcccaacagcagaccccccgagtacgagttcttctggggcctgagaagctaccacgagaccagcaagatgaaggtgctgaagttcgcctgcagagtgcagaagaaggaccccaaggactgggccgtgcagtacagagaggccgtggagatggaggtgcaggccgccgccgtggccgtggccgaggccgaggccagagccgaggccagagcccagatgggcatcggcgaggaggccgtggccggcccctggaactgggacgacatggacatcgactgcctgaccagagaggagctgggcgacgacgcccaggcctggagcagattcagcttcgagatcgaggccagagcccaggagaacgccgacgccagcaccaacgtgaacttcagcagaggcgccagcaccagagccggcttcagcgacggcgccagcatcagcttcaacggcgcccccagcagcagcggcggcttcagcggcggccccggcatcaccttcggcgtggcccccagcaccagcgccagcttcagcaacaccgccagcatcagcttcggcggcaccctgagcaccagcagcagcttcagcagcgccgccagcatcagcttcggctgcgcccacagcaccagcaccagcttcagcagcgaggccagcatcagcttcggcggcatgccctgcaccagcgccagcttcagcggcggcgtgagcagcagcttcagcggccccctgagcaccagcgccaccttcagcggcggcgccagcagcggcttcggcggcaccctgagcaccaccgccggcttcagcggcgtgctgagcaccagcaccagcttcggcagcgcccccaccaccagcaccgtgttcagcagcgccctgagcaccagcaccggcttcggcggcatcctgagcaccagcgtgtgcttcggcggcagccccagcagcagcggcagcttcggcggcaccctgagcaccagcatctgcttcggcggcagcccctgcaccagcaccggcttcggcggcaccctgagcaccagcgtgagcttcggcggcagcagcagcaccagcgccaacttcggcggcaccctgagcaccagcatctgcttcgacggcagccccagcaccggcgccggcttcggcggcgccctgaacaccagcgccagcttcggcagcgtgctgaacaccagcaccggcttcggcggcgccatgagcaccagcgccgacttcggcggcaccctgagcaccagcgtgtgcttcggcggcagccccggcaccagcgtgagcttcggcagcgccctgaacaccaacgccggctacggcggcgccgtgagcaccaacaccgacttcggcggcaccctgagcaccagcgtgtgcttcggcggcagccccagcaccagcgccggcttcggcggcgccctgaacaccaacgccagcttcggctgcgccgtgagcaccagcgccagcttcagcggcgccgtgagcaccagcgcctgcttcagcggcgcccccatcaccaaccccggcttcggcggcgccttcagcaccagcgccggcttcggcggcgccctgagcaccgccgccgacttcggcggcacccccagcaacagcatcggcttcggcgccgcccccagcaccagcgtgagcttcggcggcgcccacggcaccagcctgtgcttcggcggcgcccccagcaccagcctgtgcttcggcagcgccagcaacaccaacctgtgcttcggcggcccccccagcaccagcgcctgcttcagcggcgccaccagccccagcttctgcgacggccccagcaccagcaccggcttcagcttcggcaacggcctgagcaccaacgccggcttcggcggcggcctgaacaccagcgccggcttcggcggcggcctgggcaccagcgccggcttcagcggcggcctgagcaccagcagcggcttcgacggcggcctgggcaccagcgccggcttcggcggcggccccggcaccagcaccggcttcggcggcggcctgggcaccagcgccggcttcagcggcggcctgggcaccagcgccggcttcggcggcggcctggtgaccagcgacggcttcggcggcggcctgggcaccaacgccagcttcggcagcaccctgggcaccagcgccggcttcagcggcggcctgagcaccagcgacggcttcggcagcagacccaacgccagcttcgacagaggcctgagcaccatcatcggcttcggcagcggcagcaacaccagcaccggcttcaccggcgagcccagcaccagcaccggcttcagcagcggccccagcagcatcgtgggcttcagcggcggccccagcaccggcgtgggcttctgcagcggccccagcaccagcggcttcagcggcggccccagcaccggcgccggcttcggcggcggccccaacaccggcgccggcttcggcggcggccccagcaccagcgccggcttcggcagcggcgccgccagcctgggcgcctgcggcttcagctacggctag

SEQ ID NO: 103696 - DNA, 366 bp, synthetic construct
  misc_feature 1..366: note = Description of Artificial Sequence: Synthetic coding sequence
  source 1..366: mol_type = other DNA
atgcacaccctgctggccgccaccaaggacagcctggccatggacccccccgtggtgaacagacccaagaagagcaagaccaagaaggcccccatcaagaccatcaccaaggccgcccccgccgccccccccgtgcccgccgccaacgagatcgccaccaacaagcccaagatcacctggcaggccctgaacctgcccgtgatcacccagatcagccaggccctgcccaccaccgaggtgaccaacacccaggccagcagcgtgaccgcccagcccaagaaggccaacaagatgaagagagtgaccgccaaggccgcccagggcagccagagccccaccggccacgagggcggcaccatccagtag

SEQ ID NO: 103697 - DNA, 579 bp, synthetic construct
  misc_feature 1..579: note = Description of Artificial Sequence: Synthetic coding sequence
  source 1..579: mol_type = other DNA
atgcacaccctgctggccgccaccaaggacagcctggccatggacccccccgtggtgaacagacccaagaagagcaagaccaagaaggcccccatcaagaccatcaccaaggccgcccccgccgccccccccgtgcccgccgccaacgagatcgccaccaacaagcccaagatcacctggcaggccctgaacctgcccgtgatcacccagatcagccaggccctgcccaccaccgaggtgaccaacacccaggccagcagcgtgaccgcccagcccaagaaggccaacaagatgaagagagtgaccgccaaggccgcccagggcagccagagccccaccggccacgagggcggcaccatccagctgaagagccccctgcaggtgctgaagctgcccgtgatcagccagaacatccacgcccccatcgccaacgagagcgccagcagccaggccctgatcaccagcatcaagcccaagaaggccagcaaggccaagaaggccgccaacaaggccatcgccagcgccaccgaggtgagcctggccgccaccgccacccacaccgccaccacccagggctag

SEQ ID NO: 103698 - DNA, 531 bp, synthetic construct
  misc_feature 1..531: note = Description of Artificial Sequence: Synthetic coding sequence
  source 1..531: mol_type = other DNA
atggacagaagaaacgactacggctacagagtgcccctgttccagggccccctgcccccccccggcagcctgggcctgcccttcccccccgacatccagaccgagaccaccgaggaggacagcgtgctgctgatgcacaccctgctggccgccaccaaggacagcctggccatggacccccccgtggtgaacagacccaagaagagcaagaccaagaaggcccccatcaagaccatcaccaaggccgcccccgccgccccccccgtgcccgccgccaacgagatcgccaccaacaagcccaagatcacctggcaggccctgaacctgcccgtgatcacccagatcagccaggccctgcccaccaccgaggtgaccaacacccaggccagcagcgtgaccgcccagcccaagaaggccaacaagatgaagagagtgaccgccaaggccgcccagggcagccagagccccaccggccacgagggcggcaccatccagctgaagagccccctgcaggtgctgaagctgccctag

SEQ ID NO: 103699 - DNA, 507 bp, synthetic construct
  misc_feature 1..507: note = Description of Artificial Sequence: Synthetic coding sequence
  source 1..507: mol_type = other DNA
atggacagaagaaacgactacggctacagagtgcccctgttccagggccccctgcccccccccggcagcctgggcctgcccttcccccccgacatccagaccgagaccaccgaggaggacagcgtgctgctgatgcacaccctgctggccgccaccaaggacagcctggccatggacccccccgtggtgaacagacccaagaagagcaagaccaagaaggcccccatcaagaccatcaccaaggccgcccccgccgccccccccgtgcccgccgccaacgagatcgccaccaacaagcccaagatcacctggcaggccctgaacctgcccgtgatcacccagatcagccaggccctgcccaccaccgaggtgaccaacacccaggccagcagcgtgaccgcccagcccaagaaggccaacaagatgaagagagtgaccgccaaggccgcccagggcagccagagccccaccggccacgagggcggcaccatccagctgaagagctag

SEQ ID NO: 103700 - DNA, 2046 bp, synthetic construct
  misc_feature 1..2046: note = Description of Artificial Sequence: Synthetic coding sequence
  source 1..2046: mol_type = other DNA
atggacagaagaaacgactacggctacagagtgcccctgttccagggccccctgcccccccccggcagcctgggcctgcccttcccccccgacatccagaccgagaccaccgaggaggacagcgtgctgctgatgcacaccctgctggccgccaccaaggacagcctggccatggacccccccgtggtgaacagacccaagaagagcaagaccaagaaggcccccatcaagaccatcaccaaggccgcccccgccgccccccccgtgcccgccgccaacgagatcgccaccaacaagcccaagatcacctggcaggccctgaacctgcccgtgatcacccagatcagccaggccctgcccaccaccgaggtgaccaacacccaggccagcagcgtgaccgcccagcccaagaaggccaacaagatgaagagagtgaccgccaaggccgcccagggcagccagagccccaccggccacgagggcggcaccatccagctgaagagccccctgcaggtgctgaagctgcccgtgatcagccagaacatccacgcccccatcgccaacgagagcgccagcagccaggccctgatcaccagcatcaagcccaagaaggccagcaaggccaagaaggccgccaacaaggccatcgccagcgccaccgaggtgagcctggccgccaccgccacccacaccgccaccacccagggccagatcaccaacgagaccgccagcatccacaccaccgccgccagcatcagaaccaagaaggccagcaaggccagaaagaccatcgccaaggtgatcaacaccgacaccgagcacatcgaggccctgaacgtgaccgacgccgccaccagacagatcgaggccagcgtggtggccatcagacccaagaagagcaagggcaagaaggccgccagcagaggccccaacagcgtgagcgagatcagcgaggcccccctggccacccagatcgtgaccaaccaggccctggccgccaccctgagagtgaagagaggcagcagagccagaaaggccgccaccaaggccagagccaccgagagccagacccccaacgccgaccagggcgcccaggccaagatcgccagcgcccagaccaacgtgagcgccctggagacccaggtggccgccgccgtgcaggccctggccgacgactacctggcccagctgagcctggagcccaccaccagaaccagaggcaagagaaacagaaagagcaagcacctgaacggcgacgagagaagcggcagcaactacagaagaatcccctggggcagaagacccgccccccccagagacgtggccatcctgcaggagagagccaacaagctggtgaagtacctgctggtgaaggaccagaccaagatccccatcaagagaagcgacatgctgagagacgtgatccaggagtacgacgagtacttccccgagatcatcgagagagccagctacaccctggagaagatgttcagagtgaacctgaaggagatcgacaagcagagcagcctgtacatcctgatcagcacccaggagagcagcgccggcatcctgggcaccaccaaggacacccccaagctgggcctgctgatggtgatcctgagcgtgatcttcatgaacggcaacaaggccagcgaggccgtgatctgggaggtgctgagaaagctgggcctgagacccggcgtgagacacagcctgttcggcgaggtgagaaagctgatcaccgacgagttcgtgaagcagaagtacctggagtacaagagagtgcccaacagcagaccccccgagtacgagttcttctggggcctgagaagctaccacgagaccagcaagatgaaggtgctgaagttcgcctgcagagtgcagaagaaggaccccaaggactgggccgtgcagtacagagaggccgtggagatggaggtgcaggccgccgccgtggccgtggccgaggccgaggccagagccgagtggttccagcaccagcactggctgtactggagaacccagcaccagcacggcctgcagtag

SEQ ID NO: 103701 - DNA, 372 bp, synthetic construct
  misc_feature 1..372: note = Description of Artificial Sequence: Synthetic coding sequence
  source 1..372: mol_type = other DNA
atgcacaccctgctggccgccaccaaggacagcctggccatggacccccccgtggtgaacagacccaagaagagcaagaccaagaaggcccccatcaagaccatcaccaaggccgcccccgccgccccccccgtgcccgccgccaacgagatcgccaccaacaagcccaagatcacctggcaggccctgaacctgcccgtgatcacccagatcagccaggccctgcccaccaccgaggtgaccaacacccaggccagcagcgtgaccgcccagcccaagaaggccaacaagatgaagagagtgaccgccaaggccgcccagggcagccagagccccaccggccacgagggcggcaccatccagctgaagtag

SEQ ID NO: 103702 - DNA, 216 bp, synthetic construct
  misc_feature 1..216: note = Description of Artificial Sequence: Synthetic coding sequence
  source 1..216: mol_type = other DNA
atgcacaccctgctggccgccaccaaggacagcctggccatggacccccccgtggtgaacagacccaagaagagcaagaccaagaaggcccccatcaagaccatcaccaaggccgcccccgccgccccccccgtgcccgccgccaacgagatcgccaccaacaagcccaagatcacctggcaggccctgaacctgcccgtgatcacccagatctag

SEQ ID NO: 103703 - DNA, 195 bp, synthetic construct
  misc_feature 1..195: note = Description of Artificial Sequence: Synthetic coding sequence
  source 1..195: mol_type = other DNA
atgcacaccctgctggccgccaccaaggacagcctggccatggacccccccgtggtgaacagacccaagaagagcaagaccaagaaggcccccatcaagaccatcaccaaggccgcccccgccgccccccccgtgcccgccgccaacgagatcgccaccaacaagcccaagatcacctggcaggccctgaactag

SEQ ID NO: 103704 - DNA, 930 bp, synthetic construct
  misc_feature 1..930: note = Description of Artificial Sequence: Synthetic coding sequence
  source 1..930: mol_type = other DNA
atggacagaagaaacgactacggctacagagtgcccctgttccagagcaagcacctgaacggcgacgagagaagcggcagcaactacagaagaatcccctggggcagaagacccgccccccccagagacgtggccatcctgcaggagagagccaacaagctggtgaagtacctgctggtgaaggaccagaccaagatccccatcaagagaagcgacatgctgagagacgtgatccaggagtacgacgagtacttccccgagatcatcgagagagccagctacaccctggagaagatgttcagagtgaacctgaaggagatcgacaagcagagcagcctgtacatcctgatcagcacccaggagagcagcgccggcatcctgggcaccaccaaggacacccccaagctgggcctgctgatggtgatcctgagcgtgatcttcatgaacggcaacaaggccagcgaggccgtgatctgggaggtgctgagaaagctgggcctgagacccggcgtgagacacagcctgttcggcgaggtgagaaagctgatcaccgacgagttcgtgaagcagaagtacctggagtacaagagagtgcccaacagcagaccccccgagtacgagttcttctggggcctgagaagctaccacgagaccagcaagatgaaggtgctgaagttcgcctgcagagtgcagaagaaggaccccaaggactgggccgtgcagtacagagaggccgtggagatggaggtgcaggccgccgccgtggccgtggccgaggccgaggccagagccgagatctacagcccctgcctgcagatccccctgatcaactgcagcagccccagccacggcgccaaggtgcacccctggaacctgtgcccccacagcagccagggcagctacggccagagcgccgagggcgtgatgtag

SEQ ID NO: 103705 - DNA, 1263 bp, synthetic construct
  misc_feature 1..1263: note = Description of Artificial Sequence: Synthetic coding sequence
  source 1..1263: mol_type = other DNA
atgcccggcggctgcagcagaggccccgccgccggcgacggcagactgagactggccagactggccctggtgctgctgggctgggtgagcagcagcagccccaccagcagcgccagcagcttcagcagcagcgcccccttcctggccagcgccgtgagcgcccagccccccctgcccgaccagtgccccgccctgtgcgagtgcagcgaggccgccagaaccgtgaagtgcgtgaacagaaacctgaccgaggtgcccaccgacctgcccgcctacgtgagaaacctgttcctgaccggcaaccagctggccgtgctgcccgccggcgccttcgccagaagaccccccctggccgagctggccgccctgaacctgagcggcagcagactggacgaggtgagagccggcgccttcgagcacctgcccagcctgagacagctggacctgagccacaaccccctggccgacctgagccccttcgccttcagcggcagcaacgccagcgtgagcgcccccagccccctggtggagctgatcctgaaccacatcgtgccccccgaggacgagagacagaacagaagcttcgagggcatggtggtggccgccctgctggccggcagagccctgcagggcctgagaagactggagctggccagcaaccacttcctgtacctgcccagagacgtgctggcccagctgcccagcctgagacacctggacctgagcaacaacagcctggtgagcctgacctacgtgagcttcagaaacctgacccacctggagagcctgcacctggaggacaacgccctgaaggtgctgcacaacggcaccctggccgagctgcagggcctgccccacatcagagtgttcctggacaacaacccctgggtgtgcgactgccacatggccgacatggtgacctggctgaaggagaccgaggtggtgcagggcaaggacagactgacctgcgcctaccccgagaagatgagaaacagagtgctgctggagctgaacagcgccgacctggactgcgaccccatcctgccccccagcctgcagaccagctacgtgttcctgggcatcgtgctggccctgatcggcgccatcttcctgctggtgctgtacctgaacagaaagggcatcaagaagtggatgcacaacatcagagacgcctgcagagaccacatggagggctaccactacagatacgagatcaacgccgaccccagactgaccaacctgagcagcaacagcgacgtgtag

SEQ ID NO: 103706 - DNA, 1263 bp, synthetic construct; identical to SEQ ID NO: 103705
  misc_feature 1..1263: note = Description of Artificial Sequence: Synthetic coding sequence
  source 1..1263: mol_type = other DNA

SEQ ID NO: 103707 - DNA, 1263 bp, synthetic construct; identical to SEQ ID NO: 103705
  misc_feature 1..1263: note = Description of Artificial Sequence: Synthetic coding sequence
  source 1..1263: mol_type = other DNA

SEQ ID NO: 103708 - DNA, 1056 bp, synthetic construct
  misc_feature 1..1056: note = Description of Artificial Sequence: Synthetic coding sequence
  source 1..1056: mol_type = other DNA
atggccctgcccttccagaaggagctggagaagtacaagaacatcgacgaggacgagctgctgggcaagctgagcgaggaggagctgaagcagctggagaacgtgctggacgacctggaccccgagagcgccatgctgcccgccggcttcagacagaaggaccagacccagaaggccgccaccggccccttcgacagagagcacctgctgatgtacctggagaaggaggccctggagcagaaggacagagaggacttcgtgcccttcaccggcgagaagaagggcagagtgttcatccccaaggagaagcccatcgagaccagaaaggaggagaaggtgaccctggaccccgagctggaggaggccctggccagcgccagcgacaccgagctgtacgacctggccgccgtgctgggcgtgcacaacctgctgaacaaccccaagttcgacgaggagaccgccaacaacaagggcggcaagggccccgtgagaaacgtggtgaagggcgagaaggtgaagcccgtgttcgaggagccccccaaccccaccaacgtggagatcagcctgcagcagatgaaggccaacgaccccagcctgcaggaggtgaacctgaacaacatcaagaacatccccatccccaccctgagagagttcgccaaggccctggagaccaacacccacgtgaagaagttcagcctggccgccaccagaagcaacgaccccgtggccatcgccttcgccgacatgctgaaggtgaacaagaccctgaccagcctgaacatcgagagcaacttcatcaccggcaccggcatcctggccctggtggaggccctgaaggagaacgacaccctgaccgagatcaagatcgacaaccagagacagcagctgggcaccgccgtggagatggagatcgcccagatgctggaggagaacagcagaatcctgaagttcggctaccagttcaccaagcagggccccagaaccagagtggccgccgccatcaccaagaacaacgacctggtgagaaagaagagagtggaggccgacagaagatag

SEQ ID NO: 103709 - DNA, 948 bp, synthetic construct
  misc_feature 1..948: note = Description of Artificial Sequence: Synthetic coding sequence
  source 1..948: mol_type = other DNA
atggccctgcccttccagaaggagctggagaagtacaagaacatcgacgaggacgagctgctgggcaagctgagcgaggaggagctgaagcagctggagaacgtgctggacgacctggaccccgagagcgccatgctgcccgccggcttcagacagaaggaccagacccagaaggccgccaccggccccttcgacagagagcacctgctgatgtacctggagaaggaggccctggagcagaaggacagagaggacttcgtgcccttcaccggcgagaagaagggcagagtgttcatccccaaggagaagcccatcgagaccagaaaggaggagaaggtgaccctggaccccgagctggaggaggccctggccagcgccagcgacaccgagctgtacgacctggccgccgtgctgggcgtgcacaacctgctgaacaaccccaagttcgacgaggagaccgccaacaacaagggcggcaagggccccgtgagaaacgtggtgaagggcgagaaggtgaagcccgtgttcgaggagccccccaaccccaccaacgtggagatcagcctgcagcagatgaaggccaacgaccccagcctgcaggaggtgaacctgaacaacatcaaggccttcgccgacatgctgaaggtgaacaagaccctgaccagcctgaacatcgagagcaacttcatcaccggcaccggcatcctggccctggtggaggccctgaaggagaacgacaccctgaccgagatcaagatcgacaaccagagacagcagctgggcaccgccgtggagatggagatcgcccagatgctggaggagaacagcagaatcctgaagttcggctaccagttcaccaagcagggccccagaaccagagtggccgccgccatcaccaagaacaacgacctggtgagaaagaagagagtggaggccgacagaagatag

SEQ ID NO: 103710 - DNA, 1059 bp, synthetic construct
  misc_feature 1..1059: note = Description of Artificial Sequence: Synthetic coding sequence
  source 1..1059: mol_type = other DNA
atggccctgcccttcagaaaggacctggagaagtacaaggacctggacgaggacgagctgctgggcaacctgagcgagaccgagctgaagcagctggagaccgtgctggacgacctggaccccgagaacgccctgctgcccgccggcttcagacagaagaaccagaccagcaagagcaccaccggccccttcgacagagagcacctgctgagctacctggagaaggaggccctggagcacaaggacagagaggactacgtgccctacaccggcgagaagaagggcaagatcttcatccccaagcagaagcccgtgcagaccttcaccgaggagaaggtgagcctggaccccgagctggaggaggccctgaccagcgccagcgacaccgagctgtgcgacctggccgccatcctgggcatgcacaacctgatcaccaacaccaagttctgcaacatcatgggcagcagcaacggcgtggaccaggagcacttcagcaacgtggtgaagggcgagaagatcctgcccgtgttcgacgagccccccaaccccaccaacgtggaggagagcctgaagagaaccaaggagaacgacgcccacctggtggaggtgaacctgaacaacatcaagaacatccccatccccaccctgaaggacttcgccaaggccctggagaccaacacccacgtgaagtgcttcagcctggccgccaccagaagcaacgaccccgtggccaccgccttcgccgagatgctgaaggtgaacaagaccctgaagagcctgaacgtggagagcaacttcatcaccggcgtgggcatcctggccctgatcgacgccctgagagacaacgagaccctggccgagctgaagatcgacaaccagagacagcagctgggcaccgccgtggagctggagatggccaagatgctggaggagaacaccaacatcctgaagttcggctaccagttcacccagcagggccccagaaccagagccgccaacgccatcaccaagaacaacgacctggtgagaaagagaagagtggagggcgaccaccagtag

SEQ ID NO: 103711 - DNA, 1059 bp, synthetic construct; identical to SEQ ID NO: 103710
  misc_feature 1..1059: note = Description of Artificial Sequence: Synthetic coding sequence
  source 1..1059: mol_type = other DNA

SEQ ID NO: 103712 - DNA, 102 bp, synthetic construct
  misc_feature 1..102: note = Description of Artificial Sequence: Synthetic coding sequence
  source 1..102: mol_type = other DNA
atggccctgcccttcagaaaggacctggagaagtacaaggacctggacgaggacgagctgctgggcaacctgagcgagaccgagctgaagcagctggagtag

SEQ ID NO: 103713 - DNA, 1038 bp, synthetic construct
  misc_feature 1..1038: note = Description of Artificial Sequence: Synthetic coding sequence
  source 1..1038: mol_type = other DNA
atgagcagctaccagaaggagctggagaagtacagagacatcgacgaggacgagatcctgagaaccctgagccccgaggagctggagcagctggactgcgagctgcaggagatggaccccgagaacatgctgctgcccgccggcctgagacagagagaccagaccaagaagagccccaccggccccctggacagagaggccctgctgcagtacctggagcagcaggccctggaggtgaaggagagagacgacctggtgcccttcaccggcgagaagaagggcaagccctacatccagcccaagagagagatccccgccgaggagcagatcaccctggagcccgagctggaggaggccctggcccacgccaccgacgccgagatgtgcgacatcgccgccatcctggacatgtacaccctgatgagcaacaagcagtactacgacgccctgtgcagcggcgagatctgcaacaccgagggcatcagcagcgtggtgcagcccgacaagtacaagcccgtgcccgacgagccccccaaccccaccaacatcgaggagatcctgaagagagtgagaagcaacgacaaggagctggaggaggtgaacctgaacaacatccaggacatccccatccccatgctgagcgagctgtgcgaggccatgaaggccaacacctacgtgagaagcttcagcctggtggccaccagaagcggcgaccccatcgccaacgccgtggccgacatgctgagagagaacagaagcctgcagagcctgaacatcgagagcaacttcatcagcagcaccggcctgatggccgtgctgaaggccgtgagagagaacgccaccctgaccgagctgagagtggacaaccagagacagtggcccggcgacgccgtggagatggagatggccaccgtgctggagcagtgccccagcatcgtgagattcggctaccacttcacccagcagggccccagagccagagccgcccaggccatgaccagaaacaacgagctgagaagacagcagaagaagagatag

SEQ ID NO: 103714 - DNA, 831 bp, synthetic construct
  misc_feature 1..831: note = Description of Artificial Sequence: Synthetic coding sequence
  source 1..831: mol_type = other DNA
atgagcagctaccagaaggagctggagaagtacagagacatcgacgaggacgagatcctgagaaccctgagccccgaggagctggagcagctggactgcgagctgcaggagatggaccccgagaacatgctgctgcccgccggcctgagacagagagaccagaccaagaagagccccaccggccccctggacagagaggccctgctgcagtacctggagcagcaggccctggaggtgaaggagagagacgacctggtgcccttcaccggcgagaagaagggcgtggtgcagcccgacaagtacaagcccgtgcccgacgagccccccaaccccaccaacatcgaggagatcctgaagagagtgagaagcaacgacaaggagctggaggaggtgaacctgaacaacatccaggacatccccatccccatgctgagcgagctgtgcgaggccatgaaggccaacacctacgtgagaagcttcagcctggtggccaccagaagcggcgaccccatcgccaacgccgtggccgacatgctgagagagaacagaagcctgcagagcctgaacatcgagagcaacttcatcagcagcaccggcctgatggccgtgctgaaggccgtgagagagaacgccaccctgaccgagctgagagtggacaaccagagacagtggcccggcgacgccgtggagatggagatggccaccgtgctggagcagtgccccagcatcgtgagattcggctaccacttcacccagcagggccccagagccagagccgcccaggccatgaccagaaacaacgagctgagaagacagcagaagaagagatag

SEQ ID NO: 103715 - DNA, 429 bp, synthetic construct
  misc_feature 1..429: note = Description of Artificial Sequence: Synthetic coding sequence
  source 1..429: mol_type = other DNA
atgagcagctaccagaaggagctggagaagtacagagacatcgacgaggacgagatcctgagaaccctgagccccgaggagctggagcagctggactgcgagctgcaggagatggaccccgagaacatgctgctgcccgccggcctgagacagagagaccagaccaagaagagccccaccggccccctggacagagaggccctgctgcagtacctggagcagcaggccctggaggtgaaggagagagacgacctggtgcccttcaccggcgagaagaagggcaagccctacatccagcccaagagagagatccccgccgaggagcagatcaccctggagcccgagctggaggaggccctggcccacgccaccgacgccgagatgtgcgacatcgccgccatcctggacatgtacaccctgatgagctag

SEQ ID NO: 103716 - DNA, 855 bp, synthetic construct
  misc_feature 1..855: note = Description of Artificial Sequence: Synthetic coding sequence
  source 1..855: mol_type = other DNA
atggacgccatcaagaagaagatgcagatgctgaagctggacaaggagaacgccctggacagagccgagcaggccgaggccgacaagaaggccgccgaggacagaagcaagcagctggaggaggacatcgccgccaaggagaagctgctgagagtgagcgaggacgagagagacagagtgctggaggagctgcacaaggccgaggacagcctgctggccgccgaggaggccgccgccaaggccgaggccgacgtggccagcctgaacagaagaatccagctggtggaggaggagctggacagagcccaggagagactggccaccgccctgcagaagctggaggaggccgagaaggccgccgacgagagcgagagaggcatgaaggtgatcgagagcagagcccagaaggacgaggagaagatggagatccaggagatccagctgaaggaggccaagcacatcgccgaggacgccgacagaaagtacgaggaggtggccagaaagctggtgatcatcgagagcgacctggagagagccgaggagagagccgagctgagcgagggcaagtgcgccgagctggaggaggagctgaagaccgtgaccaacaacctgaagagcctggaggcccaggccgagaagtacagccagaaggaggacagatacgaggaggagatcaaggtgctgagcgacaagctgaaggaggccgagaccagagccgagttcgccgagagaagcgtgaccaagctggagaagagcatcgacgacctggaggagaaggtggcccacgccaaggaggagaacctgagcatgcaccagatgctggaccagaccctgctggagctgaacaacatgtag

SEQ ID NO: 103717 - DNA, 855 bp, synthetic construct
  misc_feature 1..855: note = Description of Artificial Sequence: Synthetic coding sequence
  source 1..855: mol_type = other DNA
atggacgccatcaagaagaagatgcagatgctgaagctggacaaggagaacgccctggacagagccgagcaggccgaggccgacaagaaggccgccgaggacagaagcaagcagctggaggacgagctggtgagcctgcagaagaagctgaagggcaccgaggacgagctggacaagtacagcgaggccctgaaggacgcccaggagaagctggagctggccgagaagaaggccaccgacgccgaggccgacgtggccagcctgaacagaagaatccagctggtggaggaggagctggacagagcccaggagagactggccaccgccctgcagaagctggaggaggccgagaaggccgccgacgagagcgagagaggcatgaaggtgatcgagagcagagcccagaaggacgaggagaagatggagatccaggagatccagctgaaggaggccaagcacatcgccgaggacgccgacagaaagtacgaggaggtggccagaaagctggtgatcatcgagagcgacctggagagagccgaggagagagccgagctgagcgagggccaggtgagacagctggaggagcagctgagaatcatggaccagaccctgaaggccctgatggccgccgaggacaagtacagccagaaggaggacagatacgaggaggagatcaaggtgctgagcgacaagctgaaggaggccgagaccagagccgagttcgccgagagaagcgtgaccaagctggagaagagcatcgacgacctggaggacgagctgtacgcccagaagctgaagtacaaggccatcagcgaggagctggaccacgccctgaacgacatgaccagcatgtag

SEQ ID NO: 103718 - DNA, 738 bp, synthetic construct
  misc_feature 1..738: note = Description of Artificial Sequence: Synthetic coding sequence
  source 1..738: mol_type = other DNA
atggccggcagcagcagcctggaggccgtgagaagaaagatcagaagcctgcaggagcaggccgacgccgccgaggagagagccggcaccctgcagagagagctggaccacgagagaaagctgagagagaccgccgaggccgacgtggccagcctgaacagaagaatccagctggtggaggaggagctggacagagcccaggagagactggccaccgccctgcagaagctggaggaggccgagaaggccgccgacgagagcgagagaggcatgaaggtgatcgagagcagagcccagaaggacgaggagaagatggagatccaggagatccagctgaaggaggccaagcacatcgccgaggacgccgacagaaagtacgaggaggtggccagaaagctggtgatcatcgagagcgacctggagagagccgaggagagagccgagctgagcgagggcaagtgcgccgagctggaggaggagctgaagaccgtgaccaacaacctgaagagcctggaggcccaggccgagaagtacagccagaaggaggacagatacgaggaggagatcaaggtgctgagcgacaagctgaaggaggccgagaccagagccgagttcgccgagagaagcgtgaccaagctggagaagagcatcgacgacctggaggaccagctgtaccagcagctggagcagaacagaagactgaccaacgagctgaagctggccctgaacgaggactag

SEQ ID NO: 103719 - DNA, 981 bp, synthetic construct
  misc_feature 1..981: note = Description of Artificial Sequence: Synthetic coding sequence
  source 1..981: mol_type = other DNA
atggacgccatcaagaagaagatgcagatgctgaagctggacaaggagaacgccctggacagagccgagcaggccgaggccgacaagaaggccgccgaggacagaagcaagcagctggaggaggacatcgccgccaaggagaagctgctgagagtgagcgaggacgagagagacagagtgctggaggagctgcacaaggccgaggacagcctgctggccgccgaggaggccgccgccaagctggaggacgagctggtgagcctgcagaagaagctgaagggcaccgaggacgagctggacaagtacagcgaggccctgaaggacgcccaggagaagctggagctggccgagaagaaggccaccgacgccgaggccgacgtggccagcctgaacagaagaatccagctggtggaggaggagctggacagagcccaggagagactggccaccgccctgcagaagctggaggaggccgagaaggccgccgacgagagcgagagaggcatgaaggtgatcgagagcagagcccagaaggacgaggagaagatggagatccaggagatccagctgaaggaggccaagcacatcgccgaggacgccgacagaaagtacgaggaggtggccagaaagctggtgatcatcgagagcgacctggagagagccgaggagagagccgagctgagcgagggcaagtgcgccgagctggaggaggagctgaagaccgtgaccaacaacctgaagagcctggaggcccaggccgagaagtacagccagaaggaggacagatacgaggaggagatcaaggtgctgagcgacaagctgaaggaggccgagaccagagccgagttcgccgagagaagcgtgaccaagctggagaagagcatcgacgacctggaggagaaggtggcccacgccaaggaggagaacctgagcatgcaccagatgctggaccagaccctgctggagctgaacaacatgtag

SEQ ID NO: 103720 - DNA, 855 bp, synthetic construct
  misc_feature 1..855: note = Description of Artificial Sequence: Synthetic coding sequence
  source 1..855: mol_type = other DNA
atggacgccatcaagaagaagatgcagatgctgaagctggacaaggagaacgccctggacagagccgagcaggccgaggccgacaagaaggccgccgaggacagaagcaagcagctggaggacgagctggtgagcctgcagaagaagctgaagggcaccgaggacgagctggacaagtacagcgaggccctgaaggacgcccaggagaagctggagctggccgagaagaaggccaccgacgccgaggccgacgtggccagcctgaacagaagaatccagctggtggaggaggagctggacagagcccaggagagactggccaccgccctgcagaagctggaggaggccgagaaggccgccgacgagagcgagagaggcatgaaggtgatcgagagcagagcccagaaggacgaggagaagatggagatccaggagatccagctgaaggaggccaagcacatcgccgaggacgccgacagaaagtacgaggaggtggccagaaagctggtgatcatcgagagcgacctggagagagccgaggagagagccgagctgagcgagggccaggtgagacagctggaggagcagctgagaatcatggaccagaccctgaaggccctgatggccgccgaggacaagtacagccagaaggaggacagatacgaggaggagatcaaggtgctgagcgacaagctgaaggaggccgagaccagagccgagttcgccgagagaagcgtgaccaagctggagaagagcatcgacgacctggaggagaaggtggcccacgccaaggaggagaacctgagcatgcaccagatgctggaccagaccctgctggagctgaacaacatgtag

SEQ ID NO: 103721 - DNA, 855 bp, synthetic construct
  misc_feature 1..855: note = Description of Artificial Sequence: Synthetic coding sequence
  source 1..855: mol_type = other DNA
atggacgccatcaagaagaagatgcagatgctgaagctggacaaggagaacgccctggacagagccgagcaggccgaggccgacaagaaggccgccgaggacagaagcaagcagctggaggacgagctggtgagcctgcagaagaagctgaagggcaccgaggacgagctggacaagtacagcgaggccctgaaggacgcccaggagaagctggagctggccgagaagaaggccaccgacgccgaggccgacgtggccagcctgaacagaagaatccagctggtggaggaggagctggacagagcccaggagagactggccaccgccctgcagaagctggaggaggccgagaaggccgccgacgagagcgagagaggcatgaaggtgatcgagagcagagcccagaaggacgaggagaagatggagatccaggagatccagctgaaggaggccaagcacatcgccgaggacgccgacagaaagtacgaggaggtggccagaaagctggtgatcatcgagagcgacctggagagagccgaggagagagccgagctgagcgagggcaagtgcgccgagctggaggaggagctgaagaccgtgaccaacaacctgaagagcctggaggcccaggccgagaagtacagccagaaggaggacagatacgaggaggagatcaaggtgctgagcgacaagctgaaggaggccgagaccagagccgagttcgccgagagaagcgtgaccaagctggagaagagcatcgacgacctggaggacgagctgtacgcccagaagctgaagtacaaggccatcagcgaggagctggaccacgccctgaacgacatgaccagcatctag

SEQ ID NO: 103722 - DNA, 855 bp, synthetic construct
  misc_feature 1..855: note = Description of Artificial Sequence: Synthetic coding sequence
  source 1..855: mol_type = other DNA
atggacgccatcaagaagaagatgcagatgctgaagctggacaaggagaacgccctggacagagccgagcaggccgaggccgacaagaaggccgccgaggacagaagcaagcagctggaggaggacatcgccgccaaggagaagctgctgagagtgagcgaggacgagagagacagagtgctggaggagctgcacaaggccgaggacagcctgctggccgccgaggaggccgccgccaaggccgaggccgacgtggccagcctgaacagaagaatccagctggtggaggaggagctggacagagcccaggagagactggccaccgccctgcagaagctggaggaggccgagaaggccgccgacgagagcgagagaggcatgaaggtgatcgagagcagagcccagaaggacgaggagaagatggagatccaggagatccagctgaaggaggccaagcacatcgccgaggacgccgacagaaagtacgaggaggtggccagaaagctggtgatcatcgagagcgacctggagagagccgaggagagagccgagctgagcgagggccaggtgagacagctggaggagcagctgagaatcatggaccagaccctgaaggccctgatggccgccgaggacaagtacagccagaaggaggacagatacgaggaggagatcaaggtgctgagcgacaagctgaaggaggccgagaccagagccgagttcgccgagagaagcgtgaccaagctggagaagagcatcgacgacctggaggagaaggtggcccacgccaaggaggagaacctgagcatgcaccagatgctggaccagaccctgctggagctgaacaacatgtag

SEQ ID NO: 103723 - DNA, 855 bp, synthetic construct
  misc_feature 1..855: note = Description of Artificial Sequence: Synthetic coding sequence
  source 1..855: mol_type = other DNA
atggacgccatcaagaagaagatgcagatgctgaagctggacaaggagaacgccctggacagagccgagcaggccgaggccgacaagaaggccgccgaggacagaagcaagcagctggaggacgagctggtgagcctgcagaagaagctgaagggcaccgaggacgagctggacaagtacagcgaggccctgaaggacgcccaggagaagctggagctggccgagaagaaggccaccgacgccgaggccgacgtggccagcctgaacagaagaatccagctggtggaggaggagctggacagagcccaggagagactggccaccgccctgcagaagctggaggaggccgagaaggccgccgacgagagcgagagaggcatgaaggtgatcgagagcagagcccagaaggacgaggagaagatggagatccaggagatccagctgaaggaggccaagcacatcgccgaggacgccgacagaaagtacgaggaggtggccagaaagctggtgatcatcgagagcgacctggagagagccgaggagagagccgagctgagcgagggcaagtgcgccgagctggaggaggagctgaagaccgtgaccaacaacctgaagagcctggaggcccaggccgagaagtacagccagaaggaggacagatacgaggaggagatcaaggtgctgagcgacaagctgaaggaggccgagaccagagccgagttcgccgagagaagcgtgaccaagctggagaagagcatcgacgacctggaggagaaggtggcccacgccaaggaggagaacctgagcatgcaccagatgctggaccagaccctgctggagctgaacaacatgtag

SEQ ID NO: 103724 - DNA, 798 bp, synthetic construct
  misc_feature 1..798: note = Description of Artificial Sequence: Synthetic coding sequence
  source 1..798: mol_type = other DNA
tgaagagccgagcaggccgaggccgacaagaaggccgccgaggacagaagcaagcagctggaggacgagctggtgagcctgcagaagaagctgaagggcaccgaggacgagctggacaagtacagcgaggccctgaaggacgcccaggagaagctggagctggccgagaagaaggccaccgacgccgaggccgacgtggccagcctgaacagaagaatccagctggtggaggaggagctggacagagcccaggagagactggccaccgccctgcagaagctggaggaggccgagaaggccgccgacgagagcgagagaggcatgaaggtgatcgagagcagagcccagaaggacgaggagaagatggagatccaggagatccagctgaaggaggccaagcacatcgccgaggacgccgacagaaagtacgaggaggtggccagaaagctggtgatcatcgagagcgacctggagagagccgaggagagagccgagctgagcgagggcaagtgcgccgagctggaggaggagctgaagaccgtgaccaacaacctgaagagcctggaggcccaggccgagaagtacagccagaaggaggacagatacgaggaggagatcaaggtgctgagcgacaagctgaaggaggccgagaccagagccgagttcgccgagagaagcgtgaccaagctggagaagagcatcgacgacctggaggacgagctgtacgcccagaagctgaagtacaaggccatcagcgaggagctggaccacgccctgaacgacatgaccagcatgtag

SEQ ID NO: 103725 - DNA, 855 bp, synthetic construct
  misc_feature 1..855: note = Description of Artificial Sequence: Synthetic coding sequence
  source 1..855: mol_type = other DNA
atggacgccatcaagaagaagatgcagatgctgaagctggacaaggagaacgccatcgacagagccgagcaggccgaggccgacaagaagcaggccgaggacagatgcaagcagctggaggaggagcagcaggccctgcagaagaagctgaagggcaccgaggacgaggtggagaagtacagcgagagcgtgaaggaggcccaggagaagctggagcaggccgagaagaaggccaccgacgccgaggccgacgtggccagcctgaacagaagaatccagctggtggaggaggagctggacagagcccaggagagactggccaccgccctgcagaagctggaggaggccgagaaggccgccgacgagagcgagagaggcatgaaggtgatcgagaacagagccatgaaggacgaggagaagatggagctgcaggagatgcagctgaaggaggccaagcacatcgccgaggacagcgacagaaagtacgaggaggtggccagaaagctggtgatcctggagggcgagctggagagaagcgaggagagagccgaggtggccgagagcaagtgcggcgacctggaggaggagctgaagatcgtgaccaacaacctgaagagcctggaggcccaggccgacaagtacagcaccaaggaggacaagtacgaggaggagatcaagctgctggaggagaagctgaaggaggccgagaccagagccgagttcgccgagagaagcgtggccaagctggagaagaccatcgacgacctggaggagaccctggccagcgccaaggaggagaacgtggagatccaccagaccctggaccagaccctgctggagctgaacaacctgtag

SEQ ID NO: 103726 - DNA, 855 bp, synthetic construct
  misc_feature 1..855: note = Description of Artificial Sequence: Synthetic coding sequence
  source 1..855: mol_type = other DNA
atggacgccatcaagaagaagatgcagatgctgaagctggacaaggagaacgccatcgacagagccgagcaggccgaggccgacaagaagcaggccgaggacagatgcaagcagctggaggaggagcagcaggccctgcagaagaagctgaagggcaccgaggacgaggtggagaagtacagcgagagcgtgaaggaggcccaggagaagctggagcaggccgagaagaaggccaccgacgccgaggccgacgtggccagcctgaacagaagaatccagctggtggaggaggagctggacagagcccaggagagactggccaccgccctgcagaagctggaggaggccgagaaggccgccgacgagagcgagagaggcatgaaggtgatcgagaacagagccatgaaggacgaggagaagatggagctgcaggagatgcagctgaaggaggccaagcacatcgccgaggacagcgacagaaagtacgaggaggtggccagaaagctggtgatcctggagggcgagctggagagaagcgaggagagagccgaggtggccgagagcaagtgcggcgacctggaggaggagctgaagatcgtgaccaacaacctgaagagcctggaggcccaggccgacaagtacagcaccaaggaggacaagtacgaggaggagatcaagctgctggaggagaagctgaaggaggccgagaccagagccgagttcgccgagagaagcgtggccaagctggagaagaccatcgacgacctggaggacgaggtgtacgcccagaagatgaagtacaaggccatcagcgaggagctggacaacgccctgaacgacatcaccagcctgtag

SEQ ID NO: 103727 - DNA, 855 bp, synthetic construct
  misc_feature 1..855: note = Description of Artificial Sequence: Synthetic coding sequence
  source 1..855: mol_type = other DNA
atggacgccatcaagaagaagatgcagatgctgaagctggacaaggagaacgccatcgacagagccgagcaggccgaggccgacaagaagcaggccgaggacagatgcaagcagctggaggaggagcagcaggccctgcagaagaagctgaagggcaccgaggacgaggtggagaagtacagcgagagcgtgaaggaggcccaggagaagctggagcaggccgagaagaaggccaccgacgccgaggccgacgtggccagcctgaacagaagaatccagctggtggaggaggagctggacagagcccaggagagactggccaccgccctgcagaagctggaggaggccgagaaggccgccgacgagagcgagagaggcatgaaggtgatcgagaacagagccatgaaggacgaggagaagatggagctgcaggagatgcagctgaaggaggccaagcacatcgccgaggacagcgacagaaagtacgaggaggtggccagaaagctggtgatcctggagggcgagctggagagaagcgaggagagagccgaggtggccgagagcagagccagacagctggaggaggagctgagaaccatggaccaggccctgaagagcctgatggccagcgaggaggagtacagcaccaaggaggacaagtacgaggaggagatcaagctgctggaggagaagctgaaggaggccgagaccagagccgagttcgccgagagaagcgtggccaagctggagaagaccatcgacgacctggaggagaccctggccagcgccaaggaggagaacgtggagatccaccagaccctggaccagaccctgctggagctgaacaacctgtag

SEQ ID NO: 103728 - DNA, 969 bp, synthetic construct
  misc_feature 1..969: note = Description of Artificial Sequence: Synthetic coding sequence
  source 1..969: mol_type = other DNA
atggacgccatcaagaagaagatgcagatgctgaagctggacaaggagaacgccatcgacagagccgagcaggccgaggccgacaagaagcaggccgaggacagatgcaagcagctggaggaggagcagcaggccctgcagaagaagctgaagggcaccgaggacgaggtggagaagtacagcgagagcgtgaaggaggcccaggagaagctggagcaggccgagaagaaggccaccgacgccgaggccgacgtggccagcctgaacagaagaatccagctggtggaggaggagctggacagagcccaggagagactggccaccgccctgcagaagctggaggaggccgagaaggccgccgacgagagcgagagaggcatgaaggtgatcgagaacagagccatgaaggacgaggagaagatggagctgcaggagatgcagctgaaggaggccaagcacatcgccgaggacagcgacagaaagtacgaggaggtggccagaaagctggtgatcctggagggcgagctggagagaagcgaggagagagccgaggtggccgagagcaagtgcggcgacctggaggaggagctgaagatcgtgaccaacaacctgaagagcctggaggcccaggccgacaagtacagcaccaaggaggacaagtacgaggaggagatcaagctgctggaggagaagctgaaggaggccgagaccagagccgagttcgccgagagaagcgtggccaagctggagaagaccatcgacgacctggaggagagcaccagcatcgccaccaccgagcactggttcacccccgacaccctggccctgaccgacacccccagcccctgcaccgagcccacccacaagaccccctggcccaccctgaagcccctgtgcaccggcaccccctggctgagcctgagcgacagccccctgcacgtgggcacctgcggccccatcaagccctag

SEQ ID NO: 103729 - DNA, 858 bp, synthetic construct
  misc_feature 1..858: note = Description of Artificial Sequence: Synthetic coding sequence
  source 1..858: mol_type = other DNA
atgatggaggccatcaagaagaagatgcagatgctgaagctggacaaggagaacgccctggacagagccgagcaggccgaggccgagcagaagcaggccgaggagagaagcaagcagctggaggacgagctggccgccatgcagaagaagctgaagggcaccgaggacgagctggacaagtacagcgaggccctgaaggacgcccaggagaagctggagctggccgagaagaaggccgccgacgccgaggccgaggtggccagcctgaacagaagaatccagctggtggaggaggagctggacagagcccaggagagactggccaccgccctgcagaagctggaggaggccgagaaggccgccgacgagagcgagagaggcatgaaggtgatcgagaacagagccctgaaggacgaggagaagatggagctgcaggagatccagctgaaggaggccaagcacatcgccgaggaggccgacagaaagtacgaggaggtggccagaaagctggtgatcatcgagggcgacctggagagaaccgaggagagagccgagctggccgagagcagatgcagagagatggacgagcagatcagactgatggaccagaacctgaagtgcctgagcgccgccgaggagaagtacagccagaaggaggacaagtacgaggaggagatcaagatcctgaccgacaagctgaaggaggccgagaccagagccgagttcgccgagagaagcgtggccaagctggagaagaccatcgacgacctggaggacaagctgaagtgcaccaaggaggagcacctgtgcacccagagaatgctggaccagaccctgctggacctgaacgagatgtag

SEQ ID NO: 103730 - DNA, 744 bp, synthetic construct
  misc_feature 1..744: note = Description of Artificial Sequence: Synthetic coding sequence
  source 1..744: mol_type = other DNA
atggccggcatcaccaccatcgaggccgtgaagagaaagatccaggtgctgcagcagcaggccgacgacgccgaggagagagccgagagactgcagagagaggtggagggcgagagaagagccagagagcaggccgaggccgaggtggccagcctgaacagaagaatccagctggtggaggaggagctggacagagcccaggagagactggccaccgccctgcagaagctggaggaggccgagaaggccgccgacgagagcgagagaggcatgaaggtgatcgagaacagagccctgaaggacgaggagaagatggagctgcaggagatccagctgaaggaggccaagcacatcgccgaggaggccgacagaaagtacgaggaggtggccagaaagctggtgatcatcgagggcgacctggagagaaccgaggagagagccgagctggccgagagcaagtgcagcgagctggaggaggagctgaagaacgtgaccaacaacctgaagagcctggaggcccaggccgagaagtacagccagaaggaggacaagtacgaggaggagatcaagatcctgaccgacaagctgaaggaggccgagaccagagccgagttcgccgagagaagcgtggccaagctggagaagaccatcgacgacctggaggagagactgtacagccagctggagagaaacagactgctgagcaacgagctgaagctgaccctgcacgacctgtgcgactag

SEQ ID NO: 103731 - DNA, 747 bp, synthetic construct
  misc_feature 1..747: note = Description of Artificial Sequence: Synthetic coding sequence
  source 1..747: mol_type = other DNA
atggccggcatcaccaccatcgaggccgtgaagagaaagatccaggtgctgcagcagcaggccgacgacgccgaggagagagccgagagactgcagagagaggtggagggcgagagaagagccagagagcaggccgaggccgaggtggccagcctgaacagaagaatccagctggtggaggaggagctggacagagcccaggagagactggccaccgccctgcagaagctggaggaggccgagaaggccgccgacgagagcgagagaggcatgaaggtgatcgagaacagagccctgaaggacgaggagaagatggagctgcaggagatccagctgaaggaggccaagcacatcgccgaggaggccgacagaaagtacgaggaggtggccagaaagctggtgatcatcgagggcgacctggagagaaccgaggagagagccgagctggccgagagcagatgcagagagatggacgagcagatcagactgatggaccagaacctgaagtgcctgagcgccgccgaggagaagtacagccagaaggaggacaagtacgaggaggagatcaagatcctgaccgacaagctgaaggaggccgagaccagagccgagttcgccgagagaagcgtggccaagctggagaagaccatcgacgacctggaggacgagctgtacgcccagaagctgaagtacaaggccatcagcgaggagctggaccacgccctgaacgacatgaccagcatctag

SEQ ID NO: 103732 - DNA, 747 bp, synthetic construct
  misc_feature 1..747: note = Description of Artificial Sequence: Synthetic coding sequence
  source 1..747: mol_type = other DNA
atggccggcatcaccaccatcgaggccgtgaagagaaagatccaggtgctgcagcagcaggccgacgacgccgaggagagagccgagagactgcagagagaggtggagggcgagagaagagccagagagcaggccgaggccgaggtggccagcctgaacagaagaatccagctggtggaggaggagctggacagagcccaggagagactggccaccgccctgcagaagctggaggaggccgagaaggccgccgacgagagcgagagaggcatgaaggtgatcgagaacagagccctgaaggacgaggagaagatggagctgcaggagatccagctgaaggaggccaagcacatcgccgaggaggccgacagaaagtacgaggaggtggccagaaagctggtgatcatcgagggcgacctggagagaaccgaggagagagccgagctggccgagagcaagtgcagcgagctggaggaggagctgaagaacgtgaccaacaacctgaagagcctggaggcccaggccgagaagtacagccagaaggaggacaagtacgaggaggagatcaagatcctgaccgacaagctgaaggaggccgagaccagagccgagttcgccgagagaagcgtggccaagctggagaagaccatcgacgacctggaggacaagctgaagtgcaccaaggaggagcacctgtgcacccagagaatgctggaccagaccctgctggacctgaacgagatgtag

SEQ ID NO: 103733 - DNA, 675 bp, synthetic construct
  misc_feature 1..675: note = Description of Artificial Sequence: Synthetic coding sequence
  source 1..675: mol_type = other DNA
atggccggcatcaccaccatcgaggccgtgaagagaaagatccaggtgctgcagcagcaggccgacgacgccgaggagagagccgagagactgcagagagaggtggagggcgagagaagagccagagagcagagactggccaccgccctgcagaagctggaggaggccgagaaggccgccgacgagagcgagagaggcatgaaggtgatcgagaacagagccctgaaggacgaggagaagatggagctgcaggagatccagctgaaggaggccaagcacatcgccgaggaggccgacagaaagtacgaggaggtggccagaaagctggtgatcatcgagggcgacctggagagaaccgaggagagagccgagctggccgagagcagatgcagagagatggacgagcagatcagactgatggaccagaacctgaagtgcctgagcgccgccgaggagaagtacagccagaaggaggacaagtacgaggaggagatcaagatcctgaccgacaagctgaaggaggccgagaccagagccgagttcgccgagagaagcgtggccaagctggagaagaccatcgacgacctggaggacaagctgaagtgcaccaaggaggagcacctgtgcacccagagaatgctggaccagaccctgctggacctgaacgagatgtag

SEQ ID NO: 103734 - DNA, 858 bp, synthetic construct
  misc_feature 1..858: note = Description of Artificial Sequence: Synthetic coding sequence
  source 1..858: mol_type = other DNA
atgatggaggccatcaagaagaagatgcagatgctgaagctggacaaggagaacgccctggacagagccgagcaggccgaggccgagcagaagcaggccgaggagagaagcaagcagctggaggacgagctggccgccatgcagaagaagctgaagggcaccgaggacgagctggacaagtacagcgaggccctgaaggacgcccaggagaagctggagctggccgagaagaaggccgccgacgccgaggccgaggtggccagcctgaacagaagaatccagctggtggaggaggagctggacagagcccaggagagactggccaccgccctgcagaagctggaggaggccgagaaggccgccgacgagagcgagagaggcatgaaggtgatcgagaacagagccctgaaggacgaggagaagatggagctgcaggagatccagctgaaggaggccaagcacatcgccgaggaggccgacagaaagtacgaggaggtggccagaaagctggtgatcatcgagggcgacctggagagaaccgaggagagagccgagctggccgagagcaagtgcagcgagctggaggaggagctgaagaacgtgaccaacaacctgaagagcctggaggcccaggccgagaagtacagccagaaggaggacaagtacgaggaggagatcaagatcctgaccgacaagctgaaggaggccgagaccagagccgagttcgccgagagaagcgtggccaagctggagaagaccatcgacgacctggaggacgagctgtacgcccagaagctgaagtacaaggccatcagcgaggagctggaccacgccctgaacgacatgaccagcatctag

SEQ ID NO: 103735 - DNA, 744 bp, synthetic construct
  misc_feature 1..744: note = Description of Artificial Sequence: Synthetic coding sequence
  source 1..744: mol_type = other DNA
atggccggcatcaccaccatcgaggccgtgaagagaaagatccaggtgctgcagcagcaggccgacgacgccgaggagagagccgagagactgcagagagaggtggagggcgagagaagagccagagagcaggccgaggccgaggtggccagcctgaacagaagaatccagctggtggaggaggagctggacagagcccaggagagactggccaccgccctgcagaagctggaggaggccgagaaggccgccgacgagagcgagagaggcatgaaggtgatcgagaacagagccctgaaggacgaggagaagatggagctgcaggagatccagctgaaggaggccaagcacatcgccgaggaggccgacagaaagtacgaggaggtggccagaaagctggtgatcatcgagggcgacctggagagaaccgaggagagagccgagctggccgagagcagatgcagagagatggacgagcagatcagactgatggaccagaacctgaagtgcctgagcgccgccgaggagaagtacagccagaaggaggacaagtacgaggaggagatcaagatcctgaccgacaagctgaaggaggccgagaccagagccgagttcgccgagagaagcgtggccaagctggagaagaccatcgacgacctggaggagagactgtacagccagctggagagaaacagactgctgagcaacgagctgaagctgaccctgcacgacctgtgcgactag

SEQ ID NO: 103736 - DNA, 747 bp, synthetic construct
  misc_feature 1..747: note = Description of Artificial Sequence: Synthetic coding sequence
  source 1..747: mol_type = other DNA
atggccggcatcaccaccatcgaggccgtgaagagaaagatccaggtgctgcagcagcaggccgacgacgccgaggagagagccgagagactgcagagagaggtggagggcgagagaagagccagagagcaggccgaggccgaggtggccagcctgaacagaagaatccagctggtggaggaggagctggacagagcccaggagagactggccaccgccctgcagaagctggaggaggccgagaaggccgccgacgagagcgagagaggcatgaaggtgatcgagaacagagccctgaaggacgaggagaagatggagctgcaggagatccagctgaaggaggccaagcacatcgccgaggaggccgacagaaagtacgaggaggtggccagaaagctggtgatcatcgagggcgacctggagagaaccgaggagagagccgagctggccgagagcagatgcagagagatggacgagcagatcagactgatggaccagaacctgaagtgcctgagcgccgccgaggagaagtacagccagaaggaggacaagtacgaggaggagatcaagatcctgaccgacaagctgaaggaggccgagaccagagccgagttcgccgagagaagcgtggccaagctggagaagaccatcgacgacctggaggacaagctgaagtgcaccaaggaggagcacctgtgcacccagagaatgctggaccagaccctgctggacctgaacgagatgtag

SEQ ID NO: 103737 - DNA, 228 bp, synthetic construct
  misc_feature 1..228: note = Description of Artificial Sequence: Synthetic coding sequence
  source 1..228: mol_type = other DNA
atgatggaggccatcaagaagaagatgcagatgctgaagctggacaaggagaacgccctggacagagccgagcaggccgaggccgagcagaagcaggccgaggagagaagcaagcagctggaggacgagctggccgccatgcagaagaagctgaagggcaccgaggacgagctggacaagtacagcgaggccctgaaggacgcccaggagaagctggagctggcctag

SEQ ID NO: 103738 - DNA, 747 bp, synthetic construct
  misc_feature 1..747: note = Description of Artificial Sequence: Synthetic coding sequence
  source 1..747: mol_type = other DNA
atggccggcctgaacagcctggaggccgtgaagagaaagatccaggccctgcagcagcaggccgacgaggccgaggacagagcccagggcctgcagagagagctggacggcgagagagagagaagagagaaggccgagggcgacgtggccgccctgaacagaagaatccagctggtggaggaggagctggacagagcccaggagagactggccaccgccctgcagaagctggaggaggccgagaaggccgccgacgagagcgagagaggcatgaaggtgatcgagaacagagccatgaaggacgaggagaagatggagatccaggagatgcagctgaaggaggccaagcacatcgccgaggaggccgacagaaagtacgaggaggtggccagaaagctggtgatcctggagggcgagctggagagagccgaggagagagccgaggtgagcgagctgaagtgcggcgacctggaggaggagctgaagaacgtgaccaacaacctgaagagcctggaggccgccagcgagaagtacagcgagaaggaggacaagtacgaggaggagatcaagctgctgagcgacaagctgaaggaggccgagaccagagccgagttcgccgagagaaccgtggccaagctggagaagaccatcgacgacctggaggagaagctggcccaggccaaggaggagaacgtgggcctgcaccagaccctggaccagaccctgaacgagctgaactgcatctag

SEQ ID NO: 103739 - DNA, 855 bp, synthetic construct
  misc_feature 1..855: note = Description of Artificial Sequence: Synthetic coding sequence
  source 1..855: mol_type = other DNA
atggaggccatcaagaagaagatgcagatgctgaagctggacaaggagaacgccatcgacagagccgagcaggccgaggccgacaagaaggccgccgaggacaagtgcaagcaggtggaggaggagctgacccacctgcagaagaagctgaagggcaccgaggacgagctggacaagtacagcgaggacctgaaggacgcccaggagaagctggagctgaccgagaagaaggccagcgacgccgagggcgacgtggccgccctgaacagaagaatccagctggtggaggaggagctggacagagcccaggagagactggccaccgccctgcagaagctggaggaggccgagaaggccgccgacgagagcgagagaggcatgaaggtgatcgagaacagagccatgaaggacgaggagaagatggagatccaggagatgcagctgaaggaggccaagcacatcgccgaggaggccgacagaaagtacgaggaggtggccagaaagctggtgatcctggagggcgagctggagagagccgaggagagagccgaggtgagcgagctgaagtgcggcgacctggaggaggagctgaagaacgtgaccaacaacctgaagagcctggaggccgccagcgagaagtacagcgagaaggaggacaagtacgaggaggagatcaagctgctgagcgacaagctgaaggaggccgagaccagagccgagttcgccgagagaaccgtggccaagctggagaagaccatcgacgacctggaggagaagctggcccaggccaaggaggagaacgtgggcctgcaccagaccctggaccagaccctgaacgagctgaactgcatctag

SEQ ID NO: 103740 - DNA, 855 bp, synthetic construct; identical to SEQ ID NO: 103739
  misc_feature 1..855: note = Description of Artificial Sequence: Synthetic coding sequence
  source 1..855: mol_type = other DNA

SEQ ID NO: 103741 - DNA, 2244 bp, synthetic construct
  misc_feature 1..2244: note = Description of Artificial Sequence: Synthetic coding sequence
  source 1..2244: mol_type = other DNA
atgggcagactgaacgagcagagactgttccagcccgacctgtgcgacgtggacctggtgctggtgccccagagaagcgtgttccccgcccacaagggcgtgctggccgcctacagccagttcttccacagcctgttcacccagaacaagcagctgcagagagtggagctgagcctggaggccctggcccccggcggcctgcagcagatcctgaacttcatctacaccagcaagctgctggtgaacgccgccaacgtgcacgaggtgctgagcgccgccagcctgctgcagatggccgacatcgccgccagctgccaggagctgctggacgccagaagcctgggcccccccggccccggcaccgtggccctggcccagcccgccgccagctgcacccccgccgcccccccctactactgcgacatcaagcaggaggccgacacccccggcctgcccaagatctacgccagagagggccccgacccctacagcgtgagagtggaggacggcgccggcaccgccggcggcaccgtgcccgccaccatcggccccgcccagcccttcttcaaggaggagaaggagggcggcgtggaggaggccggcggcccccccgccagcctgtgcaagctggagggcggcgaggagctggaggaggagctgggcggcagcggcacctacagcagaagagagcagagccagatcatcgtggaggtgaacctgaacaaccagaccctgcacgtgagcaccggccccgagggcaagcccggcgccggccccagccccgccaccgtggtgctgggcagagaggacggcctgcagagacacagcgacgaggaggaggaggacgacgaggaggaggaggaggaggaggaggaggaggagggcggcggcagcggcagagaggaggaggaggaggaggagggcggcagccagggcgaggaggaggaggaggaggaggacggccacagcgagcaggaggaggaggaggaggaggaggaggaggagggccccagcgagcaggaccaggagagcagcgaggaggaggagggcgaggagggcgaggccggcggcaagcagggccccagaggcagcagaagcagcagagccgacccccccccccacagccacatggccaccagaagcagagagaacgccagaagaagaggcacccccgagcccgaggaggccggcagaagaggcggcaagagacccaagcccccccccggcgtggccagcgccagcgccagaggcccccccgccaccgacggcctgggcgccaaggtgaagctggaggagaagcagcaccacccctgccagaagtgccccagagtgttcaacaacagatggtacctggagaagcacatgaacgtgacccacagcagaatgcagatctgcgaccagtgcggcaagagattcctgctggagagcgagctgctgctgcacagacagaccgactgcgagagaaacatccagtgcgtgacctgcggcaaggccttcaagaagctgtggagcctgcacgagcacaacaagatcgtgcacggctacgccgagaagaagttcagctgcgagatctgcgagaagaagttctacaccatggcccacgtgagaaagcacatggtggcccacaccaaggacatgcccttcacctgcgagacctgcggcaagagcttcaagagaagcatgagcctgaaggtgcacagcctgcagcacagcggcgagaagcccttcagatgcgagaactgcaacgagagattccagtacaagtaccagctgagaagccacatgagcatccacatcggccacaagcagttcatgtgccagtggtgcggcaaggacttcaacatgaagcagtacttcgacgagcacatgaagacccacaccggcgagaagccctacatctgcgagatctgcggcaagagcttcaccagcagacccaacatgaagagacacagaagaacccacaccggcgagaagccctacccctgcgacgtgtgcggccagagattcagattcagcaacatgctgaaggcccacaaggagaagtgcttcagagtgagccacaccctggccggcgacggcgtgcccgccgcccccggcctgccccccacccagccccaggcccacgccctgcccctgctgcccggcctgccccagaccctgcccccccccccccacctgcccccccccccccccctgttccccaccaccgccagccccggcggcagaatgaacgccaacaactag

SEQ ID NO: 103742 - DNA, 483 bp, synthetic construct
  misc_feature 1..483: note = Description of Artificial Sequence: Synthetic coding sequence
  source 1..483: mol_type = other DNA
atgaccgaccagcaggccgaggccagaagctacctgagcgaggagatgatcgccgagttcaaggccgccttcgacatgttcgacgccgacggcggcggcgacatcagcgtgaaggagctgggcaccgtgatgagaatgctgggccagacccccaccaaggaggagctggacgccatcatcgaggaggtggacgaggacggcagcggcaccatcgacttcgaggagttcctggtgatgatggtgagacagatgaaggaggacgccaagggcaagagcgaggaggagctggccgagtgcttcagaatcttcgacagaaacgccgacggctacatcgaccccgaggagctggccgagatcttcagagccagcggcgagcacgtgaccgacgaggagatcgagagcctgatgaaggacggcgacaagaacaacgacggcagaatcgacttcgacgagttcctgaagatgatggagggcgtgcagtag

SEQ ID NO: 103743 - DNA, 438 bp, synthetic construct
  misc_feature 1..438: note = Description of Artificial Sequence: Synthetic coding sequence
  source 1..438: mol_type = other DNA
atgatcgccgagttcaaggccgccttcgacatgttcgacgccgacggcggcggcgacatcagcgtgaaggagctgggcaccgtgatgagaatgctgggccagacccccaccaaggaggagctggacgccatcatcgaggaggtggacgaggacggcagcggcaccatcgacttcgaggagttcctggtgatgatggtgagacagatgaaggaggacgccaagggcaagagcgaggaggagctggccgagtgcttcagaatcttcgacagaaacgccgacggctacatcgaccccgaggagctggccgagatcttcagagccagcggcgagcacgtgaccgacgaggagatcgagagcctgatgaaggacggcgacaagaacaacgacggcagaatcgacttcgacgagttcctgaagatgatggagggcgtgcagtag

SEQ ID NO: 103744 - DNA, 564 bp, synthetic construct
  misc_feature 1..564: note = Description of Artificial Sequence: Synthetic coding sequence
  source 1..564: mol_type = other DNA
atgcccgaggtggagagaaagcccaagatcaccgccagcagaaagctgctgctgaagagcctgatgctggccaaggccaaggagtgctgggagcaggagcacgaggagagagaggccgagaaggtgagatacctggccgagagaatccccaccctgcagaccagaggcctgagcctgagcgccctgcaggacctgtgcagagagctgcacgccaaggtggaggtggtggacgaggagagatacgacatcgaggccaagtgcctgcacaacaccagagagatcaaggacctgaagctgaaggtgatggacctgagaggcaagttcaagagaccccccctgagaagagtgagagtgagcgccgacgccatgctgagagccctgctgggcagcaagcacaaggtgagcatggacctgagagccaacctgaagagcgtgaagaaggaggacaccgagaaggagagacccgtggaggtgggcgactggagaaagaacgtggaggccatgagcggcatggagggcagaaagaagatgttcgacgccgccaagagccccaccagccagtag

SEQ ID NO: 103745 - DNA, 564 bp, synthetic construct
  misc_feature 1..564: note = Description of Artificial Sequence: Synthetic coding sequence
  source 1..564: mol_type = other DNA
atgcccgaggtgcagagaaagcccaagatcaccgccagcagaaagctgctgctgaagagcctgatgctggccaaggccaaggagtgctgggagcaggagcacgaggagagagaggccgagaaggtgagatacctggccgagagaatccccaccctgcagaccagaggcctgagcctgagcgccctgcaggacctgtgcagagagctgcacgccaaggtggaggtggtggacgaggagagatacgacatcgaggccaagtgcctgcacaacaccagagagatcaaggacctgaagctgaaggtgatggacctgagaggcaagttcaagagaccccccctgagaagagtgagagtgagcgccgacgccatgctgagagccctgctgggcagcaagcacaaggtgagcatggacctgagagccaacctgaagagcgtgaagaaggaggacaccgagaaggagagacccgtggaggtgggcgactggagaaagaacgtggaggccatgagcggcatggagggcagaaagaagatgttcgacgccgccaagagccccaccagccagtag

SEQ ID NO: 103746 - DNA, 564 bp, synthetic construct; identical to SEQ ID NO: 103744
  misc_feature 1..564: note = Description of Artificial Sequence: Synthetic coding sequence
  source 1..564: mol_type = other DNA

SEQ ID NO: 103747 - DNA, 564 bp, synthetic construct; identical to SEQ ID NO: 103744
  misc_feature 1..564: note = Description of Artificial Sequence: Synthetic coding sequence
  source 1..564: mol_type = other DNA

SEQ ID NO: 103748 - DNA, 564 bp, synthetic construct; identical to SEQ ID NO: 103745
  misc_feature 1..564: note = Description of Artificial Sequence: Synthetic coding sequence
  source 1..564: mol_type = other DNA

SEQ ID NO: 103749 - DNA, 414 bp, synthetic construct
  misc_feature 1..414: note = Description of Artificial Sequence: Synthetic coding sequence
  source 1..414: mol_type = other DNA
atgcccgaggtggagagaaagcccaagatcaccgccagcagaaagctgctgctgaagagcctgatgctggccaaggccaaggagtgctgggagcaggagcacgaggagagagaggccgagaaggtgagatacctggccgagagaatccccaccctgcagaccagaggcctgagcctgagcgccctgcaggacctgtgcagagagctgcacgccaaggtggaggtggtggacgaggagagatacgacatcgaggccaagtgcctgcacaacaccagagagatcaaggacctgaagctgaaggtgatggacctgagaggcaagttcaagagaccccccctgagaagagtgagagtgagcgccgacgccatgctgagagccctgctgggcagcaagcacaaggtgagcatggactag

SEQ ID NO: 103750 - DNA, 549 bp, synthetic construct
  misc_feature 1..549: note = Description of Artificial Sequence: Synthetic coding sequence
  source 1..549: mol_type = other DNA
atgagccagtgcaagaagagaaacagagccatcaccgccagaagacagcacctgaagagcgtgatgctgcagatcgccgccaccgagctggagaaggaggagagcagaagagaggccgagaagcagaactacctggccgagcactgcccccccctgcacatccccggcagcatgagcgaggtgcaggagctgtgcaagcagctgcacgccaagatcgacgccgccgaggaggagaagtacgacatggaggtgagagtgcagaagaccagcaaggagctggaggacatgaaccagaagctgttcgacctgagaggcaagttcaagagaccccccctgagaagagtgagaatgagcgccgacgccatgctgaaggccctgctgggcagcaagcacaaggtgtgcatggacctgagagccaacctgaagcaggtgaagaaggaggacaccgagaaggagagagacctgagagacgtgggcgactggagaaagaacatcgaggagaagagcggcatggagggcagaaagaagatgttcgagagcgagagctag

SEQ ID NO: 103751 - DNA, 549 bp, synthetic construct
  misc_feature 1..549: note = Description of Artificial Sequence: Synthetic coding sequence
  source 1..549: mol_type = other DNA
atgggcgacgaggagaagagaaacagagccatcaccgccagaagacagcacctgaagagcgtgatgctgcagatcgccgccaccgagctggagaaggaggagagcagaagagaggccgagaagcagaactacctggccgagcactgcccccccctgcacatccccggcagcatgagcgaggtgcaggagctgtgcaagcagctgcacgccaagatcgacgccgccgaggaggagaagtacgacatggaggtgagagtgcagaagaccagcaaggagctggaggacatgaaccagaagctgttcgacctgagaggcaagttcaagagaccccccctgagaagagtgagaatgagcgccgacgccatgctgaaggccctgctgggcagcaagcacaaggtgtgcatggacctgagagccaacctgaagcaggtgaagaaggaggacaccgagaaggagagagacctgagagacgtgggcgactggagaaagaacatcgaggagaagagcggcatggagggcagaaagaagatgttcgagagcgagagctag

SEQ ID NO: 103752 - DNA, 549 bp, synthetic construct; identical to SEQ ID NO: 103751
  misc_feature 1..549: note = Description of Artificial Sequence: Synthetic coding sequence
  source 1..549: mol_type = other DNA

SEQ ID NO: 103753 - DNA, 549 bp, synthetic construct; identical to SEQ ID NO: 103751
  misc_feature 1..549: note = Description of Artificial Sequence: Synthetic coding sequence
  source 1..549: mol_type = other DNA

SEQ ID NO: 103754 - DNA, 633 bp, synthetic construct
  misc_feature 1..633: note = Description of Artificial Sequence: Synthetic coding sequence
  source 1..633: mol_type = other DNA
atggccgacggcagcagcgacgccgccagagagcccagacccgcccccgcccccatcagaagaagaagcagcaactacagagcctacgccaccgagccccacgccaagaagaagagcaagatcagcgccagcagaaagctgcagctgaagaccctgctgctgcagatcgccaagcaggagctggagagagaggccgaggagagaagaggcgagaagggcagagccctgagcaccagatgccagcccctggagctggccggcctgggcttcgccgagctgcaggacctgtgcagacagctgcacgccagagtggacaaggtggacgaggagagatacgacatcgaggccaaggtgaccaagaacatcaccgagatcgccgacctgacccagaagatcttcgacctgagaggcaagttcaagagacccaccctgagaagagtgagaatcagcgccgacgccatgatgcaggccctgctgggcgccagagccaaggagagcctggacctgagagcccacctgaagcaggtgaagaaggaggacaccgagaaggagaacagagaggtgggcgactggagaaagaacatcgacgccctgagcggcatggagggcagaaagaagaagttcgagagctag

SEQ ID NO: 103755 - DNA, 837 bp, synthetic construct
  misc_feature 1..837: note = Description of Artificial Sequence: Synthetic coding sequence
  source 1..837: mol_type = other DNA
atgagcgacaccgaggagcaggagtacgaggaggagcagcccgaggaggaggccgccgaggaggaggaggaggcccccgaggagcccgagcccgtggccgagcccgaggaggagagacccaagcccagcagacccgtggtgccccccctgatcccccccaagatccccgagggcgagagagtggacttcgacgacatccacagaaagagaatggagaaggacctgctggagctgcagaccctgatcgacgtgcacttcgagcagagaaagaaggaggaggaggagctggtggccctgaaggagagaatcgagagaagaagaagcgagagagccgagcagcagagattcagaaccgagaaggagagagagagacaggccaagctggccgaggagaagatgagaaaggaggaggaggaggccaagaagagagccgaggacgacgccaagaagaagaaggtgctgagcaacatgggcgcccacttcggcggctacctggtgaaggccgagcagaagagaggcaagagacagaccggcagagagatgaaggtgagaatcctgagcgagagaaagaagcccctggacatcgactacatgggcgaggagcagctgagagccagaagcgcctggctgccccccagccagcccagctgccccgccagagagaaggcccaggagctgagcgactggatccaccagctggagagcgagaagttcgacctgatggccaagctgaagcagcagaagtacgagatcaacgtgctgtacaacagaatcagccacgcccagaagttcagaaagggcgccggcaagggcagagtgggcggcagatggaagtag

SEQ ID NO: 103756 - DNA, 837 bp, synthetic construct; identical to SEQ ID NO: 103755
  misc_feature 1..837: note = Description of Artificial Sequence: Synthetic coding sequence
  source 1..837: mol_type = other DNA

SEQ ID NO: 103757 - DNA, 756 bp, synthetic construct
  misc_feature 1..756: note = Description of Artificial Sequence: Synthetic coding sequence
  source 1..756: mol_type = other DNA
atgagcgacaccgaggagcaggagtacgaggaggagcagcccgaggaggaggccgccgaggaggaggaggaggaggaggagagacccaagcccagcagacccgtggtgccccccctgatcccccccaagatccccgagggcgagagagtggacttcgacgacatccacagaaagagaatggagaaggacctgctggagctgcagaccctgatcgacgtgcacttcgagcagagaaagaaggaggaggaggagctggtggccctgaaggagagaatcgagagaagaagaagcgagagagccgagcagcagagattcagaaccgagaaggagagagagagacaggccaagctggccgaggagaagatgagaaaggaggaggaggaggccaagaagagagccgaggacgacgccaagaagaagaaggtgctgagcaacatgggcgcccacttcggcggctacctggtgaaggccgagcagaagagaggcaagagacagaccggcagagagatgaaggtgagaatcctgagcgagagaaagaagcccctggacatcgactacatgggcgaggagcagctgagagagaaggcccaggagctgagcgactggatccaccagctggagagcgagaagttcgacctgatggccaagctgaagcagcagaagtacgagatcaacgtgctgtacaacagaatcagccacgcccagaagttcagaaagggcgccggcaagggcagagtgggcggcagatggaagtag

SEQ ID NO: 103758 - DNA, 522 bp, synthetic construct
  misc_feature 1..522: note = Description of Artificial Sequence: Synthetic coding sequence
  source 1..522: mol_type = other DNA
agcaaggcccagccccaggacagccagcacctgagacacagcctgggcagaaccagaatgagcgacaccgaggagcaggagtacgaggaggagcagcccgaggaggaggccgccgaggaggaggaggagggcgaggtgcccgacagcgccgaggaggagagacccaagcccagcagacccgtggtgccccccctgatcccccccaagatccccgagggcgagagagtggacttcgacgacatccacagaaagagaatggagaaggacctgctggagctgcagaccctgatcgacgtgcacttcgagcagagaaagaaggaggaggaggagctggtggccctgaaggagagaatcgagagaagaagaagcgagagagccgagcagcagagattcagaaccgagaaggagagagagagacaggccaagctggccgaggagaagatgagaaaggaggaggaggaggccaagaagagagccgaggacgacgccaagaagaagaagaagaagaagaagaagaagtag

SEQ ID NO: 103759 - DNA, 756 bp, synthetic construct
  misc_feature 1..756: note = Description of Artificial Sequence: Synthetic coding sequence
  source 1..756: mol_type = other DNA
atgagcgacaccgaggagcaggagtacgaggaggagcagcccgaggaggaggccgccgaggaggaggaggaggcccccgaggagcccgagcccgtgagacccgtggtgccccccctgatcccccccaagatccccgagggcgagagagtggacttcgacgacatccacagaaagagaatggagaaggacctgctggagctgcagaccctgatcgacgtgcacttcgagcagagaaagaaggaggaggaggagctggtggccctgaaggagagaatcgagagaagaagaagcgagagagccgagcagcagagattcagaaccgagaaggagagagagagacaggccaagctggccgaggagaagatgagaaaggaggaggaggaggccaagaagagagccgaggacgacgccaagaagaagaaggtgctgagcaacatgggcgcccacttcggcggctacctggtgaaggccgagcagaagagaggcaagagacagaccggcagagagatgaaggtgagaatcctgagcgagagaaagaagcccctggacatcgactacatgggcgaggagcagctgagagagaaggcccaggagctgagcgactggatccaccagctggagagcgagaagttcgacctgatggccaagctgaagcagcagaagtacgagatcaacgtgctgtacaacagaatcagccacgcccagaagttcagaaagggcgccggcaagggcagagtgggcggcagatggaagtag

SEQ ID NO: 103760 - DNA, 579 bp, synthetic construct
  misc_feature 1..579: note = Description of Artificial Sequence: Synthetic coding sequence
  source 1..579: mol_type = other DNA
atggagaaggacctgctggagctgcagaccctgatcgacgtgcacttcgagcagagaaagaaggaggaggaggagctggtggccctgaaggagagaatcgagagaagaagaagcgagagagccgagcagcagagattcagaaccgagaaggagagagagagacaggccaagctggccgaggagaagatgagaaaggaggaggaggaggccaagaagagagccgaggacgacgccaagaagaagaaggtgctgagcaacatgggcgcccacttcggcggctacctggtgaaggccgagcagaagagaggcaagagacagaccggcagagagatgaaggtgagaatcctgagcgagagaaagaagcccctggacatcgactacatgggcgaggagcagctgagagagaaggcccaggagctgagcgactggatccaccagctggagagcgagaagttcgacctgatggccaagctgaagcagcagaagtacgagatcaacgtgctgtacaacagaatcagccacgcccagaagttcagaaagggcgccggcaagggcagagtgggcggcagatggaagtag

SEQ ID NO: 103761 - DNA, 882 bp, synthetic construct
  misc_feature 1..882: note = Description of Artificial Sequence: Synthetic coding sequence
  source 1..882: mol_type = other DNA
atgagcgacatcgaggaggtggtggaggagtacgaggaggagcaccccgaggaggaggaggactggagagaggacgaggacgagcaggaggaggccgccgaggaggacgccgaggccgaggccgagaccgaggagaccagagccgaggaggacgaggaggaggaggaggccaaggaggccgaggacggccccatggaggagagcaagcccaagcccagaagcttcatgcccaacctggtgccccccaagatccccgacggcgagagagtggacttcgacgacatccacagaaagagaatggagaaggacctgaacgagctgcaggccctgatcgaggcccacttcgagaacagaaagaaggaggaggaggagctggtgagcctgaaggacagaatcgagagaagaagagccgagagagccgagcagcagagaatcagaaacgagagagagaaggagagacagaacagactggccgaggagagagccagaagagaggaggaggagaacagaagaaaggccgaggacgaggccagaaagaagaaggccctgagcaacatgatgcacttcggcggctacatccagaagcaggcccagaccgagagaaagagcggcaagagacagaccgagagagagaagaagaagaagatcctggccgagagaagaaaggtgctggccatcgaccacctgaacgaggaccagctgagagagaaggccaaggagctgtggcagagcatctacaacctggaggccgagaagttcgacctgcaggagaagttcaagcagcagaagtacgagatcaacgtgctgagaaacagaatcaacgacaaccagaaggtgagcaagaccagaggcaaggccaaggtgaccggcagatggaagtag

SEQ ID NO: 103762 - DNA, 600 bp, synthetic construct
  misc_feature 1..600: note = Description of Artificial Sequence: Synthetic coding sequence
  source 1..600: mol_type = other DNA
atgagcgacatcgaggaggtggtggaggagtacgaggaggagatggccgccccccagcaccaggaggaggccgccgaggaggacgccgaggccgaggccgagaccgaggagaccagagccgaggacgaggaggaggaggaggccaaggaggccgaggacggccccatggaggagagcaagcccaagcccagaagcttcatgcccaacctggtgccccccaagatccccgacggcgagagagtggacttcgacgacatccacagaaagagaatggagaaggacctgaacgagctgcaggccctgatcgaggcccacttcgagaacagaaagaaggaggaggaggagctggtgagcctgaaggacagaatcgagagaagaagagccgagagagccgagcagcagagaatcagaaacgagagagagaaggagagacagaacagactggccgaggagagagccagaagagaggaggaggagaacagaagaaaggccgaggacgaggccagaaagaagaaggccctgagcaacatgatgcacttcggcggctacatccagaagcacccccccgacagagccgagaagtgggaggaggccgactag

SEQ ID NO: 103763 - DNA, 852 bp, synthetic construct
  misc_feature 1..852: note = Description of Artificial Sequence: Synthetic coding sequence
  source 1..852: mol_type = other DNA
atgagcgacatcgaggaggtggtggaggagtacgaggaggaggccaagctggagcaggaggaggccgccgaggaggacgccgaggccgaggccgagaccgaggagaccagagccgaggaggacgaggaggaggaggaggccaaggaggccgaggacggccccatggaggagagcaagcccaagcccagaagcttcatgcccaacctggtgccccccaagatccccgacggcgagagagtggacttcgacgacatccacagaaagagaatggagaaggacctgaacgagctgcaggccctgatcgaggcccacttcgagaacagaaagaaggaggaggaggagctggtgagcctgaaggacagaatcgagagaagaagagccgagagagccgagcagcagagaatcagaaacgagagagagaaggagagacagaacagactggccgaggagagagccagaagagaggaggaggagaacagaagaaaggccgaggacgaggccagaaagaagaaggccctgagcaacatgatgcacttcggcggctacatccagaagcaggcccagaccgagagaaagagcggcaagagacagaccgagagagagaagaagaagaagatcctggccgagagaagaaaggtgctggccatcgaccacctgaacgaggaccagctgagagagaaggccaaggagctgtggcagagcatctacaacctggaggccgagaagttcgacctgcaggagaagttcaagcagcagaagtacgagatcaacgtgctgagaaacagaatcaacgacaaccagaaggtgagcaagaccagaggcaaggccaaggtgaccggcagatggaagtag

SEQ ID NO: 103764 - DNA, 858 bp, synthetic construct
  misc_feature 1..858: note = Description of Artificial Sequence: Synthetic coding sequence
  source 1..858: mol_type = other DNA
atgagcgacatcgaggaggtggtggaggagtacgaggaggaggagcaggaggaggccgccgtggaggagcaggaggaggccgccgaggaggacgccgaggccgaggccgagaccgaggagaccagagccgaggaggacgaggaggaggaggaggccaaggaggccgaggacggccccatggaggagagcaagcccaagcccagaagcttcatgcccaacctggtgccccccaagatccccgacggcgagagagtggacttcgacgacatccacagaaagagaatggagaaggacctgaacgagctgcaggccctgatcgaggcccacttcgagaacagaaagaaggaggaggaggagctggtgagcctgaaggacagaatcgagagaagaagagccgagagagccgagcagcagagaatcagaaacgagagagagaaggagagacagaacagactggccgaggagagagccagaagagaggaggaggagaacagaagaaaggccgaggacgaggccagaaagaagaaggccctgagcaacatgatgcacttcggcggctacatccagaagaccgagagaaagagcggcaagagacagaccgagagagagaagaagaagaagatcctggccgagagaagaaaggtgctggccatcgaccacctgaacgaggaccagctgagagagaaggccaaggagctgtggcagagcatctacaacctggaggccgagaagttcgacctgcaggagaagttcaagcagcagaagtacgagatcaacgtgctgagaaacagaatcaacgacaaccagaaggtgagcaagaccagaggcaaggccaaggtgaccggcagatggaagtag

SEQ ID NO: 103765 - DNA, 867 bp, synthetic construct
  misc_feature 1..867: note = Description of Artificial Sequence: Synthetic coding sequence
  source 1..867: mol_type = other DNA
atgagcgacatcgaggaggtggtggaggagtacgaggaggaggagcaggaggaggccgccgtggaggagcaggaggaggccgccgaggaggacgccgaggccgaggccgagaccgaggagaccagagccgaggaggacgaggaggaggaggaggccaaggaggccgaggacggccccatggaggagagcaagcccaagcccagaagcttcatgcccaacctggtgccccccaagatccccgacggcgagagagtggacttcgacgacatccacagaaagagaatggagaaggacctgaacgagctgcaggccctgatcgaggcccacttcgagaacagaaagaaggaggaggaggagctggtgagcctgaaggacagaatcgagagaagaagagccgagagagccgagcagcagagaatcagaaacgagagagagaaggagagacagaacagactggccgaggagagagccagaagagaggaggaggagaacagaagaaaggccgaggacgaggccagaaagaagaaggccctgagcaacatgatgcacttcggcggctacatccagaagcaggcccagaccgagagaaagagcggcaagagacagaccgagagagagaagaagaagaagatcctggccgagagaagaaaggtgctggccatcgaccacctgaacgaggaccagctgagagagaaggccaaggagctgtggcagagcatctacaacctggaggccgagaagttcgacctgcaggagaagttcaagcagcagaagtacgagatcaacgtgctgagaaacagaatcaacgacaaccagaaggtgagcaagaccagaggcaaggccaaggtgaccggcagatggaagtag

SEQ ID NO: 103766 - DNA, 867 bp, synthetic construct; identical to SEQ ID NO: 103765
  misc_feature 1..867: note = Description of Artificial Sequence: Synthetic coding sequence
  source 1..867: mol_type = other DNA

SEQ ID NO: 103767 - DNA, 681 bp, synthetic construct
  misc_feature 1..681: note = Description of Artificial Sequence: Synthetic coding sequence
  source 1..681: mol_type = other DNA
atggaggagagcaagcccaagcccagaagcttcatgcccaacctggtgccccccaagatccccgacggcgagagagtggacttcgacgacatccacagaaagagaatggagaaggacctgaacgagctgcaggccctgatcgaggcccacttcgagaacagaaagaaggaggaggaggagctggtgagcctgaaggacagaatcgagagaagaagagccgagagagccgagcagcagagaatcagaaacgagagagagaaggagagacagaacagactggccgaggagagagccagaagagaggaggaggagaacagaagaaaggccgaggacgaggccagaaagaagaaggccctgagcaacatgatgcacttcggcggctacatccagaagaccgagagaaagagcggcaagagacagaccgagagagagaagaagaagaagatcctggccgagagaagaaaggtgctggccatcgaccacctgaacgaggaccagctgagagagaaggccaaggagctgtggcagagcatctacaacctggaggccgagaagttcgacctgcaggagaagttcaagcagcagaagtacgagatcaacgtgctgagaaacagaatcaacgacaaccagaaggtgagcaagaccagaggcaaggccaaggtgaccggcagatggaagtag

SEQ ID NO: 103768 - DNA, 858 bp, synthetic construct; identical to SEQ ID NO: 103764
  misc_feature 1..858: note = Description of Artificial Sequence: Synthetic coding sequence
  source 1..858: mol_type = other DNA

SEQ ID NO: 103769 - DNA, 876 bp, synthetic construct
  misc_feature 1..876: note = Description of Artificial Sequence: Synthetic coding sequence
  source 1..876: mol_type = other DNA
atgagcgacatcgaggaggtggtggaggagtacgaggaggagtacctggagcacgccgaggccgccgtggaggagcaggaggaggccgccgaggaggacgccgaggccgaggccgagaccgaggagaccagagccgaggaggacgaggaggaggaggaggccaaggaggccgaggacggccccatggaggagagcaagcccaagcccagaagcttcatgcccaacctggtgccccccaagatccccgacggcgagagagtggacttcgacgacatccacagaaagagaatggagaaggacctgaacgagctgcaggccctgatcgaggcccacttcgagaacagaaagaaggaggaggaggagctggtgagcctgaaggacagaatcgagagaagaagagccgagagagccgagcagcagagaatcagaaacgagagagagaaggagagacagaacagactggccgaggagagagccagaagagaggaggaggagaacagaagaaaggccgaggacgaggccagaaagaagaaggccctgagcaacatgatgcacttcggcggctacatccagaagcacaccctgcagaccgagagaaagagcggcaagagacagaccgagagagagaagaagaagaagatcctggccgagagaagaaaggtgctggccatcgaccacctgaacgaggaccagctgagagagaaggccaaggagctgtggcagagcatctacaacctggaggccgagaagttcgacctgcaggagaagttcaagcagcagaagtacgagatcaacgtgctgagaaacagaatcaacgacaaccagaaggtgagcaagaccagaggcaaggccaaggtgaccggcagatggaagtag

SEQ ID NO: 103770 - DNA, 894 bp, synthetic construct
  misc_feature 1..894: note = Description of Artificial Sequence: Synthetic coding sequence
  source 1..894: mol_type = other DNA
atgagcgacatcgaggaggtggtggaggagtacgaggaggagtacctggagcacgccgaggccgccgtggaggaggaggaggactggagagaggacgaggacgagcaggaggaggccgccgaggaggacgccgaggccgaggccgagaccgaggagaccagagccgaggaggacgaggaggaggaggaggccaaggaggccgaggacggccccatggaggagagcaagcccaagcccagaagcttcatgcccaacctggtgccccccaagatccccgacggcgagagagtggacttcgacgacatccacagaaagagaatggagaaggacctgaacgagctgcaggccctgatcgaggcccacttcgagaacagaaagaaggaggaggaggagctggtgagcctgaaggacagaatcgagagaagaagagccgagagagccgagcagcagagaatcagaaacgagagagagaaggagagacagaacagactggccgaggagagagccagaagagaggaggaggagaacagaagaaaggccgaggacgaggccagaaagaagaaggccctgagcaacatgatgcacttcggcggctacatccagaagaccgagagaaagagcggcaagagacagaccgagagagagaagaagaagaagatcctggccgagagaagaaaggtgctggccatcgaccacctgaacgaggaccagctgagagagaaggccaaggagctgtggcagagcatctacaacctggaggccgagaagttcgacctgcaggagaagttcaagcagcagaagtacgagatcaacgtgctgagaaacagaatcaacgacaaccagaaggtgagcaagaccagaggcaaggccaaggtgaccggcagatggaagtag

SEQ ID NO: 103771 - DNA, 867 bp, synthetic construct; identical to SEQ ID NO: 103765
  misc_feature 1..867: note = Description of Artificial Sequence: Synthetic coding sequence
  source 1..867: mol_type = other DNA

SEQ ID NO: 103772 - DNA, 771 bp, synthetic construct
  misc_feature 1..771: note = Description of Artificial Sequence: Synthetic coding sequence
  source 1..771: mol_type = other DNA
atgagcgacgaggaggtggagcaggtggaggagcagtacgaggaggaggaggaggcccaggaggaggccgccgaggtgcacgaggaggtgcacgagcccgaggagaagcccagacccaagctgaccgcccccaagatccccgagggcgagaaggtggacttcgacgacatccagaagaagagacagaacaaggacctgatggagctgcaggccctgatcgacagccacttcgaggccagaaagaaggaggaggaggagctggtggccctgaaggagagaatcgagaagagaagagccgagagagccgagcagcagagaatcagagccgagaaggagagagagagacagaacagactggccgaggagaaggccagaagagaggaggaggacgccaagagaagagccgaggacgacctgaagaagaagaaggccctgagcagcatgggcgccaactacagcagctacctggccaaggccgaccagaagagaggcaagaagcagaccgccagagagatgaagaagaagatcctggccgagagaagaaagcccctgaacatcgaccacctgggcgaggacaagctgagagacaaggccaaggagctgtgggagaccctgcaccagctggagatcgacaagttcgagttcggcgagaagctgaagagacagaagtacgacatcaccaccctgagaagcagaatcgaccaggcccagaagcacagcaagaaggccggcacccccgccaagggcaaggtgggcggcagatggaagtag

SEQ ID NO: 103773 - DNA, 777 bp, synthetic construct
  misc_feature 1..777: note = Description of Artificial Sequence: Synthetic coding sequence
  source 1..777: mol_type = other DNA
atgagcgacgaggaggtggagcaggtggaggagcagtacgaggaggaggaggaggcccaggaggaggaggaggtgcaggaggacaccgccgaggaggacgccgaggaggagaagcccagacccaagctgaccgcccccaagatccccgagggcgagaaggtggacttcgacgacatccagaagaagagacagaacaaggacctgatggagctgcaggccctgatcgacagccacttcgaggccagaaagaaggaggaggaggagctggtggccctgaaggagagaatcgagaagagaagagccgagagagccgagcagcagagaatcagagccgagaaggagagagagagacagaacagactggccgaggagaaggccagaagagaggaggaggacgccaagagaagagccgaggacgacctgaagaagaagaaggccctgagcagcatgggcgccaactacagcagctacctggccaaggccgaccagaagagaggcaagaagcagaccgccagagagatgaagaagaagatcctggccgagagaagaaagcccctgaacatcgaccacctgggcgaggacaagctgagagacaaggccaaggagctgtgggagaccctgcaccagctggagatcgacaagttcgagttcggcgagaagctgaagagacagaagtacgacatcaccaccctgagaagcagaatcgaccaggcccagaagcacagcaagaaggccggcacccccgccaagggcaaggtgggcggcagatggaagtag

SEQ ID NO: 103774 - DNA, 738 bp, synthetic construct
  misc_feature 1..738: note = Description of Artificial Sequence: Synthetic coding sequence
  source 1..738: mol_type = other DNA
atgagcgacgaggaggtggagcaggtggaggagcagtacgaggaggaggaggaggcccaggaggaggaggagaagcccagacccaagctgaccgcccccaagatccccgagggcgagaaggtggacttcgacgacatccagaagaagagacagaacaaggacctgatggagctgcaggccctgatcgacagccacttcgaggccagaaagaaggaggaggaggagctggtggccctgaaggagagaatcgagaagagaagagccgagagagccgagcagcagagaatcagagccgagaaggagagagagagacagaacagactggccgaggagaaggccagaagagaggaggaggacgccaagagaagagccgaggacgacctgaagaagaagaaggccctgagcagcatgggcgccaactacagcagctacctggccaaggccgaccagaagagaggcaagaagcagaccgccagagagatgaagaagaagatcctggccgagagaagaaagcccctgaacatcgaccacctgggcgaggacaagctgagagacaaggccaaggagctgtgggagaccctgcaccagctggagatcgacaagttcgagttcggcgagaagctgaagagacagaagtacgacatcaccaccctgagaagcagaatcgaccaggcccagaagcacagcaagaaggccggcacccccgccaagggcaaggtgggcggcagatggaagtag

SEQ ID NO: 103775 - DNA, 759 bp, synthetic construct
  misc_feature 1..759: note = Description of Artificial Sequence: Synthetic coding sequence
  source 1..759: mol_type = other DNA
atgagcgacgaggaggtggagcaggtggaggagcagtacgaggaggaggaggaggcccaggaggaggccgccgaggtgcacgaggaggaggagaagcccagacccaagctgaccgcccccaagatccccgagggcgagaaggtggacttcgacgacatccagaagaagagacagaacaaggacctgatggagctgcaggccctgatcgacagccacttcgaggccagaaagaaggaggaggaggagctggtggccctgaaggagagaatcgagaagagaagagccgagagagccgagcagcagagaatcagagccgagaaggagagagagagacagaacagactggccgaggagaaggccagaagagaggaggaggacgccaagagaagagccgaggacgacctgaagaagaagaaggccctgagcagcatgggcgccaactacagcagctacctggccaaggccgaccagaagagaggcaagaagcagaccgccagagagatgaagaagaagatcctggccgagagaagaaagcccctgaacatcgaccacctgggcgaggacaagctgagagacaaggccaaggagctgtgggagaccctgcaccagctggagatcgacaagttcgagttcggcgagaagctgaagagacagaagtacgacatcatgaacgtgagagccagagtgcagatgctggccaagttcagcaagaaggccggcacccccgccaagggcaaggtgggcggcagatggaagtag

SEQ ID NO: 103776 - DNA, 783 bp, synthetic construct
  misc_feature 1..783: note = Description of Artificial Sequence: Synthetic coding sequence
  source 1..783: mol_type = other DNA
atgagcgacgaggaggtggagcaggtggaggagcagtacgaggaggaggaggaggcccaggaggaggccgccgaggtgcacgaggaggacaccgccgaggaggacgccgaggaggagaagcccagacccaagctgaccgcccccaagatccccgagggcgagaaggtggacttcgacgacatccagaagaagagacagaacaaggacctgatggagctgcaggccctgatcgacagccacttcgaggccagaaagaaggaggaggaggagctggtggccctgaaggagagaatcgagaagagaagagccgagagagccgagcagcagagaatcagagccgagaaggagagagagagacagaacagactggccgaggagaaggccagaagagaggaggaggacgccaagagaagagccgaggacgacctgaagaagaagaaggccctgagcagcatgggcgccaactacagcagctacctggccaaggccgaccagaagagaggcaagaagcagaccgccagagagatgaagaagaagatcctggccgagagaagaaagcccctgaacatcgaccacctgggcgaggacaagctgagagacaaggccaaggagctgtgggagaccctgcaccagctggagatcgacaagttcgagttcggcgagaagctgaagagacagaagtacgacatcaccaccctgagaagcagaatcgaccaggcccagaagcacagcaagaaggccggcacccccgccaagggcaaggtgggcggcagatggaagtag

SEQ ID NO: 103777 - DNA, 753 bp, synthetic construct
  misc_feature 1..753: note = Description of Artificial Sequence: Synthetic coding sequence
  source 1..753: mol_type = other DNA
atgagcgacgaggaggtggagcaggtggaggagcagtacgaggaggaggaggaggcccaggaggaggaggaggtgcaggaggaggagaagcccagacccaagctgaccgcccccaagatccccgagggcgagaaggtggacttcgacgacatccagaagaagagacagaacaaggacctgatggagctgcaggccctgatcgacagccacttcgaggccagaaagaaggaggaggaggagctggtggccctgaaggagagaatcgagaagagaagagccgagagagccgagcagcagagaatcagagccgagaaggagagagagagacagaacagactggccgaggagaaggccagaagagaggaggaggacgccaagagaagagccgaggacgacctgaagaagaagaaggccctgagcagcatgggcgccaactacagcagctacctggccaaggccgaccagaagagaggcaagaagcagaccgccagagagatgaagaagaagatcctggccgagagaagaaagcccctgaacatcgaccacctgggcgaggacaagctgagagacaaggccaaggagctgtgggagaccctgcaccagctggagatcgacaagttcgagttcggcgagaagctgaagagacagaagtacgacatcaccaccctgagaagcagaatcgaccaggcccagaagcacagcaagaaggccggcacccccgccaagggcaaggtgggcggcagatggaagtag

SEQ ID NO: 103778 - DNA, 786 bp, synthetic construct
  misc_feature 1..786: note = Description of Artificial Sequence: Synthetic coding sequence
  source 1..786: mol_type = other DNA
atgagcgacgaggaggtggagcaggtggaggagcagtacgaggaggaggaggaggcccaggaggaggccgccgaggtgcacgaggagggcatgagaacccaggacttcttccacgaggagaagcccagacccaagctgaccgcccccaagatccccgagggcgagaaggtggacttcgacgacatccagaagaagagacagaacaaggacctgatggagctgcaggccctgatcgacagccacttcgaggccagaaagaaggaggaggaggagctggtggccctgaaggagagaatcgagaagagaagagccgagagagccgagcagcagagaatcagagccgagaaggagagagagagacagaacagactggccgaggagaaggccagaagagaggaggaggacgccaagagaagagccgaggacgacctgaagaagaagaaggccctgagcagcatgggcgccaactacagcagctacctggccaaggccgaccagaagagaggcaagaagcagaccgccagagagatgaagaagaagatcctggccgagagaagaaagcccctgaacatcgaccacctgggcgaggacaagctgagagacaaggccaaggagctgtgggagaccctgcaccagctggagatcgacaagttcgagttcggcgagaagctgaagagacagaagtacgacatcaccaccctgagaagcagaatcgaccaggcccagaagcacagcaagaaggccggcacccccgccaagggcaaggtgggcggcagatggaagtag

SEQ ID NO: 103779 - DNA, 786 bp, synthetic construct
  misc_feature 1..786: note = Description of Artificial Sequence: Synthetic coding sequence
  source 1..786: mol_type = other DNA
atgagcgacgaggaggtggagcaggtggaggagcagtacgaggaggaggaggaggcccaggaggaggccgccgaggtgcacgaggaggtgcacgagcccgaggaggtgcaggaggaggagaagcccagacccaagctgaccgcccccaagatccccgagggcgagaaggtggacttcgacgacatccagaagaagagacagaacaaggacctgatggagctgcaggccctgatcgacagccacttcgaggccagaaagaaggaggaggaggagctggtggccctgaaggagagaatcgagaagagaagagccgagagagccgagcagcagagaatcagagccgagaaggagagagagagacagaacagactggccgaggagaaggccagaagagaggaggaggacgccaagagaagagccgaggacgacctgaagaagaagaaggccctgagcagcatgggcgccaactacagcagctacctggccaaggccgaccagaagagaggcaagaagcagaccgccagagagatgaagaagaagatcctggccgagagaagaaagcccctgaacatcgaccacctgggcgaggacaagctgagagacaaggccaaggagctgtgggagaccctgcaccagctggagatcgacaagttcgagttcggcgagaagctgaagagacagaagtacgacatcaccaccctgagaagcagaatcgaccaggcccagaagcacagcaagaaggccggcacccccgccaagggcaaggtgggcggcagatggaagtag

SEQ ID NO: 103780 - DNA, 753 bp, synthetic construct
  misc_feature 1..753: note = Description of Artificial Sequence: Synthetic coding sequence
  source 1..753: mol_type = other DNA
atgagcgacgaggaggtggagcaggtggaggagcagtacgaggaggaggaggaggcccaggaggaggaggaggtgcaggaggaggagaagcccagacccaagctgaccgcccccaagatccccgagggcgagaaggtggacttcgacgacatccagaagaagagacagaacaaggacctgatggagctgcaggccctgatcgacagccacttcgaggccagaaagaaggaggaggaggagctggtggccctgaaggagagaatcgagaagagaagagccgagagagccgagcagcagagaatcagagccgagaaggagagagagagacagaacagactggccgaggagaaggccagaagagaggaggaggacgccaagagaagagccgaggacgacctgaagaagaagaaggccctgagcagcatgggcgccaactacagcagctacctggccaaggccgaccagaagagaggcaagaagcagaccgccagagagatgaagaagaagatcctggccgagagaagaaagcccctgaacatcgaccacctgggcgaggacaagctgagagacaaggccaaggagctgtgggagaccctgcaccagctggagatcgacaagttcgagttcggcgagaagctgaagagacagaagtacgacatcatgaacgtgagagccagagtgcagatgctggccaagttcagcaagaaggccggcacccccgccaagggcaaggtgggcggcagatggaagtag

SEQ ID NO: 103781 - DNA, 810 bp, synthetic construct
  misc_feature 1..810: note = Description of Artificial Sequence: Synthetic coding sequence
  source 1..810: mol_type = other DNA
atgagcgacgaggaggtggagcaggtggaggagcagtacgaggaggaggaggaggcccaggaggaggccgccgaggtgcacgaggaggtgcacgagcccgaggaggtgcaggaggacaccgccgaggaggacgccgaggaggagaagcccagacccaagctgaccgcccccaagatccccgagggcgagaaggtggacttcgacgacatccagaagaagagacagaacaaggacctgatggagctgcaggccctgatcgacagccacttcgaggccagaaagaaggaggaggaggagctggtggccctgaaggagagaatcgagaagagaagagccgagagagccgagcagcagagaatcagagccgagaaggagagagagagacagaacagactggccgaggagaaggccagaagagaggaggaggacgccaagagaagagccgaggacgacctgaagaagaagaaggccctgagcagcatgggcgccaactacagcagctacctggccaaggccgaccagaagagaggcaagaagcagaccgccagagagatgaagaagaagatcctggccgagagaagaaagcccctgaacatcgaccacctgggcgaggacaagctgagagacaaggccaaggagctgtgggagaccctgcaccagctggagatcgacaagttcgagttcggcgagaagctgaagagacagaagtacgacatcaccaccctgagaagcagaatcgaccaggcccagaagcacagcaagaaggccggcacccccgccaagggcaaggtgggcggcagatggaagtag

SEQ ID NO: 103782 - DNA, 813 bp, synthetic construct
  misc_feature 1..813: note = Description of Artificial Sequence: Synthetic coding sequence
  source 1..813: mol_type = other DNA
atgagcgacgaggaggtggagcaggtggaggagcagtacgaggaggaggaggaggcccaggaggaggccgccgaggtgcacgaggaggcccaccccggcgaggagagcgtgagagaggacaccgccgaggaggacgccgaggaggagaagcccagacccaagctgaccgcccccaagatccccgagggcgagaaggtggacttcgacgacatccagaagaagagacagaacaaggacctgatggagctgcaggccctgatcgacagccacttcgaggccagaaagaaggaggaggaggagctggtggccctgaaggagagaatcgagaagagaagagccgagagagccgagcagcagagaatcagagccgagaaggagagagagagacagaacagactggccgaggagaaggccagaagagaggaggaggacgccaagagaagagccgaggacgacctgaagaagaagaaggccctgagcagcatgggcgccaactacagcagctacctggccaaggccgaccagaagagaggcaagaagcagaccgccagagagatgaagaagaagatcctggccgagagaagaaagcccctgaacatcgaccacctgggcgaggacaagctgagagacaaggccaaggagctgtgggagaccctgcaccagctggagatcgacaagttcgagttcggcgagaagctgaagagacagaagtacgacatcaccaccctgagaagcagaatcgaccaggcccagaagcacagcaagaaggccggcacccccgccaagggcaaggtgggcggcagatggaagtag

SEQ ID NO: 103783 - DNA, 435 bp, synthetic construct
  misc_feature 1..435: note = Description of Artificial Sequence: Synthetic coding sequence
  source 1..435: mol_type = other DNA
atgagcgacgaggaggtggagcaggtggaggagcagtacgaggaggaggaggaggcccaggaggaggccgccgaggtgcacgaggaggagagaagagccgaggacgacctgaagaagaagaaggccctgagcagcatgggcgccaactacagcagctacctggccaaggccgaccagaagagaggcaagaagcagaccgccagagagatgaagaagaagatcctggccgagagaagaaagcccctgaacatcgaccacctgggcgaggacaagctgagagacaaggccaaggagctgtgggagcccccccagagctgccagggcctgcccgacagccccggcggcggcgaggccatccccggcagaccccccagactgtgcccctgctgcctgcaccccctgggccccgtgaacaaggccgccgagcccccctag

SEQ ID NO: 103784 - DNA, 1617 bp, synthetic construct
  misc_feature 1..1617: note = Description of Artificial Sequence: Synthetic coding sequence
  source 1..1617: mol_type = other DNA
atggaggagagcgtgaaccagatgcagcccctgaacgagaagcagatcgccaacagccaggacggctacgtgtggcaggtgaccgacatgaacagactgcacagattcctgtgcttcggcagcgagggcggcacctactacatcaaggagcagaagctgggcctggagaacgccgaggccctgatcagactgatcgaggacggcagaggctgcgaggtgatccaggagatcaagagcttcagccaggagggcagaaccaccaagcaggagcccatgctgttcgccctggccatctgcagccagtgcagcgacatcagcaccaagcaggccgccttcaaggccgtgagcgaggtgtgcagaatccccacccacctgttcaccttcatccagttcaagaaggacctgaaggagagcatgaagtgcggcatgtggggcagagccctgagaaaggccatcgccgactggtacaacgagaagggcggcatggccctggccctggccgtgaccaagtacaagcagagaaacggctggagccacaaggacctgctgagactgagccacctgaagcccagcagcgagggcctggccatcgtgaccaagtacatcaccaagggctggaaggaggtgcacgagctgtacaaggagaaggccctgagcgtggagaccgagaagctgctgaagtacctggaggccgtggagaaggtgaagagaaccagagacgagctggaggtgatccacctgatcgaggagcacagactggtgagagagcacctgctgaccaaccacctgaagagcaaggaggtgtggaaggccctgctgcaggagatgcccctgaccgccctgctgagaaacctgggcaagatgaccgccaacagcgtgctggagcccggcaacagcgaggtgagcctggtgtgcgagaagctgtgcaacgagaagctgctgaagaaggccagaatccaccccttccacatcctgatcgccctggagacctacaagaccggccacggcctgagaggcaagctgaagtggagacccgacgaggagatcctgaaggccctggacgccgccttctacaagaccttcaagaccgtggagcccaccggcaagagattcctgctggccgtggacgtgagcgccagcatgaaccagagagtgctgggcagcatcctgaacgccagcaccgtggccgccgccatgtgcatggtggtgaccagaaccgagaaggacagctacgtggtggccttcagcgacgagatggtgccctgccccgtgaccaccgacatgaccctgcagcaggtgctgatggccatgagccagatccccgccggcggcaccgactgcagcctgcccatgatctgggcccagaagaccaacacccccgccgacgtgttcatcgtgttcaccgacaacgagaccttcgccggcggcgtgcaccccgccatcgccctgagagagtacagaaagaagatggacatccccgccaagctgatcgtgtgcggcatgaccagcaacggcttcaccatcgccgaccccgacgacagaggcatgctggacatgtgcggcttcgacaccggcgccctggacgtgatcagaaacttcaccctggacatgatctag

SEQ ID NO: 103785 - DNA, 1557 bp, synthetic construct
  misc_feature 1..1557: note = Description of Artificial Sequence: Synthetic coding sequence
  source 1..1557: mol_type = other DNA
atggaggagagcgtgaaccagatgcagcccctgaacgagaagcagatcgccaacagccaggacggctacgtgtggcaggtgaccgacatgaacagactgcacagattcctgtgcttcggcagcgagggcggcacctactacatcaaggagcagaagctgggcctggagaacgccgaggccctgatcagactgatcgaggacggcagaggctgcgaggtgatccaggagatcaagagcttcagccaggagggcagaaccaccaagcaggagcccatgctgttcgccctggccatctgcagccagtgcagcgacatcagcaccaagcaggccgccttcaaggccgtgagcgaggtgtgcagaatccccacccacctgttcaccttcatccagttcaagaaggacctgaaggagagcatgaagtgcggcatgtggggcagagccctgagaaaggccatcgccgactggtacaacgagaagggcggcatggccctggccctggccgtgaccaagtacaagcagagaaacggctggagccacaaggacctgctgagactgagccacctgaagcccagcagcgagggcctggccatcgtgaccaagtacatcaccaagggctggaaggaggtgcacgagctgtacaaggagaaggccctgagcgtggagaccgagaagctgctgaagtacctggaggccgtggagaaggtgaagagaaccagagacgagctggaggtgatccacctgatcgaggagcacagactggtgagagagcacctgctgaccaaccacctgaagagcaaggaggtgtggaaggccctgctgcaggagatgcccctgaccgccctgctgagaaacctgggcaagatgaccgccaacagcgtgctggagcccggcaacagcgaggtgagcctggtgtgcgagaagctgtgcaacgagaagctgctgaagaaggccagaatccaccccttccacatcctgatcgccctggagacctacaagaccggccacggcctgagaggcaagctgaagtggagacccgacgaggagatcctgaaggccctggacgccgccttctacaagaccttcaagaccgtggagcccaccggcaagagattcctgctggccgtggacgtgagcgccagcatgaaccagagagtgctgggcagcatcctgaacgccagcaccgtggccgccgccatgtgcatggtggtgaccagaaccgagaaggacagctacgtggtggccttcagcgacgagatggtgccctgccccgtgaccaccgacatgaccctgcagcaggtgctgatggccatgagccagatccccgccggcggcaccgactgcagcctgcccatgatctgggcccagaagaccaacacccccgccgacgtgttcatcgtgttcaccgacaacgagaccttcgccggcggcgtgcaccccgccatcgccctgagagagtacagaaagaagatggacatccccgccaagctgatcgtgtgcggcatgaccagcaacggcttcaccatcgccgaccccgacgacagagacaccgtgaagtag

SEQ ID NO: 103786 - DNA, 1578 bp, synthetic construct
  misc_feature 1..1578: note = Description of Artificial Sequence: Synthetic coding sequence
  source 1..1578: mol_type = other DNA
atggaggagagcgtgaaccagatgcagcccctgaacgagaagcagatcgccaacagccaggacggctacgtgtggcaggtgaccgacatgaacagactgcacagattcctgtgcttcggcagcgagggcggcacctactacatcaaggagcagaagctgggcctggagaacgccgaggccctgatcagactgatcgaggacggcagaggctgcgaggtgatccaggagatcaagagcttcagccaggagggcagaaccaccaagcaggagcccatgctgttcgccctggccatctgcagccagtgcagcgacatcagcaccaagcaggccgccttcaaggccgtgagcgaggtgtgcagaatccccacccacctgttcaccttcatccagttcaagaaggacctgaaggagagcatgaagtgcggcatgtggggcagagccctgagaaaggccatcgccgactggtacaacgagaagggcggcatggccctggccctggccgtgaccaagtacaagcagagaaacggctggagccacaaggacctgctgagactgagccacctgaagcccagcagcgagggcctggccatcgtgaccaagtacatcaccaagggctggaaggaggtgcacgagctgtacaaggagaaggccctgagcgtggagaccgagaagctgctgaagtacctggaggccgtggagaaggtgaagagaaccagagacgagctggaggtgatccacctgatcgaggagcacagactggtgagagagcacctgctgaccaaccacctgaagagcaaggaggtgtggaaggccctgctgcaggagatgcccctgaccgccctgctgagaaacctgggcaagatgaccgccaacagcgtgctggagcccggcaacagcgaggtgagcctggtgtgcgagaagctgtgcaacgagaagctgctgaagaaggccagaatccaccccttccacatcctgatcgccctggagacctacaagaccggccacggcctgagaggcaagctgaagtggagacccgacgaggagatcctgaaggccctggacgccgccttctacaagaccttcaagaccgtggagcccaccggcaagagattcctgctggccgtggacgtgagcgccagcatgaaccagagagtgctgggcagcatcctgaacgccagcaccgtggccgccgccatgtgcatggtggtgaccagaaccgagaaggacagctacgtggtggccttcagcgacgagatggtgccctgccccgtgaccaccgacatgaccctgcagcaggtgctgatggccatgagccagatccccgccggcggcaccgactgcagcctgcccatgatctgggcccagaagaccaacacccccgccgacgtgttcatcgtgttcaccgacaacgagaccttcgccggcggcgtgcaccccgccatcgccctgagagagtacagaaagaagatggacatccccgccaagctgatcgtgtgcggcatgaccagcaacggcttcaccatcgccgaccccgacgacagagccctgcagaacaccctgctgaacaagagcttctag

SEQ ID NO: 103787 - DNA, 1605 bp, synthetic construct
  misc_feature 1..1605: note = Description of Artificial Sequence: Synthetic coding sequence
  source 1..1605: mol_type = other DNA
atggaggagagcgtgaaccagatgcagcccctgaacgagaagcagatcgccaacagccaggacggctacgtgtggcaggtgaccgacatgaacagactgcacagattcctgtgcttcggcagcgagggcggcacctactacatcaaggagcagaagctgggcctggagaacgccgaggccctgatcagactgatcgaggacggcagaggctgcgaggtgatccaggagatcaagagcttcagccaggagggcagaaccaccaagcaggagcccatgctgttcgccctggccatctgcagccagtgcagcgacatcagcaccaagcaggccgccttcaaggccgtgagcgaggtgtgcagaatccccacccacctgttcaccttcatccagttcaagaaggacctgaaggagagcatgaagtgcggcatgtggggcagagccctgagaaaggccatcgccgactggtacaacgagaagggcggcatggccctggccctggccgtgaccaagtacaagcagagaaacggctggagccacaaggacctgctgagactgagccacctgaagcccagcagcgagggcctggccatcgtgaccaagtacatcaccaagggctggaaggaggtgcacgagctgtacaaggagaaggccctgagcgtggagaccgagaagctgctgaagtacctggaggccgtggagaaggtgaagagaaccagagacgagctggaggtgatccacctgatcgaggagcacagactggtgagagagcacctgctgaccaaccacctgaagagcaaggaggtgtggaaggccctgctgcaggagatgcccctgaccgccctgctgagaaacctgggcaagatgaccgccaacagcgtgctggagcccggcaacagcgaggtgagcctggtgtgcgagaagctgtgcaacgagaagctgctgaagaaggccagaatccaccccttccacatcctgatcgccctggagacctacaagaccggccacggcctgagaggcaagctgaagtggagacccgacgaggagatcctgaaggccctggacgccgccttctacaagaccttcaagaccgtggagcccaccggcaagagattcctgctggccgtggacgtgagcgccagcatgaaccagagagtgctgggcagcatcctgaacgccagcaccgtggccgccgccatgtgcatggtggtgaccagaaccgagaaggacagctacgtggtggccttcagcgacgagatggtgccctgccccgtgaccaccgacatgaccctgcagcaggtgctgatggccatgagccagatccccgccggcggcaccgactgcagcctgcccatgatctgggcccagaagaccaacacccccgccgacgtgttcatcgtgttcaccgacaacgagaccttcgccggcggcgtgcaccccgccatcgccctgagagagtacagaaagaagatggacatccccgccaagctgatcgtgtgcggcatgaccagcaacggcttcaccatcgccgaccccgacgacagaggcatgctggacatgtgcggcttcgacaccggcgccctggacccctgcaagatcccctactag

SEQ ID NO: 103788 - DNA, 1617 bp, synthetic construct; identical to SEQ ID NO: 103784
  misc_feature 1..1617: note = Description of Artificial Sequence: Synthetic coding sequence
  source 1..1617: mol_type = other DNA

SEQ ID NO: 103789 - DNA, 1617 bp, synthetic construct; identical to SEQ ID NO: 103784
  misc_feature 1..1617: note = Description of Artificial Sequence: Synthetic coding sequence
  source 1..1617: mol_type = other DNA

SEQ ID NO: 103790 - DNA, 792 bp, synthetic construct
  misc_feature 1..792: note = Description of Artificial Sequence: Synthetic coding sequence
  source 1..792: mol_type = other DNA
atgcccctgaccgccctgctgagaaacctgggcaagatgaccgccaacagcgtgctggagcccggcaacagcgaggtgagcctggtgtgcgagaagctgtgcaacgagaagctgctgaagaaggccagaatccaccccttccacatcctgatcgccctggagacctacaagaccggccacggcctgagaggcaagctgaagtggagacccgacgaggagatcctgaaggccctggacgccgccttctacaagaccttcaagaccgtggagcccaccggcaagagattcctgctggccgtggacgtgagcgccagcatgaaccagagagtgctgggcagcatcctgaacgccagcaccgtggccgccgccatgtgcatggtggtgaccagaaccgagaaggacagctacgtggtggccttcagcgacgagatggtgccctgccccgtgaccaccgacatgaccctgcagcaggtgctgatggccatgagccagatccccgccggcggcaccgactgcagcctgcccatgatctgggcccagaagaccaacacccccgccgacgtgttcatcgtgttcaccgacaacgagaccttcgccggcggcgtgcaccccgccatcgccctgagagagtacagaaagaagatggacatccccgccaagctgatcgtgtgcggcatgaccagcaacggcttcaccatcgccgaccccgacgacagaggcatgctggacatgtgcggcttcgacaccggcgccctggacgtgatcagaaacttcaccctggacatgatctag

SEQ ID NO: 103791 - DNA, 126 bp, synthetic construct
  misc_feature 1..126: note = Description of Artificial Sequence: Synthetic coding sequence
  source 1..126: mol_type = other DNA
atggaggagagcgtgaaccagatgcagcccctgaacgagaagcagatcgccaacagccaggacggctacgtgtggcaggtgaccgacatgaacagactgcacagattcctgtgcttcggcagctag

SEQ ID NO: 103792 - DNA, 1050 bp, synthetic construct
  misc_feature 1..1050: note = Description of Artificial Sequence: Synthetic coding sequence
  source 1..1050: mol_type = other DNA
atggccgccagcgaggccgccgtggtgagcagccccagcctgaagaccgacaccagccccgtgctggagaccgccggcaccgtggccgccatggccgccacccccagcgccagagccgccgccgccgtggtggccgccgccgccagaaccggcagcgaggccagagtgagcaaggccgccctggccaccaagctgctgagcctgagcggcgtgttcgccgtgcacaagcccaagggccccaccagcgccgagctgctgaacagactgaaggagaagctgctggccgaggccggcatgcccagccccgagtggaccaagagaaagaagcagaccctgaagatcggccacggcggcaccctggacagcgccgccagaggcgtgctggtggtgggcatcggcagcggcaccaagatgctgaccagcatgctgagcggcagcaagagatacaccgccatcggcgagctgggcaaggccaccgacaccctggacagcaccggcagagtgaccgaggagaagccctacgacaagatcacccaggaggacatcgagggcatcctgcagaagttcaccggcaacatcatgcaggtgccccccctgtacagcgccctgaagaaggacggccagagactgagcaccctgatgaagagaggcgaggtggtggaggccaagcccgccagacccgtgaccgtgtacagcatcagcctgcagaagttccagccccccttcttcaccctggacgtggagtgcggcggcggcttctacatcagaagcctggtgagcgacatcggcaaggagctgagcagctgcgccaacgtgctggagctgaccagaaccaagcagggccccttcaccctggaggagcacgccctgcccgaggacaagtggaccatcgacgacatcgcccagagcctggagcactgcagcagcctgttccccgccgagctggccctgaagaagagcaagcccgagagcaacgagcaggtgctgagctgcgagtacatcaccctgaacgagcccaagagagaggacgacgtgatcaagacctgctag

SEQ ID NO: 103793 - DNA, 996 bp, synthetic construct
  misc_feature 1..996: note = Description of Artificial Sequence: Synthetic coding sequence
  source 1..996: mol_type = other DNA
atgggcagcgccggcctgagcagactgcacggcctgttcgccgtgtacaagccccccggcctgaagtggaagcacctgagagacaccgtggagctgcagctgctgaagggcctgaacgccagaaagccccccgcccccaagcagagagtgagattcctgctgggccccatggagggcagcgaggagaaggagctgaccctgaccgccaccagcgtgcccagcttcatcaaccaccccctggtgtgcggccccgccttcgcccacctgaaggtgggcgtgggccacagactggacgcccaggccagcggcgtgctggtgctgggcgtgggccacggctgcagactgctgaccgacatgtacaacgcccacctgaccaaggactacaccgtgagaggcctgctgggcaaggccaccgacgacttcagagaggacggcagactggtggagaagaccacctacgaccacgtgaccagagagaagctggacagaatcctggccgtgatccagggcagccaccagaaggccctggtgatgtacagcaacctggacctgaagacccaggaggcctacgagatggccgtgagaggcctgatcagacccatgaacaagagccccatgctgatcaccggcatcagatgcctgtacttcgccccccccgagttcctgctggaggtgcagtgcatgcacgagacccagaaggagctgagaaagctggtgcacgagatcggcctggagctgaagaccaccgccgtgtgcacccaggtgagaagaaccagagacggcttcttcaccctggacagcgccctgctgagaacccagtgggacctgaccaacatccaggacgccatcagagccgccaccccccaggtggccgccgagctggagaagagcctgagccccggcctggacaccaagcagctgcccagccccggctggagctgggacagccagggccccagcagcaccctgggcctggagagaggcgccggccagtag

SEQ ID NO: 103794 - DNA, 828 bp, synthetic construct
  misc_feature 1..828: note = Description of Artificial Sequence: Synthetic coding sequence
  source 1..828: mol_type = other DNA
atggagggcagcgaggagaaggagctgaccctgaccgccaccagcgtgcccagcttcatcaaccaccccctggtgtgcggccccgccttcgcccacctgaaggtgggcgtgggccacagactggacgcccaggccagcggcgtgctggtgctgggcgtgggccacggctgcagactgctgaccgacatgtacaacgcccacctgaccaaggactacaccgtgagaggcctgctgggcaaggccaccgacgacttcagagaggacggcagactggtggagaagaccacctacgaccacgtgaccagagagaagctggacagaatcctggccgtgatccagggcagccaccagaaggccctggtgatgtacagcaacctggacctgaagacccaggaggcctacgagatggccgtgagaggcctgatcagacccatgaacaagagccccatgctgatcaccggcatcagatgcctgtacttcgccccccccgagttcctgctggaggtgcagtgcatgcacgagacccagaaggagctgagaaagctggtgcacgagatcggcctggagctgaagaccaccgccgtgtgcacccaggtgagaagaaccagagacggcttcttcaccctggacagcgccctgctgagaacccagtgggacctgaccaacatccaggacgccatcagagccgccaccccccaggtggccgccgagctggagaagagcctgagccccggcctggacaccaagcagctgcccagccccggctggagctgggacagccagggccccagcagcaccctgggcctggagagaggcgccggccagtag

SEQ ID NO: 103795 - DNA, 1701 bp, synthetic construct
  misc_feature 1..1701: note = Description of Artificial Sequence: Synthetic coding sequence
  source 1..1701: mol_type = other DNA
atgagaagacagtggggcagcgccatgagagccgccgagcaggccggctgcatggtgagcgccagcagagccggccagcccgaggccggcccctggagctgcagcggcgtgatcctgagcagaagccccggcctggtgctgtgccacggcggcatcttcgtgcccttcctgagagccggcagcgaggtgctgaccgccgccggcgccgtgttcctgcccggcgacagctgcagagacgacctgagactgcacgtgcagtgggcccccaccgccgccggccccggcggcggcgccgagagaggcagacccggcctgtgcaccccccagtgcgccagcctggagcccggcccccccgcccccagcagaggcagacccctgcagcccagactgcccgccgagctgctgctgctgctgagctgccccgccttctgggcccacttcgccagactgttcggcgacgaggccgccgagcagtggagattcagcagcgccgccagagacgacgaggtgagcgaggacgaggaggccgaccagctgagagccctgggctggttcgccctgctgggcgtgagactgggccaggaggaggtggaggaggagagaggccccgccatggccgtgagccccctgggcgccgtgcccaagggcgcccccctgctggtgtgcggcagccccttcggcgccttctgccccgacatcttcctgaacaccctgagctgcggcgtgctgagcaacgtggccggccccctgctgctgaccgacgccagatgcctgcccggcaccgagggcggcggcgtgttcaccgccagacccgccggcgccctggtggccctggtggtggcccccctgtgctggaaggccggcgagtgggtgggcttcaccctgctgtgcgccgccgcccccctgttcagagccgccagagacgccctgcacagactgccccacagcaccgccgccctggccgccctgctgccccccgaggtgggcgtgccctggggcctgcccctgagagacagcggccccctgtgggccgccgccgccgtgctggtggagtgcggcaccgtgtggggcagcggcgtggccgtggcccccagactggtggtgacctgcagacacgtgagccccagagaggccgccagagtgctggtgagaagcaccacccccaagagcgtggccatctggggcagagtggtgttcgccacccaggagacctgcccctacgacatcgccgtggtgagcctggaggaggacctggacgacgtgcccatccccgtgcccgccgagcacttccacgagggcgaggccgtgagcgtggtgggcttcggcgtgttcggccagagctgcggccccagcgtgaccagcggcatcctgagcgccgtggtgcaggtgaacggcacccccgtgatgctgcagaccacctgcgccgtgcacagcggcagcagcggcggccccctgttcagcaaccacagcggcaacctgctgggcatcatcaccagcaacaccagagacaacaacaccggcgccacctacccccacctgaacttcagcatccccatcaccgtgctgcagcccgccctgcagcagtacagccagacccaggacctgggcggcctgagagagctggacagagccgccgagcccgtgagagtggtgtggagactgcagagacccctggccgaggcccccagaagcaagctgtag

SEQ ID NO: 103796 - DNA, 1197 bp, synthetic construct
  misc_feature 1..1197: note = Description of Artificial Sequence: Synthetic coding sequence
  source 1..1197: mol_type = other DNA
atgagaagacagtggggcagcgccatgagagccgccgagcaggccggctgcatggtgagcgccagcagagccggccagcccgaggccggcccctggagctgcagcggcgtgatcctgagcagaagccccggcctggtgctgtgccacggcggcatcttcgtgcccttcctgagagccggcagcgaggtgctgaccgccgccggcgccgtgttcctgcccggcgacagctgcagagacgacctgagactgcacgtgcagtgggcccccaccgccgccggccccggcggcggcgccgagagaggcagacccggcctgtgcaccccccagtgcgccagcctggagcccggcccccccgcccccagcagaggcagacccctgcagcccagactgcccgccgagctgctgctgctgctgagctgccccgccttctgggcccacttcgccagactgttcggcgacgaggccgccgagcagtggagattcagcagcgccgccagagacgacgaggtgagcgaggacgaggaggccgaccagctgagagccctgggctggttcgccctgctgggcgtgagactgggccaggaggaggtggaggaggagagaggccccgccatggccgtgagccccctgggcgccgtgcccaagggcgcccccctgctggtgtgcggcagccccttcggcgccttctgccccgacatcttcctgaacaccctgagctgcggcgtgctgagcaacgtggccggccccctgctgctgaccgacgccagatgcctgcccggcaccgagggcggcggcgtgttcaccgccagacccgccggcgccctggtggccctggtggtggcccccctgtgctggaaggccggcgagtgggtgggcttcaccctgctgtgcgccgccgcccccctgttcagagccgccagagacgccctgcacagactgccccacagcaccgccgccctggccgccctgctgccccccgaggtgggcgtgccctggggcctgcccctgagagacagcggccccctgtgggccgccgccgccgtgctggtggagtgcggcaccgtgtggggcagcggcgtggccgtggcccccagactggtggtgacctgcagacacgtgagccccagagaggccgccagagtgctggtgagaagcaccacccccaagcacaaccaccagcagcaccccggccagtag

SEQ ID NO: 103797 - DNA, 828 bp, synthetic construct
  misc_feature 1..828: note = Description of Artificial Sequence: Synthetic coding sequence
  source 1..828: mol_type = other DNA
atgctgaacctgctgctgctggccctgcccgtgctggccagcagagcctacgccgcccccgcccccggccaggccctgcagagagtgggcatcgtgggcggccaggaggcccccagaagcaagtggccctggcaggtgagcctgagagtgcacggcccctactggatgcacttctgcggcggcagcctgatccacccccagtgggtgctgaccgccgcccactgcgtgggccccgacgtgaaggacctggccgccctgagagtgcagctgagagagcagcacctgtactaccaggaccagctgctgcccgtgagcagaatcatcgtgcacccccagttctacaccgcccagatcggcgccgacatcgccctgctggagctggaggagcccgtgaacgtgagcagccacgtgcacaccgtgaccctgccccccgccagcgagaccttcccccccggcatgccctgctgggtgaccggctggggcgacgtggacaacgacgagagactgcccccccccttccccctgaagcaggtgaaggtgcccatcatggagaaccacatctgcgacgccaagtaccacctgggcgcctacaccggcgacgacgtgagaatcgtgagagacgacatgctgtgcgccggcaacaccagaagagacagctgccagggcgacagcggcggccccctggtgtgcaaggtgaacggcacctggctgcaggccggcgtggtgagctggggcgagggctgcgcccagcccaacagacccggcatctacaccagagtgacctactacctggactggatccaccactacgtgcccaagaagccctag

SEQ ID NO: 103798 - DNA, 849 bp, synthetic construct
  misc_feature 1..849: note = Description of Artificial Sequence: Synthetic coding sequence
  source 1..849: mol_type = other DNA
atgctgctgctggccccccagatgctgaacctgctgctgctggccctgcccgtgctggccagcagagcctacgccgcccccgcccccggccaggccctgcagagagtgggcatcgtgggcggccaggaggcccccagaagcaagtggccctggcaggtgagcctgagagtgcacggcccctactggatgcacttctgcggcggcagcctgatccacccccagtgggtgctgaccgccgcccactgcgtgggccccgacgtgaaggacctggccgccctgagagtgcagctgagagagcagcacctgtactaccaggaccagctgctgcccgtgagcagaatcatcgtgcacccccagttctacaccgcccagatcggcgccgacatcgccctgctggagctggaggagcccgtgaacgtgagcagccacgtgcacaccgtgaccctgccccccgccagcgagaccttcccccccggcatgccctgctgggtgaccggctggggcgacgtggacaacgacgagagactgcccccccccttccccctgaagcaggtgaaggtgcccatcatggagaaccacatctgcgacgccaagtaccacctgggcgcctacaccggcgacgacgtgagaatcgtgagagacgacatgctgtgcgccggcaacaccagaagagacagctgccagggcgacagcggcggccccctggtgtgcaaggtgaacggcacctggctgcaggccggcgtggtgagctggggcgagggctgcgcccagcccaacagacccggcatctacaccagagtgacctactacctggactggatccaccactacgtgcccaagaagccctag

SEQ ID NO: 103799 - DNA, 2532 bp, synthetic construct
  misc_feature 1..2532: note = Description of Artificial Sequence: Synthetic coding sequence
  source 1..2532: mol_type = other DNA
atgtggggcagactgtggcccctgctgctgagcatcctgaccgccaccgccgtgcccggccccagcctgagaagacccagcagagagctggacgccacccccagaatgaccatcccctacgaggagctgagcggcaccagacacttcaagggccaggcccagaactacagcaccctgctgctggaggaggccagcgccagactgctggtgggcgccagaggcgccctgttcagcctgagcgccaacgacatcggcgacggcgcccacaaggagatccactgggaggccagccccgagatgcagagcaagtgccaccagaagggcaagaacaaccagaccgagtgcttcaaccacgtgagattcctgcagagactgaacagcacccacctgtacgcctgcggcacccacgccttccagcccctgtgcgccgccatcgacgccgaggccttcaccctgcccaccagcttcgaggagggcaaggagaagtgcccctacgaccccgccagaggcttcaccggcctgatcatcgacggcggcctgtacaccgccaccagatacgagttcagaagcatccccgacatcagaagaagcagacacccccacagcctgagaaccgaggagacccccatgcactggctgaacgacgccgagttcgtgttcagcgtgctggtgagagagagcaaggccagcgccgtgggcgacgacgacaaggtgtactacttcttcaccgagagagccaccgaggagggcagcggcagcttcacccagagcagaagcagccacagagtggccagagtggccagagtgtgcaagggcgacctgggcggcaagaagatcctgcagaagaagtggaccagcttcctgaaggccagactgatctgccacatccccctgtacgagaccctgagaggcgtgtgcagcctggacgccgagaccagcagcagaacccacttctacgccgccttcaccctgagcacccagtggaagaccctggaggccagcgccatctgcagatacgacctggccgagatccaggccgtgttcgccggcccctacatggagtaccaggacggcagcagaagatggggcagatacgagggcggcgtgcccgagcccagacccggcagctgcatcaccgacagcctgagaagccagggctacaacagcagccaggacctgcccagcctggtgctggacttcgtgaagctgcaccccctgatggccagacccgtggtgcccaccagaggcagacccctgctgctgaagagaaacatcagatacacccacctgaccggcacccccgtgaccacccccgccggccccacctacgacctgctgttcctgggcaccgccgacggctggatccacaaggccgtggtgctgggcagcggcatgcacatcatcgaggagacccaggtgttcagagagagccagagcgtggagaacctggtgatcagcctgctgcagcacagcctgtacgtgggcgcccccagcggcgtgatccagctgcccctgagcagctgcagcagatacagaagctgctacgactgcatcctggccagagacccctactgcggctgggaccccggcacccacgcctgcgccgccgccaccaccatcgccaacagaagccagggcagcagaaccgccctgatccaggacatcgagagaggcaacagaggctgcgagagcagcagagacaccggcccccccccccccctgaagaccagaagcgtgctgagaggcgacgacgtgctgctgccctgcgaccagcccagcaacctggccagagccctgtggctgctgaacggcagcatgggcctgagcgacggccagggcggctacagagtgggcgtggacggcctgctggtgaccgacgcccagcccgagcacagcggcaactacggctgctacgccgaggagaacggcctgagaaccctgctggccagctacagcctgaccgtgagacccgccacccccgcccccgcccccaaggcccccgccacccccggcgcccagctggcccccgacgtgagactgctgtacgtgctggccatcgccgccctgggcggcctgtgcctgatcctggccagcagcctgctgtacgtggcctgcctgagagagggcagaagaggcagaagaagaaagtacagcctgggcagagccagcagagccggcggcagcgccgtgcagctgcagaccgtgagcggccagtgccccggcgaggaggacgagggcgacgacgagggcgccggcggcctggagggcagctgcctgcagatcatccccggcgagggcgcccccgccccccccccccccccccccccccccccccccgccgagctgaccaacggcctggtggccctgcccagcagactgagaagaatgaacggcaacagctacgtgctgctgagacagagcaacaacggcgtgcccgccggcccctgcagcttcgccgaggagctgagcagaatcctggagaagagaaagcacacccagctggtggagcagctggacgagagcagcgtgtag

SEQ ID NO: 103800 - DNA, 708 bp, synthetic construct
  misc_feature 1..708: note = Description of Artificial Sequence: Synthetic coding sequence
  source 1..708: mol_type = other DNA
atgctgagcctgctgctgctggccctgcccgtgctggccagccccgcctacgtggcccccgcccccggccaggccctgcagcagaccggcatcgtgggcggccaggaggcccccagaagcaagtggccctggcaggtgagcctgagagtgagaggcccctactggatgcacttctgcggcggcagcctgatccacccccagtgggtgctgaccgccgcccactgcgtggagcccgacatcaaggacctggccgccctgagagtgcagctgagagagcagcacctgtactaccaggaccagctgctgcccgtgagcagaatcatcgtgcacccccagttctacatcatccagaccggcgccgacatcgccctgctggagctggaggagcccgtgaacatcagcagccacatccacaccgtgaccctgccccccgccagcgagaccttcccccccggcatgccctgctgggtgaccggctggggcgacgtggacaacaacgtgcacctgccccccccctaccccctgaaggaggtggaggtgcccgtggtggagaaccacctgtgcaacgccgagtaccacaccggcctgcacaccggccacagcttccagatcgtgagagacgacatgctgtgcgccggcagcgagaaccacgacagctgccagggcgacagcggcggccccctggtgtgcaaggtgaacggcacctag

SEQ ID NO: 103801 - DNA, 4281 bp, synthetic construct
  misc_feature 1..4281: note = Description of Artificial Sequence: Synthetic coding sequence
  source 1..4281: mol_type = other DNA
atgcacagcagcaaccccaaggtgagaagcagccccagcggcaacacccagagcagccccaagagcaagcaggaggtgatggtgagaccccccaccgtgatgagccccagcggcaacccccagctggacagcaagttcagcaaccagggcaagcagggcggcagcgccagccagagccagcccagcccctgcgacagcaagagcggcggccacacccccaaggccctgcccggccccggcggcagcatgggcctgaagaacggcgccggcaacggcgccaagggcaagggcaagagagagagaagcatcagcgccgacagcttcgaccagagagaccccggcacccccaacgacgacagcgacatcaaggagtgcaacagcgccgaccacatcaagagccaggacagccagcacaccccccacagcatgacccccagcaacgccaccgcccccagaagcagcacccccagccacggccagaccaccgccaccgagcccacccccgcccagaagacccccgccaaggtggtgtacgtgttcagcaccgagatggccaacaaggccgccgaggccgtgctgaagggccaggtggagaccatcgtgagcttccacatccagaacatcagcaacaacaagaccgagagaagcaccgcccccctgaacacccagatcagcgccctgagaaacgaccccaagcccctgccccagcagccccccgcccccgccaaccaggaccagaacagcagccagaacaccagactgcagcccaccccccccatccccgcccccgcccccaagcccgccgccccccccagacccctggacagagagagccccggcgtggagaacaagctgatccccagcgtgggcagccccgccagcagcacccccctgccccccgacggcaccggccccaacagcacccccaacaacagagccgtgacccccgtgagccagggcagcaacagcagcagcgccgaccccaaggcccccccccccccccccgtgagcagcggcgagccccccaccctgggcgagaaccccgacggcctgagccaggagcagctggagcacagagagagaagcctgcagaccctgagagacatccagagaatgctgttccccgacgagaaggagttcaccggcgcccagagcggcggcccccagcagaaccccggcgtgctggacggcccccagaagaagcccgagggccccatccaggccatgatggcccagagccagagcctgggcaagggccccggccccagaaccgacgtgggcgcccccttcggcccccagggccacagagacgtgcccttcagccccgacgagatggtgccccccagcatgaacagccagagcggcaccatcggccccgaccacctggaccacatgacccccgagcagatcgcctggctgaagctgcagcaggagttctacgaggagaagagaagaaagcaggagcaggtggtggtgcagcagtgcagcctgcaggacatgatggtgcaccagcacggccccagaggcgtggtgagaggccccccccccccctaccagatgacccccagcgagggctgggcccccggcggcaccgagcccttcagcgacggcatcaacatgccccacagcctgccccccagaggcatggccccccaccccaacatgcccggcagccagatgagactgcccggcttcgccggcatgatcaacagcgagatggagggccccaacgtgcccaaccccgccagcagacccggcctgagcggcgtgagctggcccgacgacgtgcccaagatccccgacggcagaaacttcccccccggccagggcatcttcagcggccccggcagaggcgagagattccccaacccccagggcctgagcgaggagatgttccagcagcagctggccgagaagcagctgggcctgccccccggcatggccatggagggcatcagacccagcatggagatgaacagaatgatccccggcagccagagacacatggagcccggcaacaaccccatcttccccagaatccccgtggagggccccctgagccccagcagaggcgacttccccaagggcatccccccccagatgggccccggcagagagctggagttcggcatggtgcccagcggcatgaagggcgacgtgaacctgaacgtgaacatgggcagcaacagccagatgatcccccagaagatgagagaggccggcgccggccccgaggagatgctgaagctgagacccggcggcagcgacatgctgcccgcccagcagaagatggtgcccctgcccttcggcgagcacccccagcaggagtacggcatgggccccagacccttcctgcccatgagccagggccccggcagcaacagcggcctgagaaacctgagagagcccatcggccccgaccagagaaccaacagcagactgagccacatgccccccctgcccctgaaccccagcagcaaccccaccagcctgaacaccgccccccccgtgcagagaggcctgggcagaaagcccctggacatcagcgtggccggcagccaggtgcacagccccggcatcaaccccctgaagagccccaccatgcaccaggtgcagagccccatgctgggcagccccagcggcaacctgaagagcccccagacccccagccagctggccggcatgctggccggccccgccgccgccgccagcatcaagagcccccccgtgctgggcagcgccgccgccagccccgtgcacctgaagagccccagcctgcccgcccccagccccggctggaccagcagccccaagccccccctgcagagccccggcatcccccccaaccacaaggcccccctgaccatggccagccccgccatgctgggcaacgtggagagcggcggcccccccccccccaccgccagccagcccgccagcgtgaacatccccggcagcctgcccagcagcaccccctacaccatgccccccgagcccaccctgagccagaaccccctgagcatcatgatgagcagaatgagcaagttcgccatgcccagcagcacccccctgtaccacgacgccatcaagaccgtggccagcagcgacgacgacagcccccccgccagaagccccaacctgcccagcatgaacaacatgcccggcatgggcatcaacacccagaaccccagaatcagcggccccaaccccgtggtgcccatgcccaccctgagccccatgggcatgacccagcccctgagccacagcaaccagatgcccagccccaacgccgtgggccccaacatccccccccacggcgtgcccatgggccccggcctgatgagccacaaccccatcatgggccacggcagccaggagccccccatggtgccccagggcagaatgggcttcccccagggcttcccccccgtgcagagccccccccagcaggtgcccttcccccacaacggccccagcggcggccagggcagcttccccggcggcatgggcttccccggcgagggccccctgggcagacccagcaacctgccccagagcagcgccgacgccgccctgtgcaagcccggcggccccggcggccccgacagcttcaccgtgctgggcaacagcatgcccagcgtgttcaccgaccccgacctgcaggaggtgatcagacccggcgccaccggcatccccgagttcgacctgagcagaatcatccccagcgagaagcccagccagaccctgcagtacttccccagaggcgaggtgcccggcagaaagcagccccagggccccggccccggcttcagccacatgcagggcatgatgggcgagcaggcccccagaatgggcctggccctgcccggcatgggcggccccggccccgtgggcacccccgacatccccctgggcaccgcccccagcatgcccggccacaaccccatgagaccccccgccttcctgcagcagggcatgatgggcccccaccacagaatgatgagccccgcccagagcaccatgcccggccagcccaccctgatgagcaaccccgccgccgccgtgggcatgatccccggcaaggacagaggccccgccggcctgtacacccaccccggccccgtgggcagccccggcatgatgatgagcatgcagggcatgatgggcccccagcagaacatcatgatccccccccagatgagacccagaggcatggccgccgacgtgggcatgggcggcttcagccagggccccggcaaccccggcaacatgatgttctag

SEQ ID NO: 103802 - DNA, 1221 bp, synthetic construct
  misc_feature 1..1221: note = Description of Artificial Sequence: Synthetic coding sequence
  source 1..1221: mol_type = other DNA
atgagcggctgccccttcctgggcaacaacttcggctacaccttcaagaagctgcccgtggagggcagcgaggaggacaagagccagaccggcgtgaacagagccagcaagggcggcctgatctacggcaactacctgcacctggagaaggtgctgaacgcccaggagctgcagagcgagaccaagggcaacaagatccacgacgagcacctgttcatcatcacccaccaggcctacgagctgtggttcaagcagatcctgtgggagctggacagcgtgagagagatcttccagaacggccacgtgagagacgagagaaacatgctgaaggtggtgagcagaatgcacagagtgagcgtgatcctgaagctgctggtgcagcagttcagcatcctggagaccatgaccgccctggacttcaacgacttcagagagtacctgagccccgccagcggcttccagagcctgcagttcagactgctggagaacaagatcggcgtgctgcagaacatgagagtgccctacaacagaagacactacagagacaacttcaagggcgaggagaacgagctgctgctgaagagcgagcaggagaagaccctgctggagctggtggaggcctggctggagagaacccccggcctggagccccacggcttcaacttctggggcaagctggagaagaacatcaccagaggcctggaggaggagttcatcagaatccaggccaaggaggagagcgaggagaaggaggagcaggtggccgagttccagaagcagaaggaggtgctgctgagcctgttcgacgagaagagacacgagcacctgctgagcaagggcgagagaagactgagctacagagccctgcagggcgccctgatgatctacttctacagagaggagcccagattccaggtgcccttccagctgctgaccagcctgatggacatcgacagcctgatgaccaagtggagatacaaccacgtgtgcatggtgcacagaatgctgggcagcaaggccggcaccggcggcagcagcggctaccactacctgagaagcaccgtgagcgacagatacaaggtgttcgtggacctgttcaacctgagcacctacctgatccccagacactggatccccaagatgaaccccaccatccacaagttcctgtacaccgccgagtactgcgacagcagctacttcagcagcgacgagagcgactag

SEQ ID NO: 103803 - DNA, 1335 bp, synthetic construct
  misc_feature 1..1335: note = Description of Artificial Sequence: Synthetic coding sequence
  source 1..1335: mol_type = other DNA
atgatcgaggacaacaaggagaacaaggaccacagcctggagagaggcagagccagcctgatcttcagcctgaagaacgaggtgggcggcctgatcaaggccctgaagatcttccaggagaagcacgtgaacctgctgcacatcgagagcagaaagagcaagagaagaaacagcgagttcgagatcttcgtggactgcgacatcaacagagagcagctgaacgacatcttccacctgctgaagagccacaccaacgtgctgagcgtgaacctgcccgacaacttcaccctgaaggaggacggcatggagaccgtgccctggttccccaagaagatcagcgacctggaccactgcgccaacagagtgctgatgtacggcagcgagctggacgccgaccaccccggcttcaaggacaacgtgtacagaaagagaagaaagtacttcgccgacctggccatgaactacaagcacggcgaccccatccccaaggtggagttcaccgaggaggagatcaagacctggggcaccgtgttccaggagctgaacaagctgtaccccacccacgcctgcagagagtacctgaagaacctgcccctgctgagcaagtactgcggctacagagaggacaacatcccccagctggaggacgtgagcaacttcctgaaggagagaaccggcttcagcatcagacccgtggccggctacctgagccccagagacttcctgagcggcctggccttcagagtgttccactgcacccagtacgtgagacacagcagcgaccccttctacacccccgagcccgacacctgccacgagctgctgggccacgtgcccctgctggccgagcccagcttcgcccagttcagccaggagatcggcctggccagcctgggcgccagcgaggaggccgtgcagaagctggccacctgctacttcttcaccgtggagttcggcctgtgcaagcaggacggccagctgagagtgttcggcgccggcctgctgagcagcatcagcgagctgaagcacgccctgagcggccacgccaaggtgaagcccttcgaccccaagatcacctgcaagcaggagtgcctgatcaccaccttccaggacgtgtacttcgtgagcgagagcttcgaggacgccaaggagaagatgagagagttcaccaagaccatcaagagacccttcggcgtgaagtacaacccctacaccagaagcatccagatcctgaaggacaccaagagcatcaccagcgccatgaacgagctgcagcacgacctggacgtggtgagcgacgccctggccaaggtgagcagaaagcccagcatctag

SEQ ID NO: 103804 - DNA, 1401 bp, synthetic construct
  misc_feature 1..1401: note = Description of Artificial Sequence: Synthetic coding sequence
  source 1..1401: mol_type = other DNA
atgatcgaggacaacaaggagaacaaggaccacagcctggagagaggcagagccagcctgatcttcagcctgaagaacgaggtgggcggcctgatcaaggccctgaagatcttccaggagaagcacgtgaacctgctgcacatcgagagcagaaagagcaagagaagaaacagcgagttcgagatcttcgtggactgcgacatcaacagagagcagctgaacgacatcttccacctgctgaagagccacaccaacgtgctgagcgtgaacctgcccgacaacttcaccctgaaggaggacggcatggagaccgtgccctggttccccaagaagatcagcgacctggaccactgcgccaacagagtgctgatgtacggcagcgagctggacgccgaccaccccggcttcaaggacaacgtgtacagaaagagaagaaagtacttcgccgacctggccatgaactacaagcacggcgaccccatccccaaggtggagttcaccgaggaggagatcaagacctggggcaccgtgttccaggagctgaacaagctgtaccccacccacgcctgcagagagtacctgaagaacctgcccctgctgagcaagtactgcggctacagagaggacaacatcccccagctggaggacgtgagcaacttcctgaaggagagaaccggcttcagcatcagacccgtggccggctacctgagccccagagacttcctgagcggcctggccttcagagtgttccactgcacccagtacgtgagacacagcagcgaccccttctacacccccgagcccgacacctgccacgagctgctgggccacgtgcccctgctggccgagcccagcttcgcccagttcagccaggagatcggcctggccagcctgggcgccagcgaggaggccgtgcagaagctggccacctgctacttcttcaccgtggagttcggcctgtgcaagcaggacggccagctgagagtgttcggcgccggcctgctgagcagcatcagcgagctgaagcacgccctgagcggccacgccaaggtgaagcccttcgaccccaagatcacctgcaagcaggagtgcctgatcaccaccttccaggacgtgtacttcgtgagcgagagcttcgaggacgccaaggagaagatgagagagttcaccaagaccatcaagagacccttcggcgtgaagtacaacccctacaccagaagcatccagatcctgaaggacaccaagagcatcaccagcgccatgaacgagctgcagcacgacctggacgtggtgagcgacgccctggccaagagcctgaacgaggacgtgctgcaggtgagcgtgttcgccctgctgctgttcctgcccagcctgcacggcgagtgccaccccgacacctag

SEQ ID NO: 103805 - DNA, 753 bp, synthetic construct
  misc_feature 1..753: note = Description of Artificial Sequence: Synthetic coding sequence
  source 1..753: mol_type = other DNA
atgcagcccgccatgatgatgttcagcagcaagtactgggccagaagaggcttcagcctggacagcgccgtgcccgaggagcaccagctgctgggcagcagcaccctgaacaagcccaacagcggcaagaacgacgacaagggcaacaagggcagcagcaagagagaggccgccaccgagagcggcaagaccgccgtggtgttcagcctgaagaacgaggtgggcggcctggtgaaggccctgagactgttccaggagaagagagtgaacatggtgcacatcgagagcagaaagagcagaagaagaagcagcgaggtggagatcttcgtggactgcgagtgcggcaagaccgagttcaacgagctgatccagctgctgaagttccagaccaccatcgtgaccctgaacccccccgagaacatctggaccgaggaggaggagctggaggacgtgccctggttccccagaaagatcagcgagctggacaagtgcagccacagagtgctgatgtacggcagcgagctggacgccgaccaccccggcttcaaggacaacgtgtacagacagagaagaaagtacttcgtggacgtggccatgggctacaagtacggccccagactgctggccgccatcggcgactgggagttccagctgttcagcgtgagcagcagcctgagcagcagcagcctgtgcatgctgagcgtgcacatcctgatggacgtgagaagcatcgtggtggccgtggacatctag

SEQ ID NO: 103806 - DNA, 1473 bp, synthetic construct
  misc_feature 1..1473: note = Description of Artificial Sequence: Synthetic coding sequence
  source 1..1473: mol_type = other DNA
atgcagcccgccatgatgatgttcagcagcaagtactgggccagaagaggcttcagcctggacagcgccgtgcccgaggagcaccagctgctgggcagcagcaccctgaacaagcccaacagcggcaagaacgacgacaagggcaacaagggcagcagcaagagagaggccgccaccgagagcggcaagaccgccgtggtgttcagcctgaagaacgaggtgggcggcctggtgaaggccctgagactgttccaggagaagagagtgaacatggtgcacatcgagagcagaaagagcagaagaagaagcagcgaggtggagatcttcgtggactgcgagtgcggcaagaccgagttcaacgagctgatccagctgctgaagttccagaccaccatcgtgaccctgaacccccccgagaacatctggaccgaggaggaggagctggaggacgtgccctggttccccagaaagatcagcgagctggacaagtgcagccacagagtgctgatgtacggcagcgagctggacgccgaccaccccggcttcaaggacaacgtgtacagacagagaagaaagtacttcgtggacgtggccatgggctacaagtacggccagcccatccccagagtggagtacaccgaggaggagaccaagacctggggcgtggtgttcagagagctgagcaagctgtaccccacccacgcctgcagagagtacctgaagaacttccccctgctgaccaagtactgcggctacagagaggacaacgtgccccagctggaggacgtgagcatgttcctgaaggagagaagcggcttcaccgtgagacccgtggccggctacctgagccccagagacttcctggccggcctggcctacagagtgttccactgcacccagtacatcagacacggcagcgaccccctgtacacccccgagcccgacacctgccacgagctgctgggccacgtgcccctgctggccgaccccaagttcgcccagttcagccaggagatcggcctggccagcctgggcgccagcgacgaggacgtgcagaagctggccacctgctacttcttcaccatcgagttcggcctgtgcaagcaggagggccagctgagagcctacggcgccggcctgctgagcagcatcggcgagctgaagcacgccctgagcgacaaggcctgcgtgaaggccttcgaccccaagaccacctgcctgcaggagtgcctgatcaccaccttccaggaggcctacttcgtgagcgagagcttcgaggaggccaaggagaagatgagagacttcgccaagagcatcaccagacccttcagcgtgtacttcaacccctacacccagagcatcgagatcctgaaggacaccagaagcatcgagaacgtggtgcaggacctgagaagcgacctgaacaccgtgtgcgacgccctgaacaagatgaaccagtacctgggcatctag

SEQ ID NO: 103807 - DNA, 525 bp, synthetic construct
  misc_feature 1..525: note = Description of Artificial Sequence: Synthetic coding sequence
  source 1..525: mol_type = other DNA
atgagcagcgccgccgccgaccactgggcctggctgctggtgctgagcttcgtgttcggctgcaacgtgctgagaatcctgctgcccagcttcagcagcttcatgagcagagtgctgcagaaggacgccgagcaggagagccagatgagagccgagatccaggacatgaagcaggagctgagcaccgtgaacatgatggacgagttcgccagatacgccagactggagagaaagatcaacaagatgaccgacaagctgaagacccacgtgaaggccagaaccgcccagctggccaagatcaagtgggtgatcagcgtggccttctacgtgctgcaggccgccctgatgatcagcctgatctggaagtactacagcgtgcccgtggccgtggtgcccagcaagtggatcacccccctggacagactggtggccttccccaccagagtggccggcggcgtgggcatcacctgctggatcctggtgtgcaacaaggtggtggccatcgtgctgcaccccttcagctag

SEQ ID NO: 103808 - DNA, 423 bp, synthetic construct
  misc_feature 1..423: note = Description of Artificial Sequence: Synthetic coding sequence
  source 1..423: mol_type = other DNA
atgagcagagtgctgcagaaggacgccgagcaggagagccagatgagagccgagatccaggacatgaagcaggagctgagcaccgtgaacatgatggacgagttcgccagatacgccagactggagagaaagatcaacaagatgaccgacaagctgaagacccacgtgaaggccagaaccgcccagctggccaagatcaagtgggtgatcagcgtggccttctacgtgctgcaggccgccctgatgatcagcctgatctggaagtactacagcgtgcccgtggccgtggtgcccagcaagtggatcacccccctggacagactggtggccttccccaccagagtggccggcggcgtgggcatcacctgctggatcctggtgtgcaacaaggtggtggccatcgtgctgcaccccttcagctag

SEQ ID NO: 103809 - DNA, 423 bp, synthetic construct; identical to SEQ ID NO: 103808
  misc_feature 1..423: note = Description of Artificial Sequence: Synthetic coding sequence
  source 1..423: mol_type = other DNA

SEQ ID NO: 103810 - DNA, 519 bp, synthetic construct
  misc_feature 1..519: note = Description of Artificial Sequence: Synthetic coding sequence
  source 1..519: mol_type = other DNA
atgagcagcgccgccgccgaccactgggcctggctgctggtgctgagcttcgtgttcggctgcaacgtgctgagaatcctgctgcccagcttcagcagcttcatgagcagagtgctgcagaaggacgccgagcaggagagccagatgagagccgagatccaggacatgaagcaggagctgagcaccgtgaacatgatggacgagttcgccagatacgccagactggagagaaagatcaacaagatgaccgacaagctgaagacccacgtgaaggccagaaccgcccagctggccaagatcaagtgggtgatcagcgtggccttctacgtgctgcaggccgccctgatgatcagcctgatctggaagtactacagcgtgcccgtggccgtggtgcccagcaagtggatcacccccctggacagactggtggccttccccaccagagtggccgtgttcagcagcagcatctggaccagcaagtgcttcagcagccccgacaagagcatcctggagaagtag

SEQ ID NO: 103811 - DNA, 1083 bp, synthetic construct
  misc_feature 1..1083: note = Description of Artificial Sequence: Synthetic coding sequence
  source 1..1083: mol_type = other DNA
atggccctgcacagcatgagaaaggccagagagagatggagcttcatcagagccctgcacaagggcagcgccgccgcccccgccctgcagaaggacagcaagaagagagtgttcagcggcatccagcccaccggcatcctgcacctgggcaactacctgggcgccatcgagagctgggtgagactgcaggacgagtacgacagcgtgctgtacagcatcgtggacctgcacagcatcaccgtgccccaggaccccgccgtgctgagacagagcatcctggacatgaccgccgtgctgctggcctgcggcatcaaccccgagaagagcatcctgttccagcagagccaggtgagcgagcacacccagctgagctggatcctgagctgcatggtgagactgcccagactgcagcacctgcaccagtggaaggccaagaccaccaagcagaagcacgacggcaccgtgggcctgctgacctaccccgtgctgcaggccgccgacatcctgctgtacaagagcacccacgtgcccgtgggcgaggaccaggtgcagcacatggagctggtgcaggacctggcccagggcttcaacaagaagtacggcgagttcttccccgtgcccgagagcatcctgaccagcatgaagaaggtgaagagcctgagagaccccagcgccaagatgagcaagagcgaccccgacaagctggccaccgtgagaatcaccgacagccccgaggagatcgtgcagaagttcagaaaggccgtgaccgacttcaccagcgaggtgacctacgaccccgccggcagagccggcgtgagcaacatcgtggccgtgcacgccgccgtgaccggcctgagcgtggaggaggtggtgagaagaagcgccggcatgaacaccgccagatacaagctggccgtggccgacgccgtgatcgagaagttcgcccccatcaagagagagatcgagaagctgaagctggacaaggaccacctggagaaggtgctgcagatcggcagcgccaaggccaaggagctggcctacaccgtgtgccaggaggtgaagaagctggtgggcttcctgtag

SEQ ID NO: 103812 - DNA, 663 bp, synthetic construct
  misc_feature 1..663: note = Description of Artificial Sequence: Synthetic coding sequence
  source 1..663: mol_type = other DNA
atggccctgcacagcatgagaaaggccagagagagatggagcttcatcagagccctgcacaagggcagcgccgccgcccccgccctgcagaaggacagcaagaagagagtgttcagcggcatccagcccaccggcatcctgcacctgggcaactacctgggcgccatcgagagctgggtgagactgcaggacgagtacgacagcgtgctgtacagcatcgtggacctgcacagcatcaccgtgccccaggaccccgccgtgctgagacagagcatcctggacatgaccgccgtgctgctggcctgcggcatcaaccccgagaagagcatcctgttccagcagagccaggtgagcgagcacacccagctgagctggatcctgagctgcatggtgagactgcccagactgcagcacctgcaccagtggaaggccaagaccaccaagcagaagcacgacggcaccgtgggcctgctgacctaccccgtgctgcaggccgccgacatcctgctgtacaagagcacccacgtgcccgtgggcgaggaccaggtgcagcacatggagctggtgcaggacctggcccagggcttcaacaagaagtacggcgagttcttccccgtgcccgagagcatcctgagcatgtgcgtgctggtgttcctgacctag

SEQ ID NO: 103813 - DNA, 801 bp, synthetic construct
  misc_feature 1..801: note = Description of Artificial Sequence: Synthetic coding sequence
  source 1..801: mol_type = other DNA
atgaccgccgtgctgctggcctgcggcatcaaccccgagaagagcatcctgttccagcagagccaggtgagcgagcacacccagctgagctggatcctgagctgcatggtgagactgcccagactgcagcacctgcaccagtggaaggccaagaccaccaagcagaagcacgacggcaccgtgggcctgctgacctaccccgtgctgcaggccgccgacatcctgctgtacaagagcacccacgtgcccgtgggcgaggaccaggtgcagcacatggagctggtgcaggacctggcccagggcttcaacaagaagtacggcgagttcttccccgtgcccgagagcatcctgaccagcatgaagaaggtgaagagcctgagagaccccagcgccaagatgagcaagagcgaccccgacaagctggccaccgtgagaatcaccgacagccccgaggagatcgtgcagaagttcagaaaggccgtgaccgacttcaccagcgaggtgacctacgaccccgccggcagagccggcgtgagcaacatcgtggccgtgcacgccgccgtgaccggcctgagcgtggaggaggtggtgagaagaagcgccggcatgaacaccgccagatacaagctggccgtggccgacgccgtgatcgagaagttcgcccccatcaagagagagatcgagaagctgaagctggacaaggaccacctggagaaggtgctgcagatcggcagcgccaaggccaaggagctggcctacaccgtgtgccaggaggtgaagaagctggtgggcttcctgtag

SEQ ID NO: 103814 - DNA, 1293 bp, synthetic construct
  misc_feature 1..1293: note = Description of Artificial Sequence: Synthetic coding sequence
  source 1..1293: mol_type = other DNA
atgctggtgagcctgaagatgagctacaaggccgccgccggcgaggactacaaggccgactgcccccccggcaaccccgcccccaccagcaaccacggccccgacgccaccgaggccgaggaggacttcgtggacccctggaccgtgcagaccagcagcgccaagggcatcgactacgacaagctgatcgtgagattcggcagcagcaagatcgacaaggagctgatcaacagaatcgagagagccaccggccagagaccccaccacttcctgagaagaggcatcttcttcagccacagagacatgaaccaggtgctggacgcctacgagaacaagaagcccttctacctgtacaccggcagaggccccagcagcgaggccatgcacgtgggccacctgatccccttcatcttcaccaagtggctgcaggacgtgttcaacgtgcccctggtgatccagatgaccgacgacgagaagtacctgtggaaggacctgaccctggaccaggcctacagctacgccgtggagaacgccaaggacatcatcgcctgcggcttcgacatcaacaagaccttcatcttcagcgacctggactacatgggcatgagcagcggcttctacaagaacgtggtgaagatccagaagcacgtgaccttcaaccaggtgaagggcatcttcggcttcaccgacagcgactgcatcggcaagatcagcttccccgccatccaggccgcccccagcttcagcaacagcttcccccagatcttcagagacagaaccgacatccagtgcctgatcccctgcgccatcgaccaggacccctacttcagaatgaccagagacgtggcccccagaatcggctaccccaagcccgccctgctgcacagcaccttcttccccgccctgcagggcgcccagaccaagatgagcgccagcgaccccaacagcagcatcttcctgaccgacaccgccaagcagatcaagaccaaggtgaacaagcacgccttcagcggcggcagagacaccatcgaggagcacagacagttcggcggcaactgcgacgtggacgtgagcttcatgtacctgaccttcttcctggaggacgacgacaagctggagcagatcagaaaggactacaccagcggcgccatgctgaccggcgagctgaagaaggccctgatcgaggtgctgcagcccctgatcgccgagcaccaggccagaagaaaggaggtgaccgacgagatcgtgaaggagttcatgacccccagaaagctgagcttcgacttccagtag

SEQ ID NO: 103815 - DNA, 1416 bp, synthetic construct
  misc_feature 1..1416: note = Description of Artificial Sequence: Synthetic coding sequence
  source 1..1416: mol_type = other DNA
atgcccaacagcgagcccgccagcctgctggagctgttcaacagcatcgccacccagggcgagctggtgagaagcctgaaggccggcaacgccagcaaggacgagatcgacagcgccgtgaagatgctggtgagcctgaagatgagctacaaggccgccgccggcgaggactacaaggccgactgcccccccggcaaccccgcccccaccagcaaccacggccccgacgccaccgaggccgaggaggacttcgtggacccctggaccgtgcagaccagcagcgccaagggcatcgactacgacaagctgatcgtgagattcggcagcagcaagatcgacaaggagctgatcaacagaatcgagagagccaccggccagagaccccaccacttcctgagaagaggcatcttcttcagccacagagacatgaaccaggtgctggacgcctacgagaacaagaagcccttctacctgtacaccggcagaggccccagcagcgaggccatgcacgtgggccacctgatccccttcatcttcaccaagtggctgcaggacgtgttcaacgtgcccctggtgatccagatgaccgacgacgagaagtacctgtggaaggacctgaccctggaccaggcctacagctacgccgtggagaacgccaaggacatcatcgcctgcggcttcgacatcaacaagaccttcatcttcagcgacctggactacatgggcatgagcagcggcttctacaagaacgtggtgaagatccagaagcacgtgaccttcaaccaggtgaagggcatcttcggcttcaccgacagcgactgcatcggcaagatcagcttccccgccatccaggccgcccccagcttcagcaacagcttcccccagatcttcagagacagaaccgacatccagtgcctgatcccctgcgccatcgaccaggacccctacttcagaatgaccagagacgtggcccccagaatcggctaccccaagcccgccctgctgcacagcaccttcttccccgccctgcagggcgcccagaccaagatgagcgccagcgaccccaacagcagcatcttcctgaccgacaccgccaagcagatcaagaccaaggtgaacaagcacgccttcagcggcggcagagacaccatcgaggagcacagacagttcggcggcaactgcgacgtggacgtgagcttcatgtacctgaccttcttcctggaggacgacgacaagctggagcagatcagaaaggactacaccagcggcgccatgctgaccggcgagctgaagaaggccctgatcgaggtgctgcagcccctgatcgccgagcaccaggccagaagaaaggaggtgaccgacgagatcgtgaaggagttcatgacccccagaaagctgagcttcgacttccagtag

SEQ ID NO: 103816 - DNA, 1293 bp, synthetic construct; identical to SEQ ID NO: 103814
  misc_feature 1..1293: note = Description of Artificial Sequence: Synthetic coding sequence
  source 1..1293: mol_type = other DNA

SEQ ID NO: 103817 - DNA, 1416 bp, synthetic construct; identical to SEQ ID NO: 103815
  misc_feature 1..1416: note = Description of Artificial Sequence: Synthetic coding sequence
  source 1..1416: mol_type = other DNA

SEQ ID NO: 103818 - DNA, 684 bp, synthetic construct
  misc_feature 1..684: note = Description of Artificial Sequence: Synthetic coding sequence
  source 1..684: mol_type = other DNA
atgctggtgagcctgaagatgagctacaaggccgccgccggcgaggactacaaggccgactgcccccccggcaaccccgcccccaccagcaaccacggccccgacgccaccgaggccgaggaggacttcgtggacccctggaccgtgcagaccagcagcgccaagggcatcgactacgacaagctgatcgtgagattcggcagcagcaagatcgacaaggagctgatcaacagaatcgagagagccaccggccagagaccccaccacttcctgagaagaggcatcttcttcagccacagagacatgaaccaggtgctggacgcctacgagaacaagaagcccttctacctgtacaccggcagaggccccagcagcgaggccatgcacgtgggccacctgatccccttcatcttcaccaagtggctgcaggacgtgttcaacgtgcccctggtgatccagatgaccgacgacgagaagtacctgtggaaggacctgaccctggaccaggcctacagctacgccgtggagaacgccaaggacatcatcgcctgcggcttcgacatcaacaagaccttcatcttcagcgacctggactacatgggcatgagcagcggcttctacaagaacgtggtgaagatccagaagcacgtgaccttcaaccaggtgaagggcatcttcggctag

SEQ ID NO: 103819 - DNA, 324 bp, synthetic construct
  misc_feature 1..324: note = Description of Artificial Sequence: Synthetic coding sequence
  source 1..324: mol_type = other DNA
atgcccaacagcgagcccgccagcctgctggagctgttcaacagcatcgccacccagggcgagctggtgagaagcctgaaggccggcaacgccagcaaggacgagatcgacagcgccgtgaagatgctggtgagcctgaagatgagctacaaggccgccgccggcgaggactacaaggccgactgcccccccggcaaccccgcccccaccagcaaccacggccccgacgccaccgaggccgaggaggacttcgtggacccctggaccgtgcagaccagcagcgccaagggcatcgactacgacaagctgatcgtgagattctag

SEQ ID NO: 103820 - DNA, 453 bp, synthetic construct
  misc_feature 1..453: note = Description of Artificial Sequence: Synthetic coding sequence
  source 1..453: mol_type = other DNA
atgcccaacagcgagcccgccagcctgctggagctgttcaacagcatcgccacccagggcgagctggtgagaagcctgaaggccggcaacgccagcaaggacgagatcgacagcgccgtgaagatgctggtgagcctgaagatgagctacaaggccgccgccggcgaggactacaaggccgactgcccccccggcaaccccgcccccaccagcaaccacggccccgacgccaccgaggccgaggaggacttcgtggacccctggaccgtgcagaccagcagcgccaagggcatcgactacgacaagctgatcgtgagattcggcagcagcaagatcgacaaggagctgatcaacagaatcgagagagccaccggccagagaccccaccacttcctgagaagaggcatcttcttcagccacagagacatgaaccaggtgctggacgcctactag

SEQ ID NO: 103821 - DNA, 294 bp, synthetic construct
  misc_feature 1..294: note = Description of Artificial Sequence: Synthetic coding sequence
  source 1..294: mol_type = other DNA
atgcccaacagcgagcccgccagcctgctggagctgttcaacagcatcgccacccagggcgagctggtgagaagcctgaaggccggcaacgccagcaaggacgagatcgacagcgccgtgaagatgctggtgagcctgaagatgagctacaaggccgccgccggcgaggactacaaggccgactgcccccccggcaaccccgcccccaccagcaaccacggccccgacgccaccgaggccgaggaggacttcgtggacccctggaccgtgcagaccagcagcgccaagggctag

SEQ ID NO: 103822 - DNA, 81 bp, synthetic construct
  misc_feature 1..81: note = Description of Artificial Sequence: Synthetic coding sequence
  source 1..81: mol_type = other DNA
atgcccaacagcgagcccgccagcctgctggagctgttcaacagcatcgccacccagggcgagctggtgagaagcctgtag

SEQ ID NO: 103823 - DNA, 318 bp, synthetic construct
  misc_feature 1..318: note = Description of Artificial Sequence: Synthetic coding sequence
  source 1..318: mol_type = other DNA
atgcccaacagcgagcccgccagcctgctggagctgttcaacagcatcgccacccagggcgagctggtgagaagcctgaaggccggcaacgccagcaaggacgagatcgacagcgccgtgaagatgctggtgagcctgaagatgagctacaaggccgccgccggcgaggactacaaggccgactgcccccccggcaaccccgcccccaccagcaaccacggccccgacgccaccgaggccgaggaggacttcgtggacccctggaccgtgcagaccagcagcgccaagggcatcgactacgacaagctgatcgtgtag

SEQ ID NO: 103824 - DNA, 102 bp, synthetic construct
  misc_feature 1..102: note = Description of Artificial Sequence: Synthetic coding sequence
  source 1..102: mol_type = other DNA
atgcccaacagcgagcccgccagcctgctggagctgttcaacagcatcgccacccagggcgagctggtgagaagcctgaaggccggcaacgccagcaagtag

SEQ ID NO: 103825 - DNA, 207 bp, synthetic construct
  misc_feature 1..207: note = Description of Artificial Sequence: Synthetic coding sequence
  source 1..207: mol_type = other DNA
atgcccaacagcgagcccgccagcctgctggagctgttcaacagcatcgccacccagggcgagctggtgagaagcctgaaggccggcaacgccagcaaggacgagatcgacagcgccgtgaagatgctggtgagcctgaagatgagctacaaggccgccgccggcgaggactacaaggccgactgcccccccggcaaccccgcctag

SEQ ID NO: 103826 - DNA, 375 bp, synthetic construct
  misc_feature 1..375: note = Description of Artificial Sequence: Synthetic coding sequence
  source 1..375: mol_type = other DNA
atgcccaacagcgagcccgccagcctgctggagctgttcaacagcatcgccacccagggcgagctggtgagaagcctgaaggccggcaacgccagcaaggacgagatcgacagcgccgtgaagatgctggtgagcctgaagatgagctacaaggccgccgccggcgaggactacaaggccgactgcccccccggcaaccccgcccccaccagcaaccacggccccgacgccaccgaggccgaggaggacttcgtggacccctggaccgtgcagaccagcagcgccaagggcatcgactacgacaagctgatcgtgagattcggcagcagcaagatcgacaaggagctgatcaacagaatcgagagagccacctag

SEQ ID NO: 103827 - DNA, 261 bp, synthetic construct
  misc_feature 1..261: note = Description of Artificial Sequence: Synthetic coding sequence
  source 1..261: mol_type = other DNA
atgcccaacagcgagcccgccagcctgctggagctgttcaacagcatcgccacccagggcgagctggtgagaagcctgaaggccggcaacgccagcaaggacgagatcgacagcgccgtgaagatgctggtgagcctgaagatgagctacaaggccgccgccggcgaggactacaaggccgactgcccccccggcaaccccgcccccaccagcaaccacggccccgacgccaccgaggccgaggaggacttcgtggactag

SEQ ID NO: 103828 - DNA, 168 bp, synthetic construct
  misc_feature 1..168: note = Description of Artificial Sequence: Synthetic coding sequence
  source 1..168: mol_type = other DNA
atgcccaacagcgagcccgccagcctgctggagctgttcaacagcatcgccacccagggcgagctggtgagaagcctgaaggccggcaacgccagcaaggacgagatcgacagcgccgtgaagatgctggtgagcctgaagatgagctacaaggccgccgccggctag

SEQ ID NO: 103829 - DNA, 192 bp, synthetic construct
  misc_feature 1..192: note = Description of Artificial Sequence: Synthetic coding sequence
  source 1..192: mol_type = other DNA
atgcccaacagcgagcccgccagcctgctggagctgttcaacagcatcgccacccagggcgagctggtgagaagcctgaaggccggcaacgccagcaaggacgagatcgacagcgccgtgaagatgctggtgagcctgaagatgagctacaaggccgccgccggcgaggactacaaggccgactgcccctag

SEQ ID NO: 103830 - DNA, 213 bp, synthetic construct
  misc_feature 1..213: note = Description of Artificial Sequence: Synthetic coding sequence
  source 1..213: mol_type = other DNA
atgcccaacagcgagcccgccagcctgctggagctgttcaacagcatcgccacccagggcgagctggtgagaagcctgaaggccggcaacgccagcaaggacgagatcgacagcgccgtgaagatgctggtgagcctgaagatgagctacaaggccgccgccggcgaggactacaaggccgactgcccccccggcaaccccgcccccacctag

SEQ ID NO: 103831 - DNA, 177 bp, synthetic construct
  misc_feature 1..177: note = Description of Artificial Sequence: Synthetic coding sequence
  source 1..177: mol_type = other DNA
atgcccaacagcgagcccgccagcctgctggagctgttcaacagcatcgccacccagggcgagctggtgagaagcctgaaggccggcaacgccagcaaggacgagatcgacagcgccgtgaagatgctggtgagcctgaagatgagctacaaggccgccgccggcgaggactactag

SEQ ID NO: 103832 - DNA, 423 bp, synthetic construct
  misc_feature 1..423: note = Description of Artificial Sequence: Synthetic coding sequence
  source 1..423: mol_type = other DNA
atgctggtgagcctgaagatgagctacaaggccgccgccggcgaggactacaaggccgactgcccccccggcaaccccgcccccaccagcaaccacggccccgacgccaccgaggccgaggaggacttcgtggacccctggaccgtgcagaccagcagcgccaagggcatcgactacgacaagctgatcgtgagattcggcagcagcaagatcgacaaggagctgatcaacagaatcgagagagccaccggccagagaccccaccacttcctgagaagaggcatcttcttcagccacagagacatgaaccaggtgctggacgcctacgagaacaagaagcccttctacctgtacaccggcagaggccccagcagcgaggccatgcacgtgggccacctgatccccttcatcttcaccaagtag

SEQ ID NO: 103833 - DNA, 462 bp, synthetic construct
  misc_feature 1..462: note = Description of Artificial Sequence: Synthetic coding sequence
  source 1..462: mol_type = other DNA
atgctggtgagcctgaagatgagctacaaggccgccgccggcgaggactacaaggccgactgcccccccggcaaccccgcccccaccagcaaccacggccccgacgccaccgaggccgaggaggacttcgtggacccctggaccgtgcagaccagcagcgccaagggcatcgactacgacaagctgatcgtgagattcggcagcagcaagatcgacaaggagctgatcaacagaatcgagagagccaccggccagagaccccaccacttcctgagaagaggcatcttcttcagccacagagacatgaaccaggtgctggacgcctacgagaacaagaagcccttctacctgtacaccggcagaggccccagcagcgaggccatgcacgtgggccacctgatccccttcatcttcaccaagtggctgcaggacgtgttcaacgtgcccctggtgatccagtag

SEQ ID NO: 103834 - DNA, 675 bp, synthetic construct
  misc_feature 1..675: note = Description of Artificial Sequence: Synthetic coding sequence
  source 1..675: mol_type = other DNA
atgctggtgagcctgaagatgagctacaaggccgccgccggcgaggactacaaggccgactgcccccccggcaaccccgcccccaccagcaaccacggccccgacgccaccgaggccgaggaggacttcgtggacccctggaccgtgcagaccagcagcgccaagggcatcgactacgacaagctgatcgtgagattcggcagcagcaagatcgacaaggagctgatcaacagaatcgagagagccaccggccagagaccccaccacttcctgagaagaggcatcttcttcagccacagagacatgaaccaggtgctggacgcctacgagaacaagaagcccttctacctgtacaccggcagaggccccagcagcgaggccatgcacgtgggccacctgatccccttcatcttcaccaagtggctgcaggacgtgttcaacgtgcccctggtgatccagatgaccgacgacgagaagtacctgtggaaggacctgaccctggaccaggcctacagctacgccgtggagaacgccaaggacatcatcgcctgcggcttcgacatcaacaagaccttcatcttcagcgacctggactacatgggcatgagcagcggcttctacaagaacgtggtgaagatccagaagcacgtgaccttcaaccaggtgaagggctag

SEQ ID NO: 103835 - DNA, 1293 bp, synthetic construct; identical to SEQ ID NO: 103814
  misc_feature 1..1293: note = Description of Artificial Sequence: Synthetic coding sequence
  source 1..1293: mol_type = other DNA

SEQ ID NO: 103836 - DNA, 345 bp, synthetic construct
  misc_feature 1..345: note = Description of Artificial Sequence: Synthetic coding sequence
  source 1..345: mol_type = other DNA
atgcccaacagcgagcccgccagcctgctggagctgttcaacagcatcgccacccagggcgagctggtgagaagcctgaaggccggcaacgccagcaaggacgagatcgacagcgccgtgaagatgctggtgagcctgaagatgagctacaaggccgccgccggcgaggactacaaggccgactgcccccccggcaaccccgcccccaccagcaaccacggccccgacgccaccgaggccgaggaggacttcgtggacccctggaccgtgcagaccagcagcgccaagggcatcgactacgacaagctgatcgtgagattcggcagcagcaagatcgacaagtag

SEQ ID NO: 103837 - DNA, 177 bp, synthetic construct; identical to SEQ ID NO: 103831
  misc_feature 1..177: note = Description of Artificial Sequence: Synthetic coding sequence
  source 1..177: mol_type = other DNA

SEQ ID NO: 103838 - DNA, 459 bp, synthetic construct
  misc_feature 1..459: note = Description of Artificial Sequence: Synthetic coding sequence
  source 1..459: mol_type = other DNA
atgcccaacagcgagcccgccagcctgctggagctgttcaacagcatcgccacccagggcgagctggtgagaagcctgaaggccggcaacgccagcaaggacgagatcgacagcgccgtgaagatgctggtgagcctgaagatgagctacaaggccgccgccggcgaggactacaaggccgactgcccccccggcaaccccgcccccaccagcaaccacggccccgacgccaccgaggccgaggaggacttcgtggacccctggaccgtgcagaccagcagcgccaagggcatcgactacgacaagctgatcgtgagattcggcagcagcaagatcgacaaggagctgatcaacagaatcgagagagccaccggccagagaccccaccacttcctgagaagaggcatcttcttcagccacagagacatgaaccaggtgctggacgcctacgagaactag

SEQ ID NO: 103839 - DNA, 1416 bp, synthetic construct; identical to SEQ ID NO: 103815
  misc_feature 1..1416: note = Description of Artificial Sequence: Synthetic coding sequence
  source 1..1416: mol_type = other DNA

SEQ ID NO: 103840 - DNA, 465 bp, synthetic construct
  misc_feature 1..465: note = Description of Artificial Sequence: Synthetic coding sequence
  source 1..465: mol_type = other DNA
atgctggtgagcctgaagatgagctacaaggccgccgccggcgaggactacaaggccgactgcccccccggcaaccccgcccccaccagcaaccacggccccgacgccaccgaggccgaggaggacttcgtggacccctggaccgtgcagaccagcagcgccaagggcatcgactacgacaagctgatcgtgagattcggcagcagcaagatcgacaaggagctgatcaacagaatcgagagagccaccggccagagaccccaccacttcctgagaagaggcatcttcttcagccacagagacatgaaccaggtgctggacgcctacgagaacaagaagcccttctacctgtacaccggcagaggccccagcagcgaggccatgcacgtgggccacctgatccccttcatcttcaccaagtggctgcaggacgtgttcaacgtgcccctggtgatccagatgtag

SEQ ID NO: 103841 - DNA, 639 bp, synthetic construct
  misc_feature 1..639: note = Description of Artificial Sequence: Synthetic coding sequence
  source 1..639: mol_type = other DNA
atgcccaacagcgagcccgccagcctgctggagctgttcaacagcatcgccacccagggcgagctggtgagaagcctgaaggccggcaacgccagcaaggacgagatcgacagcgccgtgaagatgctggtgagcctgaagatgagctacaaggccgccgccggcgaggactacaaggccgactgcccccccggcaaccccgcccccaccagcaaccacggccccgacgccaccgaggccgaggaggacttcgtggacccctggaccgtgcagaccagcagcgccaagggcatcgactacgacaagctgatcgtgagattcggcagcagcaagatcgacaaggagctgatcaacagaatcgagagagccaccggccagagaccccaccacttcctgagaagaggcatcttcttcagccacagagacatgaaccaggtgctggacgcctacgagaacaagaagcccttctacctgtacaccggcagaggccccagcagcgaggccatgcacgtgggccacctgatccccttcatcttcaccaagtggctgcaggacgtgttcaacgtgcccctggtgatccagatgaccgacgacgagaagtacctgtggaaggacctgaccctggaccaggcctactag

SEQ ID NO: 103842 - DNA, 1041 bp, synthetic construct
  misc_feature 1..1041: note = Description of Artificial Sequence: Synthetic coding sequence
  source 1..1041: mol_type = other DNA
atgagcctgctgagaagcctgagagtgttcctggtggccagaaccggcagctaccccgccggcagcctgctgagacagagcccccagcccagacacaccttctacgccggccccagactgagcgccagcgccagcagcaaggagctgctgatgaagctgagaagaaagaccggctacagcttcgtgaactgcaagaaggccctggagacctgcggcggcgacctgaagcaggccgagatctggctgcacaaggaggcccagaaggagggctggagcaaggccgccaagctgcagggcagaaagaccaaggagggcctgatcggcctgctgcaggagggcaacaccaccgtgctggtggaggtgaactgcgagaccgacttcgtgagcagaaacctgaagttccagctgctggtgcagcaggtggccctgggcaccatgatgcactgccagaccctgaaggaccagcccagcgcctacagcaaggtgcagtggctgacccccgtgaacctggccctgtgggaggccgaggccggcggcagcctggagggcttcctgaacagcagcgagctgagcggcctgcccgccggccccgacagagagggcagcctgaaggaccagctggccctggccatcggcaagctgggcgagaacatgatcctgaagagagccgcctgggtgaaggtgcccagcggcttctacgtgggcagctacgtgcacggcgccatgcagagccccagcctgcacaagctggtgctgggcaagtacggcgccctggtgatctgcgagaccagcgagcagaagaccaacctggaggacgtgggcagaagactgggccagcacgtggtgggcatggcccccctgagcgtgggcagcctggacgacgagcccggcggcgaggccgagaccaagatgctgagccagccctacctgctggaccccagcatcaccctgggccagtacgtgcagccccagggcgtgagcgtggtggacttcgtgagattcgagtgcggcgagggcgaggaggccgccgagaccgagtag

SEQ ID NO: 103843 - DNA, 858 bp, synthetic construct
  misc_feature 1..858: note = Description of Artificial Sequence: Synthetic coding sequence
  source 1..858: mol_type = other DNA
atggtgtactgcaccaccacctgggccatctggaactgccagctgctgctgggctacaagcccctgcagaacgtgaccggcctgaacaccgtgggcagctgcaacaccgtggccgagatctggctgcacaaggaggcccagaaggagggctggagcaaggccgccaagctgcagggcagaaagaccaaggagggcctgatcggcctgctgcaggagggcaacaccaccgtgctggtggaggtgaactgcgagaccgacttcgtgagcagaaacctgaagttccagctgctggtgcagcaggtggccctgggcaccatgatgcactgccagaccctgaaggaccagcccagcgcctacagcaagggcttcctgaacagcagcgagctgagcggcctgcccgccggccccgacagagagggcagcctgaaggaccagctggccctggccatcggcaagctgggcgagaacatgatcctgaagagagccgcctgggtgaaggtgcccagcggcttctacgtgggcagctacgtgcacggcgccatgcagagccccagcctgcacaagctggtgctgggcaagtacggcgccctggtgatctgcgagaccagcgagcagaagaccaacctggaggacgtgggcagaagactgggccagcacgtggtgggcatggcccccctgagcgtgggcagcctggacgacgagcccggcggcgaggccgagaccaagatgctgagccagccctacctgctggaccccagcatcaccctgggccagtacgtgcagccccagggcgtgagcgtggtggacttcgtgagattcgagtgcggcgagggcgaggaggccgccgagaccgagtag

SEQ ID NO: 103844 - DNA, 978 bp, synthetic construct
  misc_feature 1..978: note = Description of Artificial Sequence: Synthetic coding sequence
  source 1..978: mol_type = other DNA
atgagcctgctgagaagcctgagagtgttcctggtggccagaaccggcagctaccccgccggcagcctgctgagacagagcccccagcccagacacaccttctacgccggccccagactgagcgccagcgccagcagcaaggagctgctgatgaagctgagaagaaagaccggctacagcttcgtgaactgcaagaaggccctggagacctgcggcggcgacctgaagcaggccgagatctggctgcacaaggaggcccagaaggagggctggagcaaggccgccaagctgcagggcagaaagaccaaggagggcctgatcggcctgctgcaggagggcaacaccaccgtgctggtggaggtgaactgcgagaccgacttcgtgagcagaaacctgaagttccagctgctggtgcagcaggtggccctgggcaccatgatgcactgccagaccctgaaggaccagcccagcgcctacagcaagggcttcctgaacagcagcgagctgagcggcctgcccgccggccccgacagagagggcagcctgaaggaccagctggccctggccatcggcaagctgggcgagaacatgatcctgaagagagccgcctgggtgaaggtgcccagcggcttctacgtgggcagctacgtgcacggcgccatgcagagccccagcctgcacaagctggtgctgggcaagtacggcgccctggtgatctgcgagaccagcgagcagaagaccaacctggaggacgtgggcagaagactgggccagcacgtggtgggcatggcccccctgagcgtgggcagcctggacgacgagcccggcggcgaggccgagaccaagatgctgagccagccctacctgctggaccccagcatcaccctgggccagtacgtgcagccccagggcgtgagcgtggtggacttcgtgagattcgagtgcggcgagggcgaggaggccgccgagaccgagtag

SEQ ID NO: 103845 - DNA, 504 bp, synthetic construct
  misc_feature 1..504: note = Description of Artificial Sequence: Synthetic coding sequence
  source 1..504: mol_type = other DNA
atgagcctgctgagaagcctgagagtgttcctggtggccagaaccggcagctaccccgccggcagcctgctgagacagagcccccagcccagacacaccttctacgccggccccagactgagcgccagcgccagcagcaaggagctgctgatgaagctgagaagaaagaccggctacagcttcgtgaactgcaagaaggccctggagacctgcggcggcgacctgaagcaggccgagatctggctgcacaaggaggcccagaaggagggctggagcaaggccgccaagctgcagggcagaaagaccaaggagggcctgatcggcctgctgcaggagggcaacaccaccgtgctggtggaggtgaactgcgagaccgacttcgtgagcagaaacctgaagttccagctgctggtgcagcaggtggccctgggcaccatgatgcactgccagaccctgaaggaccagcccagcgcctacagcaaggagaactgggagaagacctag

SEQ ID NO: 103846 - DNA, 648 bp, synthetic construct
  misc_feature 1..648: note = Description of Artificial Sequence: Synthetic coding sequence
  source 1..648: mol_type = other DNA
atgagcctgctgagaagcctgagagtgttcctggtggccagaaccggcagctaccccgccggcagcctgctgagacagagcccccagcccagacacaccttctacgccggccccagactgagcgccagcgccagcagcaaggagctgctgatgaagctgagaagaaagaccggctacagcttcgtgaactgcaagaaggccctggagacctgcggcggcgacctgaagcaggccgagatctggctgcacaaggaggcccagaaggagggctggagcaaggccgccaagctgcagggcagaaagaccaaggagggcctgatcggcctgctgcaggagggcaacaccaccgtgctggtggaggtgaactgcgagaccgacttcgtgagcagaaacctgaagttccagctgctggtgcagcaggtggccctgggcaccatgatgcactgccagaccctgaaggaccagcccagcgcctacagcaagggcttcctgaacagcagcgagctgagcggcctgcccgccggccccgacagagagggcagcctgaaggaccagctggccctggccatcggcctgcccttccagatcggcgccgtgagcgagctgcagctgcccgagagcaacttcctgcagaacaccagcagctag

SEQ ID NO: 103847 - DNA, 435 bp, synthetic construct
  misc_feature 1..435: note = Description of Artificial Sequence: Synthetic coding sequence
  source 1..435: mol_type = other DNA
atgaagagccagtggtgcagacccgtggccatggacctgggcgtgtaccagctgagacacttcagcatcagcttcctgagcagcctgctgggcaccgagaacgccagcgtgagactggacaacagcagcagcggcgccagcgtggtggccatcgacaacaagatcgagcaggccatggacctggtgaagagccacctgatgtacgccgtgagagaggaggtggaggtgctgaaggagcagatcaaggagctgatcgagaagaacagccagctggagcaggagaacaacctgctgaagaccctggccagccccgagcagctggcccagttccaggcccagctgcagaccggcagcccccccgccaccacccagccccagggcaccacccagccccccgcccagcccgccagccagggcagcggccccaccgcctag

SEQ ID NO: 103848 - DNA, 3222 bp, synthetic construct
  misc_feature 1..3222: note = Description of Artificial Sequence: Synthetic coding sequence
  source 1..3222: mol_type = other DNA
atgcaccagccccccgagagcaccgccgccgccgccgccgccgccgacatcagcgccagaaagatggcccaccccgccatgttccccagaagaggcagcggcagcggcagcgccagcgccctgaacgccgccggcaccggcgtgggcagcaacgccaccagcagcgaggacttccccccccccagcctgctgcagccccccccccccgccgccagcagcaccagcggcccccagcccccccccccccagagcctgaacctgctgagccaggcccagctgcaggcccagcccctggcccccggcggcacccagatgaagaagaagagcggcttccagatcaccagcgtgacccccgcccagatcagcgccagcatcagcagcaacaacagcatcgccgaggacaccgagagctacgacgacctggacgagagccacaccgaggacctgagcagcagcgagatcctggacgtgagcctgagcagagccaccgacctgggcgagcccgagagaagcagcagcgaggagaccctgaacaacttccaggaggccgagacccccggcgccgtgagccccaaccagccccacctgccccagccccacctgccccacctgccccagcagaacgtggtgatcaacggcaacgcccacccccaccacctgcaccaccaccaccagatccaccacggccaccacctgcagcacggccaccaccaccccagccacgtggccgtggccagcgccagcatcaccggcggcccccccagcagccccgtgagcagaaagctgagcaccaccggcagcagcgacagcatcacccccgtggcccccaccagcgccgtgagcagcagcggcagccccgccagcgtgatgaccaacatgagagcccccagcaccaccggcggcatcggcatcaacagcgtgaccggcaccagcaccgtgaacaacgtgaacatcaccgccgtgggcagcttcaaccccaacgtgaccagcagcatgctgggcaacgtgaacatcagcaccagcaacatccccagcgccgccggcgtgagcgtgggccccggcgtgaccagcggcgtgaacgtgaacatcctgagcggcatgggcaacggcaccatcagcagcagcgccgccgtgagcagcgtgcccaacgccgccgccggcatgaccggcggcagcgtgagcagccagcagcagcagcccaccgtgaacaccagcagattcagagtggtgaagctggacagcagcagcgagcccttcaagaagggcagatggacctgcaccgagttctacgagaaggagaacgccgtgcccgccaccgagggcgtgctgatcaacaaggtggtggagaccgtgaagcagaaccccatcgaggtgaccagcgagagagagagcaccagcggcagcagcgtgagcagcagcgtgagcaccctgagccactacaccgagagcgtgggcagcggcgagatgggcgcccccaccgtggtggtgcagcagcagcagcagcagcagcagcagcagcagcagcagcccgccctgcagggcgtgaccctgcagcagatggacttcggcagcaccggcccccagagcatccccgccgtgagcatcccccagagcatcagccagagccagatcagccaggtgcagctgcagagccaggagctgagctaccagcagaagcagggcctgcagcccgtgcccctgcaggccaccatgagcgccgccaccggcatccagcccagccccgtgaacgtggtgggcgtgaccagcgccctgggccagcagcccagcatcagcagcctggcccagccccagctgccctacagccaggccgccccccccgtgcagacccccctgcccggcgccccccccccccagcagctgcagtacggccagcagcagcccatggtgagcacccagatggcccccggccacgtgaagagcgtgacccagaaccccgccagcgagtacgtgcagcagcagcccatcctgcagaccgccatgagcagcggccagcccagcagcgccggcgtgggcgccggcaccaccgtgatccccgtggcccagccccagggcatccagctgcccgtgcagcccaccgccgtgcccgcccagcccgccggcgccagcgtgcagcccgtgggccaggcccccgccgccgtgagcgccgtgcccaccggcagccagatcgccaacatcggccagcaggccaacatccccaccgccgtgcagcagcccagcacccaggtgccccccagcgtgatccagcagggcgccccccccagcagccaggtggtgccccccgcccagaccggcatcatccaccagggcgtgcagaccagcgcccccagcctgccccagcagctggtgatcgccagccagagcagcctgctgaccgtgcccccccagccccagggcgtggagcccgtggcccagggcatcgtgagccagcagctgcccgccgtgagcagcctgcccagcgccagcagcatcagcgtgaccagccaggtgagcagcaccggccccagcggcatgcccagcgcccccaccaacctggtgcccccccagaacatcgcccagacccccgccacccagaacggcaacctggtgcagagcgtgagccagccccccctgatcgccaccaacaccaacctgcccctggcccagcagatccccctgagcagcacccagttcagcgcccagagcctggcccaggccatcggcagccagatcgaggacgccagaagagccgccgagcccagcctggtgggcctgccccagaccatcagcggcgacagcggcggcatgagcgccgtgagcgacggcagcagcagcagcctggccgccagcgccagcctgttccccctgaaggtgctgcccctgaccacccccctggtggacggcgaggacgagagcagcagcggcgccagcgtggtggccatcgacaacaagatcgagcaggccatggacctggtgaagagccacctgatgtacgccgtgagagaggaggtggaggtgctgaaggagcagatcaaggagctgatcgagaagaacagccagctggagcaggagaacaacctgctgaagaccctggccagccccgagcagctggcccagttccaggcccagctgcagaccggcagcccccccgccaccacccagccccagggcaccacccagccccccgcccagcccgccagccagggcagcggccccaccgcctag

SEQ ID NO: 103849 - DNA, 126 bp, synthetic construct
  misc_feature 1..126: note = Description of Artificial Sequence: Synthetic coding sequence
  source 1..126: mol_type = other DNA
atgaagagccagtggtgcagacccgtggccatggacctgggcgtgtaccagctgagacacttcagcatcagcttcctgagcagcctgctgggcaccgagaacgccagcgtgagactggacaactag

SEQ ID NO: 103850 - DNA, 429 bp, synthetic construct
  misc_feature 1..429: note = Description of Artificial Sequence: Synthetic coding sequence
  source 1..429: mol_type = other DNA
atgcaccagccccccgagagcaccgccgccgccgccgccgccgccgacatcagcgccagaaagatggcccaccccgccatgttccccagaagaggcagcggcagcggcagcgccagcgccctgaacgccgccggcaccggcgtgggcagcaacgccaccagcagcgaggacttccccccccccagcctgctgcagccccccccccccgccgccagcagcaccagcggcccccagcccccccccccccagagcctgaacctgctgagccaggcccagctgcaggcccagcccctggcccccggcggcacccagatgaagaagaagagcggcttccagatcaccagcgtgacccccgcccagatcagcgccagcatcagcagcaacaacagcatcgccgaggacaccgagagctacgacgacctggactag

SEQ ID NO: 103851 - DNA, 1713 bp, synthetic construct
  misc_feature 1..1713: note = Description of Artificial Sequence: Synthetic coding sequence
  source 1..1713: mol_type = other DNA
atgcaccagccccccgagagcaccgccgccgccgccgccgccgccgacatcagcgccagaaagatggcccaccccgccatgttccccagaagaggcagcggcagcggcagcgccagcgccctgaacgccgccggcaccggcgtgggcagcaacgccaccagcagcgaggacttccccccccccagcctgctgcagccccccccccccgccgccagcagcaccagcggcccccagcccccccccccccagagcctgaacctgctgagccaggcccagctgcaggcccagcccctggcccccggcggcacccagatgaagaagaagagcggcttccagatcaccagcgtgacccccgcccagatcagcgccagcatcagcagcaacaacagcatcgccgaggacaccgagagctacgacgacctggacgagagccacaccgaggacctgagcagcagcgagatcctggacgtgagcctgagcagagccaccgacctgggcgagcccgagagaagcagcagcgaggagaccctgaacaacttccaggaggccgagacccccggcgccgtgagccccaaccagccccacctgccccagccccacctgccccacctgccccagcagaacgtggtgatcaacggcaacgcccacccccaccacctgcaccaccaccaccagatccaccacggccaccacctgcagcacggccaccaccaccccagccacgtggccgtggccagcgccagcatcaccggcggcccccccagcagccccgtgagcagaaagctgagcaccaccggcagcagcgacagcatcacccccgtggcccccaccagcgccgtgagcagcagcggcagccccgccagcgtgatgaccaacatgagagcccccagcaccaccggcggcatcggcatcaacagcgtgaccggcaccagcaccgtgaacaacgtgaacatcaccgccgtgggcagcttcaaccccaacgtgaccagcagcatgctgggcaacgtgaacatcagcaccagcaacatccccagcgccgccggcgtgagcgtgggccccggcgtgaccagcggcgtgaacgtgaacatcctgagcggcatgggcaacggcaccatcagcagcagcgccgccgtgagcagcgtgcccaacgccgccgccggcatgaccggcggcagcgtgagcagccagcagcagcagcccaccgtgaacaccagcagattcagagtggtgaagctggacagcagcagcgagcccttcaagaagggcagatggacctgcaccgagttctacgagaaggagaacgccgtgcccgccaccgagggcgtgctgatcaacaaggtggtggagaccgtgaagcagaaccccatcgaggtgaccagcgagagagagagcaccagcggcagcagcgtgagcagcagcgtgagcaccctgagccactacaccgagagcgtgggcagcggcgagatgggcgcccccaccgtggtggtgcagcagcagcagcagcagcagcagcagcagcagcagcagcccgccctgcagggcgtgaccctgcagcagatggacttcggcagcaccggcccccagagcatccccgccgtgagcatcccccagagcatcagccagagccagatcagccaggtgcagctgcagagccaggagctgagctacctgaccatgaaggtggtgctgctgatcgtgtacctgtgcatgtag

SEQ ID NO: 103852 - DNA, 603 bp, synthetic construct
  misc_feature 1..603: note = Description of Artificial Sequence: Synthetic coding sequence
  source 1..603: mol_type = other DNA
atggcccagagcaagctggactgcagaagccccgtgggcctggactgctgcaactgctgcctggacctggcccacagaagcggcctgcagagaggcagcagcggcgagaacaacaaccccggcagccccaccgtgagcaacttcagacagctgcaggagaagctggtgttcgagaacctgaacaccgacaagctgaacagcatcatgagacaggacagcctggagcccgtgctgagagacccctgctacctgatcaacgagggcatctgcaacagaaacatcgaccagaccatgctgagcatcctgctgttcttccacagcgccagcggcgccagcgtggtggccatcgacaacaagatcgagcaggccatggacctggtgaagaaccacctgatgtacgccgtgagagaggaggtggagatcctgaaggagcagatcagagagctggtggagaagaacagccagctggagagagagaacaccctgctgaagaccctggccagccccgagcagctggagaagttccagagctgcctgagccccgaggagcccgcccccgagagcccccaggtgcccgaggcccccggcggcagcgccgtgtag

SEQ ID NO: 103853 - DNA, 333 bp, synthetic construct
  misc_feature 1..333: note = Description of Artificial Sequence: Synthetic coding sequence
  source 1..333: mol_type = other DNA
atggccttccagcccccctacagcagcagcctgttcagaaagagagacaacgccagcggcgccagcgtggtggccatcgacaacaagatcgagcaggccatggacctggtgaagaaccacctgatgtacgccgtgagagaggaggtggagatcctgaaggagcagatcagagagctggtggagaagaacagccagctggagagagagaacaccctgctgaagaccctggccagccccgagcagctggagaagttccagagctgcctgagccccgaggagcccgcccccgagagcccccaggtgcccgaggcccccggcggcagcgccgtgtag

SEQ ID NO: 103854 - DNA, 603 bp, synthetic construct; identical to SEQ ID NO: 103852
  misc_feature 1..603: note = Description of Artificial Sequence: Synthetic coding sequence
  source 1..603: mol_type = other DNA

SEQ ID NO: 103855 - DNA, 603 bp, synthetic construct; identical to SEQ ID NO: 103852
  misc_feature 1..603: note = Description of Artificial Sequence: Synthetic coding sequence
  source 1..603: mol_type = other DNA

SEQ ID NO: 103856 - DNA, 234 bp, synthetic construct
  misc_feature 1..234: note = Description of Artificial Sequence: Synthetic coding sequence
  source 1..234: mol_type = other DNA
atggacctggtgaagaaccacctgatgtacgccgtgagagaggaggtggagatcctgaaggagcagatcagagagctggtggagaagaacagccagctggagagagagaacaccctgctgaagaccctggccagccccgagcagctggagaagttccagagctgcctgagccccgaggagcccgcccccgagagcccccaggtgcccgaggcccccggcggcagcgccgtgtag

SEQ ID NO: 103857 - DNA, 405 bp, synthetic construct
  misc_feature 1..405: note = Description of Artificial Sequence: Synthetic coding sequence
  source 1..405: mol_type = other DNA
atgaacaccgagatgtaccagacccccatggaggtggccgtgtaccagctgcacaacttcagcatcagcttcttcagcagcctgctgggcggcgacgtggtgagcgtgaagctggacaacagcgccagcggcgccagcgtggtggccatcgacaacaagatcgagcaggccatggacctggtgaagaaccacctgatgtacgccgtgagagaggaggtggagatcctgaaggagcagatcagagagctggtggagaagaacagccagctggagagagagaacaccctgctgaagaccctggccagccccgagcagctggagaagttccagagctgcctgagccccgaggagcccgcccccgagagcccccaggtgcccgaggcccccggcggcagcgccgtgtag

SEQ ID NO: 103858 - DNA, 540 bp, synthetic construct
  misc_feature 1..540: note = Description of Artificial Sequence: Synthetic coding sequence
  source 1..540: mol_type = other DNA
atggcccagagcaagctggactgcagaagccccgtgggcctggactgctgcaactgctgcctggacctggcccacagaagcggcctgcagagaggcagcagcggcgagaacaacaaccccggcagccccaccgtgagcaacttcagacaggacagcctggagcccgtgctgagagacccctgctacctgatcaacgagggcatctgcaacagaaacatcgaccagaccatgctgagcatcctgctgttcttccacagcgccagcggcgccagcgtggtggccatcgacaacaagatcgagcaggccatggacctggtgaagaaccacctgatgtacgccgtgagagaggaggtggagatcctgaaggagcagatcagagagctggtggagaagaacagccagctggagagagagaacaccctgctgaagaccctggccagccccgagcagctggagaagttccagagctgcctgagccccgaggagcccgcccccgagagcccccaggtgcccgaggcccccggcggcagcgccgtgtag

SEQ ID NO: 103859 - DNA, 372 bp, synthetic construct
  misc_feature 1..372: note = Description of Artificial Sequence: Synthetic coding sequence
  source 1..372: mol_type = other DNA
atggcccagagcaagctggactgcagaagccccgtgggcctggactgctgcaactgctgcctggacctggcccacagaagcggcctgcagagaggcagcagcggcgagaacaacaaccccggcagccccaccgtgagcaacttcagacagctgcaggagaagctggtgttcgagaacctgaacaccgacaagctgaacagcatcatgagacaggacagcctggagcccgtgctgagagacccctgctacctgatcaacgagggcatctgcaacagaaacatcgaccagaccatgctgagcatcctgctgttcttccacagcgccagcggcgccagcgtggtggccatcgacaacaagatcgagcaggcctag

SEQ ID NO: 103860 - DNA, 78 bp, synthetic construct
  misc_feature 1..78: note = Description of Artificial Sequence: Synthetic coding sequence
  source 1..78: mol_type = other DNA
atggacctggtgaagaaccacctgatgtacgccgtgagagaggaggtggagatcctgaaggagcagatcagagagtag

SEQ ID NO: 103861 - DNA, 351 bp, synthetic construct
  misc_feature 1..351: note = Description of Artificial Sequence: Synthetic coding sequence
  source 1..351: mol_type = other DNA
atggcccagagcaagctggactgcagaagccccgtgggcctggactgctgcaactgctgcctggacctggcccacagaagcggcctgcagagaggcagcagcggcgagaacaacaaccccggcagccccaccgtgagcaacttcagacagctgcaggagaagctggtgttcgagaacctgaacaccgacaagctgaacagcatcatgagacaggacagcctggagcccgtgctgagagacccctgctacctgatcaacgagggcatctgcaacagaaacatcgaccagaccatgctgagcatcctgctgttcttccacagcgccagcggcgccagcgtggtggccatctag

SEQ ID NO: 103862 - DNA, 177 bp, synthetic construct
  misc_feature 1..177: note = Description of Artificial Sequence: Synthetic coding sequence
  source 1..177: mol_type = other DNA
atggcccagagcaagctggactgcagaagccccgtgggcctggactgctgcaactgctgcctggacctggcccacagaagcggcctgcagagaggcagcagcggcgagaacaacaaccccggcagccccaccgtgagcaacttcagacagctgcaggagaagctggtgttcgagtag

SEQ ID NO: 103863 - DNA, 255 bp, synthetic construct
  misc_feature 1..255: note = Description of Artificial Sequence: Synthetic coding sequence
  source 1..255: mol_type = other DNA
atggcccagagcaagctggactgcagaagccccgtgggcctggactgctgcaactgctgcctggacctggcccacagaagcggcctgcagagaggcagcagcggcgagaacaacaaccccggcagccccaccgtgagcaacttcagacagctgcaggagaagctggtgttcgagaacctgaacaccgacaagctgaacagcatcatgagacaggacagcctggagcccgtgctgagagacccctgctacctgtag

SEQ ID NO: 103864 - DNA, 603 bp, synthetic construct; identical to SEQ ID NO: 103852
  misc_feature 1..603: note = Description of Artificial Sequence: Synthetic coding sequence
  source 1..603: mol_type = other DNA

SEQ ID NO: 103865 - DNA, 303 bp, synthetic construct
  misc_feature 1..303: note = Description of Artificial Sequence: Synthetic coding sequence
  source 1..303: mol_type = other DNA
atggcccagagcaagctggactgcagaagccccgtgggcctggactgctgcaactgctgcctggacctggcccacagaagcggcctgcagagaggcagcagcggcgagaacaacaaccccggcagccccaccgtgagcaacttcagacagctgcaggagaagctggtgttcgagaacctgaacaccgacaagctgaacagcatcatgagacaggacagcctggagcccgtgctgagagacccctgctacctgatcaacgagggcatctgcaacagaaacatcgaccagaccatgctgagctag

SEQ ID NO: 103866 - DNA, 360 bp, synthetic construct
  misc_feature 1..360: note = Description of Artificial Sequence: Synthetic coding sequence
  source 1..360: mol_type = other DNA
atggcccagagcaagctggactgcagaagccccgtgggcctggactgctgcaactgctgcctggacctggcccacagaagcggcctgcagagaggcagcagcggcgagaacaacaaccccggcagccccaccgtgagcaacttcagacagctgcaggagaagctggtgttcgagaacctgaacaccgacaagctgaacagcatcatgagacaggacagcctggagcccgtgctgagagacccctgctacctgatcaacgagggcatctgcaacagaaacatcgaccagaccatgctgagcatcctgctgttcttccacagcgccagcggcgccagcgtggtggccatcgacaacaagtag

SEQ ID NO: 103867 - DNA, 399 bp, synthetic construct
  misc_feature 1..399: note = Description of Artificial Sequence: Synthetic coding sequence
  source 1..399: mol_type = other DNA
atgagacaggacagcctggagcccgtgctgagagacccctgctacctgatcaacgagggcatctgcaacagaaacatcgaccagaccatgctgagcatcctgctgttcttccacagcgccagcggcgccagcgtggtggccatcgacaacaagatcgagcaggccatggacctggtgaagaaccacctgatgtacgccgtgagagaggaggtggagatcctgaaggagcagatcagagagctggtggagaagaacagccagctggagagagagaacaccctgctgaagaccctggccagccccgagcagctggagaagttccagagctgcctgagccccgaggagcccgcccccgagagcccccaggtgcccgaggcccccggcggcagcgccgtgtag

SEQ ID NO: 103868 - DNA, 375 bp, synthetic construct
  misc_feature 1..375: note = Description of Artificial Sequence: Synthetic coding sequence
  source 1..375: mol_type = other DNA
atggcccagagcaagctggactgcagaagccccgtgggcctggactgctgcaactgctgcctggacctggcccacagaagcggcctgcagagaggcagcagcggcgagaacaacaaccccggcagccccaccgtgagcaacttcagacagctgcaggagaagctggtgttcgagaacctgaacaccgacaagctgaacagcatcatgagacaggacagcctggagcccgtgctgagagacccctgctacctgatcaacgagggcatctgcaacagaaacatcgaccagaccatgctgagcatcctgctgttcttccacagcgccagcggcgccagcgtggtggccatcgacaacaagatcgagcaggccatgtag

SEQ ID NO: 103869 - DNA, 1188 bp, synthetic construct
  misc_feature 1..1188: note = Description of Artificial Sequence: Synthetic coding sequence
  source 1..1188: mol_type = other DNA
atgagcggcggcaagaagaagagcagcttccagatcaccagcgtgaccaccgactacgagggccccggcagccccggcgccagcgacccccccaccccccagccccccaccggccccccccccagactgcccaacggcgagcccagccccgaccccggcggcaagggcacccccagaaacggcagccccccccccggcgcccccagcagcagattcagagtggtgaagctgccccacggcctgggcgagccctacagaagaggcagatggacctgcgtggacgtgtacgagagagacctggagccccacagcttcggcggcctgctggagggcatcagaggcgccagcggcggcgccggcggcagaagcctggacagcagactggagctggccagcctgggcctgggcgcccccaccccccccagcggcctgagccagggccccaccagctggctgagacccccccccaccagccccggcccccaggccagaagcttcaccggcggcctgggccagctggtggtgcccagcaaggccaaggccgagaagccccccctgagcgccagcagcccccagcagagaccccccgagcccgagaccggcgagagcgccggcaccagcagagccgccacccccctgcccagcctgagagtggaggccgaggccggcggcagcggcgccagaaccccccccctgagcagaagaaaggccgtggacatgagactgagaatggagctgggcgcccccgaggagatgggccaggtgccccccctggacagcagacccagcagccccgccctgtacttcacccacgacgccagcctggtgcacaagagccccgaccccttcggcgccgtggccgcccagaagttcagcctggcccacagcatgctggccatcagcggccacctggacagcgacgacgacagcggcagcggcagcctggtgggcatcgacaacaagatcgagcaggccatggacctggtgaagagccacctgatgttcgccgtgagagaggaggtggaggtgctgaaggagcagatcagagagctggccgagagaaacgccgccctggagcaggagaacggcctgctgagagccctggccagccccgagcagctggcccagctgcccagcagcggcgtgcccagactgggcccccccgcccccaacggccccagcgtgtag

SEQ ID NO: 103870 - DNA, 1314 bp, synthetic construct
  misc_feature 1..1314: note = Description of Artificial Sequence: Synthetic coding sequence
  source 1..1314: mol_type = other DNA
atgagcggcctggacggcgtgaagagaaccacccccctgcagacccacagcatcatcatcagcgaccaggtgcccagcgaccaggacgcccaccagtacctgagactgagagaccagagcgaggccacccaggtgatggccgagcccggcgagggcggcagcgagaccgtggccctgcccccccccccccccagcgaggagggcggcgtgccccaggacgccgccggcagaggcggcaccccccagatcagagtggtgggcggcagaggccacgtggccatcaaggccggccaggaggagggccagccccccgccgagggcctggccgccgccagcgtggtgatggccgccgacagaagcctgaagaagggcgtgcagggcggcgagaaggccctggagatctgcggcgcccagagaagcgccagcgagctgaccgccggcgccgaggccgaggccgaggaggtgaagaccggcaagtgcgccaccgtgagcgccgccgtggccgagagagagagcgccgaggtggtgaaggagggcctggccgagaaggaggtgatggaggagcagatggaggtggaggagcagccccccgagggcgaggagatcgaggtggccgaggaggacagactggaggaggaggccagagaggaggagggcccctggcccctgcacgaggccctgagaatggaccccctggaggccatccagctggagctggacaccgtgaacgcccaggccgacagagccttccagcagctggagcacaagttcggcagaatgagaagacactacctggagagaagaaactacatcatccagaacatccccggcttctggatgaccgccttcagaaaccacccccagctgagcgccatgatcagaggccaggacgccgagatgctgagatacatcaccaacctggaggtgaaggagctgagacaccccagaaccggctgcaagttcaagttcttcttcagaagaaacccctacttcagaaacaagctgatcgtgaaggagtacgaggtgagaagcagcggcagagtggtgagcctgagcacccccatcatctggagaagaggccacgagccccagagcttcatcagaagaaaccaggacctgatctgcagcttcttcacctggttcagcgaccacagcctgcccgagagcgacaagatcgccgagatcatcaaggaggacctgtggcccaaccccctgcagtactacctgctgagagagggcgtgagaagagccagaagaagacccctgagagagcccgtggagatccccagacccttcggcttccagagcggctag

SEQ ID NO: 103871 - DNA, 522 bp, synthetic construct
  misc_feature 1..522: note = Description of Artificial Sequence: Synthetic coding sequence
  source 1..522: mol_type = other DNA
atgagcggcctggacggcgtgaagagaaccacccccctgcagacccacagcatcatcatcagcgaccaggtgcccagcgaccaggacgcccaccagtacctgagactgagagaccagagcgaggccacccaggtgatggccgagcccggcgagggcggcagcgagaccgtggccctgcccccccccccccccagcgaggagggcggcgtgccccaggacgccgccggcagaggcggcaccccccagatcagagtggtgggcggcagaggccacgtggccatcaaggccggccaggaggagggccagccccccgccgagggcctggccgccgccagcgtggtgatggccgccgacagaagcctgaagaagggcgtgcagggcggcgagaaggccctggagatctgcggcgcccagagaagcgccagcgagctgaccgccggcgccgaggccgaggccgaggaggtgaagaccggcaagtgcgccaccgtgagcgccgccgtggccaagatgcagagatgctag

SEQ ID NO: 103872 - DNA, 2082 bp, synthetic construct
  misc_feature 1..2082: note = Description of Artificial Sequence: Synthetic coding sequence
  source 1..2082: mol_type = other DNA
atggacagacccgacgagggcccccccgccaagaccagaagactgagcagcagcgagagcccccagagagaccccccccccccccccccccccccccccctgctgagactgcccctgccccccccccagcagagacccagactgcaggaggagaccgaggccgcccaggtgctggccgacatgagaggcgtgggcctgggccccgccctgccccccccccccccctacgtgatcctggaggagggcggcatcagagcctacttcaccctgggcgccgagtgccccggctgggacagcaccatcgagagcggctacggcgaggcccccccccccaccgagagcctggaggccctgcccacccccgaggccagcggcggcagcctggagatcgacttccaggtggtgcagagcagcagcttcggcggcgagggcgccctggagacctgcagcgccgtgggctgggccccccagagactggtggaccccaagagcaaggaggaggccatcatcatcgtggaggacgaggacgaggacgagagagagagcatgagaagcagcagaagaagaagaagaagaagaagaagaaagcagagaaaggtgaagagagagagcagagagagaaacgccgagagaatggagagcatcctgcaggccctggaggacatccagctggacctggaggccgtgaacatcaaggccggcaaggccttcctgagactgaagagaaagttcatccagatgagaagacccttcctggagagaagagacctgatcatccagcacatccccggcttctgggtgaaggccttcctgaaccaccccagaatcagcatcctgatcaacagaagagacgaggacatcttcagatacctgaccaacctgcaggtgcaggacctgagacacatcagcatgggctacaagatgaagctgtacttccagaccaacccctacttcaccaacatggtgatcgtgaaggagttccagagaaacagaagcggcagactggtgagccacagcacccccatcagatggcacagaggccaggagccccaggccagaagacacggcaaccaggacgccagccacagcttcttcagctggttcagcaaccacagcctgcccgaggccgacagaatcgccgagatcatcaagaacgacctgtgggtgaaccccctgagatactacctgagagagagaggcagcagaatcaagagaaagaagcaggagatgaagaagagaaagaccagaggcagatgcgaggtggtgatcatggaggacgcccccgactactacgccgtggaggacatcttcagcgagatcagcgacatcgacgagaccatccacgacatcaagatcagcgacttcatggagaccaccgactacttcgagaccaccgacaacgagatcaccgacatcaacgagaacatctgcgacagcgagaaccccgaccacaacgaggtgcccaacaacgagaccaccgacaacaacgagagcgccgacgaccacgagaccaccgacaacaacgagagcgccgacgacaacaacgagaaccccgaggacaacaacaagaacaccgacgacaacgaggagaaccccaacaacaacgagaacacctacggcaacaacttcttcaagggcggcttctggggcagccacggcaacaaccaggacagcagcgacagcgacaacgaggccgacgaggccagcgacgacgaggacaacgacggcaacgagggcgacaacgagggcagcgacgacgacggcaacgagggcgacaacgagggcagcgacgacgacgacagagacatcgagtactacgagaaggtgatcgaggacttcgacaaggaccaggccgactacgaggacgtgatcgagatcatcagcgacgagagcgtggaggaggagggcatcgaggagggcatccagcaggacgaggacatctacgaggagggcaactacgaggaggagggcagcgaggacgtgtgggaggagggcgaggacagcgacgacagcgacctggaggacgtgctgcaggtgcccaacggctgggccaaccccggcaagagaggcaagaccggctag

SEQ ID NO: 103873 - DNA, 1062 bp, synthetic construct
  misc_feature 1..1062: note = Description of Artificial Sequence: Synthetic coding sequence
  source 1..1062: mol_type = other DNA
atgccctggcccctgctgctgctgctggccgtgagcggcgcccagaccaccagaccctgcttccccggctgccagtgcgaggtggagaccttcggcctgttcgacagcttcagcctgaccagagtggactgcagcggcctgggcccccacatcatgcccgtgcccatccccctggacaccgcccacctggacctgagcagcaacagactggagatggtgaacgagagcgtgctggccggccccggctacaccaccctggccggcctggacctgagccacaacctgctgaccagcatcagccccaccgccttcagcagactgagatacctggagagcctggacctgagccacaacggcctgaccgccctgcccgccgagagcttcaccagcagccccctgagcgacgtgaacctgagccacaaccagctgagagaggtgagcgtgagcgccttcaccacccacagccagggcagagccctgcacgtggacctgagccacaacctgatccacagactggtgccccaccccaccagagccggcctgcccgcccccaccatccagagcctgaacctggcctggaacagactgcacgccgtgcccaacctgagagacctgcccctgagatacctgagcctggacggcaaccccctggccgtgatcggccccggcgccttcgccggcctgggcggcctgacccacctgagcctggccagcctgcagagactgcccgagctggcccccagcggcttcagagagctgcccggcctgcaggtgctggacctgagcggcaaccccaagctgaactgggccggcgccgaggtgttcagcggcctgagcagcctgcaggagctggacctgagcggcaccaacctggtgcccctgcccgaggccctgctgctgcacctgcccgccctgcagagcgtgagcgtgggccaggacgtgagatgcagaagactggtgagagagggcacctaccccagaagacccggcagcagccccaaggtggccctgcactgcgtggacaccagagacagcgccgccagaggccccaccatcctgtag

SEQ ID NO: 103874 - DNA, 966 bp, synthetic construct
  misc_feature 1..966: note = Description of Artificial Sequence: Synthetic coding sequence
  source 1..966: mol_type = other DNA
atgccctggcccctgctgctgctgctggccgtgagcggcgcccagaccaccagaccctgcttccccggctgccagtgcgaggtggagaccttcggcctgttcgacagcttcagcctgaccagagtggactgcagcggcctgggcccccacatcatgcccgtgcccatccccctggacaccgcccacctggacctgagcagcaacagactggagatggtgaacgagagcgtgctggccggccccggctacaccaccctggccggcctggacctgagccacaacctgctgaccagcagccccctgagcgacgtgaacctgagccacaaccagctgagagaggtgagcgtgagcgccttcaccacccacagccagggcagagccctgcacgtggacctgagccacaacctgatccacagactggtgccccaccccaccagagccggcctgcccgcccccaccatccagagcctgaacctggcctggaacagactgcacgccgtgcccaacctgagagacctgcccctgagatacctgagcctggacggcaaccccctggccgtgatcggccccggcgccttcgccggcctgggcggcctgacccacctgagcctggccagcctgcagagactgcccgagctggcccccagcggcttcagagagctgcccggcctgcaggtgctggacctgagcggcaaccccaagctgaactgggccggcgccgaggtgttcagcggcctgagcagcctgcaggagctggacctgagcggcaccaacctggtgcccctgcccgaggccctgctgctgcacctgcccgccctgcagagcgtgagcgtgggccaggacgtgagatgcagaagactggtgagagagggcacctaccccagaagacccggcagcagccccaaggtggccctgcactgcgtggacaccagagacagcgccgccagaggccccaccatcctgtag

SEQ ID NO: 103875 - DNA, 318 bp, synthetic construct
  misc_feature 1..318: note = Description of Artificial Sequence: Synthetic coding sequence
  source 1..318: mol_type = other DNA
atgccctggcccctgctgctgctgctggccgtgagcggcgcccagaccaccagaccctgcttccccggctgccagtgcgaggtggagaccttcggcctgttcgacagcttcagcctgaccagagtggactgcagcggcctgggcccccacatcatgcccgtgcccatccccctggacaccgcccacctggacctgagcagcaacagactggagatggtgaacgagagcgtgctggccggccccggctacaccaccctggccggcctggacctgagccacaacctgctgaccagcatcagccccaccgccttcagctag

SEQ ID NO: 103876 - DNA, 1062 bp, synthetic construct; identical to SEQ ID NO: 103873
  misc_feature 1..1062: note = Description of Artificial Sequence: Synthetic coding sequence
  source 1..1062: mol_type = other DNA

SEQ ID NO: 103877 - DNA, 453 bp, synthetic construct
  misc_feature 1..453: note = Description of Artificial Sequence: Synthetic coding sequence
  source 1..453: mol_type = other DNA
atgccctggcccctgctgctgctgctggccgtgagcggcgcccagaccaccagaccctgcttccccggctgccagtgcgaggtggagaccttcggcctgttcgacagcttcagcctgaccagagtggactgcagcggcctgggcccccacatcatgcccgtgcccatccccctggacaccgcccacctggacctgagcagcaacagactggagatggtgaacgagagcgtgctggccggccccggctacaccaccctggccggcctggacctgagccacaacctgctgaccagcatcagccccaccgccttcagcagactgagatacctggagagcctggacctgagccacaacggcctgaccgccctgcccgccgagagcttcaccagcagccccctgagcgacgtgaacctgagccacaaccagctgagagaggtgagcgtgagcgcctag

SEQ ID NO: 103878 - DNA, 2574 bp, synthetic construct
  misc_feature 1..2574: note = Description of Artificial Sequence: Synthetic coding sequence
  source 1..2574: mol_type = other DNA
atggagagcgaggacctgagcggcagagagctgaccatcgacagcatcatgaacaaggtgagagacatcaagaacaagttcaagaacgaggacctgaccgacgagctgagcctgaacaagatcagcgccgacaccaccgacaacagcggcaccgtgaaccagatcatgatgatggccaacaaccccgaggactggctgagcctgctgctgaagctggagaagaacagcgtgcccctgagcgacgccctgctgaacaagctgatcggcagatacagccaggccatcgaggccctgccccccgacaagtacggccagaacgagagcttcgccagaatccaggtgagattcgccgagctgaaggccatccaggagcccgacgacgccagagactacttccagatggccagagccaactgcaagaagttcgccttcgtgcacatcagcttcgcccagttcgagctgagccagggcaacgtgaagaagagcaagcagctgctgcagaaggccgtggagagaggcgccgtgcccctggagatgctggagatcgccctgagaaacctgaacctgcagaagaagcagctgctgagcgaggaggagaagaagaacctgagcgccagcaccgtgctgaccgcccaggagagcttcagcggcagcctgggccacctgcagaacagaaacaacagctgcgacagcagaggccagaccaccaaggccagattcctgtacggcgagaacatgcccccccaggacgccgagatcggctacagaaacagcctgagacagaccaacaagaccaagcagagctgccccttcggcagagtgcccgtgaacctgctgaacagccccgactgcgacgtgaagaccgacgacagcgtggtgccctgcttcatgaagagacagaccagcagaagcgagtgcagagacctggtggtgcccggcagcaagcccagcggcaacgacagctgcgagctgagaaacctgaagagcgtgcagaacagccacttcaaggagcccctggtgagcgacgagaagagcagcgagctgatcatcaccgacagcatcaccctgaagaacaagaccgagagcagcctgctggccaagctggaggagaccaaggagtaccaggagcccgaggtgcccgagagcaaccagaagcagtggcagagcaagagaaagagcgagtgcatcaaccagaaccccgccgccagcagcaaccactggcagatccccgagctggccagaaaggtgaacaccgagcagaagcacaccaccttcgagcagcccgtgttcagcgtgagcaagcagagcccccccatcagcaccagcaagtggttcgaccccaagagcatctgcaagacccccagcagcaacaccctggacgactacatgagctgcttcagaacccccgtggtgaagaacgacttcccccccgcctgccagctgagcaccccctacggccagcccgcctgcttccagcagcagcagcaccagatcctggccacccccctgcagaacctgcaggtgctggccagcagcagcgccaacgagtgcatcagcgtgaagggcagaatctacagcatcctgaagcagatcggcagcggcggcagcagcaaggtgttccaggtgctgaacgagaagaagcagatctacgccatcaagtacgtgaacctggaggaggccgacaaccagaccctggacagctacagaaacgagatcgcctacctgaacaagctgcagcagcacagcgacaagatcatcagactgtacgactacgagatcaccgaccagtacatctacatggtgatggagtgcggcaacatcgacctgaacagctggctgaagaagaagaagagcatcgacccctgggagagaaagagctactggaagaacatgctggaggccgtgcacaccatccaccagcacggcatcgtgcacagcgacctgaagcccgccaacttcctgatcgtggacggcatgctgaagctgatcgacttcggcatcgccaaccagatgcagcccgacaccaccagcgtggtgaaggacagccaggtgggcaccgtgaactacatgccccccgaggccatcaaggacatgagcagcagcagagagaacggcaagagcaagagcaagatcagccccaagagcgacgtgtggagcctgggctgcatcctgtactacatgacctacggcaagacccccttccagcagatcatcaaccagatcagcaagctgcacgccatcatcgaccccaaccacgagatcgagttccccgacatccccgagaaggacctgcaggacgtgctgaagtgctgcctgaagagagaccccaagcagagaatcagcatccccgagctgctggcccacccctacgtgcagatccagacccaccccgtgaaccagatggccaagggcaccaccgaggagatgaagtacgtgctgggccagctggtgggcctgaacagccccaacagcatcctgaaggccgccaagaccctgtacgagcactacagcggcggcgagagccacaacagcagcagcagcaagaccttcgagaagaagagaggcaagaagtag

SEQ ID NO: 103879 - DNA, 420 bp, synthetic construct
  misc_feature 1..420: note = Description of Artificial Sequence: Synthetic coding sequence
  source 1..420: mol_type = other DNA
atggagagcgaggacctgagcggcagagagctgaccatcgacagcatcatgaacaaggtgagagacatcaagaacaagttcaagaacgaggacctgaccgacgagctgagcctgaacaagatcagcgccgacaccaccgacaacagcggcaccgtgaaccagatcatgatgatggccaacaaccccgaggactggctgagcctgctgctgaagctggagaagaacagcgtgcccctgagcgacgccctgctgaacaagctgatcggcagatacagccaggccatcgaggccctgccccccgacaagtacggccagaacgagagcttcgccagaatccaggtgagattcgccgagctgaaggccatccaggagcccgacgacgccagagactacttccagatggccagagccaactgctag

SEQ ID NO: 103880 - DNA, 531 bp, synthetic construct
  misc_feature 1..531: note = Description of Artificial Sequence: Synthetic coding sequence
  source 1..531: mol_type = other DNA
atggagagcgaggacctgagcggcagagagctgaccatcgacagcatcatgaacaaggtgagagacatcaagaacaagttcaagaacgaggacctgaccgacgagctgagcctgaacaagatcagcgccgacaccaccgacaacagcggcaccgtgaaccagatcatgatgatggccaacaaccccgaggactggctgagcctgctgctgaagctggagaagaacagcgtgcccctgagcgacgccctgctgaacaagctgatcggcagatacagccaggccatcgaggccctgccccccgacaagtacggccagaacgagagcttcgccagaatccaggtgagattcgccgagctgaaggccatccaggagcccgacgacgccagagactacttccagatggccagagccaactgcaagaagttcgccttcgtgcacatcagcttcgcccagttcgagctgagccagggcaacgtgaagaagagcaagcagctgctgcagaaggccgtggagagaggcgccgtgccctag

SEQ ID NO: 103881 - DNA, 453 bp, synthetic construct
  misc_feature 1..453: note = Description of Artificial Sequence: Synthetic coding sequence
  source 1..453: mol_type = other DNA
atggagagcgaggacctgagcggcagagagctgaccatcgacagcatcatgaacaaggtgagagacatcaagaacaagttcaagaacgaggacctgaccgacgagctgagcctgaacaagatcagcgccgacaccaccgacaacagcggcaccgtgaaccagatcatgatgatggccaacaaccccgaggactggctgagcctgctgctgaagctggagaagaacagcgtgcccctgagcgacgccctgctgaacaagctgatcggcagatacagccaggccatcgaggccctgccccccgacaagtacggccagaacgagagcttcgccagaatccaggtgagattcgccgagctgaaggccatccaggagcccgacgacgccagagactacttccagatggccagagccaactgcaagaagttcgccttcgtgcacatcagcttcgcctag

SEQ ID NO: 103882 - DNA, 492 bp, synthetic construct
  misc_feature 1..492: note = Description of Artificial Sequence: Synthetic coding sequence
  source 1..492: mol_type = other DNA
atggccgagggcggcggccagaaccaccacgaggtggtgaagttcatggacgtgtaccagagaagctactgccaccccatcgagaccctggtggacatcttccaggagtaccccgacgagatcgagtacatcttcaagcccagctgcgtgcccctgatgagatgcggcggctgctgcaacgacgagggcctggagtgcgtgcccaccgaggagagcaacatcaccatgcagatcatgagaatcaagccccaccagggccagcacatcggcgagatgagcttcctgcagcacaacaagtgcgagtgcagacccaagaaggacagagccagacaggagaacccctgcggcccctgcagcgagagaagaaagcacctgttcgtgcaggacccccagacctgcaagtgcagctgcaagaacaccgacagcagatgcaaggccagacagctggagctgaacgagagaacctgcagatgcgacaagcccagaagatag

SEQ ID NO: 103883 - DNA, 1368 bp, synthetic construct
  misc_feature 1..1368: note = Description of Artificial Sequence: Synthetic coding sequence
  source 1..1368: mol_type = other DNA
atgaccaccatggccgccgccaccctgctgagagccaccccccacttcagcggcctggccgccggcagaaccttcctgctgcagggcctgctgagactgctgaaggcccccgccctgcccctgctgtgcagaggcctggccgtggaggccaagaagacctacgtgagagacaagccccacgtgaacgtgggcaccatcggccacgtggaccacggcaagaccaccctgaccgccgccatcaccaagatcctggccgagggcggcggcgccaagttcaagaagtacgaggagatcgacaacgcccccgaggagagagccagaggcatcaccatcaacgccgcccacgtggagtacagcaccgccgccagacactacgcccacaccgactgccccggccacgccgactacgtgaagaacatgatcaccggcaccgcccccctggacggctgcatcctggtggtggccgccaacgacggccccatgccccagaccagagagcacctgctgctggccagacagatcggcgtggagcacgtggtggtgtacgtgaacaaggccgacgccgtgcaggacagcgagatggtggagctggtggagctggagatcagagagctgctgaccgagttcggctacaagggcgaggagacccccgtgatcgtgggcagcgccctgtgcgccctggagggcagagaccccgagctgggcctgaagagcgtgcagaagctgctggacgccgtggacacctacatccccgtgcccgccagagacctggagaagcccttcctgctgcccgtggaggccgtgtacagcgtgcccggcagaggcaccgtggtgaccggcaccctggagagaggcatcctgaagaagggcgacgagtgcgagctgctgggccacagcaagaacatcagaaccgtggtgaccggcatcgagatgttccacaagagcctggagagagccgaggccggcgacaacctgggcgccctggtgagaggcctgaagagagaggacctgagaagaggcctggtgatggtgaagcccggcagcatcaagccccaccagaaggtggaggcccaggtgtacatcctgagcaaggaggagggcggcagacacaagcccttcgtgagccacttcatgcccgtgatgttcagcctgacctgggacatggcctgcagaatcatcctgccccccgagaaggagctggccatgcccggcgaggacctgaagttcaacctgatcctgagacagcccatgatcctggagaagggccagagattcaccctgagagacggcaacagaaccatcggcaccggcctggtgaccaacaccctggccatgaccgaggaggagaagaacatcaagtggggctag

SEQ ID NO: 103884 - DNA, 1611 bp, synthetic construct
  misc_feature 1..1611: note = Description of Artificial Sequence: Synthetic coding sequence
  source 1..1611: mol_type = other DNA
atggccacccccgacgccggcctgcccggcgccgagggcgtggagcccgccccctgggcccagctggaggcccccgccagactgctgctgcaggccctgcaggccggccccgagggcgccagaagaggcctgggcgtgctgagagccctgggcagcagaggctgggagcccttcgactggggcagactgctggaggccctgtgcagagaggagcccgtggtgcagggccccgacggcagactggagctgaagcccctgctgctgagactgcccagaatctgccagagaaacctgatgagcctgctgatggccgtgagacccagcctgcccgagagcggcctgctgagcgtgctgcagatcgcccagcaggacctggcccccgaccccgacgcctggctgagagccctgggcgagctgctgagaagagacctgggcgtgggcaccagcatggagggcgccagccccctgagcgagagatgccagagacagctgcagagcctgtgcagaggcctgggcctgggcggcagaagactgaagagcccccaggcccccgaccccgaggaggaggagaacagagacagccagcagcccggcaagagaagaaaggacagcgaggaggaggccgccagccccgagggcaagagagtgcccaagagactgagatgctgggaggaggaggaggaccacgagaaggagagacccgagcacaagagcctggagagcctggccgacggcggcagcgccagccccatcaaggaccagcccgtgatggccgtgaagaccggcgaggacggcagcaacctggacgacgccaagggcctggccgagagcctggagctgcccaaggccatccaggaccagctgcccagactgcagcagctgctgaagaccctggaggagggcctggagggcctggaggacgccccccccgtggagctgcagctgctgcacgagtgcagccccagccagatggacctgctgtgcgcccagctgcagctgccccagctgagcgacctgggcctgctgagactgtgcacctggctgctggccctgagccccgacctgagcctgagcaacgccaccgtgctgaccagaagcctgttcctgggcagaatcctgagcctgaccagcagcgccagcagactgctgaccaccgccctgaccagcttctgcgccaagtacacctaccccgtgtgcagcgccctgctggaccccgtgctgcaggcccccggcaccggccccgcccagaccgagctgctgtgctgcctggtgaagatggagagcctggagcccgacgcccaggtgctgatgctgggccagatcctggagctgccctggaaggaggagaccttcctggtgctgcagagcctgctggagagacaggtggagatgacccccgagaagttcagcgtgctgatggagaagctgtgcaagaagggcctggccgccaccaccagcatggcctacgccaagctgatgctgaccgtgatgaccaagtaccaggccaacatcaccgagacccagagactgggcctggccatggccctggagcccaacaccaccttcctgagaaagagcctgaaggccgccctgaagcacctgggcccctag

SEQ ID NO: 103885 - DNA, 1470 bp, synthetic construct
  misc_feature 1..1470: note = Description of Artificial Sequence: Synthetic coding sequence
  source 1..1470: mol_type = other DNA
atgcccctgagagacgagaccctgagagaggtgtgggccagcgacagcggccacgaggaggagagcctgagccccgaggcccccagaagacccaagcagagacccgcccccgcccagagactgagaaagaagagaaccgaggcccccgagagcccctgccccaccggcagcaagcccagaaagcccggcgaggaggaggaggaggaggaggacgaggaggacgaggaggaggaggccgaggagaagaaggagaagatcctgctgccccccaagaagcccctgagagagaagagcagcgccgacctgaaggagagaagagccaaggcccagggccccagaggcgacctgggcagccccgaccccccccccaagcccctgagagtgagaaacaaggaggcccccgccggcgagggcaccaagatgagaaagaccaagaagaagggcagcggcgaggccgacaaggaccccagcggcagccccgccagcgccagaaagagccccgccgccatgttcctggtgggcgagggcagccccgacaagaaggccctgaagaagaagggcacccccaagggcgccagaaaggaggaggaggaggaggaggaggccgccaccgtgatcaagaagagcaaccagaagggcaaggccaagggcaagggcaagaagaaggccaaggaggagagagcccccagcccccccgtggaggtggacgagcccagagagttcgtgctgagacccgccccccagggcagaaccgtgagatgcagactgaccagagacaagaagggcatggacagaggcatgtaccccagctacttcctgcacctggacaccgagaagaaggtgttcctgctggccggcagaaagagaaagagaagcaagaccgccaactacctgatcagcatcgaccccaccaacctgagcagaggcggcgagaacttcatcggcaagctgagaagcaacctgctgggcaacagattcaccgtgttcgacaacggccagaacccccagagaggctacagcaccaacgtggccagcctgagacaggagctggccgccgtgatctacgagaccaacgtgctgggcttcagaggccccagaagaatgaccgtgatcatccccggcatgagcgccgagaacgagagagtgcccatcagacccagaaacgccagcgacggcctgctggtgagatggcagaacaagaccctggagagcctgatcgagctgcacaacaagccccccgtgtggaacgacgacagcggcagctacaccctgaacttccagggcagagtgacccaggccagcgtgaagaacttccagatcgtgcacgccgacgaccccgactacatcgtgctgcagttcggcagagtggccgaggacgccttcaccctggactacagataccccctgtgcgccctgcaggccttcgccatcgccctgagcagcttcgacggcaagctggcctgcgagtag

SEQ ID NO: 103886 - DNA, 561 bp, synthetic construct
  misc_feature 1..561: note = Description of Artificial Sequence: Synthetic coding sequence
  source 1..561: mol_type = other DNA
atgcccctgagagacgagaccctgagagaggtgtgggccagcgacagcggccacgaggaggagagcctgagccccgaggcccccagaagacccaagcagagacccgcccccgcccagagactgagaaagaagagaaccgaggcccccgagagcccctgccccaccggcagcaagcccagaaagcccggcgaggaggaggaggaggaggaggacgaggaggacgaggaggaggaggccgaggagaagaaggagaagatcctgctgccccccaagaagcccctgagagagaagagcagcgccgacctgaaggagagaagagccaaggcccagggccccagaggcgacctgggcagccccgaccccccccccaagcccctgagagtgagaaacaaggaggcccccgccggcgagggcaccaagatgagaaagaccaagaagaagggcagcggcgaggccgacaaggaccccagcggcagccccgccagcgccagaaagagccccgccgccatgttcctggtgggcgagggcagccccgacaagaaggccctgaagaagaagtag

SEQ ID NO: 103887 - DNA, 3033 bp, synthetic construct
  misc_feature 1..3033: note = Description of Artificial Sequence: Synthetic coding sequence
  source 1..3033: mol_type = other DNA
atgggcgcctacgccagagccagcggcgtgtgcgccagaggctgcctggacagcgccggcccctggaccatgagcagagccctgagaccccccctgccccccctgtgcttcttcctgctgctgctggccgccgccggcgccagagccggcggctacgagacctgccccaccgtgcagcccaacatgctgaacgtgcacctgctgccccacacccacgacgacgtgggctggctgaagaccgtggaccagtacttctacggcatcaagaacgacatccagcacgccggcgtgcagtacatcctggacagcgtgatcagcgccctgctggccgaccccaccagaagattcatctacgtggagatcgccttcttcagcagatggtggcaccagcagaccaacgccacccaggaggtggtgagagacctggtgagacagggcagactggagttcgccaacggcggctgggtgatgaacgacgaggccgccacccactacggcgccatcgtggaccagatgaccctgggcctgagattcctggaggacaccttcggcaacgacggcagacccagagtggcctggcacatcgaccccttcggccacagcagagagcaggccagcctgttcgcccagatgggcttcgacggcttcttcttcggcagactggactaccaggacaagtgggtgagaatgcagaagctggagatggagcaggtgtggagagccagcaccagcctgaagccccccaccgccgacctgttcaccggcgtgctgcccaacggctacaacccccccagaaacctgtgctgggacgtgctgtgcgtggaccagcccctggtggaggaccccagaagccccgagtacaacgccaaggagctggtggactacttcctgaacgtggccaccgcccagggcagatactacagaaccaaccacaccgtgatgaccatgggcagcgacttccagtacgagaacgccaacatgtggttcaagaacctggacaagctgatcagactggtgaacgcccaggccaagggcagcagcgtgcacgtgctgtacagcacccccgcctgctacctgtgggagctgaacaaggccaacctgacctggagcgtgaagcacgacgacttcttcccctacgccgacggcccccaccagttctggaccggctacttcagcagcagacccgccctgaagagatacgagagactgagctacaacttcctgcaggtgtgcaaccagctggaggccctggtgggcctggccgccaacgtgggcccctacggcagcggcgacagcgcccccctgaacgaggccatggccgtgctgcagcaccacgacgccgtgagcggcaccagcagacagcacgtggccaacgactacgccagacagctggccgccggctggggcccctgcgaggtgctgctgagcaacgccctggccagactgagaggcttcaaggaccacttcaccttctgccagcagctgaacatcagcatctgccccctgagccagaccgccgccagattccaggtgatcgtgtacaaccccctgggcagaaaggtgaactggatggtgagactgcccgtgagcgagggcgtgttcgtggtgaaggaccccaacggcagaaccgtgcccagcgacgtggtgatcttccccagcagcgacagccaggcccacccccccgagctgctgttcagcgccagcctgcccgccctgggcttcagcacctacagcgtggcccaggtgcccagatggaagccccaggccagagccccccagcccatccccagaagaagctggagccccgccctgaccatcgagaacgagcacatcagagccaccttcgaccccgacaccggcctgctgatggagatcatgaacatgaaccagcagctgctgctgcccgtgagacagaccttcttctggtacaacgccagcatcggcgacaacgagagcgaccaggccagcggcgcctacatcttcagacccaaccagcagaagcccctgcccgtgagcagatgggcccagatccacctggtgaagacccccctggtgcaggaggtgcaccagaacttcagcgcctggtgcagccaggtggtgagactgtaccccggccagagacacctggagctggagtggagcgtgggccccatccccgtgggcgacacctggggcaaggaggtgatcagcagattcgacacccccctggagaccaagggcagattctacaccgacagcaacggcagagagatcctggagagaagaagagactacagacccacctggaagctgaaccagaccgagcccgtggccggcaactactaccccgtgaacaccagaatctacatcaccgacggcaacatgcagctgaccgtgctgaccgacagaagccagggcggcagcagcctgagagacggcagcctggagctgatggtgcacagaagactgctgaaggacgacggcagaggcgtgagcgagcccctgatggagaacggcagcggcgcctgggtgagaggcagacacctggtgctgctggacaccgcccaggccgccgccgccggccacagactgctggccgagcaggaggtgctggccccccaggtggtgctggcccccggcggcggcgccgcctacaacctgggcgccccccccagaacccagttcagcggcctgagaagagacctgccccccagcgtgcacctgctgaccctggccagctggggccccgagatggtgctgctgagactggagcaccagttcgccgtgggcgaggacagcggcagaaacctgagcgcccccgtgaccctgaacctgagagacctgttcagcaccttcaccatcaccagactgcaggagaccaccctggtggccaaccagctgagagaggccgccagcagactgaagtggaccaccaacaccggccccaccccccaccagaccccctaccagctggaccccgccaacatcaccctggagcccatggagatcagaaccttcctggccagcgtgcagtggaaggaggtggacggctag

SEQ ID NO: 103888 - DNA, 1158 bp, synthetic construct
  misc_feature 1..1158: note = Description of Artificial Sequence: Synthetic coding sequence
  source 1..1158: mol_type = other DNA
atgcacgtgtgcgtgtgcgtgtgcgtgtgcgtgtacatgcccgtgtgcgtggacgcctgcatgtgctgcgaggccggcagacccgccttcagaagcttcctgttcagcctgtgcagcgacctgggcgccgtgatcagcctgctgctgtggggcagacagctgttcgccctgtacagcggcaacgacgtgaccgacatcagcgacgacagattccccaagccccccgagatcgccaacggctacgtggagcacctgttcagataccagtgcaagaactactacagactgagaaccgagggcgacggcgtgtacaccctgaacgacaagaagcagtggatcaacaaggccgtgggcgacaagctgcccgagtgcgaggccgtgtgcggcaagcccaagaaccccgccaaccccgtgcagagaatcctgggcggccacctggacgccaagggcagcttcccctggcaggccaagatggtgagccaccacaacctgaccaccggcgccaccctgatcaacgagcagtggctgctgaccaccgccaagaacctgttcctgaaccacagcgagaacgccaccgccaaggacatcgcccccaccctgaccctgtacgtgggcaagaagcagctggtggagatcgagaaggtggtgctgcaccccaactaccaccaggtggacatcggcctgatcaagctgaagcagaaggtgctggtgaacgagagagtgatgcccatctgcctgcccagcaagaactacgccgaggtgggcagagtgggctacgtgagcggctggggccagagcgacaacttcaagctgaccgaccacctgaagtacgtgatgctgcccgtggccgaccagtacgactgcatcacccactacgagggcagcacctgccccaagtggaaggcccccaagagccccgtgggcgtgcagcccatcctgaacgagcacaccttctgcgtgggcatgagcaagtaccaggaggacacctgctacggcgacgccggcagcgccttcgccgtgcacgacctggaggaggacacctggtacgccgccggcatcctgagcttcgacaagagctgcgccgtggccgagtacggcgtgtacgtgaaggtgaccagcatccagcactgggtgcagaagaccatcgccgagaactag

SEQ ID NO: 103889 - DNA, 1329 bp, synthetic construct; identical to SEQ ID NO: 77265
  misc_feature 1..1329: note = Description of Artificial Sequence: Synthetic coding sequence
  source 1..1329: mol_type = other DNA

SEQ ID NO: 103890 - DNA, 513 bp, synthetic construct
  misc_feature 1..513: note = Description of Artificial Sequence: Synthetic coding sequence
  source 1..513: mol_type = other DNA
atgatgaagatgagacaggccaagctggactaccagagactgctgctggagaagagacagagaaagaagagactggagcccttcatggtgcagcccaaccccgaggccagactgagaagagccaagcccagagccagcgacgagcagacccccctggtgaactgccacaccccccacagcaacgtgatcctgcacggcatcgacggccccgccgccgtgctgaagcccgacgaggtgcacgcccccagcgtgagcagcagcgtggtggaggaggacgccgagaacaccgtggacaccgccagcaagcccggcctgcaggagagactgcagaagcacgacatcagcgagagcgtgaacttcgacgaggagaccgacggcatcagccagagcgcctgcctggagagacccaacagcgccagcagccagaacagcaccttcagcagcttctgccagaagaccgaggacaccggctacagacacttcagattctgctactgcagacccaccagctag

SEQ ID NO: 103891 - DNA, 801 bp, synthetic construct
  misc_feature 1..801: note = Description of Artificial Sequence: Synthetic coding sequence
  source 1..801: mol_type = other DNA
atgctgaagaccccctggatcctgctgcccagccaggacttcagaagcgtgagcaagagcatggacaccggcaccagcggcagcgccaccgccgcccagcccgccgacaacctgctgggcgacatcgacgacctggaggacttcgtgtacagccccgccccccagggcgtgaccgtgagatgcagaatcatcagagacaagagaggcatggacagaggcctgttccccacctactacatgtacctggagaaggaggagaaccagaagatcttcctgctggccgccagaaagagaaagaagagcaagaccgccaactacctgatcagcatcgaccccgtggacctgagcagagagggcgagagctacgtgggcaagctgagaagcaacctgatgggcaccaagttcaccgtgtacgacagaggcatctgccccatgaagggcagaggcctggtgggcgccgcccacaccagacaggagctggccgccatcagctacaaccacgacagcctgctgagcagatggcagaacagaaccatggagaacctggtggagctgcacaacaaggcccccgtgtggaacagcgacacccagagctacgtgctgaacttcagaggcagagtgacccaggccagcgtgaagaacttccagatcgtgcacaagaacgaccccgactacatcgtgatgcagttcggcagagtggccgacgacgtgttcaccctggactacaactaccccctgtgcgccgtgcaggccttcggcatcggcctgagcagcttcgacagcaagctggcctgcgagtag

SEQ ID NO: 103892 - DNA, 1506 bp, synthetic construct
  misc_feature 1..1506: note = Description of Artificial Sequence: Synthetic coding sequence
  source 1..1506: mol_type = other DNA
atggaggccagcagatgcagactgagccccagcggcgacagcgtgttccacgaggagatgatgaagatgagacaggccaagctggactaccagagactgctgctggagaagagacagagaaagaagagactggagcccttcatggtgcagcccaaccccgaggccagactgagaagagccaagcccagagccagcgacgagcagacccccctggtgaactgccacaccccccacagcaacgtgatcctgcacggcatcgacggccccgccgccgtgctgaagcccgacgaggtgcacgcccccagcgtgagcagcagcgtggtggaggaggacgccgagaacaccgtggacaccgccagcaagcccggcctgcaggagagactgcagaagcacgacatcagcgagagcgtgaacttcgacgaggagaccgacggcatcagccagagcgcctgcctggagagacccaacagcgccagcagccagaacagcaccgacaccggcaccagcggcagcgccaccgccgcccagcccgccgacaacctgctgggcgacatcgacgacctggaggacttcgtgtacagccccgccccccagggcgtgaccgtgagatgcagaatcatcagagacaagagaggcatggacagaggcctgttccccacctactacatgtacctggagaaggaggagaaccagaagatcttcctgctggccgccagaaagagaaagaagagcaagaccgccaactacctgatcagcatcgaccccgtggacctgagcagagagggcgagagctacgtgggcaagctgagaagcaacctgatgggcaccaagttcaccgtgtacgacagaggcatctgccccatgaagggcagaggcctggtgggcgccgcccacaccagacaggagctggccgccatcagctacgagaccaacgtgctgggcttcaagggccccagaaagatgagcgtgatcatccccggcatgaccctgaaccacaagcagatcccctaccagccccagaacaaccacgacagcctgctgagcagatggcagaacagaaccatggagaacctggtggagctgcacaacaaggcccccgtgtggaacagcgacacccagagctacgtgctgaacttcagaggcagagtgacccaggccagcgtgaagaacttccagatcgtgcacaagaacgaccccgactacatcgtgatgcagttcggcagagtggccgacgacgtgttcaccctggactacaactaccccctgtgcgccgtgcaggccttcggcatcggcctgagcagcttcgacaagtgcatccagaccctgagaatgcaggagctgtgcgagctgcacagacagcaccacagcgccgccagcctggtgcacagaaccgtgtgccagagatgggtgggccacccctggagactgctgccccagaccagcctgctgtggaccgacctgagccccccccccgtggtgcccgccccccaccagatcagcatgtag

SEQ ID NO: 103893 - DNA, 1269 bp, synthetic construct
  misc_feature 1..1269: note = Description of Artificial Sequence: Synthetic coding sequence
  source 1..1269: mol_type = other DNA
atggccctgagcgacgagcccgccgccggcggccccgaggaggaggccgaggacgagaccctggccttcggcgccgccctggaggccttcggcgagagcgccgagaccagagccctgctgggcagactgagagaggtgcacggcggcggcgccgagagagaggtggccctggagagattcagagagtggatgatgaacctgctgctggacatcgtgcaggaccagaccagccccgccagcctggtgcacctggccttcaagttcctgtacatcatcaccaaggtgagaggctacaagaccttcctgagactgttcccccacgaggtggccgacgtggagcccgtgctggacctggtgaccatccagaaccccaaggaccacgaggcctgggagaccagatacatgctgctgctgtggctgagcgtgacctgcctgatccccttcgacttcagcagactggacggcaacctgctgacccagcccggccaggccagaatgagcatcatggacagaatcctgcagatcgccgagagctacctgatcgtgagcgacaaggccagagacgccgccgccgtgctggtgagcagattcatcaccagacccgacgtgaagcagagcaagatggccgagttcctggactggagcctgtgcaacctggccagaagcagcttccagaccatgcagggcgtgatcaccatggacggcaccctgcaggccctggcccagatcttcaagcacggcaagagagaggactgcctgccctacgccgccaccgtgctgagatgcctggacggctgcagactgcccgagagcaaccagaccctgctgagaaagctgggcgtgaagctggtgcagagactgggcctgaccttcctgaagcccaaggtggccgcctggagataccagagaggctgcagaagcctggccgccaacctgcagctgctgacccagggccagagcgagcagaagcccctgatcctgaccgaggacgacgacgaggacgacgacgtgcccgagggcgtggagagagtgatcgagcagctgctggtgggcctgaaggacaaggacaccgtggtgagatggagcgccgccaagggcatcggcagaatggccggcagactgcccagagccctggccgacgacgtggtgggcagcgtgctggactgcttcagcttccaggagaccgacaaggcctggcacggcggctgcctggccctggccgagctgggcagaagaggcctgctgctgcccagcagactggtggactag

SEQ ID NO: 103894 - DNA, 2997 bp, synthetic construct
  misc_feature 1..2997: note = Description of Artificial Sequence: Synthetic coding sequence
  source 1..2997: mol_type = other DNA
atggacggcaccctgcaggccctggcccagatcttcaagcacggcaagagagaggactgcctgccctacgccgccaccgtgctgagatgcctggacggctgcagactgcccgagagcaaccagaccctgctgagaaagctgggcgtgaagctggtgcagagactgggcctgaccttcctgaagcccaaggtggccgcctggagataccagagaggctgcagaagcctggccgccaacctgcagctgctgacccagggccagagcgagcagaagcccctgatcctgaccgaggacgacgacgaggacgacgacgtgcccgagggcgtggagagagtgatcgagcagctgctggtgggcctgaaggacaaggacaccgtggtgagatggagcgccgccaagggcatcggcagaatggccggcagactgcccagagccctggccgacgacgtggtgggcagcgtgctggactgcttcagcttccaggagaccgacaaggcctggcacggcggctgcctggccctggccgagctgggcagaagaggcctgctgctgcccagcagactggtggacgtggtggccgtgatcctgaaggccctgacctacgacgagaagagaggcgcctgcagcgtgggcaccaacgtgagagacgccgcctgctacgtgtgctgggccttcgccagagcctacgagccccaggagctgaagcccttcgtgaccgccatcagcagcgccctggtgatcgccgccgtgttcgacagagacatcaactgcagaagagccgccagcgccgccttccaggagaacgtgggcagacagggcaccttcccccacggcatcgacatcctgaccaccgccgactacttcgccgtgggcaacagaagcaactgcttcctggtgatcagcgtgttcatcgccggcttccccgagtacacccagcccatgatcgaccacctggtgaccatgaagatcagccactgggacggcgtgatcagagagctggccgccagagccctgcacaacctggcccagcaggcccccgagttcagcgccacccaggtgttccccagactgctgagcatgaccctgagccccgacctgcacatgagacacggcagcatcctggcctgcgccgaggtggcctacgccctgtacaagctggccgcccaggagaacagacccgtgaccgaccacctggacgagcaggccgtgcagggcctgaagcagatccaccagcagctgtacgacagacagctgtacagaggcctgggcggccagctgatgagacaggccgtgtgcgtgctgatcgagaagctgagcctgagcaagatgcccttcagaggcgacaccgtgatcgacggctggcagtggctgatcaacgacaccctgagacacctgcacctgatcagcagccacagcagacagcagatgaaggacgccgccgtgagcgccctggccgccctgtgcagcgagtactacatgaaggagcccggcgaggccgaccccgccatccaggaggagctgatcacccagtacctggccgagctgagaaaccccgaggagatgaccagatgcggcttcagcctggccctgggcgccctgcccggcttcctgctgaagggcagactgcagcaggtgctgaccggcctgagagccgtgacccacaccagccccgaggacgtgagcttcgccgagagcagaagagacggcctgaaggccatcgccagaatctgccagaccgtgggcgtgaaggccggcgcccccgacgaggccgtgtgcggcgagaacgtgagccagatctactgcgccctgctgggctgcatggacgactacaccaccgacagcagaggcgacgtgggcacctgggtgagaaaggccgccatgaccagcctgatggacctgaccctgctgctggccagaagccagcccgagctgatcgaggcccacacctgcgagagaatcatgtgctgcgtggcccagcaggccagcgagaagatcgacagattcagagcccacgccgccagcgtgttcctgaccctgctgcacttcgacagcccccccatcccccacgtgccccacagaggcgagctggagaagctgttccccagaagcgacgtggccagcgtgaactggagcgcccccagccaggccttccccagaatcacccagctgctgggcctgcccacctacagataccacgtgctgctgggcctggtggtgagcctgggcggcctgaccgagagcaccatcagacacagcacccagagcctgttcgagtacatgaagggcatccagagcgacccccaggccctgggcagcttcagcggcaccctgctgcagatcttcgaggacaacctgctgaacgagagagtgagcgtgcccctgctgaagaccctggaccacgtgctgacccacggctgcttcgacatcttcaccaccgaggaggaccaccccttcgccgtgaagctgctggccctgtgcaagaaggagatcaagaacagcaaggacatccagaagctgctgagcggcatcgccgtggacttccccagcgccaccctggtgtgcgtgggcaccgtgcagatgtacgcccacacccacctgagactgggcgcccccggcccccactgcgcccacggcagcgccctgcccagattctgcgagatggtgcagttccccggcgacgtgagaagacaggccctgctgcagctgtgcctgctgctgtgccacagattccccctgatcagaaagaccaccgccagccaggtgtacgagaccctgctgacctacagcgacgtggtgggcgccgacgtgctggacgaggtggtgaccgtgctgagcgacaccgcctgggacgccgagctggccgtggtgagagagcagagaaacagactgtgcgacctgctgggcgtgccccccagctggtgccccacctggtgcctgctgaagcccgtgctggagcccatcccccacccctgcctggtgagaatgagctgcagctag

SEQ ID NO: 103895 - DNA, 3579 bp, synthetic construct
  misc_feature 1..3579: note = Description of Artificial Sequence: Synthetic coding sequence
  source 1..3579: mol_type = other DNA
atggccctgagcgacgagcccgccgccggcggccccgaggaggaggccgaggacgagaccctggccttcggcgccgccctggaggccttcggcgagagcgccgagaccagagccctgctgggcagactgagagaggtgcacggcggcggcgccgagagagaggtggccctggagagattcagagtgatcatggacaagtaccaggagcagccccacctgctggacccccacctggagtggatgatgaacctgctgctggacatcgtgcaggaccagaccagccccgccagcctggtgcacctggccttcaagttcctgtacatcatcaccaaggtgagaggctacaagaccttcctgagactgttcccccacgaggtggccgacgtggagcccgtgctggacctggtgaccatccagaaccccaaggaccacgaggcctgggagaccagatacatgctgctgctgtggctgagcgtgacctgcctgatccccttcgacttcagcagactggacggcaacctgctgacccagcccggccaggccagaatgagcatcatggacagaatcctgcagatcgccgagagctacctgatcgtgagcgacaaggccagagacgccgccgccgtgctggtgagcagattcatcaccagacccgacgtgaagcagagcaagatggccgagttcctggactggagcctgtgcaacctggccagaagcagcttccagaccatgcagggcgtgatcaccatggacggcaccctgcaggccctggcccagatcttcaagcacggcaagagagaggactgcctgccctacgccgccaccgtgctgagatgcctggacggctgcagactgcccgagagcaaccagaccctgctgagaaagctgggcgtgaagctggtgcagagactgggcctgaccttcctgaagcccaaggtggccgcctggagataccagagaggctgcagaagcctggccgccaacctgcagctgctgacccagggccagagcgagcagaagcccctgatcctgaccgaggacgacgacgaggacgacgacgtgcccgagggcgtggagagagtgatcgagcagctgctggtgggcctgaaggacaaggacaccgtggtgagatggagcgccgccaagggcatcggcagaatggccggcagactgcccagagccctggccgacgacgtggtgggcagcgtgctggactgcttcagcttccaggagaccgacaaggcctggcacggcggctgcctggccctggccgagctgggcagaagaggcctgctgctgcccagcagactggtggacgtggtggccgtgatcctgaaggccctgacctacgacgagaagagaggcgcctgcagcgtgggcaccaacgtgagagacgccgcctgctacgtgtgctgggccttcgccagagcctacgagccccaggagctgaagcccttcgtgaccgccatcagcagcgccctggtgatcgccgccgtgttcgacagagacatcaactgcagaagagccgccagcgccgccttccaggagaacgtgggcagacagggcaccttcccccacggcatcgacatcctgaccaccgccgactacttcgccgtgggcaacagaagcaactgcttcctggtgatcagcgtgttcatcgccggcttccccgagtacacccagcccatgatcgaccacctggtgaccatgaagatcagccactgggacggcgtgatcagagagctggccgccagagccctgcacaacctggcccagcaggcccccgagttcagcgccacccaggtgttccccagactgctgagcatgaccctgagccccgacctgcacatgagacacggcagcatcctggcctgcgccgaggtggcctacgccctgtacaagctggccgcccaggagaacagacccgtgaccgaccacctggacgagcaggccgtgcagggcctgaagcagatccaccagcagctgtacgacagacagctgtacagaggcctgggcggccagctgatgagacaggccgtgtgcgtgctgatcgagaagctgagcctgagcaagatgcccttcagaggcgacaccgtgatcgacggctggcagtggctgatcaacgacaccctgagacacctgcacctgatcagcagccacagcagacagcagatgaaggacgccgccgtgagcgccctggccgccctgtgcagcgagtactacatgaaggagcccggcgaggccgaccccgccatccaggaggagctgatcacccagtacctggccgagctgagaaaccccgaggagatgaccagatgcggcttcagcctggccctgggcgccctgcccggcttcctgctgaagggcagactgcagcaggtgctgaccggcctgagagccgtgacccacaccagccccgaggacgtgagcttcgccgagagcagaagagacggcctgaaggccatcgccagaatctgccagaccgtgggcgtgaaggccggcgcccccgacgaggccgtgtgcggcgagaacgtgagccagatctactgcgccctgctgggctgcatggacgactacaccaccgacagcagaggcgacgtgggcacctgggtgagaaaggccgccatgaccagcctgatggacctgaccctgctgctggccagaagccagcccgagctgatcgaggcccacacctgcgagagaatcatgtgctgcgtggcccagcaggccagcgagaagatcgacagattcagagcccacgccgccagcgtgttcctgaccctgctgcacttcgacagcccccccatcccccacgtgccccacagaggcgagctggagaagctgttccccagaagcgacgtggccagcgtgaactggagcgcccccagccaggccttccccagaatcacccagctgctgggcctgcccacctacagataccacgtgctgctgggcctggtggtgagcctgggcggcctgaccgagagcaccatcagacacagcacccagagcctgttcgagtacatgaagggcatccagagcgacccccaggccctgggcagcttcagcggcaccctgctgcagatcttcgaggacaacctgctgaacgagagagtgagcgtgcccctgctgaagaccctggaccacgtgctgacccacggctgcttcgacatcttcaccaccgaggaggaccaccccttcgccgtgaagctgctggccctgtgcaagaaggagatcaagaacagcaaggacatccagaagctgctgagcggcatcgccgtgttctgcgagatggtgcagttccccggcgacgtgagaagacaggccctgctgcagctgtgcctgctgctgtgccacagattccccctgatcagaaagaccaccgccagccaggtgtacgagaccctgctgacctacagcgacgtggtgggcgccgacgtgctggacgaggtggtgaccgtgctgagcgacaccgcctgggacgccgagctggccgtggtgagagagcagagaaacagactgtgcgacctgctgggcgtgcccagaccccagctggtgccccagcccggcgcctgctag

SEQ ID NO: 103896 - DNA, 936 bp, synthetic construct
  misc_feature 1..936: note = Description of Artificial Sequence: Synthetic coding sequence
  source 1..936: mol_type = other DNA
atggccggcagactgcccagagccctggccgacgacgtggtgggcagcgtgctggactgcttcagcttccaggagaccgacaaggcctggcacggcggctgcctggccctggccgagctgggcagaagaggcctgctgctgcccagcagactggtggacgtggtggccgtgatcctgaaggccctgacctacgacgagaagagaggcgcctgcagcgtgggcaccaacgtgagagacgccgcctgctacgtgtgctgggccttcgccagagcctacgagccccaggagctgaagcccttcgtgaccgccatcagcagcgccctggtgatcgccgccgtgttcgacagagacatcaactgcagaagagccgccagcgccgccttccaggagaacgtgggcagacagggcaccttcccccacggcatcgacatcctgaccaccgccgactacttcgccgtgggcaacagaagcaactgcttcctggtgatcagcgtgttcatcgccggcttccccgagtacacccagcccatgatcgaccacctggtgaccatgaagatcagccactgggacggcgtgatcagagagctggccgccagagccctgcacaacctggcccagcaggcccccgagttcagcgccacccaggtgttccccagactgctgagcatgaccctgagccccgacctgcacatgagacacggcagcatcctggcctgcgccgaggtggcctacgccctgtacaagctggccgcccaggagaacagacccgtgaccgaccacctggacgagcaggccgtgcagggcctgaagcagatccaccagcagccctgcatctgcagctggggcctgatgagccccgagagcaaggccgagttctgcgtgtgcgtgtgcagaatcagcctgggcagacagtgcgtgcacctgagcggcctgtag

SEQ ID NO: 103897 - DNA, 2253 bp, synthetic construct
  misc_feature 1..2253: note = Description of Artificial Sequence: Synthetic coding sequence
  source 1..2253: mol_type = other DNA
atggccctgagcgacgagcccgccgccggcggccccgaggaggaggccgaggacgagaccctggccttcggcgccgccctggaggccttcggcgagagcgccgagaccagagccctgctgggcagactgagagaggtgcacggcggcggcgccgagagagaggtggccctggagagattcagagtgatcatggacaagtaccaggagcagccccacctgctggacccccacctggagtggatgatgaacctgctgctggacatcgtgcaggaccagaccagccccgccagcctggtgcacctggccttcaagttcctgtacatcatcaccaaggtgagaggctacaagaccttcctgagactgttcccccacgaggtggccgacgtggagcccgtgctggacctggtgaccatccagaaccccaaggaccacgaggcctgggagaccagatacatgctgctgctgtggctgagcgtgacctgcctgatccccttcgacttcagcagactggacggcaacctgctgacccagcccggccaggccagaatgagcatcatggacagaatcctgcagatcgccgagagctacctgatcgtgagcgacaaggccagagacgccgccgccgtgctggtgagcagattcatcaccagacccgacgtgaagcagagcaagatggccgagttcctggactggagcctgtgcaacctggccagaagcagcttccagaccatgcagggcgtgatcaccatggacggcaccctgcaggccctggcccagatcttcaagcacggcaagagagaggactgcctgccctacgccgccaccgtgctgagatgcctggacggctgcagactgcccgagagcaaccagaccctgctgagaaagctgggcgtgaagctggtgcagagactgggcctgaccttcctgaagcccaaggtggccgcctggagataccagagaggctgcagaagcctggccgccaacctgcagctgctgacccagggccagagcgagcagaagcccctgatcctgaccgaggacgacgacgaggacgacgacgtgcccgagggcgtggagagagtgatcgagcagctgctggtgggcctgaaggacaaggacaccgtggtgagatggagcgccgccaagggcatcggcagaatggccggcagactgcccagagccctggccgacgacgtggtgggcagcgtgctggactgcttcagcttccaggagaccgacaaggcctggcacggcggctgcctggccctggccgagctgggcagaagaggcctgctgctgcccagcagactggtggacgtggtggccgtgatcctgaaggccctgacctacgacgagaagagaggcgcctgcagcgtgggcaccaacgtgagagacgccgcctgctacgtgtgctgggccttcgccagagcctacgagccccaggagctgaagcccttcgtgaccgccatcagcagcgccctggtgatcgccgccgtgttcgacagagacatcaactgcagaagagccgccagcgccgccttccaggagaacgtgggcagacagggcaccttcccccacggcatcgacatcctgaccaccgccgactacttcgccgtgggcaacagaagcaactgcttcctggtgatcagcgtgttcatcgccggcttccccgagtacacccagcccatgatcgaccacctggtgaccatgaagatcagccactgggacggcgtgatcagagagctggccgccagagccctgcacaacctggcccagcaggcccccgagttcagcgccacccaggtgttccccagactgctgagcatgaccctgagccccgacctgcacatgagacacggcagcatcctggcctgcgccgaggtggcctacgccctgtacaagctggccgcccaggagaacagacccgtgaccgaccacctggacgagcaggccgtgcagggcctgaagcagatccaccagcagctgtacgacagacagctgtacagaggcctgggcggccagctgatgagacaggccgtgtgcgtgctgatcgagaagctgagcctgagcaagatgcccttcagaggcgacaccgtgatcgacggctggcagtggctgatcaacgacagcctgtggctgctggtgggcctgggcagacccagcagactgcccagcgagagacccgcccccgccggcagccacagattcaagagcagctacccccacttccccagaggcagaaagttctgctag

SEQ ID NO: 103898 - DNA, 555 bp, synthetic construct
  misc_feature 1..555: note = Description of Artificial Sequence: Synthetic coding sequence
  source 1..555: mol_type = other DNA
atgaagggcatccagagcgacccccaggccctgggcagcttcagcggcaccctgctgcagatcttcgaggacaacctgctgaacgagagagtgagcgtgcccctgctgaagaccctggaccacgtgctgacccacggctgcttcgacatcttcaccaccgaggaggaccaccccttcgccgtgaagctgctggccctgtgcaagaaggagatcaagaacagcaaggacatccagaagctgctgagcggcatcgccgtgttctgcgagatggtgcagttccccggcgacgtgagaagacaggccctgctgcagctgtgcctgctgctgtgccacagattccccctgatcagaaagaccaccgccagccaggtgtacgagaccctgctgacctacagcgacgtggtgggcgccgacgtgctggacgaggtggtgaccgtgctgagcgacaccgcctgggacgccgagctggccgtggtgagagagcagagaaacagactgtgcgacctgctgggcgtgcccagaccccagctggtgccccagcccggcgcctgctag

SEQ ID NO: 103899 - DNA, 1584 bp, synthetic construct
  misc_feature 1..1584: note = Description of Artificial Sequence: Synthetic coding sequence
  source 1..1584: mol_type = other DNA
atgagcgacaccctgaccgccgacgtgatcggcagaagagtggaggtgaacggcgagcacgccaccgtgagattcgccggcgtggtgccccccgtggccggcccctggctgggcgtggagtgggacaaccccgagagaggcaagcacgacggcagccacgagggcaccgtgtacttcaagtgcagacaccccaccggcggcagcttcatcagacccaacaaggtgaacttcggcaccgacttcctgaccgccatcaagaacagatacgtgctggaggacggccccgaggaggacagaaaggagcagatcgtgaccatcggcaacaagcccgtggagaccatcggcttcgacagcatcatgaagcagcagagccagctgagcaagctgcaggaggtgagcctgagaaactgcgccgtgagctgcgccggcgagaagggcggcgtggccgaggcctgccccaacatcagaaaggtggacctgagcaagaacctgctgagcagctgggacgaggtgatccacatcgccgaccagctgagacacctggaggtgctgaacgtgagcgagaacaagctgaagttccccagcggcagcgtgctgaccggcaccctgagcgtgctgaaggtgctggtgctgaaccagaccggcatcacctgggccgaggtgctgagatgcgtggccggctgccccggcctggaggagctgtacctggagagcaacaacatcttcatcagcgagagacccaccgacgtgctgcagaccgtgaagctgctggacctgagcagcaaccagctgatcgacgagaaccagctgtacctgatcgcccacctgcccagactggagcagctgatcctgagcgacaccggcatcagcagcctgcacttccccgacgccggcatcggctgcaagaccagcatgttccccagcctgaagtacctggtggtgaacgacaaccagatcagccagtggagcttcttcaacgagctggagaagctgcccagcctgagagccctgagctgcctgagaaaccccctgaccaaggaggacaaggaggccgagaccgccagactgctgatcatcgccagcatcggccagctgaagaccctgaacaagtgcgagatcctgcccgaggagagaagaagagccgagctggactacagaaaggccttcggcaacgagtggaagcaggccggcggccacaaggaccccgagaagaacagactgagcgaggagttcctgaccgcccaccccagataccagttcctgtgcctgaagtacggcgcccccgaggactgggagctgaagacccagcagcccctgatgctgaagaaccagctgctgaccctgaagatcaagtacccccaccagctggaccagaaggtgctggagaagcagctgcccggcagcatgaccatccagaaggtgaagggcctgctgagcagactgctgaaggtgcccgtgagcgacctgctgctgagctacgagagccccaagaagcccggcagagagatcgagctggagaacgacctgaagagcctgcagttctacagcgtggagaacggcgactgcctgctggtgagatggtag

SEQ ID NO: 103900 - DNA, 1584 bp, synthetic construct; identical to SEQ ID NO: 103899
  misc_feature 1..1584: note = Description of Artificial Sequence: Synthetic coding sequence
  source 1..1584: mol_type = other DNA

SEQ ID NO: 103901 - DNA, 1737 bp, synthetic construct
  misc_feature 1..1737: note = Description of Artificial Sequence: Synthetic coding sequence
  source 1..1737: mol_type = other DNA
atgagcgacaccctgaccgccgacgtgatcggcagaagagtggaggtgaacggcgagcacgccaccgtgagattcgccggcgtggtgccccccgtggccggcccctggctgggcgtggagtgggacaaccccgagagaggcaagcacgacggcagccacgagggcaccgtgtacttcaagtgcagacaccccaccggcggcagcttcatcagacccaacaaggtgaacttcggcaccgacttcctgaccgccatcaagaacagatacgtgctggaggacggccccgaggaggacagaaaggagcagatcgtgaccatcggcaacaagcccgtggagaccatcggcttcgacagcatcatgaagcagcagagccagctgagcaagctgcaggaggtgagcctgagaaactgcgccgtgagctgcgccggcgagaagggcggcgtggccgaggcctgccccaacatcagaaaggtggacctgagcaagaacctgctgagcagctgggacgaggtgatccacatcgccgaccagctgagacacctggaggtgctgaacgtgagcgagaacaagctgaagttccccagcggcagcgtgctgaccggcaccctgagcgtgctgaaggtgctggtgctgaaccagaccggcatcacctgggccgaggcccacgcccagtgcggcggcagcagacacggcctggacatgcagaaggacgccagcaagttcgtggacctgtgcgtgctgcagaagtgcagcaccagcaactgcatcatcagcgccaaggaccacaccagcatgagaatgaacgtggccaaggtgctgagatgcgtggccggctgccccggcctggaggagctgtacctggagagcaacaacatcttcatcagcgagagacccaccgacgtgctgcagaccgtgaagctgctggacctgagcagcaaccagctgatcgacgagaaccagctgtacctgatcgcccacctgcccagactggagcagctgatcctgagcgacaccggcatcagcagcctgcacttccccgacgccggcatcggctgcaagaccagcatgttccccagcctgaagtacctggtggtgaacgacaaccagatcagccagtggagcttcttcaacgagctggagaagctgcccagcctgagagccctgagctgcctgagaaaccccctgaccaaggaggacaaggaggccgagaccgccagactgctgatcatcgccagcatcggccagctgaagaccctgaacaagtgcgagatcctgcccgaggagagaagaagagccgagctggactacagaaaggccttcggcaacgagtggaagcaggccggcggccacaaggaccccgagaagaacagactgagcgaggagttcctgaccgcccaccccagataccagttcctgtgcctgaagtacggcgcccccgaggactgggagctgaagacccagcagcccctgatgctgaagaaccagctgctgaccctgaagatcaagtacccccaccagctggaccagaaggtgctggagaagcagctgcccggcagcatgaccatccagaaggtgaagggcctgctgagcagactgctgaaggtgcccgtgagcgacctgctgctgagctacgagagccccaagaagcccggcagagagatcgagctggagaacgacctgaagagcctgcagttctacagcgtggagaacggcgactgcctgctggtgagatggtag

SEQ ID NO: 103902 - DNA, 2001 bp, synthetic construct
  misc_feature 1..2001: note = Description of Artificial Sequence: Synthetic coding sequence
  source 1..2001: mol_type = other DNA
atgatccacgagctgctgctggccctgagcggctaccccggcagcatcttcacctggaacaagagaagcggcctgcaggtgagccaggacttccccttcctgcaccccagcgagaccagcgtgctgaacagactgtgcagactgggcaccgactacatcagattcaccgagttcatcgagcagtacaccggccacgtgcagcagcaggaccaccaccccagccagcagggccagggcggcctgcacggcatctacctgagagccttctgcaccggcctggacagcgtgctgcagccctacagacaggccctgctggacctggagcaggagttcctgggcgacccccacctgagcatcagccacgtgaactacttcctggaccagttccagctgctgttccccagcgtgatggtggtggtggagcagatcaagagccagaagatccacggctgccagatcctggagaccgtgtacaagcacagctgcggcggcctgccccccgtgagaagcgccctggagaagatcctggccgtgtgccacggcgtgatgtacaagcagctgagcgcctggatgctgcacggcctgctgctggaccagcacgaggagttcttcatcaagcagggccccagcagcggcaacgtgagcgcccagcccgaggaggacgaggaggacctgggcatcggcggcctgaccggcaagcagctgagagagctgcaggacctgagactgatcgaggaggagaacatgctggcccccagcctgaagcagttcagcctgagagtggagatcctgcccagctacatccccgtgagagtggccgagaagatcctgttcgtgggcgagagcgtgcagatgttcgagaaccagaacgtgaacctgaccagaaagggcagcatcctgaagaaccaggaggacaccttcgccgccgagctgcacagactgaagcagcagcccctgttcagcctggtggacttcgagcaggtggtggacagaatcagaagcaccgtggccgagcacctgtggaagctgatggtggaggagagcgacctgctgggccagctgaagatcatcaaggacttctacctgctgggcagaggcgagctgttccaggccttcatcgacaccgcccagcacatgctgaagaccccccccaccgccgtgaccgagcacgacgtgaacgtggccttccagcagagcgcccacaaggtgctgctggacgacgacaacctgctgcccctgctgcacctgaccatcgagtaccacggcaaggagcacaaggacgccacccaggccagagagggccccagcagagagaccagccccagagaggcccccgccagcggctgggccgccctgggcctgagctacaaggtgcagtggcccctgcacatcctgttcacccccgccgtgctggagaagtacaacgtggtgttcaagtacctgctgagcgtgagaagagtgcaggccgagctgcagcactgctgggccctgcagatgcagagaaagcacctgaagagcaaccagaccgacgccatcaagtggagactgagaaaccacatggccttcctggtggacaacctgcagtactacctgcaggtggacgtgctggagagccagttcagccagctgctgcaccagatcaacagcaccagagacttcgagagcatcagactggcccacgaccacttcctgagcaacctgctggcccagagcttcatcctgctgaagcccgtgttccactgcctgaacgagatcctggacctgtgccacagcttctgcagcctggtgagccagaacctgggccccctggacgagagaggcgccgcccagctgagcatcctggtgaagggcttcagcagacagagcagcctgctgttcaagatcctgagcagcgtgagaaaccaccagatcaacagcgacctggcccagctgctgctgagactggactacaacaagtactacacccaggccggcggcaccctgggcagcttcggcatgtag

SEQ ID NO: 103903 - DNA, 660 bp, synthetic construct
  misc_feature 1..660: note = Description of Artificial Sequence: Synthetic coding sequence
  source 1..660: mol_type = other DNA
atggccgacaaggccaagcccgccaaggccgccaacagaaccccccccaagagccccggcgaccccagcaaggacagagccgccaagagactgagcctggagagcgagggcgccggcgagggcgccgccgccagccccgagctgagcgccctggaggaggccttcagaagattcgccgtgcacggcgacgccagagccaccggcagagagatgcacggcaagaactggagcaagctgtgcaaggactgccaggtgatcgacggcagaaacgtgaccgtgaccgacgtggacatcgtgttcagcaagatcaagggcaagagctgcagaaccatcaccttcgagcagttccaggaggccctggaggagctggccaagaagagattcaaggacaagagcagcgaggaggccgtgagagaggtgcacagactgatcgagggcaaggcccccatcatcagcggcgtgaccaaggccatcagcagccccaccgtgagcagactgaccgacaccaccaagttcaccggcagccacaaggagagattcgaccccagcggcaagggcaagggcaaggccggcagagtggacctggtggacgagagcggctacgtgagcggctacaagcacgccggcacctacgaccagaaggtgcagggcggcaagtag

SEQ ID NO: 103904 - DNA, 1071 bp, synthetic construct
  misc_feature 1..1071: note = Description of Artificial Sequence: Synthetic coding sequence
  source 1..1071: mol_type = other DNA
atgagcaagctgtggagaagaggcagcaccagcggcgccatggaggcccccgagcccggcgaggccctggagctgagcctggccggcgcccacggccacggcgtgcacaagaagaagcacaagaagcacaagaagaagcacaagaagaagcaccaccaggaggaggacgccggccccacccagcccagccccgccaagccccagctgaagctgaagatcaagctgggcggccaggtgctgggcaccaagagcgtgcccaccttcaccgtgatccccgagggccccagaagccccagccccctgatggtggtggacaacgaggaggagcccatggagggcgtgcccctggagcagtacagagcctggctggacgaggacagcaacctgagccccagccccctgagagacctgagcggcggcctgggcggccaggaggaggaggaggagcagagatggctggacgccctggagaagggcgagctggacgacaacggcgacctgaagaaggagatcaacgagagactgctgaccgccagacagagagccctgctgcagaaggccagaagccagcccagccccatgctgcccctgcccgtggccgagggctgccccccccccgccctgaccgaggagatgctgctgaagagagaggagagagccagaaagagaagactgcaggccgccagaagagccgaggagcacaagaaccagaccatcgagagactgaccaagaccgccgccaccagcggcagaggcggcagaggcggcgccagaggcgagagaagaggcggcagagccgccgcccccgcccccatggtgagatactgcagcggcgcccagggcagcaccctgagcttcccccccggcgtgcccgcccccaccgccgtgagccagagacccagccccagcggccccccccccagatgcagcgtgcccggctgcccccaccccagaagatacgcctgcagcagaaccggccaggccctgtgcagcctgcagtgctacagaatcaacctgcagatgagactgggcggccccgagggccccggcagccccctgctggccacctag

SEQ ID NO: 103905 - DNA, 1272 bp, synthetic construct
  misc_feature 1..1272: note = Description of Artificial Sequence: Synthetic coding sequence
  source 1..1272: mol_type = other DNA
atggccggcaaggtgaagtgggtgaccgacatcgagaagagcgtgctgatcaacaacttcgagaagagaggctgggtgcaggtgaccgagaacgaggactggaacttctactggatgagcgtgcagaccatcagaaacgtgttcagcgtggaggccggctacagactgagcgacgaccagatcgtgaaccacttccccaaccactacgagctgaccagaaaggacctgatggtgaagaacatcaagagatacagaaaggagctggagaaggagggcagccccctggccgagaaggacgagaacggcaagtacctgtacctggacttcgtgcccgtgacctacatgctgcccgccgactacaacctgttcgtggaggagttcagaaagagccccagcagcacctggatcatgaagccctgcggcaaggcccagggcaagggcatcttcctgatcaacaagctgagccagatcaagaagtggagcagagacagcaagaccagcagcttcgtgagccagagcaacaaggaggcctacgtgatcagcctgtacatcaacaaccccctgctgatcggcggcagaaagttcgacctgagactgtacgtgctggtgagcacctacagacccctgagatgctacatgtacaagctgggcttctgcagattctgcaccgtgaagtacacccccagcaccagcgagctggacaacatgttcgtgcacctgaccaacgtggccatccagaagcacggcgaggactacaaccacatccacggcggcaagtggaccgtgagcaacctgagactgtacctggagagcaccagaggcaaggaggtgaccagcaagctgttcgacgagatccactggatcatcgtgcagagcctgaaggccgtggcccccgtgatgaacaacgacaagcactgcttcgagtgctacggctacgacatcatcatcgacgacaagctgaagccctggctgatcgaggtgaacgccagccccagcctgaccagcagcaccgccaacgacagaatcctgaagtacaacctgatcaacgacaccctgaacatcgccgtgcccaacggcgagatccccgactgcaagtggaacaagagcccccccaaggaggtgctgggcaactacgagatcctgtacgacgaggagctggcccagggcgacggcgccgacagagagctgagaagcagacagggccagagcctgggccccagagccggcagaagcagagacagcggcagagccgtgctgaccacctggaagtag

SEQ ID NO: 103906 - DNA, 1185 bp, synthetic construct
  misc_feature 1..1185: note = Description of Artificial Sequence: Synthetic coding sequence
  source 1..1185: mol_type = other DNA
atggccggcaaggtgaagtgggtgaccgacatcgagaagagcgtgctgatcaacaacttcgagaagagaggctgggtgcaggtgaccgagaacgaggactggaacttctactggatgagcgtgcagaccatcagaaacgtgttcagcgtggaggccggctacagactgagcgacgaccagatcgtgaaccacttccccaaccactacgagctgaccagaaaggacctgatggtgaagaacatcaagagatacagaaaggagctggagaaggagggcagccccctggccgagaaggacgagaacggcaagtacctgtacctggacttcgtgcccgtgacctacatgctgcccgccgactacaacctgttcgtggaggagttcagaaagagccccagcagcacctggatcatgaagccctgcggcaaggcccagggcaagggcatcttcctgatcaacaagctgagccagatcaagaagtggagcagagacagcaagaccagcagcttcgtgagccagagcaacaaggaggcctacgtgatcagcctgtacatcaacaaccccctgctgatcggcggcagaaagttcgacctgagactgtacgtgctggtgagcacctacagacccctgagatgctacatgtacaagctgggcttctgcagattctgcaccgtgaagtacacccccagcaccagcgagctggacaacatgttcgtgcacctgaccaacgtggccatccagaagcacggcgaggactacaaccacatccacggcggcaagtggaccgtgagcaacctgagactgtacctggagagcaccagaggcaaggaggtgaccagcaagctgttcgacgagatccactggatcatcgtgcagagcctgaaggccgtggccgtgaacgccagccccagcctgaccagcagcaccgccaacgacagaatcctgaagtacaacctgatcaacgacaccctgaacatcgccgtgcccaacggcgagatccccgactgcaagtggaacaagagcccccccaaggaggtgctgggcaactacgagatcctgtacgacgaggagctggcccagggcgacggcgccgacagagagctgagaagcagacagggccagagcctgggccccagagccggcagaagcagagacagcggcagagccgtgctgaccacctggaagtag

SEQ ID NO: 103907 - DNA, 180 bp, synthetic construct
  misc_feature 1..180: note = Description of Artificial Sequence: Synthetic coding sequence
  source 1..180: mol_type = other DNA
atggccggcaaggtgaagtgggtgaccgacatcgagaagagcgtgctgatcaacaacttcgagaagagaggctgggtgcaggtgaccgagaacgaggactggaacttctactggctgctggacctgcccgagttcagatacagaagctgcctgaacgagttccccgacttcagagtgtag

SEQ ID NO: 103908 - DNA, 1068 bp, synthetic construct
  misc_feature 1..1068: note = Description of Artificial Sequence: Synthetic coding sequence
  source 1..1068: mol_type = other DNA
atgccccaccagcccaccatcctgctgaacaccgtgagcgccagcgccagcccctgcctgcaccccggcgcccagaacatccccagccccaccggcctgcccagatgcagaagcggcagccacaccatcggccccttcagcagcttccagagcgccgcccacatctacagccagaagctgagcagacccagcagcgccaaggccgccggcagctgctacctgaacaagcaccacagcggcatcgccaagacccagaaggagggcgaggacgccagcctgtacagcaagagatacaaccagagcatggtgaccgccgagctgcagagactggccgagaagcaggccgccagacagtacagccccagcagccacatcaacctgctgacccagcaggtgaccaacctgaacctggccaccggcatcatcaacagaagcagcgccagcgccccccccaccctgagacccatcatcagccccagcggccccacctggagcacccagagcgacccccaggcccccgagaaccacagcagcagccccggcagcagaagcctgcagaccggcggcttcgcctgggagggcgaggtggagaacaacgtgtacagccaggccaccggcgtggtgccccagcacaagtaccaccccaccgccggcagctaccagctgcagttcgccctgcagcagctggagcagcagaagctgcagagcagacagctgctggaccagagcagagccagacaccaggccatcttcggcagccagaccctgcccaacagcaacctgtggaccatgaacaacggcgccggctgcagaatcagcagcgccaccgccagcggccagaagcccaccaccctgccccagaaggtggtgcccccccccagcagctgcgccagcctggtgcccaagcccccccccaaccacgagcaggtgctgagaagagccaccagccagaaggccagcaagggcagcagcgccgagggccagctgaacggcctgcagagcagcctgaaccccgccgccttcgtgcccatcaccagcagcaccgtgaacagccacaccgccctgtag

SEQ ID NO: 103909 - DNA, 3846 bp, synthetic construct
  misc_feature 1..3846: note = Description of Artificial Sequence: Synthetic coding sequence
  source 1..3846: mol_type = other DNA
atgcccatcgtgatggccagagacctggaggagaccgccagcagcagcgaggacgaggaggtgatcagccaggaggaccacccctgcatcatgtggaccggcggctgcagaagaatccccgtgctggtgttccacgccgacgccatcctgaccaaggacaacaacatcagagtgatcggcgagagataccacctgagctacaagatcgtgagaaccgacagcagactggtgagaagcatcctgaccgcccacggcttccacgaggtgcaccccagcagcaccgactacaacctgatgtggaccggcagccacctgaagcccttcctgctgagaaccctgagcgaggcccagaaggtgaaccacttccccagaagctacgagctgaccagaaaggacagactgtacaagaacatcatcagaatgcagcacacccacggcttcaaggccttccacatcctgccccagaccttcctgctgcccgccgagtacgccgagttctgcaacagctacagcaaggacagaggcccctggatcgtgaagcccgtggccagcagcagaggcagaggcgtgtacctgatcaacaaccccaaccagatcagcctggaggagaacatcctggtgagcagatacatcaacaaccccctgctgatcgacgacttcaagttcgacgtgagactgtacgtgctggtgaccagctacgaccccctggtgatctacctgtacgaggagggcctggccagattcgccaccgtgagatacgaccagggcgccaagaacatcagaaaccagttcatgcacctgaccaactacagcgtgaacaagaagagcggcgactacgtgagctgcgacgaccccgaggtggaggactacggcaacaagtggagcatgagcgccatgctgagatacctgaagcaggagggcagagacaccaccgccctgatggcccacgtggaggacctgatcatcaagaccatcatcagcgccgagctggccatcgccaccgcctgcaagaccttcgtgccccacagaagcagctgcttcgagctgtacggcttcgacgtgctgatcgacagcaccctgaagccctggctgctggaggtgaacctgagccccagcctggcctgcgacgcccccctggacctgaagatcaaggccagcatgatcagcgacatgttcaccgtggtgggcttcgtgtgccaggaccccgcccagagagccagcaccagacccatctaccccaccttcgagagcagcagaagaaaccccttccagaagccccagagatgcagacccctgagcgccagcgacgccgagatgaagaacctggtgggcagcgccagagagaagggccccggcaagctgggcggcagcgtgctgggcctgagcatggaggagatcaaggtgctgagaagagtgaaggaggagaacgacagaagaggcggcttcatcagaatcttccccaccagcgagacctgggagatctacggcagctacctggagcacaagaccagcatgaactacatgctggccaccagactgttccaggacagaatgaccgccgacggcgcccccgagctgaagatcgagagcctgaacagcaaggccaagctgcacgccgccctgtacgagagaaagctgctgagcctggaggtgagaaagagaagaagaagaagcagcagactgagagccatgagacccaagtaccccgtgatcacccagcccgccgagatgaacgtgaagaccgagaccgagagcgaggaggaggaggaggtggccctggacaacgaggacgaggagcaggaggccagccaggaggagagcgccggcttcctgagagagaaccaggccaagtacacccccagcctgaccgccctggtggagaacacccccaaggagaacagcatgaaggtgagagagtggaacaacaagggcggccactgctgcaagctggagacccaggagctggagcccaagttcaacctgatgcagatcctgcaggacaacggcaacctgagcaagatgcaggccagaatcgccttcagcgcctacctgcagcacgtgcagatcagactgatgaaggacagcggcggccagaccttcagcgccagctgggccgccaaggaggacgagcagatggagctggtggtgagattcctgaagagagccagcaacaacctgcagcacagcctgagaatggtgctgcccagcagaagactggccctgctggagagaagaagaatcctggcccaccagctgggcgacttcatcatcgtgtacaacaaggagaccgagcagatggccgagaagaagagcaagaagaaggtggaggaggaggaggaggacggcgtgaacatggagaacttccaggagttcatcagacaggccagcgaggccgagctggaggaggtgctgaccttctacacccagaagaacaagagcgccagcgtgttcctgggcacccacagcaagatcagcaagaacaacaacaactacagcgacagcggcgccaagggcgaccaccccgagaccatcatggaggaggtgaagatcaagccccccaagcagcagcagaccaccgagatccacagcgacaagctgagcagattcaccaccagcgccgagaaggaggccaagctggtgtacagcaacagcagcagcggccccaccgccaccctgcagaagatccccaacacccacctgagcagcgtgaccaccagcgacctgagccccggcccctgccaccacagcagcctgagccagatccccagcgccatccccagcatgccccaccagcccaccatcctgctgaacaccgtgagcgccagcgccagcccctgcctgcaccccggcgcccagaacatccccagccccaccggcctgcccagatgcagaagcggcagccacaccatcggccccttcagcagcttccagagcgccgcccacatctacagccagaagctgagcagacccagcagcgccaaggccggcagctgctacctgaacaagcaccacagcggcatcgccaagacccagaaggagggcgaggacgccagcctgtacagcaagagatacaaccagagcatggtgaccgccgagctgcagagactggccgagaagcaggccgccagacagtacagccccagcagccacatcaacctgctgacccagcaggtgaccaacctgaacctggccaccggcatcatcaacagaagcagcgccagcgccccccccaccctgagacccatcatcagccccagcggccccacctggagcacccagagcgacccccaggcccccgagaaccacagcagcagccccggcagcagaagcctgcagaccggcggcttcgcctgggagggcgaggtggagaacaacgtgtacagccaggccaccggcgtggtgccccagcacaagtaccaccccaccgccggcagctaccagctgcagttcgccctgcagcagctggagcagcagaagctgcagagcagacagctgctggaccagagcagagccagacaccaggccatcttcggcagccagaccctgcccaacagcaacctgtggaccatgaacaacggcgccggctgcagaatcagcagcgccaccgccagcggccagaagcccaccaccctgccccagaaggtggtgcccccccccagcagctgcgccagcctggtgcccaagcccccccccaaccacgagcaggtgctgagaagagccaccagccagaaggccagcaagggcagcagcgccgagggccagctgaacggcctgcagagcagcctgaaccccgccgccttcgtgcccatcaccagcagcaccgaccccgcccacaccaagatctag

SEQ ID NO: 103910 - DNA, 2454 bp, synthetic construct
  misc_feature 1..2454: note = Description of Artificial Sequence: Synthetic coding sequence
  source 1..2454: mol_type = other DNA
atgaaggagatcaaggtgctgagaagagtgaaggaggagaacgacagaagaggcggcttcatcagaatcttccccaccagcgagacctgggagatctacggcagctacctggagcacaagaccagcatgaactacatgctggccaccagactgttccaggacagaggcaaccccagaagaagcctgctgaccggcagaaccagaatgaccgccgacggcgcccccgagctgaagatcgagagcctgaacagcaaggccaagctgcacgccgccctgtacgagagaaagctgctgagcctggaggtgagaaagagaagaagaagaagcagcagactgagagccatgagacccaagtaccccgtgatcacccagcccgccgagatgaacgtgaagaccgagaccgagagcgaggaggaggaggaggtggccctggacaacgaggacgaggagcaggaggccagccaggaggagagcgccggcttcctgagagagaaccaggccaagtacacccccagcctgaccgccctggtggagaacacccccaaggagaacagcatgaaggtgagagagtggaacaacaagggcggccactgctgcaagctggagacccaggagctggagcccaagttcaacctgatgcagatcctgcaggacaacggcaacctgagcaagatgcaggccagaatcgccttcagcgcctacctgcagcacgtgcagatcagactgatgaaggacagcggcggccagaccttcagcgccagctgggccgccaaggaggacgagcagatggagctggtggtgagattcctgaagagagccagcaacaacctgcagcacagcctgagaatggtgctgcccagcagaagactggccctgctggagagaagaagaatcctggcccaccagctgggcgacttcatcatcgtgtacaacaaggagaccgagcagatggccgagaagaagagcaagaagaaggtggaggaggaggaggaggacggcgtgaacatggagaacttccaggagttcatcagacaggccagcgaggccgagctggaggaggtgctgaccttctacacccagaagaacaagagcgccagcgtgttcctgggcacccacagcaagatcagcaagaacaacaacaactacagcgacagcggcgccaagggcgaccaccccgagaccatcatggaggaggtgaagatcaagccccccaagcagcagcagaccaccgagatccacagcgacaagctgagcagattcaccaccagcgccgagaaggaggccaagctggtgtacagcaacagcagcagcggccccaccgccaccctgcagaagatccccaacacccacctgagcagcgtgaccaccagcgacctgagccccggcccctgccaccacagcagcctgagccagatccccagcgccatccccagcatgccccaccagcccaccatcctgctgaacaccgtgagcgccagcgccagcccctgcctgcaccccggcgcccagaacatccccagccccaccggcctgcccagatgcagaagcggcagccacaccatcggccccttcagcagcttccagagcgccgcccacatctacagccagaagctgagcagacccagcagcgccaaggccggcagctgctacctgaacaagcaccacagcggcatcgccaagacccagaaggagggcgaggacgccagcctgtacagcaagagatacaaccagagcatggtgaccgccgagctgcagagactggccgagaagcaggccgccagacagtacagccccagcagccacatcaacctgctgacccagcaggtgaccaacctgaacctggccaccggcatcatcaacagaagcagcgccagcgccccccccaccctgagacccatcatcagccccagcggccccacctggagcacccagagcgacccccaggcccccgagaaccacagcagcagccccggcagcagaagcctgcagaccggcggcttcgcctgggagggcgaggtggagaacaacgtgtacagccaggccaccggcgtggtgccccagcacaagtaccaccccaccgccggcagctaccagctgcagttcgccctgcagcagctggagcagcagaagctgcagagcagacagctgctggaccagagcagagccagacaccaggccatcttcggcagccagaccctgcccaacagcaacctgtggaccatgaacaacggcgccggctgcagaatcagcagcgccaccgccagcggccagaagcccaccaccctgccccagaaggtggtgcccccccccagcagctgcgccagcctggtgcccaagcccccccccaaccacgagcaggtgctgagaagagccaccagccagaaggccagcaacaccagattcagaagcagcttccagaactacctgtggtacttcttccaggccgtgagctag

SEQ ID NO: 103911 - DNA, 2337 bp, synthetic construct
  misc_feature 1..2337: note = Description of Artificial Sequence: Synthetic coding sequence
  source 1..2337: mol_type = other DNA
atggcccacgtggaggacctgatcatcaagaccatcatcagcgccgagctggccatcgccaccgcctgcaagaccttcgtgccccacagaagcagctgcttcgagctgtacggcttcgacgtgctgatcgacagcaccctgaagccctggctgctggaggtgaacctgagccccagcctggcctgcgacgcccccctggacctgaagatcaaggccagcatgatcagcgacatgttcaccgtggtgggcttcgtgtgccaggaccccgcccagagagccagcaccagacccatctaccccaccttcgagagcagcagaagaaaccccttccagaagccccagagatgcagacccctgagcgccagcgacgccgagatgaagaacctggtgggcagcgccagagagaagggccccggcaagctgggcggcagcgtgctgggcctgagcatggaggagatcaaggtgctgagaagagtgaaggaggagaacgacagaagaggcggcttcatcagaatcttccccaccagcgagacctgggagatctacggcagctacctggagcacaagaccagcatgaactacatgctggccaccagactgttccaggacagaatgaccgccgacggcgcccccgagctgaagatcgagagcctgaacagcaaggccaagctgcacgccgccctgtacgagagaaagctgctgagcctggaggtgagaaagagaagaagaagaagcagcagactgagagccatgagacccaagtaccccgtgatcacccagcccgccgagatgaacgtgaagaccgagaccgagagcgaggaggaggaggaggtggccctggacaacgaggacgaggagcaggaggccagccaggaggagagcgccggcttcctgagagagaaccaggccaagtacacccccagcctgaccgccctggtggagaacacccccaaggagaacagcatgaaggtgagagagtggaacaacaagggcggccactgctgcaagctggagacccaggagctggagcccaagttcaacctgatgcagatcctgcaggacaacggcaacctgagcaagatgcaggccagaatcgccttcagcgcctacctgcagcacgtgcagatcagactgatgaaggacagcggcggccagaccttcagcgccagctgggccgccaaggaggacgagcagatggagctggtggtgagattcctgaagagagccagcaacaacctgcagcacagcctgagaatggtgctgcccagcagaagactggccctgctggagagaagaagaatcctggcccaccagctgggcgacttcatcatcgtgtacaacaaggagaccgagcagatggccgagaagaagagcaagaagaaggtggaggaggaggaggaggacggcgtgaacatggagaacttccaggagttcatcagacaggccagcgaggccgagctggaggaggtgctgaccttctacacccagaagaacaagagcgccagcgtgttcctgggcacccacagcaagatcagcaagaacaacaacaactacagcgacagcggcgccaagggcgaccaccccgagaccatcatggaggaggtgaagatcaagccccccaagcagcagcagaccaccgagatccacagcgacaagctgagcagattcaccaccagcgccgagaaggaggccaagctggtgtacagcaacagcagcagcggccccaccgccaccctgcagaagatccccaacacccacctgagcagcgtgaccaccagcgacctgagccccggcccctgccaccacagcagcctgagccagatccccagcgccatccccagcatgccccaccagcccaccatcctgctgaacaccgtgagcgccagcgccagcccctgcctgcaccccggcgcccagaacatccccagccccaccggcctgcccagatgcagaagcggcagccacaccatcggccccttcagcagcttccagagcgccgcccacatctacagccagaagctgagcagacccagcagcgccaaggccggcagctgctacctgaacaagcaccacagcggcatcgccaagacccagaaggagggcgaggacgccagcctgtacagcaagagatacaaccagagcatggtgaccgccgagctgcagagactggccgagaagcaggccgccagacagtacagccccagcagccacaccgacccctggaagtacgacagaagcatcagaatgtgcagccccctgaacatcctggagcccgagttcaagaagtacctgatgggcatctacagcccccacagcagcaagaagaagaagaagtag

SEQ ID NO: 103912 - DNA, 1755 bp, synthetic construct
  misc_feature 1..1755: note = Description of Artificial Sequence: Synthetic coding sequence
  source 1..1755: mol_type = other DNA
atgagaatcggcacccccaccgccggccccggccccagcgccgtgatggagggctgcctgggcgtggccgagctgagaaagctgagcaccttcagcgcctacctggaggaccacagctacaacgtggagcagatctggagagacatcgaggacgtgatcatcaagaccctgatcagcgcccaccccatcatcagacacaactaccacacctgcttccccaaccacaccctgaacagcgcctgcttcgagatcctgggcttcgacatcctgctggaccacaagctgaagccctggctgctggaggtgaaccacagccccagcttcagcaccgacagcagactggacaaggaggtgaaggacggcctgctgtacgacaccctggtgctgatcaacctggagagctgcgacaagaagaaggtgctggaggaggagagacagagaggccagttcctgcagcagtgctgcagcagagagatgagaatcgaggaggccaagggcttcagagccgtgcagctgaagaagaccgagacctacgagaaggagaactgcggcggcttcagactgatctaccccagcctgaacagcgagaagtacgagaagttcttccaggacaacaacagcctgttccagaacaccgtggccagcagagccagagaggagtacgccagacagctgatccaggagctgagactgaagagagagaagaagcccttccagatgaagaagaaggtggagatgcagggcgagagcgccggcgagcaggtgagaaagaagggcatgagaggctggcagcagaagcagcagcagaaggacaaggccgccacccaggccagcaagcagtacatccagcccctgaccctggtgagctacacccccgacctgctgctgagcgtgagaggcgagagaaagaacgagaccgacagcagcctgaaccaggaggcccccaccgaggaggccagcagcgtgttccccaagctgaccagcgccaagcccttcagcagcctgcccgacctgagaaacatcaacctgagcagcagcaagctggagcccagcaagcccaacttcagcatcaaggaggccaagagcgccagcgccgtgaacgtgttcaccggcaccgtgcacctgaccagcgtggagaccacccccgagagcaccacccagctgagcatcagccccaagagcccccccaccctggccgtgaccgccagcagcgagtacagcggccccgagaccgacagagtggtgagcttcaagtgcaagaagcagcagacccccccccacctgacccagaagaagatgctgaagagcttcctgcccaccaagagcaagagcttctgggagagccccaacaccaactggaccctgctgaagagcgacatgaacaagccccacctgatcagcgagctgctgaccaagctgcagctgagcggcaagctgagcttcttccccgcccactacaaccccaagctgggcatgaacaacctgagccagaaccccagcctgcccggcgagtgccacagcagaagcgacagcagcggcgagaagagacagctggacgtgagcagcctgctgctgcagagcccccagagctacaacgtgaccctgagagacctgctggtgatcgccacccccgcccagctggaccccagaccctgcagaagccacgccagcgccatgagagacccctgcatgcaggaccaggaggcctacagccactgcctgatcagcggccagaagggctgcgagagaagctag

SEQ ID NO: 103913 - DNA, 2532 bp, synthetic construct
  misc_feature 1..2532: note = Description of Artificial Sequence: Synthetic coding sequence
  source 1..2532: mol_type = other DNA
atgccccagtgccccaccctggagagccaggagggcgagaacagcgaggagaagggcgacagcagcaaggaggaccccaaggagaccgtggccctggccttcgtgagagagaaccccggcgcccagaacggcctgcagaacgcccagcagcagggcaagaagaagagaaagaagaagagactggtgatcaacctgagcagctgcagatacgagagcgtgagaagagccgcccagcagtacggcttcagagagggcggcgaggacgacgactggaccctgtactggaccgactacagcgtgagcctggagagagtgatggagatgaagagctaccagaagatcaaccacttccccggcatgagcgagatctgcagaaaggacctgctggccagaaacatgagcagaatgctgaagatgttccccaaggacttcagattcttccccagaacctggtgcctgcccgccgactggggcgacctgcagacctacagcagaagcagaaagaacaagacctacatctgcaagcccgacagcggctgccagggcaagggcatcttcatcaccagaaccgtgaaggagatcaagcccggcgaggacatgatctgccagctgtacatcagcaagcccttcatcatcgacggcttcaagttcgacctgagaatctacgtgctggtgaccagctgcgaccccctgagaatcttcgtgtacaacgagggcctggccagattcgccaccaccagctacagcagaccctgcaccgacaacctggacgacatctgcatgcacctgaccaactacagcatcaacaagcacagcagcaacttcagcagagacgcccacagcggcagcaagagaaagctgagcaccttcagcgcctacctggaggaccacagctacaacgtggagcagatctggagagacatcgaggacgtgatcatcaagaccctgatcagcgcccaccccatcatcagacacaactaccacacctgcttccccaaccacaccctgaacagcgcctgcttcgagatcctgggcttcgacatcctgctggaccacaagctgaagccctggctgctggaggtgaaccacagccccagcttcagcaccgacagcagactggacaaggaggtgaaggacggcctgctgtacgacaccctggtgctgatcaacctggagagctgcgacaagaagaaggtgctggaggaggagagacagagaggccagttcctgcagcagtgctgcagcagagagatgagaatcgaggaggccaagggcttcagagccgtgcagctgaagaagaccgagacctacgagaaggagaactgcggcggcttcagactgatctaccccagcctgaacagcgagaagtacgagaagttcttccaggacaacaacagcctgttccagaacaccgtggccagcagagccagagaggagtacgccagacagctgatccaggagctgagactgaagagagagaagaagcccttccagatgaagaagaaggtggagatgcagggcgagagcgccggcgagcaggtgagaaagaagggcatgagaggctggcagcagaagcagcagcagaaggacaaggccgccacccaggccagcaagcagtacatccagcccctgaccctggtgagctacacccccgacctgctgctgagcgtgagaggcgagagaaagaacgagaccgacagcagcctgaaccaggaggcccccaccgaggaggccagcagcgtgttccccaagctgaccagcgccaagcccttcagcagcctgcccgacctgagaaacatcaacctgagcagcagcaagctggagcccagcaagcccaacttcagcatcaaggaggccaagagcgccagcgccgtgaacgtgttcaccggcaccgtgcacctgaccagcgtggagaccacccccgagagcaccacccagctgagcatcagccccaagagcccccccaccctggccgtgaccgccagcagcgagtacagcggccccgagaccgacagagtggtgagcttcaagtgcaagaagcagcagacccccccccacctgacccagaagaagatgctgaagagcttcctgcccaccaagagcaagagcttctgggagagccccaacaccaactggaccctgctgaagagcgacatgaacaagccccacctgatcagcgagctgctgaccaagctgcagctgagcggcaagctgagcttcttccccgcccactacaaccccaagctgggcatgaacaacctgagccagaaccccagcctgcccggcgagtgccacagcagaagcgacagcagcggcgagaagagacagctggacgtgagcagcctgctgctgcagagcccccagagctacaacgtgaccctgagagacctgctggtgatcgccacccccgcccagctggaccccagaccctgcagaagccacgccagcgccatgagagacccctgcatgcaggaccaggaggcctacagccactgcctgatcagcggccagaagggctgcgagagaagctag

SEQ ID NO: 103914 - DNA, 558 bp, synthetic construct
  misc_feature 1..558: note = Description of Artificial Sequence: Synthetic coding sequence
  source 1..558: mol_type = other DNA
cagcccatgggcgccctgctgctgcaccccagcagaagaggccccgccggcgtggtggccagctggaccagcagccccgccggcagagacggcggcgtgggcatcgccggcgcctggtacttccccagagccagcagccaggccagagagatgccccagtgccccaccctggagagccaggagggcgagaacagcgaggagaagggcgacagcagcaaggaggaccccaaggagaccgtggccctggccttcgtgagagagaaccccggcgcccagaacggcctgcagaacgcccagcagcagggcaagaagaagagaaagaagaagagaatgcccctgaagaacagcagaaagagaagattcccctgcttcaagaaggccctgatctgccccggcaacctggtgagactgcagtacgacagcaccatcctgacctaccaggaccccaccgccgcctgcgccttccagttcctgttcaacatcagcccctgcctggcccccttcagactgatcgacgagggcaagctggtgcacttcctgatccacagcttcccctag

SEQ ID NO: 103915 - DNA, 1710 bp, synthetic construct
  misc_feature 1..1710: note = Description of Artificial Sequence: Synthetic coding sequence
  source 1..1710: mol_type = other DNA
atggagggctgcctgggcgtggccgagctgagaaagctgagcaccttcagcgcctacctggaggaccacagctacaacgtggagcagatctggagagacatcgaggacgtgatcatcaagaccctgatcagcgcccaccccatcatcagacacaactaccacacctgcttccccaaccacaccctgaacagcgcctgcttcgagatcctgggcttcgacatcctgctggaccacaagctgaagccctggctgctggaggtgaaccacagccccagcttcagcaccgacagcagactggacaaggaggtgaaggacggcctgctgtacgacaccctggtgctgatcaacctggagagctgcgacaagaagaaggtgctggaggaggagagacagagaggccagttcctgcagcagtgctgcagcagagagatgagaatcgaggaggccaagggcttcagagccgtgcagctgaagaagaccgagacctacgagaaggagaactgcggcggcttcagactgatctaccccagcctgaacagcgagaagtacgagaagttcttccaggacaacaacagcctgttccagaacaccgtggccagcagagccagagaggagtacgccagacagctgatccaggagctgagactgaagagagagaagaagcccttccagatgaagaagaaggtggagatgcagggcgagagcgccggcgagcaggtgagaaagaagggcatgagaggctggcagcagaagcagcagcagaaggacaaggccgccacccaggccagcaagcagtacatccagcccctgaccctggtgagctacacccccgacctgctgctgagcgtgagaggcgagagaaagaacgagaccgacagcagcctgaaccaggaggcccccaccgaggaggccagcagcgtgttccccaagctgaccagcgccaagcccttcagcagcctgcccgacctgagaaacatcaacctgagcagcagcaagctggagcccagcaagcccaacttcagcatcaaggaggccaagagcgccagcgccgtgaacgtgttcaccggcaccgtgcacctgaccagcgtggagaccacccccgagagcaccacccagctgagcatcagccccaagagcccccccaccctggccgtgaccgccagcagcgagtacagcggccccgagaccgacagagtggtgagcttcaagtgcaagaagcagcagacccccccccacctgacccagaagaagatgctgaagagcttcctgcccaccaagagcaagagcttctgggagagccccaacaccaactggaccctgctgaagagcgacatgaacaagccccacctgatcagcgagctgctgaccaagctgcagctgagcggcaagctgagcttcttccccgcccactacaaccccaagctgggcatgaacaacctgagccagaaccccagcctgcccggcgagtgccacagcagaagcgacagcagcggcgagaagagacagctggacgtgagcagcctgctgctgcagagcccccagagctacaacgtgaccctgagagacctgctggtgatcgccacccccgcccagctggaccccagaccctgcagaagccacgccagcgccatgagagacccctgcatgcaggaccaggaggcctacagccactgcctgatcagcggccagaagggctgcgagagaagctag

SEQ ID NO: 103916 - DNA, 2676 bp, synthetic construct
  misc_feature 1..2676: note = Description of Artificial Sequence: Synthetic coding sequence
  source 1..2676: mol_type = other DNA
atgggcgccctgctgctgcaccccagcagaagaggccccgccggcgtggtggccagctggaccagcagccccgccggcagagacggcggcgtgggcatcgccggcgcctggtacttccccagagccagcagccaggccagagagatgccccagtgccccaccctggagagccaggagggcgagaacagcgaggagaagggcgacagcagcaaggaggaccccaaggagaccgtggccctggccttcgtgagagagaaccccggcgcccagaacggcctgcagaacgcccagcagcagggcaagaagaagagaaagaagaagagactggtgatcaacctgagcagctgcagatacgagagcgtgagaagagccgcccagcagtacggcttcagagagggcggcgaggacgacgactggaccctgtactggaccgactacagcgtgagcctggagagagtgatggagatgaagagctaccagaagatcaaccacttccccggcatgagcgagatctgcagaaaggacctgctggccagaaacatgagcagaatgctgaagatgttccccaaggacttcagattcttccccagaacctggtgcctgcccgccgactggggcgacctgcagacctacagcagaagcagaaagaacaagacctacatctgcaagcccgacagcggctgccagggcaagggcatcttcatcaccagaaccgtgaaggagatcaagcccggcgaggacatgatctgccagctgtacatcagcaagcccttcatcatcgacggcttcaagttcgacctgagaatctacgtgctggtgaccagctgcgaccccctgagaatcttcgtgtacaacgagggcctggccagattcgccaccaccagctacagcagaccctgcaccgacaacctggacgacatctgcatgcacctgaccaactacagcatcaacaagcacagcagcaacttcagcagagacgcccacagcggcagcaagagaaagctgagcaccttcagcgcctacctggaggaccacagctacaacgtggagcagatctggagagacatcgaggacgtgatcatcaagaccctgatcagcgcccaccccatcatcagacacaactaccacacctgcttccccaaccacaccctgaacagcgcctgcttcgagatcctgggcttcgacatcctgctggaccacaagctgaagccctggctgctggaggtgaaccacagccccagcttcagcaccgacagcagactggacaaggaggtgaaggacggcctgctgtacgacaccctggtgctgatcaacctggagagctgcgacaagaagaaggtgctggaggaggagagacagagaggccagttcctgcagcagtgctgcagcagagagatgagaatcgaggaggccaagggcttcagagccgtgcagctgaagaagaccgagacctacgagaaggagaactgcggcggcttcagactgatctaccccagcctgaacagcgagaagtacgagaagttcttccaggacaacaacagcctgttccagaacaccgtggccagcagagccagagaggagtacgccagacagctgatccaggagctgagactgaagagagagaagaagcccttccagatgaagaagaaggtggagatgcagggcgagagcgccggcgagcaggtgagaaagaagggcatgagaggctggcagcagaagcagcagcagaaggacaaggccgccacccaggccagcaagcagtacatccagcccctgaccctggtgagctacacccccgacctgctgctgagcgtgagaggcgagagaaagaacgagaccgacagcagcctgaaccaggaggcccccaccgaggaggccagcagcgtgttccccaagctgaccagcgccaagcccttcagcagcctgcccgacctgagaaacatcaacctgagcagcagcaagctggagcccagcaagcccaacttcagcatcaaggaggccaagagcgccagcgccgtgaacgtgttcaccggcaccgtgcacctgaccagcgtggagaccacccccgagagcaccacccagctgagcatcagccccaagagcccccccaccctggccgtgaccgccagcagcgagtacagcggccccgagaccgacagagtggtgagcttcaagtgcaagaagcagcagacccccccccacctgacccagaagaagatgctgaagagcttcctgcccaccaagagcaagagcttctgggagagccccaacaccaactggaccctgctgaagagcgacatgaacaagccccacctgatcagcgagctgctgaccaagctgcagctgagcggcaagctgagcttcttccccgcccactacaaccccaagctgggcatgaacaacctgagccagaaccccagcctgcccggcgagtgccacagcagaagcgacagcagcggcgagaagagacagctggacgtgagcagcctgctgctgcagagcccccagagctacaacgtgaccctgagagacctgctggtgatcgccacccccgcccagctggaccccagaccctgcagaagccacgccagcgccatgagagacccctgcatgcaggaccaggaggcctacagccactgcctgatcagcggccagaagggctgcgagagaagctag

SEQ ID NO: 103917 - DNA, 306 bp, synthetic construct
  misc_feature 1..306: note = Description of Artificial Sequence: Synthetic coding sequence
  source 1..306: mol_type = other DNA
atgccccagtgccccaccctggagagccaggagggcgagaacagcgaggagaagggcgacagcagcaaggaggaccccaaggagaccgtggccctggccttcgtgagagagaaccccggcgcccagaacggcctgcagaacgcccagcagcagggcaagaagaagagaaagaagaagagactggtgatcaacctgagcagctgcagatacgagagcgtgagaagagccgcccagcagtacggcttcagagagggcggcgaggacgacgactggaccctgtactggaccgactacagcgtgagctag

SEQ ID NO: 103918 - DNA, 1356 bp, synthetic construct
  misc_feature 1..1356: note = Description of Artificial Sequence: Synthetic coding sequence
  source 1..1356: mol_type = other DNA
atgagagagtgcatcagcatccacgtgggccaggccggcgtgcagatcggcaacgcctgctgggagctgtactgcctggagcacggcatccagcccgacggccagatgcccagcgacaagaccatcggcggcggcgacgacagcttcaacaccttcttcagcgagaccggcgccggcaagcacgtgcccagagccgtgttcgtggacctggagcccaccgtgatcgacgaggtgagaaccggcacctacagacagctgttccaccccgagcagctgatcaccggcaaggaggacgccgccaacaactacgccagaggccactacaccatcggcaaggagatcatcgacctggtgctggacagaatcagaaagctggccgaccagtgcaccggcctgcagggcttcctggtgttccacagcttcggcggcggcaccggcagcggcttcaccagcctgctgatggagagactgagcgtggactacggcaagaagagcaagctggagttcagcatctaccccgccccccaggtgagcaccgccgtggtggagccctacaacagcatcctgaccacccacaccaccctggagcacagcgactgcgccttcatggtggacaacgaggccatctacgacatctgcagaagaaacctggacatcgagagacccacctacaccaacctgaacagactgatcggccagatcgtgagcagcatcaccgccagcctgagattcgacggcgccctgaacgtggacctgaccgagttccagaccaacctggtgccctaccccagaatccacttccccctggccacctacgcccccgtgatcagcgccgagaaggcctaccacgagcagctgagcgtggccgagatcaccaacgcctgcttcgagcccgccaaccagatggtgaagtgcgaccccagacacggcaagtacatggcctgctgcctgctgtacagaggcgacgtggtgcccaaggacgtgaacgccgccatcgccaccatcaagaccaagagaaccatccagttcgtggactggtgccccaccggcttcaaggtgggcatcaactaccagccccccaccgtggtgcccggcggcgacctggccaaggtgcagagagccgtgtgcatgctgagcaacaccaccgccatcgccgaggcctgggccagactggaccacaagttcgacctgatgtacgccaagagagccttcgtgcactggtacgtgggcgagggcatggaggagggcgagttcagcgaggccagagaggacatggccgccctggagaaggactacgaggaggtgggcgtggacagcgtggagggcgagggcgaggaggagggcgaggagtactag

SEQ ID NO: 103919 - DNA, 1356 bp, synthetic construct; identical to SEQ ID NO: 103918
  misc_feature 1..1356: note = Description of Artificial Sequence: Synthetic coding sequence
  source 1..1356: mol_type = other DNA

SEQ ID NO: 103920 - DNA, 1152 bp, synthetic construct
  misc_feature 1..1152: note = Description of Artificial Sequence: Synthetic coding sequence
  source 1..1152: mol_type = other DNA
atgatcgacctggagcccaccgtggtggacgaggtgagagccggcacctacagacagctgttccaccccgagcagctgatcaccggcaaggaggacgccgccaacaactacgccagaggccactacaccgtgggcaaggagagcatcgacctggtgctggacagaatcagaaagctgaccgacgcctgcagcggcctgcagggcttcctgatcttccacagcttcggcggcggcaccggcagcggcttcaccagcctgctgatggagagactgagcctggactacggcaagaagagcaagctggagttcgccatctaccccgccccccaggtgagcaccgccgtggtggagccctacaacagcatcctgaccacccacaccaccctggagcacagcgactgcgccttcatggtggacaacgaggccatctacgacatctgcagaagaaacctggacatcgagagacccacctacaccaacctgaacagactgatcagccagatcgtgagcagcatcaccgccagcctgagattcgacggcgccctgaacgtggacctgaccgagttccagaccaacctggtgccctaccccagaatccacttccccctggtgacctacgcccccatcatcagcgccgagaaggcctaccacgagcagctgagcgtggccgagatcaccagcagctgcttcgagcccaacagccagatggtgaagtgcgaccccagacacggcaagtacatggcctgctgcatgctgtacagaggcgacgtggtgcccaaggacgtgaacgtggccatcgccgccatcaagaccaagagaaccatccagttcgtggactggtgccccaccggcttcaaggtgggcatcaactaccagccccccaccgtggtgcccggcggcgacctggccaaggtgcagagagccgtgtgcatgctgagcaacaccaccgccatcgccgaggcctgggccagactggaccacaagttcgacctgatgtacgccaagagagccttcgtgcactggtacgtgggcgagggcatggaggagggcgagttcagcgaggccagagaggacctggccgccctggagaaggactacgaggaggtgggcaccgacagcttcgaggaggagaacgagggcgaggagttctag

SEQ ID NO: 103921 - DNA, 1350 bp, synthetic construct
  misc_feature 1..1350: note = Description of Artificial Sequence: Synthetic coding sequence
  source 1..1350: mol_type = other DNA
atgagagagtgcatcagcgtgcacgtgggccaggccggcgtgcagatcggcaacgcctgctgggagctgttctgcctggagcacggcatccaggccgacggcaccttcgacgcccaggccagcaagatcaacgacgacgacagcttcaccaccttcttcagcgagaccggcaacggcaagcacgtgcccagagccgtgatgatcgacctggagcccaccgtggtggacgaggtgagagccggcacctacagacagctgttccaccccgagcagctgatcaccggcaaggaggacgccgccaacaactacgccagaggccactacaccgtgggcaaggagagcatcgacctggtgctggacagaatcagaaagctgaccgacgcctgcagcggcctgcagggcttcctgatcttccacagcttcggcggcggcaccggcagcggcttcaccagcctgctgatggagagactgagcctggactacggcaagaagagcaagctggagttcgccatctaccccgccccccaggtgagcaccgccgtggtggagccctacaacagcatcctgaccacccacaccaccctggagcacagcgactgcgccttcatggtggacaacgaggccatctacgacatctgcagaagaaacctggacatcgagagacccacctacaccaacctgaacagactgatcagccagatcgtgagcagcatcaccgccagcctgagattcgacggcgccctgaacgtggacctgaccgagttccagaccaacctggtgccctaccccagaatccacttccccctggtgacctacgcccccatcatcagcgccgagaaggcctaccacgagcagctgagcgtggccgagatcaccagcagctgcttcgagcccaacagccagatggtgaagtgcgaccccagacacggcaagtacatggcctgctgcatgctgtacagaggcgacgtggtgcccaaggacgtgaacgtggccatcgccgccatcaagaccaagagaaccatccagttcgtggactggtgccccaccggcttcaaggtgggcatcaactaccagccccccaccgtggtgcccggcggcgacctggccaaggtgcagagagccgtgtgcatgctgagcaacaccaccgccatcgccgaggcctgggccagactggaccacaagttcgacctgatgtacgccaagagagccttcgtgcactggtacgtgggcgagggcatggaggagggcgagttcagcgaggccagagaggacctggccgccctggagaaggactacgaggaggtgggcaccgacagcttcgaggaggagaacgagggcgaggagttctag

SEQ ID NO: 103922 - DNA, 912 bp, synthetic construct
  misc_feature 1..912: note = Description of Artificial Sequence: Synthetic coding sequence
  source 1..912: mol_type = other DNA
atggccagaagaggccccggctggagacccctgctgctgctggtgctgctggccggcgccgcccagggcggcctgtacttcagaagaggccagacctgctacagacccctgagaggcgacggcctggcccccctgggcagaagcacctaccccagaccccacgagtacctgagccccgccgacctgcccaagagctgggactggagaaacgtggacggcgtgaactacgccagcatcaccagaaaccagcacatcccccagtactgcggcagctgctgggcccacgccagcaccagcgccatggccgacagaatcaacatcaagagaaagggcgcctggcccagcaccctgctgagcgtgcagaacgtgatcgactgcggcaacgccggcagctgcgagggcggcaacgacctgagcgtgtgggactacgcccaccagcacggcatccccgacgagacctgcaacaactaccaggccaaggaccaggagtgcgacaagttcaaccagtgcggcacctgcaacgagttcaaggagtgccacgccatcagaaactacaccctgtggagagtgggcgactacggcagcctgagcggcagagagaagatgatggccgagatctacgccaacggccccatcagctgcggcatcatggccaccgagagactggccaactacaccggcggcatctacgccgagtaccaggacaccacctacatcaaccacgtggtgagcgtggccggctggggcatcagcgacggcaccgagtactggatcgtgagaaacagctggggcgagccctggggcgagagaggctggctgagaatcgtgaccagcacctacaaggacggcaagggcgccagatacaacctggccatcgaggagcactgcaccttcggcgaccccatcgtgtag

SEQ ID NO: 103923 - DNA, 1338 bp, synthetic construct
  misc_feature 1..1338: note = Description of Artificial Sequence: Synthetic coding sequence
  source 1..1338: mol_type = other DNA
atgagagagatcgtgcacatccaggccggccagtgcggcaaccagatcggcgccaagttctgggaggtgatcagcgacgagcacggcatcgaccccaccggcagctaccacggcgacagcgacctgcagctggagagaatcaacgtgtactacaacgaggccaccggcaacaagtacgtgcccagagccatcctggtggacctggagcccggcaccatggacagcgtgagaagcggccccttcggccagatcttcagacccgacaacttcgtgttcggccagagcggcgccggcaacaactgggccaagggccactacaccgagggcgccgagctggtggacagcgtgctggacgtggtgagaaaggagagcgagagctgcgactgcctgcagggcttccagctgacccacagcctgggcggcggcaccggcagcggcatgggcaccctgctgatcagcaagatcagagaggagtaccccgacagaatcatgaacaccttcagcgtgatgcccagccccaaggtgagcgacaccgtggtggagccctacaacgccaccctgagcgtgcaccagctggtggagaacaccgacgagacctactgcatcgacaacgaggccctgtacgacatctgcttcagaaccctgaagctgaccacccccacctacggcgacctgaaccacctggtgagcgccaccatgagcggcgtgaccacctgcctgagattccccggccagctgaacgccgacctgagaaagctggccgtgaacatggtgcccttccccagactgcacttcttcatgcccggcttcgcccccctgaccagcagaggcagccagcagtacagagccctgaccgtgcccgagctgacccagcagatgttcgacagcaagaacatgatggccgcctgcgaccccagacacggcagatacctgaccgtggccgccatcttcagaggcagaatgagcatgaaggaggtggacgagcagatgctgaacgtgcagaacaagaacagcagctacttcgtggagtggatccccaacaacgtgaagaccgccgtgtgcgacatcccccccagaggcctgaagatgagcgccaccttcatcggcaacagcaccgccatccaggagctgttcaagagaatcagcgagcagttcaccgccatgttcagaagaaaggccttcctgcactggtacaccggcgagggcatggacgagatggagttcaccgaggccgagagcaacatgaacgacctggtgagcgagtaccagcagtaccaggacgccaccgccgacgagcagggcgagttcgaggaggaggagggcgaggacgaggcctag

SEQ ID NO: 103924 - DNA, 1353 bp, synthetic construct
  misc_feature 1..1353: note = Description of Artificial Sequence: Synthetic coding sequence
  source 1..1353: mol_type = other DNA
atgagagagatcgtgcacatccaggccggccagtgcggcaaccagatcggcgccaagttctgggaggtgatcagcgacgagcacggcatcgaccccagcggcaactacgtgggcgacagcgacctgcagctggagagaatcagcgtgtactacaacgaggccagcagccacaagtacgtgcccagagccatcctggtggacctggagcccggcaccatggacagcgtgagaagcggcgccttcggccacctgttcagacccgacaacttcatcttcggccagagcggcgccggcaacaactgggccaagggccactacaccgagggcgccgagctggtggacagcgtgctggacgtggtgagaaaggagtgcgagaactgcgactgcctgcagggcttccagctgacccacagcctgggcggcggcaccggcagcggcatgggcaccctgctgatcagcaaggtgagagaggagtaccccgacagaatcatgaacaccttcagcgtggtgcccagccccaaggtgagcgacaccgtggtggagccctacaacgccaccctgagcatccaccagctggtggagaacaccgacgagacctactgcatcgacaacgaggccctgtacgacatctgcttcagaaccctgaagctggccacccccacctacggcgacctgaaccacctggtgagcgccaccatgagcggcgtgaccaccagcctgagattccccggccagctgaacgccgacctgagaaagctggccgtgaacatggtgcccttccccagactgcacttcttcatgcccggcttcgcccccctgaccgccagaggcagccagcagtacagagccctgaccgtgcccgagctgacccagcagatgttcgacgccaagaacatgatggccgcctgcgaccccagacacggcagatacctgaccgtggccaccgtgttcagaggcagaatgagcatgaaggaggtggacgagcagatgctggccatccagagcaagaacagcagctacttcgtggagtggatccccaacaacgtgaaggtggccgtgtgcgacatcccccccagaggcctgaagatgagcagcaccttcatcggcaacagcaccgccatccaggagctgttcaagagaatcagcgagcagttcaccgccatgttcagaagaaaggccttcctgcactggtacaccggcgagggcatggacgagatggagttcaccgaggccgagagcaacatgaacgacctggtgagcgagtaccagcagtaccaggacgccaccgccgaggaggagggcgagatgtacgaggacgacgaggaggagagcgaggcccagggccccaagtag

SEQ ID NO: 103925 - DNA, 1137 bp, synthetic construct
  misc_feature 1..1137: note = Description of Artificial Sequence: Synthetic coding sequence
  source 1..1137: mol_type = other DNA
atggacagcgtgagaagcggcgccttcggccacctgttcagacccgacaacttcatcttcggccagagcggcgccggcaacaactgggccaagggccactacaccgagggcgccgagctggtggacagcgtgctggacgtggtgagaaaggagtgcgagaactgcgactgcctgcagggcttccagctgacccacagcctgggcggcggcaccggcagcggcatgggcaccctgctgatcagcaaggtgagagaggagtaccccgacagaatcatgaacaccttcagcgtggtgcccagccccaaggtgagcgacaccgtggtggagccctacaacgccaccctgagcatccaccagctggtggagaacaccgacgagacctactgcatcgacaacgaggccctgtacgacatctgcttcagaaccctgaagctggccacccccacctacggcgacctgaaccacctggtgagcgccaccatgagcggcgtgaccaccagcctgagattccccggccagctgaacgccgacctgagaaagctggccgtgaacatggtgcccttccccagactgcacttcttcatgcccggcttcgcccccctgaccgccagaggcagccagcagtacagagccctgaccgtgcccgagctgacccagcagatgttcgacgccaagaacatgatggccgcctgcgaccccagacacggcagatacctgaccgtggccaccgtgttcagaggcagaatgagcatgaaggaggtggacgagcagatgctggccatccagagcaagaacagcagctacttcgtggagtggatccccaacaacgtgaaggtggccgtgtgcgacatcccccccagaggcctgaagatgagcagcaccttcatcggcaacagcaccgccatccaggagctgttcaagagaatcagcgagcagttcaccgccatgttcagaagaaaggccttcctgcactggtacaccggcgagggcatggacgagatggagttcaccgaggccgagagcaacatgaacgacctggtgagcgagtaccagcagtaccaggacgccaccgccgaggaggagggcgagatgtacgaggacgacgaggaggagagcgaggcccagggccccaagtag

SEQ ID NO: 103926 - DNA, 1335 bp, synthetic construct
  misc_feature 1..1335: note = Description of Artificial Sequence: Synthetic coding sequence
  source 1..1335: mol_type = other DNA
atgagagagatcgtgcacatccaggccggccagtgcggcaaccagatcggcgccaagttctgggaggtgatcagcgacgagcacggcatcgaccccaccggcacctaccacggcgacagcgacctgcagctggacagaatcagcgtgtactacaacgaggccaccggcggcaagtacgtgcccagagccatcctggtggacctggagcccggcaccatggacagcgtgagaagcggccccttcggccagatcttcagacccgacaacttcgtgttcggccagagcggcgccggcaacaactgggccaagggccactacaccgagggcgccgagctggtggacagcgtgctggacgtggtgagaaaggaggccgagagctgcgactgcctgcagggcttccagctgacccacagcctgggcggcggcaccggcagcggcatgggcaccctgctgatcagcaagatcagagaggagtaccccgacagaatcatgaacaccttcagcgtggtgcccagccccaaggtgagcgacaccgtggtggagccctacaacgccaccctgagcgtgcaccagctggtggagaacaccgacgagacctactgcatcgacaacgaggccctgtacgacatctgcttcagaaccctgaagctgaccacccccacctacggcgacctgaaccacctggtgagcgccaccatgagcggcgtgaccacctgcctgagattccccggccagctgaacgccgacctgagaaagctggccgtgaacatggtgcccttccccagactgcacttcttcatgcccggcttcgcccccctgaccagcagaggcagccagcagtacagagccctgaccgtgcccgagctgacccagcaggtgttcgacgccaagaacatgatggccgcctgcgaccccagacacggcagatacctgaccgtggccgccgtgttcagaggcagaatgagcatgaaggaggtggacgagcagatgctgaacgtgcagaacaagaacagcagctacttcgtggagtggatccccaacaacgtgaagaccgccgtgtgcgacatcccccccagaggcctgaagatggccgtgaccttcatcggcaacagcaccgccatccaggagctgttcaagagaatcagcgagcagttcaccgccatgttcagaagaaaggccttcctgcactggtacaccggcgagggcatggacgagatggagttcaccgaggccgagagcaacatgaacgacctggtgagcgagtaccagcagtaccaggacgccaccgccgaggaggaggaggacttcggcgaggaggccgaggaggaggcctag

SEQ ID NO: 103927 - DNA, 1119 bp, synthetic construct
  misc_feature 1..1119: note = Description of Artificial Sequence: Synthetic coding sequence
  source 1..1119: mol_type = other DNA
atggacagcgtgagaagcggccccttcggccagatcttcagacccgacaacttcgtgttcggccagagcggcgccggcaacaactgggccaagggccactacaccgagggcgccgagctggtggacagcgtgctggacgtggtgagaaaggaggccgagagctgcgactgcctgcagggcttccagctgacccacagcctgggcggcggcaccggcagcggcatgggcaccctgctgatcagcaagatcagagaggagtaccccgacagaatcatgaacaccttcagcgtggtgcccagccccaaggtgagcgacaccgtggtggagccctacaacgccaccctgagcgtgcaccagctggtggagaacaccgacgagacctactgcatcgacaacgaggccctgtacgacatctgcttcagaaccctgaagctgaccacccccacctacggcgacctgaaccacctggtgagcgccaccatgagcggcgtgaccacctgcctgagattccccggccagctgaacgccgacctgagaaagctggccgtgaacatggtgcccttccccagactgcacttcttcatgcccggcttcgcccccctgaccagcagaggcagccagcagtacagagccctgaccgtgcccgagctgacccagcaggtgttcgacgccaagaacatgatggccgcctgcgaccccagacacggcagatacctgaccgtggccgccgtgttcagaggcagaatgagcatgaaggaggtggacgagcagatgctgaacgtgcagaacaagaacagcagctacttcgtggagtggatccccaacaacgtgaagaccgccgtgtgcgacatcccccccagaggcctgaagatggccgtgaccttcatcggcaacagcaccgccatccaggagctgttcaagagaatcagcgagcagttcaccgccatgttcagaagaaaggccttcctgcactggtacaccggcgagggcatggacgagatggagttcaccgaggccgagagcaacatgaacgacctggtgagcgagtaccagcagtaccaggacgccaccgccgaggaggaggaggacttcggcgaggaggccgaggaggaggcctag

SEQ ID NO: 103928 - DNA, 1335 bp, synthetic construct; identical to SEQ ID NO: 103926
  misc_feature 1..1335: note = Description of Artificial Sequence: Synthetic coding sequence
  source 1..1335: mol_type = other DNA

SEQ ID NO: 103929 - DNA, 1119 bp, synthetic construct; identical to SEQ ID NO: 103927
  misc_feature 1..1119: note = Description of Artificial Sequence: Synthetic coding sequence
  source 1..1119: mol_type = other DNA

SEQ ID NO: 103930 - DNA, 1281 bp, synthetic construct
  misc_feature 1..1281: note = Description of Artificial Sequence: Synthetic coding sequence
  source 1..1281: mol_type = other DNA
atgttctgggaggtgatcagcgacgagcacggcatcgaccccaccggcacctaccacggcgacagcgacctgcagctggacagaatcagcgtgtactacaacgaggccaccggcggcaagtacgtgcccagagccatcctggtggacctggagcccggcaccatggacagcgtgagaagcggccccttcggccagatcttcagacccgacaacttcgtgttcggccagagcggcgccggcaacaactgggccaagggccactacaccgagggcgccgagctggtggacagcgtgctggacgtggtgagaaaggaggccgagagctgcgactgcctgcagggcttccagctgacccacagcctgggcggcggcaccggcagcggcatgggcaccctgctgatcagcaagatcagagaggagtaccccgacagaatcatgaacaccttcagcgtggtgcccagccccaaggtgagcgacaccgtggtggagccctacaacgccaccctgagcgtgcaccagctggtggagaacaccgacgagacctactgcatcgacaacgaggccctgtacgacatctgcttcagaaccctgaagctgaccacccccacctacggcgacctgaaccacctggtgagcgccaccatgagcggcgtgaccacctgcctgagattccccggccagctgaacgccgacctgagaaagctggccgtgaacatggtgcccttccccagactgcacttcttcatgcccggcttcgcccccctgaccagcagaggcagccagcagtacagagccctgaccgtgcccgagctgacccagcaggtgttcgacgccaagaacatgatggccgcctgcgaccccagacacggcagatacctgaccgtggccgccgtgttcagaggcagaatgagcatgaaggaggtggacgagcagatgctgaacgtgcagaacaagaacagcagctacttcgtggagtggatccccaacaacgtgaagaccgccgtgtgcgacatcccccccagaggcctgaagatggccgtgaccttcatcggcaacagcaccgccatccaggagctgttcaagagaatcagcgagcagttcaccgccatgttcagaagaaaggccttcctgcactggtacaccggcgagggcatggacgagatggagttcaccgaggccgagagcaacatgaacgacctggtgagcgagtaccagcagtaccaggacgccaccgccgaggaggaggaggacttcggcgaggaggccgaggaggaggcctag

SEQ ID NO: 103931 - DNA, 1119 bp, synthetic construct; identical to SEQ ID NO: 103927
  misc_feature 1..1119: note = Description of Artificial Sequence: Synthetic coding sequence
  source 1..1119: mol_type = other DNA

SEQ ID NO: 103932 - DNA, 1119 bp, synthetic construct; identical to SEQ ID NO: 103927
  misc_feature 1..1119: note = Description of Artificial Sequence: Synthetic coding sequence
  source 1..1119: mol_type = other DNA

SEQ ID NO: 103933 - DNA, 1281 bp, synthetic construct; identical to SEQ ID NO: 103930
  misc_feature 1..1281: note = Description of Artificial Sequence: Synthetic coding sequence
  source 1..1281: mol_type = other DNA

SEQ ID NO: 103934 - DNA, 1281 bp, synthetic construct; identical to SEQ ID NO: 103930
  misc_feature 1..1281: note = Description of Artificial Sequence: Synthetic coding sequence
  source 1..1281: mol_type = other DNA

SEQ ID NO: 103935 - DNA, 1119 bp, synthetic construct; identical to SEQ ID NO: 103927
  misc_feature 1..1119: note = Description of Artificial Sequence: Synthetic coding sequence
  source 1..1119: mol_type = other DNA

SEQ ID NO: 103936 - DNA, 1281 bp, synthetic construct; identical to SEQ ID NO: 103930
  misc_feature 1..1281: note = Description of Artificial Sequence: Synthetic coding sequence
  source 1..1281: mol_type = other DNA

SEQ ID NO: 103937 - DNA, 1335 bp, synthetic construct; identical to SEQ ID NO: 103926
  misc_feature 1..1335: note = Description of Artificial Sequence: Synthetic coding sequence
  source 1..1335: mol_type = other DNA

SEQ ID NO: 103938 - DNA, 1281 bp, synthetic construct; identical to SEQ ID NO: 103930
  misc_feature 1..1281: note = Description of Artificial Sequence: Synthetic coding sequence
  source 1..1281: mol_type = other DNA

SEQ ID NO: 103939 - DNA, 1119 bp, synthetic construct; identical to SEQ ID NO: 103927
  misc_feature 1..1119: note = Description of Artificial Sequence: Synthetic coding sequence
  source 1..1119: mol_type = other DNA

SEQ ID NO: 103940 - DNA, 1335 bp, synthetic construct; identical to SEQ ID NO: 103926
  misc_feature 1..1335: note = Description of Artificial Sequence: Synthetic coding sequence
  source 1..1335: mol_type = other DNA

SEQ ID NO: 103941 - DNA, 1335 bp, synthetic construct; identical to SEQ ID NO: 103926
  misc_feature 1..1335: note = Description of Artificial Sequence: Synthetic coding sequence
  source 1..1335: mol_type = other DNA

SEQ ID NO: 103942 - DNA, 1335 bp, synthetic construct; identical to SEQ ID NO: 103926
  misc_feature 1..1335: note = Description of Artificial Sequence: Synthetic coding sequence
  source 1..1335: mol_type = other DNA

SEQ ID NO: 103943 - DNA, 1062 bp, synthetic construct
  misc_feature 1..1062: note = Description of Artificial Sequence: Synthetic coding sequence
  source 1..1062: mol_type = other DNA
atgagagagatcgtgcacatccaggccggccagtgcggcaaccagatcggcgccaagttctgggaggtgatcagcgacgagcacggcatcgaccccaccggcacctaccacggcgacagcgacctgcagctgacccacagcctgggcggcggcaccggcagcggcatgggcaccctgctgatcagcaagatcagagaggagtaccccgacagaatcatgaacaccttcagcgtggtgcccagccccaaggtgagcgacaccgtggtggagccctacaacgccaccctgagcgtgcaccagctggtggagaacaccgacgagacctactgcatcgacaacgaggccctgtacgacatctgcttcagaaccctgaagctgaccacccccacctacggcgacctgaaccacctggtgagcgccaccatgagcggcgtgaccacctgcctgagattccccggccagctgaacgccgacctgagaaagctggccgtgaacatggtgcccttccccagactgcacttcttcatgcccggcttcgcccccctgaccagcagaggcagccagcagtacagagccctgaccgtgcccgagctgacccagcaggtgttcgacgccaagaacatgatggccgcctgcgaccccagacacggcagatacctgaccgtggccgccgtgttcagaggcagaatgagcatgaaggaggtggacgagcagatgctgaacgtgcagaacaagaacagcagctacttcgtggagtggatccccaacaacgtgaagaccgccgtgtgcgacatcccccccagaggcctgaagatggccgtgaccttcatcggcaacagcaccgccatccaggagctgttcaagagaatcagcgagcagttcaccgccatgttcagaagaaaggccttcctgcactggtacaccggcgagggcatggacgagatggagttcaccgaggccgagagcaacatgaacgacctggtgagcgagtaccagcagtaccaggacgccaccgccgaggaggaggaggacttcggcgaggaggccgaggaggaggcctag

SEQ ID NO: 103944 - DNA, 1281 bp, synthetic construct; identical to SEQ ID NO: 103930
  misc_feature 1..1281: note = Description of Artificial Sequence: Synthetic coding sequence
  source 1..1281: mol_type = other DNA

SEQ ID NO: 103945 - DNA, 1119 bp, synthetic construct; identical to SEQ ID NO: 103927
  misc_feature 1..1119: note = Description of Artificial Sequence: Synthetic coding sequence
  source 1..1119: mol_type = other DNA

SEQ ID NO: 103946 - DNA, 1281 bp, synthetic construct; identical to SEQ ID NO: 103930
  misc_feature 1..1281: note = Description of Artificial Sequence: Synthetic coding sequence
  source 1..1281: mol_type = other DNA

SEQ ID NO: 103947 - DNA, 1281 bp, synthetic construct; identical to SEQ ID NO: 103930
  misc_feature 1..1281: note = Description of Artificial Sequence: Synthetic coding sequence
  source 1..1281: mol_type = other DNA

SEQ ID NO: 103948 - DNA, 1119 bp, synthetic construct; identical to SEQ ID NO: 103927
  misc_feature 1..1119: note = Description of Artificial Sequence: Synthetic coding sequence
  source 1..1119: mol_type = other DNA

SEQ ID NO: 103949 - DNA, 1335 bp, synthetic construct; identical to SEQ ID NO: 103926
  misc_feature 1..1335: note = Description of Artificial Sequence: Synthetic coding sequence
  source 1..1335: mol_type = other DNA

SEQ ID NO: 103950 - DNA, 732 bp, synthetic construct
  misc_feature 1..732: note = Description of Artificial Sequence: Synthetic coding sequence
  source 1..732: mol_type = other DNA
atgagagagatcgtgcacatccaggccggccagtgcggcaaccagatcggcgccaagttctgggaggtgatcagcgacgagcacggcatcgaccccaccggcacctaccacggcgacagcgacctgcagctggacagaatcagcgtgtactacaacgaggccaccggcggcaagtacgtgcccagagccatcctggtggacctggagcccggcaccatggacagcgtgagaagcggccccttcggccagatcttcagacccgacaacttcgtgttcggccagagcggcgccggcaacaactgggccaagggccactacaccgagggcgccgagctggtggacagcgtgctggacgtggtgagaaaggaggaggtggacgagcagatgctgaacgtgcagaacaagaacagcagctacttcgtggagtggatccccaacaacgtgaagaccgccgtgtgcgacatcccccccagaggcctgaagatggccgtgaccttcatcggcaacagcaccgccatccaggagctgttcaagagaatcagcgagcagttcaccgccatgttcagaagaaaggccttcctgcactggtacaccggcgagggcatggacgagatggagttcaccgaggccgagagcaacatgaacgacctggtgagcgagtaccagcagtaccaggacgccaccgccgaggaggaggaggacttcggcgaggaggccgaggaggaggcctag

SEQ ID NO: 103951 - DNA, 1119 bp, synthetic construct; identical to SEQ ID NO: 103927
  misc_feature 1..1119: note = Description of Artificial Sequence: Synthetic coding sequence
  source 1..1119: mol_type = other DNA

SEQ ID NO: 103952 - DNA, 1119 bp, synthetic construct; identical to SEQ ID NO: 103927
  misc_feature 1..1119: note = Description of Artificial Sequence: Synthetic coding sequence
  source 1..1119: mol_type = other DNA

SEQ ID NO: 103953 - DNA, 1335 bp, synthetic construct; identical to SEQ ID NO: 103926
  misc_feature 1..1335: note = Description of Artificial Sequence: Synthetic coding sequence
  source 1..1335: mol_type = other DNA

SEQ ID NO: 103954 - DNA, 1119 bp, synthetic construct; identical to SEQ ID NO: 103927
  misc_feature 1..1119: note = Description of Artificial Sequence: Synthetic coding sequence
  source 1..1119: mol_type = other DNA

SEQ ID NO: 103955 - DNA, 1119 bp, synthetic construct; identical to SEQ ID NO: 103927
  misc_feature 1..1119: note = Description of Artificial Sequence: Synthetic coding sequence
  source 1..1119: mol_type = other DNA

SEQ ID NO: 103956 - DNA, 1119 bp, synthetic construct; identical to SEQ ID NO: 103927
  misc_feature 1..1119: note = Description of Artificial Sequence: Synthetic coding sequence
  source 1..1119: mol_type = other DNA

SEQ ID NO: 103957 - DNA, 1119 bp, synthetic construct; identical to SEQ ID NO: 103927
  misc_feature 1..1119: note = Description of Artificial Sequence: Synthetic coding sequence
  source 1..1119: mol_type = other DNA

SEQ ID NO: 103958 - DNA, 1119 bp, synthetic construct; identical to SEQ ID NO: 103927
  misc_feature 1..1119: note = Description of Artificial Sequence: Synthetic coding sequence
  source 1..1119: mol_type = other DNA

SEQ ID NO: 103959 - DNA, 1119 bp, synthetic construct; identical to SEQ ID NO: 103927
  misc_feature 1..1119: note = Description of Artificial Sequence: Synthetic coding sequence
  source 1..1119: mol_type = other DNA

SEQ ID NO: 103960 - DNA, 624 bp, synthetic construct
  misc_feature 1..624: note = Description of Artificial Sequence: Synthetic coding sequence
  source 1..624: mol_type = other DNA
atgggcaccctgctgatcagcaagatcagagaggagtaccccgacagaatcatgaacaccttcagcgtggtgcccagccccaaggtgagcgacaccgtggtggagccctacaacgccaccctgagcgtgcaccagctggtggagaacaccgacgagacctactgcatcgacaacgaggccctgtacgacatctgcttcagaaccctgaagctgaccacccccacctacggcgacctgaaccacctggtgagcgccaccatgagcggcgtgaccacctgcctgagattccccggccagctgaacgccgacctgagaaagctggccgtgaacatggtgcccttccccagactgcacttcttcatgcccggcttcgcccccctgaccagcagaggcagccagcagtacagagccctgaccgtgcccgagctgacccagcaggtgttcgacgccaagaacatgatggccgcctgcgaccccagacacggcagatacctgaccgtggccgccgtgttcagaggcagaatgagcatgaaggaggtggacgagcagatgctgaacgtgcagaacaagaacagcagctacttcgtggagtggccccagcagtgccaggacagcagactgtag

SEQ ID NO: 103961 - DNA, 1248 bp, synthetic construct
  misc_feature 1..1248: note = Description of Artificial Sequence: Synthetic coding sequence
  source 1..1248: mol_type = other DNA
atgagagagatcgtgcacatccaggccggccagtgcggcaaccagatcggcgccaagttctgggaggtgatcagcgacgagcacggcatcgaccccaccggcacctaccacggcgacagcgacctgcagctggacagaatcagcgtgtactacaacgaggccaccggcggcaagtacgtgcccagagccatcctggtggacctggagcccggcaccatggacagcgtgagaagcggccccttcggccagatcttcagacccgacaacttcgtgttcggccagagcggcgccggcaacaactgcctgcagggcttccagctgacccacagcctgggcggcggcaccggcagcggcatgggcaccctgctgatcagcaagatcagagaggagtaccccgacagaatcatgaacaccttcagcgtggtgcccagccccaaggtgagcgacaccgtggtggagccctacaacgccaccctgagcgtgcaccagctggtggagaacaccgacgagacctactgcatcgacaacgaggccctgtacgacatctgcttcagaaccctgaagctgaccacccccacctacggcgacctgaaccacctggtgagcgccaccatgagcggcgtgaccacctgcctgagattccccggccagctgaacgccgacctgagaaagctggccgtgaacatggtgcccttccccagactgcacttcttcatgcccggcttcgcccccctgaccagcagaggcagccagcagtacagagccctgaccgtgcccgagctgacccagcaggtgttcgacgccaagaacatgatggccgcctgcgaccccagacacggcagatacctgaccgtggccgccgtgttcagaggcagaatgagcatgaaggaggtggacgagcagatgctgaacgtgcagaacaagaacagcagctacttcgtggagtggatccccaacaacgtgaagaccgccgtgtgcgacatcccccccagaggcctgaagatggccgtgaccttcatcggcaacagcaccgccatccaggagctgttcaagagaatcagcgagcagttcaccgccatgttcagaagaaaggccttcctgcactggtacaccggcgagggcatggacgagatggagttcaccgaggccgagagcaacatgaacgacctggtgagcgagtaccagcagtaccaggacgccaccgccgaggaggaggaggacttcggcgaggaggccgaggaggagtag

SEQ ID NO: 103962 - DNA, 1062 bp, synthetic construct; identical to SEQ ID NO: 103943
  misc_feature 1..1062: note = Description of Artificial Sequence: Synthetic coding sequence
  source 1..1062: mol_type = other DNA

SEQ ID NO: 103963 - DNA, 1062 bp, synthetic construct; identical to SEQ ID NO: 103943
  misc_feature 1..1062: note = Description of Artificial Sequence: Synthetic coding sequence
  source 1..1062: mol_type = other DNA

SEQ ID NO: 103964 - DNA, 1308 bp, synthetic construct
  misc_feature 1..1308: note = Description of Artificial Sequence: Synthetic coding sequence
  source 1..1308: mol_type = other DNA
atgagagagatcgtgcacatccaggccggccagtgcggcaaccagatcggcgccaagttctgggaggtgatcagcgacgagcacggcatcgaccccaccggcacctaccacggcgacagcgacctgcagctggacagaatcagcgtgtactacaacgaggccaccggcggcaagtacgtgcccagagccatcctggtggacctggagcccggcaccatggacagcgtgagaagcggccccttcggccagatcttcagacccgacaacttcgtgttcggccagagcggcgccggcaacaactgggccaagggccactacaccgagggcgccgagctggtggacagcgtgctggacgtggtgagaaaggaggccgagagctgcgactgcctgcagggcttccagctgacccacagcctgggcggcggcaccggcagcggcatgggcaccctgctgatcagcaagatcagagaggagtaccccgacagaatcatgaacaccttcagcgtggtgcccagccccaaggtgagcgacaccgtggtggagccctacaacgccaccctgagcgtgcaccagctggtggagaacaccgacgagacctactgcatcgacaacgaggccctgtacgacatctgcttcagaaccctgaagctgaccacccccacctacggcgacctgaaccacctggtgagcgccaccatgagcggcgtgaccacctgcctgagattccccggccagctgaacgccgacctgagaaagctggccgtgaacatggtgcccttccccagactgcacttcttcatgcccggcttcgcccccctgaccagcagaggcagccagcagtacagagccctgaccgtgcccgagctgacccagcaggtgttcgacgccaagaacatgatggccgcctgcgaccccagacacggcagatacctgaccgtggccgccgtgttcagaggcagaatgagcatgaaggaggtggacgagcagatgctgaacgtgcagaacaagaacagcagctacttcgtggagtggatccccaacaacgtgaagaccgccgtgtgcgacatcccccccagaggcctgaagatggccgtgaccttcatcggcaacagcaccgccatccaggagctgttcaagagaatcagcgagcagttcaccgccatgttcagaagaaaggccttcctgcactggtacaccggcgagggcatggacgagatggagttcaccgaggccgagagcaacatgaacgacctggtgagcgagtaccagcagtaccaggacgccaccgccgagggcggcggcctgtag

SEQ ID NO: 103965 - DNA, 1308 bp, synthetic construct; identical to SEQ ID NO: 103964
  misc_feature 1..1308: note = Description of Artificial Sequence: Synthetic coding sequence
  source 1..1308: mol_type = other DNA

SEQ ID NO: 103966 - DNA, 1308 bp, synthetic construct; identical to SEQ ID NO: 103964
  misc_feature 1..1308: note = Description of Artificial Sequence: Synthetic coding sequence
  source 1..1308: mol_type = other DNA

SEQ ID NO: 103967 - DNA, 1248 bp, synthetic construct; identical to SEQ ID NO: 103961
  misc_feature 1..1248: note = Description of Artificial Sequence: Synthetic coding sequence
  source 1..1248: mol_type = other DNA

SEQ ID NO: 103968 - DNA, 1248 bp, synthetic construct; identical to SEQ ID NO: 103961
  misc_feature 1..1248: note = Description of Artificial Sequence: Synthetic coding sequence
  source 1..1248: mol_type = other DNA

SEQ ID NO: 103969 - DNA, 1248 bp, synthetic construct; identical to SEQ ID NO: 103961
  misc_feature 1..1248: note = Description of Artificial Sequence: Synthetic coding sequence
  source 1..1248: mol_type = other DNA

SEQ ID NO: 103970 - DNA, 1308 bp, synthetic construct; identical to SEQ ID NO: 103964
  misc_feature 1..1308: note = Description of Artificial Sequence: Synthetic coding sequence
  source 1..1308: mol_type = other DNA

SEQ ID NO: 103971 - DNA, 1308 bp, synthetic construct; identical to SEQ ID NO: 103964
  misc_feature 1..1308: note = Description of Artificial Sequence: Synthetic coding sequence
  source 1..1308: mol_type = other DNA

SEQ ID NO: 103972 - DNA, 1308 bp, synthetic construct; identical to SEQ ID NO: 103964
  misc_feature 1..1308: note = Description of Artificial Sequence: Synthetic coding sequence
  source 1..1308: mol_type = other DNA

SEQ ID NO: 103973 - DNA, 1062 bp, synthetic construct; identical to SEQ ID NO: 103943
  misc_feature 1..1062: note = Description of Artificial Sequence: Synthetic coding sequence
  source 1..1062: mol_type = other DNA

SEQ ID NO: 103974 - DNA, 1248 bp, synthetic construct; identical to SEQ ID NO: 103961
  misc_feature 1..1248: note = Description of Artificial Sequence: Synthetic coding sequence
  source 1..1248: mol_type = other DNA

SEQ ID NO: 103975 - DNA, 1308 bp, synthetic construct
  misc_feature 1..1308: note = Description of Artificial Sequence: Synthetic coding sequence
  source 1..1308: mol_type = other DNA
atgagagagatcgtgcacatccaggccggccagtgcggcaaccagatcggcgccaagttctgggaggtgatcagcgacgagcacggcatcgaccccaccggcacctaccacggcgacagcgacctgcagctggacagaatcagcgtgtactacaacgaggccaccggcggcaagtacgtgcccagagccatcctggtggacctggagcccggcaccatggacagcgtgagaagcggccccttcggccagatcttcagacccgacaacttcgtgttcggccagagcggcgccggcaacaactgggccaagggccactacaccgagggcgccgagctggtggacagcgtgctggacgtggtgagaaaggaggccgagagctgcgactgcctgcagggcttccagctgacccacagcctgggcggcggcaccggcagcggcatgggcaccctgctgatcagcaagatcagagaggagtaccccgacagaatcatgaacaccttcagcgtggtgcccagccccaaggtgagcgacaccgtggtggagccctacaacgccaccctgagcgtgcaccagctggtggagaacaccgacgagacctactgcatcgacaacgaggccctgtacgacatctgcttcagaaccctgaagctgaccacccccacctacggcgacctgaaccacctggtgagcgccaccatgagcggcgtgaccacctgcctgagattccccggccagctgaacgccgacctgagaaagctggccgtgaacatggtgcccttccccagactgcacttcttcatgcccggcttcgcccccctgaccagcagaggcagccagcagtacagagccctgaccgtgcccgagctgacccagcaggtgttcgacgccaagaacatgatggccgcctgcgaccccagacacggcagatacctgaccgtggccgccgtgttcagaggcagaatgagcatgaaggaggtggacgagcagatgctgaacgtgcagaacaagaacagcagctacttcgtggagtggatccccaacaacgtgaagaccgccgtgtgcgacatcccccccagaggcctgaagatggccgtgaccttcatcggcaacagcaccgccatccaggagctgttcaagagaatcagcgagcagttcaccgccatgttcagaagaaaggccttcctgcactggtacaccggcgagggcatggacgagatggagttcaccgaggccgagagcaacatgaacgacctggtgagcgagtaccagcagtaccaggacgccaccgccgaggagggcggcgtgtag

SEQ ID NO: 103976 - DNA, 1062 bp, synthetic construct; identical to SEQ ID NO: 103943
  misc_feature 1..1062: note = Description of Artificial Sequence: Synthetic coding sequence
  source 1..1062: mol_type = other DNA

SEQ ID NO: 103977 - DNA, 1062 bp, synthetic construct; identical to SEQ ID NO: 103943
  misc_feature 1..1062: note = Description of Artificial Sequence: Synthetic coding sequence
  source 1..1062: mol_type = other DNA

SEQ ID NO: 103978 - DNA, 1062 bp, synthetic construct; identical to SEQ ID NO: 103943
  misc_feature 1..1062: note = Description of Artificial Sequence: Synthetic coding sequence
  source 1..1062: mol_type = other DNA

SEQ ID NO: 103979 - DNA, 1248 bp, synthetic construct; identical to SEQ ID NO: 103961
  misc_feature 1..1248: note = Description of Artificial Sequence: Synthetic coding sequence
  source 1..1248: mol_type = other DNA

SEQ ID NO: 103980 - DNA, 1248 bp, synthetic construct; identical to SEQ ID NO: 103961
  misc_feature 1..1248: note = Description of Artificial Sequence: Synthetic coding sequence
  source 1..1248: mol_type = other DNA

SEQ ID NO: 103981 - DNA, 1062 bp, synthetic construct; identical to SEQ ID NO: 103943
  misc_feature 1..1062: note = Description of Artificial Sequence: Synthetic coding sequence
  source 1..1062: mol_type = other DNA

SEQ ID NO: 103982 - DNA, 1362 bp, synthetic construct
  misc_feature 1..1362: note = Description of Artificial Sequence: Synthetic coding sequence
  source 1..1362: mol_type = other DNA
atgagcatcgtgaccgtgcagctgggccagtgcggcaaccagatcggcttcgaggtgttcgacgccctgctgagcgacagccacagcagccagggcctgtgcagcatgagagagaacgaggcctaccaggccagctgcaaggagagattcttcagcgaggaggagaacggcgtgcccatcgccagagccgtgctggtggacatggagcccaaggtgatcaaccagatgctgagcaaggccgcccagagcggccagtggaagtacggccagcacgcctgcttctgccagaagcagggcagcggcaacaactgggcctacggctacagcgtgcacggccccagacacgaggagagcatcatgaacatcatcagaaaggaggtggagaagtgcgacagcttcagcggcttcttcatcatcatgagcatggccggcggcaccggcagcggcctgggcgccttcgtgacccagaacctggaggaccagtacagcaacagcctgaagatgaaccagatcatctggccctacggcaccggcgaggtgatcgtgcagaactacaacagcatcctgaccctgagccacctgtacagaagcagcgacgccctgctgctgcacgagaacgacgccatccacaagatctgcgccaagctgatgaacatcaagcagatcagcttcagcgacatcaaccaggtgctggcccaccagctgggcagcgtgttccagcccacctacagcgccgagagcagcttccactacagaagaaaccccctgggcgacctgatggagcacctggtgccccaccccgagttcaagatgctgagcgtgagaaacatcccccacatgagcgagaacagcctggcctacaccaccttcacctgggccggcctgctgaagcacctgagacagatgctgatcagcaacgccaagatggaggagggcatcgacagacacgtgtggccccccctgagcggcctgccccccctgagcaagatgagcctgaacaaggacctgcacttcaacaccagcatcgccaacctggtgatcctgagaggcaaggacgtgcagagcgccgacgtggagggcttcaaggaccccgccctgtacaccagctggctgaagcccgtgaacgccttcaacgtgtggaagacccagagagccttcagcaagtacgagaagagcgccgtgctggtgagcaacagccagttcctggtgaagcccctggacatgatcgtgggcaaggcctggaacatgttcgccagcaaggcctacatccaccagtacaccaagttcggcatcgaggaggaggacttcctggacagcttcaccagcctggagcaggtggtggccagctactgcaacctgtag

SEQ ID NO: 103983 - DNA, 1197 bp, synthetic construct
  misc_feature 1..1197: note = Description of Artificial Sequence: Synthetic coding sequence
  source 1..1197: mol_type = other DNA
atgagcatcgtgaccgtgcagctgggccagtgcggcaaccagatcggcttcgaggtgttcgacgccctgctgagcgacagccacagcagccagggcctgtgcagcatgagagagaacgaggcctaccaggccagctgcaaggagagattcttcagcgaggaggagaacggcgtgcccatcgccagagccgtgctggtggacatggagcccaaggtgatcaaccagatgctgagcaaggccgcccagagcggccagtggaagtacggccagcacgcctgcttctgccagaagcagggcagcggcaacaactgggcctacggctacagcgtgcacggccccagacacgaggagagcatcatgaacatcatcagaaaggaggtggagaagtgcgacagcttcagcggcttcttcatcatcatgagcatggccggcggcaccggcagcggcctgggcgccttcgtgacccagaacctggaggaccagtacagcaacagcctgaagatgaaccagatcatctggccctacggcaccggcgaggtgatcgtgcagaactacaacagcatcctgaccctgagccacctgtacagaagcagcgacgccctgctgctgcacgagaacgacgccatccacaagatctgcgccaagctgatgaacatcaagcagatcagcttcagcgacatcaaccaggtgctggcccaccagctgggcagcgtgttccagcccacctacagcgccgagagcagcttccactacagaagaaaccccctgggcatcgacagacacgtgtggccccccctgagcggcctgccccccctgagcaagatgagcctgaacaaggacctgcacttcaacaccagcatcgccaacctggtgatcctgagaggcaaggacgtgcagagcgccgacgtggagggcttcaaggaccccgccctgtacaccagctggctgaagcccgtgaacgccttcaacgtgtggaagacccagagagccttcagcaagtacgagaagagcgccgtgctggtgagcaacagccagttcctggtgaagcccctggacatgatcgtgggcaaggcctggaacatgttcgccagcaaggcctacatccaccagtacaccaagttcggcatcgaggaggaggacttcctggacagcttcaccagcctggagcaggtggtggccagctactgcaacctgtag

SEQ ID NO: 103984 - DNA, 600 bp, synthetic construct
  misc_feature 1..600: note = Description of Artificial Sequence: Synthetic coding sequence
  source 1..600: mol_type = other DNA
atgagcatcgtgaccgtgcagctgggccagtgcggcaaccagatcggcttcgaggtgttcgacgccctgctgagcgacagccacagcagccagggcctgtgcagcatgagagagaacgaggcctaccaggccagctgcaaggagagattcttcagcgaggaggagaacggcggcatcgacagacacgtgtggccccccctgagcggcctgccccccctgagcaagatgagcctgaacaaggacctgcacttcaacaccagcatcgccaacctggtgatcctgagaggcaaggacgtgcagagcgccgacgtggagggcttcaaggaccccgccctgtacaccagctggctgaagcccgtgaacgccttcaacgtgtggaagacccagagagccttcagcaagtacgagaagagcgccgtgctggtgagcaacagccagttcctggtgaagcccctggacatgatcgtgggcaaggcctggaacatgttcgccagcaaggcctacatccaccagtacaccaagttcggcatcgaggaggaggacttcctggacagcttcaccagcctggagcaggtggtggccagctactgcaacctgtag

SEQ ID NO: 103985 - DNA, 1056 bp, synthetic construct
  misc_feature 1..1056: note = Description of Artificial Sequence: Synthetic coding sequence
  source 1..1056: mol_type = other DNA
atgagcatcgtgaccgtgcagctgggccagtgcggcaaccagatcggcttcgaggtgttcgacgccctgctgagcgacagccacagcagccagggcctgtgcagcatgagagagaacgaggcctaccaggccagctgcaaggagagattcttcagcgaggaggagaacggcgtgcccatcgccagagccgtgctggtggacatggagcccaaggtgatcaaccagatgctgagcaaggccgcccagagcggccagtggaagtacggccagcacgcctgcttctgccagaagcagggcagcggcaacaactgggcctacggctacagcgtgcacggccccagacacgaggagagcatcatgaacatcatcagaaaggaggtggagaagtgcgacagcttcagcggcttcttcatcatcatgagcatggccggcggcaccggcagcggcctgggcgccttcgtgacccagaacctggaggaccagtacagcaacagcctgaagatgaaccagatcatctggccctacggcaccggcgaggtgatcgtgcagaactacaacagcatcctgaccctgagccacctgtacagaagcagcgacgccctgctgctgcacgagaacgacgccatccacaagatctgcgccaagctgatgaacatcaagcagatcagcttcagcgacatcaaccaggtgctggcccaccagctgggcagcgtgttccagcccacctacagcgccgagagcagcttccactacagaagaaaccccctggagggcttcaaggaccccgccctgtacaccagctggctgaagcccgtgaacgccttcaacgtgtggaagacccagagagccttcagcaagtacgagaagagcgccgtgctggtgagcaacagccagttcctggtgaagcccctggacatgatcgtgggcaaggcctggaacatgttcgccagcaaggcctacatccaccagtacaccaagttcggcatcgaggaggaggacttcctggacagcttcaccagcctggagcaggtggtggccagctactgcaacctgtag

SEQ ID NO: 103986 - DNA, 1191 bp, synthetic construct
  misc_feature 1..1191: note = Description of Artificial Sequence: Synthetic coding sequence
  source 1..1191: mol_type = other DNA
atgagcatcgtgaccgtgcagctgggccagtgcggcaaccagatcggcttcgaggtgttcgacgccctgctgagcgacagccacagcagccagggcctgtgcagcatgagagagaacgaggcctaccaggccagctgcaaggagagattcttcagcgaggaggagaacggcgtgcccatcgccagagccgtgctggtggacatggagcccaaggtgatcaaccagatgctgagcaaggccgcccagagcggccagtggaagtacggccagcacgcctgcttctgccagaagcagggcagcggcaacaactgggcctacggctacagcgtgcacggccccagacacgaggagagcatcatgaacatcatcagaaaggaggtggagaagtgcgacagcttcagcggcttcttcatcatcatgagcatggccggcggcaccggcagcggcctgggcgccttcgtgacccagaacctggaggaccagtacagcaacagcctgaagatgaaccagatcatctggccctacggcaccggcgaggtgatcgtgcagaactacaacagcatcctgaccctgagccacctgtacagaagcagcgacgccctgctgctgcacgagaacgacgccatccacaagatctgcgccaagctgatgaacatcaagcagatcagcttcagcgacatcaaccaggtgctggcccaccagctgggcagcgtgttccagcccacctacagcgccgagagcagcttccactacagaagaaaccccctgggcgacctgatggagcacctggtgccccaccccgagttcaagatgctgagcgtgagaaacatcccccacatgagcgagaacagcctggcctacaccaccttcacctgggccggcctgctgaagcacctgagacagatgctgatcagcaacgccaagatggaggagggcatcgacagacacgtgtggccccccctgagcggcctgccccccctgagcaagatgagcctgaacaaggacctgcacttcaacaccagcatcgccaacctggtgatcctgagaggcaaggacgtgcagagcgccgacgtgggcaagaagttcagagcctacatccaccagtacaccaagttcggcatcgaggaggaggacttcctggacagcttcaccagcctggagcaggtggtggccagctactgcaacctgtag

SEQ ID NO: 103987 - DNA, 714 bp, synthetic construct
  misc_feature 1..714: note = Description of Artificial Sequence: Synthetic coding sequence
  source 1..714: mol_type = other DNA
atgaacatcaagcagatcagcttcagcgacatcaaccaggtgctggcccaccagctgggcagcgtgttccagcccacctacagcgccgagagcagcttccactacagaagaaaccccctgggcgacctgatggagcacctggtgccccaccccgagttcaagatgctgagcgtgagaaacatcccccacatgagcgagaacagcctggcctacaccaccttcacctgggccggcctgctgaagcacctgagacagatgctgatcagcaacgccaagatggaggagggcatcgacagacacgtgtggccccccctgagcggcctgccccccctgagcaagatgagcctgaacaaggacctgcacttcaacaccagcatcgccaacctggtgatcctgagaggcaaggacgtgcagagcgccgacgtggagggcttcaaggaccccgccctgtacaccagctggctgaagcccgtgaacgccttcaacgtgtggaagacccagagagccttcagcaagtacgagaagagcgccgtgctggtgagcaacagccagttcctggtgaagcccctggacatgatcgtgggcaaggcctggaacatgttcgccagcaaggcctacatccaccagtacaccaagttcggcatcgaggaggaggacttcctggacagcttcaccagcctggagcaggtggtggccagctactgcaacctgtag

SEQ ID NO: 103988 - DNA, 378 bp, synthetic construct
  misc_feature 1..378: note = Description of Artificial Sequence: Synthetic coding sequence
  source 1..378: mol_type = other DNA
atgagcatcgtgaccgtgcagctgggccagtgcggcaaccagatcggcttcgaggtgttcgacgccctgctgagcgacagccacagcagccagggcctgtgcagcatgagagagaacgaggcctaccaggccagctgcaaggagagattcttcagcgaggaggagaacggcgtgcccatcgccagagccgtgctggtggacatggagcccaaggtgatcaaccagatgctgagcaaggccgcccagagcggccagtggaagtacggccagcacgcctgcttctgccagaagcagggcagcggcaacaactgggcctacggcagagacaaggacagcgcctgctaccccgactggagcggcacccccggcctgcagtag

SEQ ID NO: 103989 - DNA, 492 bp, synthetic construct
  misc_feature 1..492: note = Description of Artificial Sequence: Synthetic coding sequence
  source 1..492: mol_type = other DNA
atgacccagagcgtggtggtgcaggtgggccagtgcggcaaccagatcggctgctgcttctgggacctggccctgagagagcacgccgccgtgaaccagaagggcatctacgacgaggccatcagcagcttcttcagaaacgtggacaccagagtggtgggcgacggcggcagcatcagcaagggcaagatctgcagcctgaaggccagagccgtgctgatcgacatggaggagggcgtggtgaacgagatcctgcagggccccctgagagacgtgttcgacaccaagcagctgatcaccgacatcagcggcagcggcaacaactgggccgtgggccacaaggtgttcggcagcctgtaccaggaccagatcctggagaagttcagaaagagcgccgagcactgcgactgcctgcagtgcttcttcatcatccacagcatgggcggcggcaagatcttccacagcttcgcctgcaacagcgtgaagggctag

SEQ ID NO: 103990 - DNA, 621 bp, synthetic construct
  misc_feature 1..621: note = Description of Artificial Sequence: Synthetic coding sequence
  source 1..621: mol_type = other DNA
atggagagcgaccagagaaaggtggtgggcgacggcggcagcatcagcaagggcaagatctgcagcctgaaggccagagccgtgctgatcgacatggaggagggcgtggtgaacgagatcctgcagggccccctgagagacgtgttcgacaccaagcagctgatcaccgacatcagcggcagcggcaacaactgggccgtgggccacaaggtgttcggcagcctgtaccaggaccagatcctggagaagttcagaaagagcgccgagcactgcgactgcctgcagtgcttcttcatcatccacagcatgggcggcggcaccggcagcggcctgggcaccttcctgctgaaggtgctggaggacgagttccccgaggtgtacagattcgtgaccagcatctaccccagcggcgaggacgacgtgatcaccagcccctacaacagcatcctggccatgaaggagctgaacgagcacgccgactgcgtgctgcccatcgacaaccagagcctgttcgacatcatcagcaagatcgacctgatggtgaacagcggcaagctgggcaccaccgtgaagcccaagagcctggtgaccagcagcagcggcgccctgaagaagcagtag

SEQ ID NO: 103991 - DNA, 1428 bp, synthetic construct
  misc_feature 1..1428: note = Description of Artificial Sequence: Synthetic coding sequence
  source 1..1428: mol_type = other DNA
atgacccagagcgtggtggtgcaggtgggccagtgcggcaaccagatcggctgctgcttctgggacctggccctgagagagcacgccgccgtgaaccagaagggcatctacgacgaggccatcagcagcttcttcagaaacgtggacaccagagtggtgggcgacggcggcagcatcagcaagggcaagatctgcagcctgaaggccagagccgtgctgatcgacatggaggagggcgtggtgaacgagatcctgcagggccccctgagagacgtgttcgacaccaagcagctgatcaccgacatcagcggcagcggcaacaactgggccgtgggccacaaggtgttcggcagcctgtaccaggaccagatcctggagaagttcagaaagagcgccgagcactgcgactgcctgcagtgcttcttcatcatccacagcatgggcggcggcaccggcagcggcctgggcaccttcctgctgaaggtgctggaggacgagttccccgaggtgtacagattcgtgaccagcatctaccccagcggcgaggacgacgtgatcaccagcccctacaacagcatcctggccatgaaggagctgaacgagcacgccgactgcgtgctgcccatcgacaaccagagcctgttcgacatcatcagcaagatcgacctgatggtgaacagcggcaagctgggcaccaccgtgaagcccaagagcctggtgaccagcagcagcggcgccctgaagaagcagcacaagaagcccttcgacgccatgaacaacatcgtggccaacctgctgctgaacctgaccagcagcgccagattcgagggcagcctgaacatggacctgaacgagatcagcatgaacctggtgcccttcccccagctgcactacctggtgagcagcctgacccccctgtacaccctgaccgacgtgaacatcccccccagaagactggaccagatgttcagcgacgccttcagcaaggaccaccagctgctgagagccgaccccaagcacagcctgtacctggcctgcgccctgatggtgagaggcaacgtgcagatcagcgacctgagaagaaacatcgagagactgaagcccagcctgcagttcgtgagctggaaccaggagggctggaagaccagcctgtgcagcgtgccccccgtgggccacagccacagcctgctggccctggccaacaacacctgcgtgaagcccaccttcatggagctgaaggagagattcatgagactgtacaagaagaaggcccacctgcaccactacctgcaggtggagggcatggaggagagctgcttcaccgaggccgtgagcagcctgagcgccctgatccaggagtacgaccagctggacgccaccaagaacatgcccgtgcaggacctgcccagactgagcatcgccatgtag

SEQ ID NO: 103992 - DNA, 621 bp, synthetic construct; identical to SEQ ID NO: 103990
  misc_feature 1..621: note = Description of Artificial Sequence: Synthetic coding sequence
  source 1..621: mol_type = other DNA

SEQ ID NO: 103993 - DNA, 1356 bp, synthetic construct
  misc_feature 1..1356: note = Description of Artificial Sequence: Synthetic coding sequence
  source 1..1356: mol_type = other DNA
atgcccagagagatcatcaccctgcagctgggccagtgcggcaaccagatcggcttcgagttctggaagcagctgtgcgccgagcacggcatcagccccgagggcatcgtggaggagttcgccaccgagggcaccgacagaaaggacgtgttcttctaccaggccgacgacgagcactacatccccagagccgtgctgctggacctggagcccagagtgatccacagcatcctgaacagcccctacgccaagctgtacaaccccgagaacatctacctgagcgagcacggcggcggcgccggcaacaactgggccagcggcttcagccagggcgagaagatccacgaggacatcttcgacatcatcgacagagaggccgacggcagcgacagcctggagggcttcgtgctgtgccacagcatcgccggcggcaccggcagcggcctgggcagctacctgctggagagactgaacgacagataccccaagaagctggtgcagacctacagcgtgttccccaaccaggacgagatgagcgacgtggtggtgcagccctacaacagcctgctgaccctgaagagactgacccagaacgccgactgcgtggtggtgctggacaacaccgccctgaacagaatcgccaccgacagactgcacatccagaaccccagcttcagccagatcaaccagctggtgagcaccatcatgagcgccagcaccaccaccctgagataccccggctacatgaacaacgacctgatcggcctgatcgccagcctgatccccacccccagactgcacttcctgatgaccggctacacccccctgaccaccgaccagagcgtggccagcgtgagaaagaccaccgtgctggacgtgatgagaagactgctgcagcccaagaacgtgatggtgagcaccggcagagacagacagaccaaccactgctacatcgccatcctgaacatcatccagggcgaggtggaccccacccaggtgcacaagagcctgcagagaatcagagagagaaagctggccaacttcatcccctggggccccgccagcatccaggtggccctgagcagaaagagcccctacctgcccagcgcccacagagtgagcggcctgatgatggccaaccacaccagcatcagcagcctgttcgagagaacctgcagacagtacgacaagctgagaaagagagaggccttcctggagcagttcagaaaggaggacatgttcaaggacaacttcgacgagatggacaccagcagagagatcgtgcagcagctgatcgacgagtaccacgccgccaccagacccgactacatcagctggggcacccaggagcagtag

SEQ ID NO: 103994 - DNA, 1356 bp, synthetic construct
  misc_feature 1..1356: note = Description of Artificial Sequence: Synthetic coding sequence
  source 1..1356: mol_type = other DNA
atgcccagagagatcatcaccctgcagctgggccagtgcggcaaccagatcggcttcgagttctggaagcagctgtgcgccgagcacggcatcagccccgagggcatcgtggaggagttcgccaccgagggcaccgacagaaaggacgtgttcttctaccaggccgacgacgagcactacatccccagagccgtgctgctggacctggagcccagagtgatccacagcatcctgaacagcccctacgccaagctgtacaaccccgagaacatctacctgagcgagcacggcggcggcgccggcaacaactgggccagcggcttcagccagggcgagaagatccacgaggacatcttcgacatcatcgacagagaggccgacggcagcgacagcctggagggcttcgtgctgtgccacagcatcgccggcggcaccggcagcggcctgggcagctacctgctggagagactgaacgacagataccccaagaagctggtgcagacctacagcgtgttcccctaccaggacgagatgagcgacgtggtggtgcagccctacaacagcctgctgaccctgaagagactgacccagaacgccgactgcgtggtggtgctggacaacaccgccctgaacagaatcgccaccgacagactgcacatccagaaccccagcttcagccagatcaaccagctggtgagcaccatcatgagcgccagcaccaccaccctgagataccccggctacatgaacaacgacctgatcggcctgatcgccagcctgatccccacccccagactgcacttcctgatgaccggctacacccccctgaccaccgaccagagcgtggccagcgtgagaaagaccaccgtgctggacgtgatgagaagactgctgcagcccaagaacgtgatggtgagcaccggcagagacagacagaccaaccactgctacatcgccatcctgaacatcatccagggcgaggtggaccccacccaggtgcacaagagcctgcagagaatcagagagagaaagctggccaacttcatcccctggggccccgccagcatccaggtggccctgagcagaaagagcccctacctgcccagcgcccacagagtgagcggcctgatgatggccaaccacaccagcatcagcagcctgttcgagagcagctgccagcagttcgacaagctgagaaagagagacgccttcctggagcagttcagaaaggaggacatgttcaaggacaacttcgacgagatggacagaagcagagaggtggtgcaggagctgatcgacgagtaccacgccgccacccagcccgactacatcagctggggcacccaggagcagtag

SEQ ID NO: 103995 - DNA, 2001 bp, synthetic construct; identical to SEQ ID NO: 103902
  misc_feature 1..2001: note = Description of Artificial Sequence: Synthetic coding sequence
  source 1..2001: mol_type = other DNA

SEQ ID NO: 103996 - DNA, 1029 bp, synthetic construct
  misc_feature 1..1029: note = Description of Artificial Sequence: Synthetic coding sequence
  source 1..1029: mol_type = other DNA
atggtggtggtggagcagatcaagagccagaagatccacggctgccagatcctggagaccgtgtacaagcacagctgcggcggcctgccccccgtgagaagcgccctggagaagatcctggccgtgtgccacggcgtgatgtacaagcagctgagcgcctggatgctgcacggcctgctgctggaccagcacgaggagttcttcatcaagcagggccccagcagcggcaacgtgagcgcccagcccgaggaggacgaggaggacctgggcatcggcggcctgaccggcaagcagctgagagagctgcaggacctgagactgatcgaggaggagaacatgctggcccccagcctgaagcagttcagcctgagagtggagatcctgcccagctacatccccgtgagagtggccgagaagatcctgttcgtgggcgagagcgtgcagatgttcgagaaccagaacgtgaacctgaccagaaagggcagcatcctgaagaaccaggaggacaccttcgccgccgagctgcacagactgaagcagcagcccctgttcagcctggtggacttcgagcaggtggtggacagaatcagaagcaccgtggccgagcacctgtggaagctgatggtggaggagagcgacctgctgggccagctgaagatcatcaaggacttctacctgctgggcagaggcgagctgttccaggccttcatcgacaccgcccagcacatgctgaagaccccccccaccgccgtgaccgagcacgacgtgaacgtggccttccagcagagcgcccacaaggtgctgctggacgacgacaacctgctgcccctgctgcacctgaccatcgagtaccacggcaaggagcacaaggccgacgccacccaggccagagagggccccagcagagagaccagccccagagaggcccccgccagcggctgggccgccctgggcctgagctacaaggtgcagtggcccctgcacatcctgttcacccccgccgtgctggagaagaacagacagttctag

SEQ ID NO: 103997 - DNA, 3075 bp, synthetic construct
  misc_feature 1..3075: note = Description of Artificial Sequence: Synthetic coding sequence
  source 1..3075: mol_type = other DNA
atggccagacacggccccccctggagcagactggacgcccagcaggagagagacgtgagagagctggtgagaggcgtggccggcctgcaggacgaggccgaccccaacttccagctggccctgaacttcgcctggagcaacttcagattccacagattcctggacgtgaacagccacaagatcgagaagaccatcgagggcatctacgagaagttcgtgatccacagcgacctgagcaaggccgccagctggaagagactgaccgaggagttcctgaacgcccccctgcccagcatcaaggagatcaagaccgacgcccactacagcatcctgagcctgctgctgtgcctgagcgacagccccagcaacagcagctacgtggagacccccagaaacaaggaggtggagaagaaggacgacttcgactggggcaagtacctgatggaggacgaggagatggacatcggcccctacatggacacccccaactggagcgaggagagcgaggaggagaacgaccagcagcccctgagcagagaggacagcggcatccaggtggacagaacccccctggaggagcaggaccagaacagaaagctggacccctgcatcagctggaaggacgagcccgacgacagaagctggctggagcaccacgtggtgcaccagtactggaccgccagacccagccagttcccccacagcctgcacctgcacagcaacctggccgccgtgtgggaccagcacctgtacagcagcgaccccctgtacgtgcccgacgacagagtgctggtgaccgagacccaggtgatcagagagaccctgtggctgctgagcggcgtgaagaagctgttcatcttccagctgatcgacggcaaggtgaccgtgagaaacaacatcatcgtgacccacctgacccacagctgcctgagaagcgtgctggagcagatcgccgcctacggccaggtggtgttcagactgcaggagttcatcgacgaggtgatgggccacagcagcgagagcatgctgcccggcagcggcagcgtgcccaagaagagcaccgaggcccccttcagaacctaccaggccttcatgtgggccctgtacaagtacttcatcagcttcaaggaggagctggccgagatcgagaagtgcatcatcaacaacgacaccaccatcaccctggccatcgtggtggacaagctggcccccagactgagccagctgaaggtgctgcacaaggtgttcagcaccggcgtggccgaggtgccccccgacaccagaaacgtggtgagagccagccacctgctgaacaccctgtacaaggccatcctggagtacgacaacgtgggcgaggccagcgagcagaccgtgagcctgctgttcagcctgtgggtggagaccgtgagaccctacctgcagaccgtggacgagtggatcgtgcacggccacctgtgggacggcgccagagagttcatcatccagagaaacaagaacgtgcccgtgaaccacagagacttctggtacgccacctacaccctgtacagcgtgagcgagaagaccgagaacgaggagaagatgagcgacaacgccagcgccagcagcggcagcgaccagggccccagcagcagacagcacaccatggtgagcttcctgaagcccgtgctgaagcagatcatcatggccggcaagagcatgcagctgctgaagaacctgcagtgcgccgagagcaccacctgccaggccggcgccagagacgccgagagaaagagcctgtacaccctgttcctggagagcgtgcagagcagactgagacacggcgaggacagcaccccccaggtgctgaccgagcagcaggccaccaaggagaacctgatgaagatgcagagcatcgccgagagccacctggagctggacgacgtgcacgaccccctgctggccatcaacttcgccagaatgtacctggagcagagcgacttccacgagaagttcgccggcggcgacgtgtgcgtggacagaagcagcgagagcgtgacctgccagaccttcgagctgaccctgagaagctgcctgtacccccacatcgacaagcagtacctggactgctgcggcaacctgatgcagaccctgaagaaggactacagactggtggagtacctgcaggccatgagaaacttcttcctgatggagggcggcgacaccatgtacgacttctacaccagcatcttcgacaagatcagagagaaggagacctggcagaacgtgagcttcctgaacgtgcagctgcaggaggccgtgggccagagataccccgaggacagcagcagactgagcatcagcttcgagaacgtggacaccgccaagaagaagctgcccgtgcacatcctggacggcctgaccctgagctacaaggtgccctggcccgtggacatcgtgatcagcctggagtgccagaagatctacaaccaggtgttcctgctgctgctgcagatcaagtgggccaagtacagcctggacgtgctgctgttcggcgagctggtgagcaccgccgagaagcccagactgaaggagggcctgatccacgagcaggacaccgtggcccagttcggcccccagaaggagcccgtgagacagcagatccacagaatgttcctgctgagagtgaagctgatgcacttcgtgaacagcctgcacaactacatcatgaccagaatcctgcacagcaccggcctggagttccagcaccaggtggaggaggccaaggacctggaccagctgatcaagatccactacagatacctgagcaccatccacgacagatgcctgctgagagagaaggtgagcttcgtgaaggaggccatcatgaaggtgctgaacctggccctgatgttcgccgacggctggcaggccggcctgggcacctggagaatggagagcatcgagaagatggagagcgacttcaagaactgccacatgttcctggtgaccatcctgaacaaggccgtgtgcagaggcagcttcccccacctggagagcctggccctgagcctgatggccggcatggagcagagctag

SEQ ID NO: 103998 - DNA, 3075 bp, synthetic construct
  misc_feature 1..3075: note = Description of Artificial Sequence: Synthetic coding sequence
  source 1..3075: mol_type = other DNA
atggccagacacggccccccctggagcagactggacgcccagcaggagagagacgtgagagagctggtgagaggcgtggccggcctgcaggacgaggccgaccccaacttccagctggccctgaacttcgcctggagcaacttcagattccacagattcctggacgtgaacagccacaagatcgagaagaccatcgagggcatctacgagaagttcgtgatccacagcgacctgagcaaggccgccagctggaagagactgaccgaggagttcctgaacgcccccctgcccagcatcaaggagatcaagaccgacgcccactacagcatcctgagcctgctgctgtgcctgagcgacagccccagcaacagcagctacgtggagacccccagaaacaaggaggtggagaagaaggacgacttcgactggggcaagtacctgatggaggacgaggagatggacatcggcccctacatggacacccccaactggagcgaggagagcgaggaggagaacgaccagcagcccctgagcagagaggacagcggcatccaggtggacagaacccccctggaggagcaggaccagaacagaaagctggacccctgcatcagctggaaggacgagcccgacgacagaagctggctggagcaccacgtggtgcaccagtactggaccgccagacccagccagttcccccacagcctgcacctgcacagcaacctggccgccgtgtgggaccagcacctgtacagcagcgaccccctgtacgtgcccgacgacagagtgctggtgaccgagacccaggtgatcagagagaccctgtggctgctgagcggcgtgaagaagctgttcatcttccagctgatcgacggcaaggtgaccgtgagaaacaacatcatcgtgacccacctgacccacagctgcctgagaagcgtgctggagcagatcgccgcctacggccaggtggtgttcagactgcaggagttcatcgacgaggtgatgggccacagcagcgagagcatgctgcccggcagcggcagcgtgcccaagaagagcaccgaggcccccttcagaacctaccaggccttcatgtgggccctgtacaagtacttcatcagcttcaaggaggagctggccgagatcgagaagtgcatcatcaacaacgacaccaccatcaccctggccatcgtggtggacaagctggcccccagactgagccagctgaaggtgctgcacaaggtgttcagcaccggcgtggccgaggtgccccccgacaccagaaacgtggtgagagccagccacctgctgaacaccctgtacaaggccatcctggagtacgacaacgtgggcgaggccagcgagcagaccgtgagcctgctgttcagcctgtgggtggagaccgtgagaccctacctgcagaccgtggacgagtggatcgtgcacggccacctgtgggacggcgccagagagttcatcatccagagaaacaagaacgtgcccgtgaaccacagagacttctggtacgccacctacaccctgtacagcgtgagcgagaagaccgagaacgaggagaagatgagcgacaacgccagcgccagcagcggcagcgaccagggccccagcagcagacagcacaccatggtgagcttcctgaagcccgtgctgaagcagatcatcatggccggcaagagcatgcagctgctgaagaacctgcagtgcgccgagagcaccacctgccaggccggcgccagagacgccgagagaaagagcctgtacaccctgttcctggagagcgtgcagagcagactgagacacggcgaggacagcaccccccaggtgctgaccgagcagcaggccaccaaggagaacctgatgaagatgcagagcatcgccgagagccacctggagctggacgacgtgcacgaccccctgctggccatcaacttcgccagaatgtacctggagcagagcgacttccacgagaagttcgccggcggcgacgtgtgcgtggacagaagcagcgagagcgtgacctgccagaccttcgagctgaccctgagaagctgcctgtacccccacatcgacaagcagtacctggactgctgcggcaacctgatgcagaccctgaagaaggactacagactggtggagtacctgcaggccatgagaaacttcttcctgatggagggcggcgacaccatgtacgacttctacaccagcatcttcgacaagatcagagagaaggagacctggcagaacgtgagcttcctgaacgtgcagctgcaggaggccgtgggccagagataccccgaggacagcagcagactgagcatcagcttcgagaacgtggacaccgccaagaagaagctgcccgtgcacatcctggacggcctgaccctgagctacaaggtgccctggcccgtggacatcgtgatcagcctggagtgccagaagatctacaaccaggtgttcctgctgctgctgcagatcaagtgggccaagtacagcctggacgtgctgctgttcggcgagctggtgagcaccgccgagaagcccagactgaaggagggcctgatccacgagcaggacaccgtggcccagttcggcccccagaaggagcccgtgagacagcagatccacagaatgttcctgctgagagtgaagctgatgcacttcgtgaacagcctgcacaactacatcatgaccagaatcctgcacagcaccggcctggagttccagcaccaggtggaggaggccaaggacctggaccagctgatcaagatccactacagatacctgagcaccatccacgacagatgcctgctgagagagaaggtgagcttcgtgaaggaggccatcatgaaggtgctgaacctggccctgatgttcgccgacggctggcaggccggcctgggcacctggagaatggagagcatcgagaagatggagagcgacttcaagaactgccacatgttcctggtgaccatcctgaacaaggccgtgtgcagaggcagcttcccccactgcgagtacatcatgctgaagtacttctacctgtgcatcagcctgtag

SEQ ID NO: 103999 - DNA, 1431 bp, synthetic construct
  misc_feature 1..1431: note = Description of Artificial Sequence: Synthetic coding sequence
  source 1..1431: mol_type = other DNA
atgtggaccggctacaagatcctgatcttcagctacctgaccaccgagatctggatggagaagcagtacctgagccagagagaggtggacctggaggcctacttcaccagaaaccacaccgtgctgcagggcaccagattcaagagagccatcttccagggccagtactgcagaaacttcggctgctgcgaggacagagacgacggctgcgtgaccgagttctacgccgccaacgccctgtgctactgcgacaagttctgcgacagagagaacagcgactgctgccccgactacaagagcttctgcagagaggagaaggagtggcccccccacacccagccctggtaccccgagggctgcttcaaggacggccagcactacgaggagggcagcgtgatcaaggagaactgcaacagctgcacctgcagcggccagcagtggaagtgcagccagcacgtgtgcctggtgagaagcgagctgatcgagcaggtgaacaagggcgactacggctggaccgcccagaactacagccagttctggggcatgaccctggaggacggcttcaagttcagactgggcaccctgccccccagccccatgctgctgagcatgaacgagatgaccgccagcctgcccgccaccaccgacctgcccgagttcttcgtggccagctacaagtggcccggctggacccacggccccctggaccagaagaactgcgccgccagctgggccttcagcaccgccagcgtggccgccgacagaatcgccatccagagcaagggcagatacaccgccaacctgagcccccagaacctgatcagctgctgcgccaagaacagacacggctgcaacagcggcagcatcgacagagcctggtggtacctgagaaagagaggcctggtgagccacgcctgctaccccctgttcaaggaccagaacgccaccaacaacggctgcgccatggccagcagaagcgacggcagaggcaagagacacgccaccaagccctgccccaacaacgtggagaagagcaacagaatctaccagtgcagccccccctacagagtgagcagcaacgagaccgagatcatgaaggagatcatgcagaacggccccgtgcaggccatcatgcaggtgagagaggacttcttccactacaagaccggcatctacagacacgtgaccagcaccaacaaggagagcgagaagtacagaaagctgcagacccacgccgtgaagctgaccggctggggcaccctgagaggcgcccagggccagaaggagaagttctggatcgccgccaacagctggggcaagagctggggcgagaacggctacttcagaatcctgagaggcgtgaacgagagcgacatcgagaagctgatcatcgccgcctggggccagctgaccagcagcgacgagccctag

SEQ ID NO: 104000 - DNA, 1008 bp, synthetic construct
  misc_feature 1..1008: note = Description of Artificial Sequence: Synthetic coding sequence
  source 1..1008: mol_type = other DNA
atgtggaccggctacaagatcctgatcttcagctacctgaccaccgagatctggatggagaagcagtacctgagccagagagaggtggacctggaggcctacttcaccagaaaccacaccgtgctgcagggcaccagattcaagagagccatcttccagggccagtactgcagaaacttcggctgctgcgaggacagagacgacggctgcgtgaccgagttctacgccgccaacgccctgtgctactgcgacaagttctgcgacagagagaacagcgactgctgccccgactacaagagcttctgcagagaggagaaggagtggcccccccacacccagccctggtaccccgagggcagatggaccgcccagaactacagccagttctggggcatgaccctggaggacggcttcaagttcagactgggcaccctgccccccagccccatgctgctgagcatgaacgagatgaccagactggtgagccacgcctgctaccccctgttcaaggaccagaacgccaccaacaacggctgcgccatggccagcagaagcgacggcagaggcaagagacacgccaccaagccctgccccaacaacgtggagaagagcaacagaatctaccagtgcagccccccctacagagtgagcagcaacgagaccgagatcatgaaggagatcatgcagaacggccccgtgcaggccatcatgcaggtgagagaggacttcttccactacaagaccggcatctacagacacgtgaccagcaccaacaaggagagcgagaagtacagaaagctgcagacccacgccgtgaagctgaccggctggggcaccctgagaggcgcccagggccagaaggagaagttctggatcgccgccaacagctggggcaagagctggggcgagaacggctacttcagaatcctgagaggcgtgaacgagagcgacatcgagaagctgatcatcgccgcctggggccagctgaccagcagcgacgagccctag

SEQ ID NO: 104001 - DNA, 612 bp, synthetic construct
  misc_feature 1..612: note = Description of Artificial Sequence: Synthetic coding sequence
  source 1..612: mol_type = other DNA
atggagaagcagtacctgagccagagagaggtggacctggaggcctacttcaccagaaaccacaccgtgctgcagggcaccagattcaagagagccatcttccagggccagtactgcagaaacttcggctgctgcgaggacagagacgacggctgcgtgaccgagttctacgccgccaacgccctgtgctactgcgacaagttctgcgacagagagaacagcgactgctgccccgactacaagagcttctgcagagaggagaaggagtggcccccccacacccagccctggtaccccgagggctgcttcaaggacggccagcactacgaggagggcagcgtgatcaaggagaactgcaacagctgcacctgcagcggccagcagtggaagtgcagccagcacgtgtgcctggtgagaagcgagctgatcgagcaggtgaacaagggcgactacggctggaccgcccagaactacagccagttctggggcatgaccctggaggacggcttcaagttcagactgggcaccctgccccccagccccatgctgctgagcatgaacgagatgaccgtgagcgtgcccagcgacagcagaatgtgcatgtacctgtag

SEQ ID NO: 104002 - DNA, 468 bp, synthetic construct
  misc_feature 1..468: note = Description of Artificial Sequence: Synthetic coding sequence
  source 1..468: mol_type = other DNA
atggccagcagaagcgacggcagaggcaagagacacgccaccaagccctgccccaacaacgtggagaagagcaacagaatctaccagtgcagccccccctacagagtgagcagcaacgagaccgagatcatgaaggagatcatgcagaacggccccgtgcaggccatcatgcaggtgagagaggacttcttccactacaagaccggcatctacagacacgtgaccagcaccaacaaggagagcgagaagtacagaaagctgcagacccacgccgtgaagctgaccggctggggcaccctgagaggcgcccagggccagaaggagaagttctggatcgccgccaacagctggggcaagagctggggcgagaacggctacttcagaatcctgagaggcgtgaacgagagcgacatcgagaagctgatcatcgccgcctggggccagctgaccagcagcgacgagccctag

SEQ ID NO: 104003 - DNA, 618 bp, synthetic construct
  misc_feature 1..618: note = Description of Artificial Sequence: Synthetic coding sequence
  source 1..618: mol_type = other DNA
atgagagcctggatgttcgtgagcatgcaggccgagatctggatggagaagcagtacctgagccagagagaggtggacctggaggcctacttcaccagaaaccacaccgtgctgcagggcaccagattcaagagagccatcttccagggccagtactgcagaaacttcggctgctgcgaggacagagacgacggctgcgtgaccgagttctacgccgccaacgccctgtgctactgcgacaagttctgcgacagagagaacagcgactgctgccccgactacaagagcttctgcagagaggagaaggagtggcccccccacacccagccctggtaccccgagggctgcttcaaggacggccagcactacgaggagggcagcgtgatcaaggagaactgcaacagctgcacctgcagcggccagcagtggaagtgcagccagcacgtgtgcctggtgagaagcgagctgatcgagcaggtgaacaagggcgactacggctggaccgcccagaactacagccagttctggggcatgaccctggaggacggcttcaagttcagactgggcaccctgccccccagccccatgctgctgagcatgaacgagatgaccgagtag

SEQ ID NO: 104004 - DNA, 3570 bp, synthetic construct
  misc_feature 1..3570: note = Description of Artificial Sequence: Synthetic coding sequence
  source 1..3570: mol_type = other DNA
atgagcgtgaagagccccttcaacgtgatgagcagaaacaacctggaggcccccccctgcaagatgaccgagcccttcaacttcgagaagaacgagaacaagctgcccccccacgagagcctgagaagccccggcaccctgcccaaccaccccaacttcagactgaagagcagcgagaacggcaacaagaagaacaacttcctgctgtgcgagcagaccaagcagtacctggccagccaggaggacaacagcgtgagcagcaaccccaacggcatcaacggcgaggtggtgggcagcaagggcgacagaaagaagctgcccgccggcaacagcgtgagcccccccagcgccgagagcaacagcccccccaaggaggtgaacatcaagcccggcaacaacgtgagacccgccaagagcaagaagctgaacaagctggtggagaacagcctgagcatcagcaaccccggcctgttcaccagcctgggcccccccctgagaagcaccacctgccacagatgcggcctgttcggcagcctgagatgcagccagtgcaagcagacctactactgcagcaccgcctgccagagaagagactggagcgcccacagcatcgtgtgcagacccgtgcagcccaacttccacaagctggagaacaagagcagcatcgagaccaaggacgtggaggtgaacaacaagagcgactgccccctgggcgtgaccaaggagatcgccatctgggccgagagaatcatgttcagcgacctgagaagcctgcagctgaagaagaccatggagatcaagggcaccgtgaccgagttcaagcaccccggcgacttctacgtgcagctgtacagcagcgaggtgctggagtacatgaaccagctgagcgccagcctgaaggagacctacgccaacgtgcacgagaaggactacatccccgtgaagggcgaggtgtgcatcgccaagtacaccgtggaccagacctggaacagagccatcatccagaacgtggacgtgcagcagaagaaggcccacgtgctgtacatcgactacggcaacgaggagatcatccccctgaacagaatctaccacctgaacagaaacatcgacctgttccccccctgcgccatcaagtgcttcgtggccaacgtgatccccgccgagggcaactggagcagcgactgcatcaaggccaccaagcccctgctgatggagcagtactgcagcatcaagatcgtggacatcctggaggaggaggtggtgaccttcgccgtggaggtggagctgcccaacagcggcaagctgctggaccacgtgctgatcgagatgggctacggcctgaagcccagcggccaggacagcaagaaggagaacgccgaccagagcgaccccgaggacgtgggcaagatgaccaccgagaacaacatcgtggtggacaagagcgacctgatccccaaggtgctgaccctgaacgtgggcgacgagttctgcggcgtggtggcccacatccagacccccgaggacttcttctgccagcagctgcagagcggcagaaagctggccgagctgcaggccagcctgagcaagtactgcgaccagctgccccccagaagcgacttctaccccgccatcggcgacatctgctgcgcccagttcagcgaggacgaccagtggtacagagccagcgtgctggcctacgccagcgaggagagcgtgctggtgggctacgtggactacggcaacttcgagatcctgagcctgatgagactgtgccccatcatccccaagctgctggagctgcccatgcaggccatcaagtgcgtgctggccggcgtgaagcccagcctgggcatctggacccccgaggccatctgcctgatgaagaagctggtgcagaacaagatcatcaccgtgaaggtggtggacaagctggagaacagcagcctggtggagctgatcgacaagagcgagaccccccacgtgagcgtgagcaaggtgctgctggacgccggcttcgccgtgggcgagcagagcatggtgaccgacaagcccagcgacgtgaaggagaccagcgtgcccctgggcgtggagggcaaggtgaaccccctggagtggacctgggtggagctgggcgtggaccagaccgtggacgtggtggtgtgcgtgatctacagccccggcgagttctactgccacgtgctgaaggaggacgccctgaagaagctgaacgacctgaacaagagcctggccgagcactgccagcagaagctgcccaacggcttcaaggccgagatcggccagccctgctgcgccttcttcgccggcgacggcagctggtacagagccctggtgaaggagatcctgcccaacggccacgtgaaggtgcacttcgtggactacggcaacatcgaggaggtgaccgccgacgagctgagaatgatcagcagcaccttcctgaacctgcccttccagggcatcagatgccagctggccgacatccagagcagaaacaagcactggagcgaggaggccatcaccagattccagatgtgcgtggccggcatcaagctgcaggccagagtggtggaggtgaccgagaacggcatcggcgtggagctgaccgacctgagcacctgctaccccagaatcatcagcgacgtgctgatcgacgagcacctggtgctgaagagcgccagcccccacaaggacctgcccaacgacagactggtgaacaagcacgagctgcaggtgcacgtgcagggcctgcaggccaccagcagcgccgagcagtggaagaccatcgagctgcccgtggacaagaccatccaggccaacgtgctggagatcatcagccccaacctgttctacgccctgcccaagggcatgcccgagaaccaggagaagctgtgcatgctgaccgccgagctgctggagtactgcaacgcccccaagagcagacccccctacagacccagaatcggcgacgcctgctgcgccaagtacaccagcgacgacttctggtacagagccgtggtgctgggcaccagcgacaccgacgtggaggtgctgtacgccgactacggcaacatcgagaccctgcccctgtgcagagtgcagcccatcaccagcagccacctggccctgcccttccagatcatcagatgcagcctggagggcctgatggagctgaacggcagcagcagccagctgatcatcatgctgctgaagaacttcatgctgaaccagaacgtgatgctgagcgtgaagggcatcaccaagaacgtgcacaccgtgagcgtggagaagtgcagcgagaacggcaccgtggacgtggccgacaagctggtgaccttcggcctggccaagaacatcaccccccagagacagagcgccctgaacaccgagaagatgtacagaatgaactgctgctgcaccgagctgcagaagcaggtggagaagcacgagcacatcctgctgttcctgctgaacaacagcaccaaccagaacaagttcatcgagatgaagaagctgctgaagaagaccgccagcctgggcggcaagcccctgtag

SEQ ID NO: 104005 - DNA, 3315 bp, synthetic construct
  misc_feature 1..3315: note = Description of Artificial Sequence: Synthetic coding sequence
  source 1..3315: mol_type = other DNA
atgagcgtgaagagccccttcaacgtgatgagcagaaacaacctggaggcccccccctgcaagatgaccgagcccttcaacttcgagaagaacgagaacaagctgcccccccacgagagcctgagaagccccggcaccctgcccaaccaccccaacttcagactgaagagcagcgagaacggcaacaagaagaacaacttcctgctgtgcgagcagaccaagcagtacctggccagccaggaggacaacagcgtgagcagcaaccccaacggcatcaacggcgaggtggtgggcagcaagggcgacagaaagaagctgcccgccggcaacagcgtgagcccccccagcgccgagagcaacagcccccccaaggaggtgaacatcaagcccggcaacaacgtgagacccgccaagagcaagaagctgaacaagctggtggagaacagcctgagcatcagcaaccccggcctgttcaccagcctgggcccccccctgagaagcaccacctgccacagatgcggcctgttcggcagcctgagatgcagccagtgcaagcagacctactactgcagcaccgcctgccagagaagagactggagcgcccacagcatcgtgtgcagacccgtgcagcccaacttccacaagctggagaacaagagcagcatcgagaccaaggacgtggaggtgaacaacaagagcgactgccccctgggcgtgaccaaggagatcgccatctgggccgagagaatcatgttcagcgacctgagaagcctgcagctgaagaagaccatggagatcaagggcaccgtgaccgagttcaagcaccccggcgacttctacgtgcagctgtacagcagcgaggtgctggagtacatgaaccagctgagcgccagcctgaaggagacctacgccaacgtgcacgagaaggactacatccccgtgaagggcgaggtgtgcatcgccaagtacaccgtggaccagacctggaacagagccatcatccagaacgtggacgtgcagcagaagaaggcccacgtgctgtacatcgactacggcaacgaggagatcatccccctgaacagaatctaccacctgaacagaaacatcgacctgttccccccctgcgccatcaagtgcttcgtggccaacgtgatccccgccgagggcaactggagcagcgactgcatcaaggccaccaagcccctgctgatggagcagtactgcagcatcaagatcgtggacatcctggaggaggaggtggtgaccttcgccgtggaggtggagctgcccaacagcggcaagctgctggaccacgtgctgatcgagatgggctacggcctgaagcccagcggccaggacagcaagaaggagaacgccgaccagagcgaccccgaggacgtgggcaagatgaccaccgagaacaacatcgtggtggacaagagcgacctgatccccaaggtgctgaccctgaacgtgggcgacgagttctgcggcgtggtggcccacatccagacccccgaggacttcttctgccagcagctgcagagcggcagaaagctggccgagctgcaggccagcctgagcaagtactgcgaccagctgccccccagaagcgacttctaccccgccatcggcgacatctgctgcgcccagttcagcgaggacgaccagtggtacagagccagcgtgctggcctacgccagcgaggagagcgtgctggtgggctacgtggactacggcaacttcgagatcctgagcctgatgagactgtgccccatcatccccaagctgctggagctgcccatgcaggccatcaagtgcgtgctggccggcgtgaagcccagcctgggcatctggacccccgaggccatctgcctgatgaagaagctggtgcagaacaagatcatcaccgtgaaggtggtggacaagctggagaacagcagcctggtggagctgatcgacaagagcgagaccccccacgtgagcgtgagcaaggtgctgctggacgccggcttcgccgtgggcgagcagagcatggtgaccgacaagcccagcgacgtgaaggagaccagcgtgcccctgggcgtggagggcaaggtgaaccccctggagtggacctgggtggagctgggcgtggaccagaccgtggacgtggtggtgtgcgtgatctacagccccggcgagttctactgccacgtgctgaaggaggacgccctgaagaagctgaacgacctgaacaagagcctggccgagcactgccagcagaagctgcccaacggcttcaaggccgagatcggccagccctgctgcgccttcttcgccggcgacggcagctggtacagagccctggtgaaggagatcctgcccaacggccacgtgaaggtgcacttcgtggactacggcaacatcgaggaggtgaccgccgacgagctgagaatgatcagcagcaccttcctgaacctgcccttccagggcatcagatgccagctggccgacatccagagcagaaacaagcactggagcgaggaggccatcaccagattccagatgtgcgtggccggcatcaagctgcaggccagagtggtggaggtgaccgagaacggcatcggcgtggagctgaccgacctgagcacctgctaccccagaatcatcagcgacgtgctgatcgacgagcacctggtgctgaagagcgccagcccccacaaggacctgcccaacgacagactggtgaacaagcacgagctgcaggtgcacgtgcagggcctgcaggccaccagcagcgccgagcagtggaagaccatcgagctgcccgtggacaagaccatccaggccaacgtgctggagatcatcagccccaacctgttctacgccctgcccaagggcatgcccgagaaccaggagaagctgtgcatgctgaccgccgagctgctggagtactgcaacgcccccaagagcagacccccctacagacccagaatcggcgacgcctgctgcgccaagtacaccagcgacgacttctggtacagagccgtggtgctgggcaccagcgacaccgacgtggaggtgctgtacgccgactacggcaacatcgagaccctgcccctgtgcagagtgcagcccatcaccagcagccacctggccctgcccttccagatcatcagatgcagcctggaggagaagatgtacagaatgaactgctgctgcaccgagctgcagaagcaggtggagaagcacgagcacatcctgctgttcctgctgaacaacagcaccaaccagaacaagttcatcgagatgaagaagctgctgaagagctag

SEQ ID NO: 104006 - DNA, 3228 bp, synthetic construct
  misc_feature 1..3228: note = Description of Artificial Sequence: Synthetic coding sequence
  source 1..3228: mol_type = other DNA
atgagcgtgaagagccccttcaacgtgatgagcagaaacaacctggaggcccccccctgcaagatgaccgagcccttcaacttcgagaagaacgagaacaagctgcccccccacgagagcctgagaagccccggcaccctgcccaaccaccccaacttcagactgaagagcagcgagaacggcaacaagaagaacaacttcctgctgtgcgagcagaccaagcagtacctggccagccaggaggacaacagcgtgagcagcaaccccaacggcatcaacggcgaggtggtgggcagcaagggcgacagaaagaagctgcccgccggcaacagcgtgagcccccccagcgccgagagcaacagcccccccaaggaggtgaacatcaagcccggcaacaacgtgagacccgccaagagcaagaagctgaacaagctggtggagaacagcctgagcatcagcaaccccggcctgttcaccagcctgggcccccccctgagaagcaccacctgccacagatgcggcctgttcggcagcctgagatgcagccagtgcaagcagacctactactgcagcaccgcctgccagagaagagactggagcgcccacagcatcgtgtgcagacccgtgcagcccaacttccacaagctggagaacaagagcagcatcgagaccaaggacgtggaggtgaacaacaagagcgactgccccctgggcgtgaccaaggagatcgccatctgggccgagagaatcatgttcagcgacctgagaagcctgcagctgaagaagaccatggagatcaagggcaccgtgaccgagttcaagcaccccggcgacttctacgtgcagctgtacagcagcgaggtgctggagtacatgaaccagctgagcgccagcctgaaggagacctacgccaacgtgcacgagaaggactacatccccgtgaagggcgaggtgtgcatcgccaagtacaccgtggaccagacctggaacagagccatcatccagaacgtggacgtgcagcagaagaaggcccacgtgctgtacatcgactacggcaacgaggagatcatccccctgaacagaatctaccacctgaacagaaacatcgacctgttccccccctgcgccatcaagtgcttcgtggccaacgtgatccccgccgagggcaactggagcagcgactgcatcaaggccaccaagcccctgctgatggagcagtactgcagcatcaagatcgtggacatcctggaggaggaggtggtgaccttcgccgtggaggtggagctgcccaacagcggcaagctgctggaccacgtgctgatcgagatgggctacggcctgaagcccagcggccaggacagcaagaaggagaacgccgaccagagcgaccccgaggacgtgggcaagatgaccaccgagaacaacatcgtggtggacaagagcgacctgatccccaaggtgctgaccctgaacgtgggcgacgagttctgcggcgtggtggcccacatccagacccccgaggacttcttctgccagcagctgcagagcggcagaaagctggccgagctgcaggccagcctgagcaagtactgcgaccagctgccccccagaagcgacttctaccccgccatcggcgacatctgctgcgcccagttcagcggcgtgaagcccagcctgggcatctggacccccgaggccatctgcctgatgaagaagctggtgcagaacaagatcatcaccgtgaaggtggtggacaagctggagaacagcagcctggtggagctgatcgacaagagcgagaccccccacgtgagcgtgagcaaggtgctgctggacgccggcttcgccgtgggcgagcagagcatggtgaccgacaagcccagcgacgtgaaggagaccagcgtgcccctgggcgtggagggcaaggtgaaccccctggagtggacctgggtggagctgggcgtggaccagaccgtggacgtggtggtgtgcgtgatctacagccccggcgagttctactgccacgtgctgaaggaggacgccctgaagaagctgaacgacctgaacaagagcctggccgagcactgccagcagaagctgcccaacggcttcaaggccgagatcggccagccctgctgcgccttcttcgccgacatccagagcagaaacaagcactggagcgaggaggccatcaccagattccagatgtgcgtggccggcatcaagctgcaggccagagtggtggaggtgaccgagaacggcatcggcgtggagctgaccgacctgagcacctgctaccccagaatcatcagcgacgtgctgatcgacgagcacctggtgctgaagagcgccagcccccacaaggacctgcccaacgacagactggtgaacaagcacgagctgcaggtgcacgtgcagggcctgcaggccaccagcagcgccgagcagtggaagaccatcgagctgcccgtggacaagaccatccaggccaacgtgctggagatcatcagccccaacctgttctacgccctgcccaagggcatgcccgagaaccaggagaagctgtgcatgctgaccgccgagctgctggagtactgcaacgcccccaagagcagacccccctacagacccagaatcggcgacgcctgctgcgccaagtacaccagcgacgacttctggtacagagccgtggtgctgggcaccagcgacaccgacgtggaggtgctgtacgccgactacggcaacatcgagaccctgcccctgtgcagagtgcagcccatcaccagcagccacctggccctgcccttccagatcatcagatgcagcctggagggcctgatggagctgaacggcagcagcagccagctgatcatcatgctgctgaagaacttcatgctgaaccagaacgtgatgctgagcgtgaagggcatcaccaagaacgtgcacaccgtgagcgtggagaagtgcagcgagaacggcaccgtggacgtggccgacaagctggtgaccttcggcctggccaagaacatcaccccccagagacagagcgccctgaacaccgagaagatgtacagaatgaactgctgctgcaccgagctgcagaagcaggtggagaagcacgagcacatcctgctgttcctgctgaacaacagcaccaaccagaacaagttcatcgagatgaagaagctgctgaagaagaccgccagcctgggcggcaagcccctgtag

SEQ ID NO: 104007 - DNA, 3342 bp, synthetic construct
  misc_feature 1..3342: note = Description of Artificial Sequence: Synthetic coding sequence
  source 1..3342: mol_type = other DNA
atgagcgtgaagagccccttcaacgtgatgagcagaaacaacctggaggcccccccctgcaagatgaccgagcccttcaacttcgagaagaacgagaacaagctgcccccccacgagagcctgagaagccccggcaccctgcccaaccaccccaacttcagactgaagagcagcgagaacggcaacaagaagaacaacttcctgctgtgcgagcagaccaagcagtacctggccagccaggaggacaacagcgtgagcagcaaccccaacggcatcaacggcgaggtggtgggcagcaagggcgacagaaagaagctgcccgccggcaacagcgtgagcccccccagcgccgagagcaacagcccccccaaggaggtgaacatcaagcccggcaacaacgtgagacccgccaagagcaagaagctgaacaagctggtggagaacagcctgagcatcagcaaccccggcctgttcaccagcctgggcccccccctgagaagcaccacctgccacagatgcggcctgttcggcagcctgagatgcagccagtgcaagcagacctactactgcagcaccgcctgccagagaagagactggagcgcccacagcatcgtgtgcagacccgtgcagcccaacttccacaagctggagaacaagagcagcatcgagaccaaggacgtggaggtgaacaacaagagcgactgccccctgggcgtgaccaaggagatcgccatctgggccgagagaatcatgttcagcgacctgagaagcctgcagctgaagaagaccatggagatcaagggcaccgtgaccgagttcaagcaccccggcgacttctacgtgcagctgtacagcagcgaggtgctggagtacatgaaccagctgagcgccagcctgaaggagacctacgccaacgtgcacgagaaggactacatccccgtgaagggcgaggtgtgcatcgccaagtacaccgtggaccagacctggaacagagccatcatccagaacgtggacgtgcagcagaagaaggcccacgtgctgtacatcgactacggcaacgaggagatcatccccctgaacagaatctaccacctgaacagaaacatcgacctgttccccccctgcgccatcaagtgcttcgtggccaacgtgatccccgccgagggcaactggagcagcgactgcatcaaggccaccaagcccctgctgatggagcagtactgcagcatcaagatcgtggacatcctggaggaggaggtggtgaccttcgccgtggaggtggagctgcccaacagcggcaagctgctggaccacgtgctgatcgagatgggctacggcctgaagcccagcggccaggacagcaagaaggagaacgccgaccagagcgaccccgaggacgtgggcaagatgaccaccgagaacaacatcgtggtggacaagagcgacctgatccccaaggtgctgaccctgaacgtgggcgacgagttctgcggcgtggtggcccacatccagacccccgaggacttcttctgccagcagctgcagagcggcagaaagctggccgagctgcaggccagcctgagcaagtactgcgaccagctgccccccagaagcgacttctaccccgccatcggcgacatctgctgcgcccagttcagcgaggacgaccagtggtacagagccagcgtgctggcctacgccagcgaggagagcgtgctggtgggctacgtggactacggcaacttcgagatcctgagcctgatgagactgtgccccatcatccccaagctgctggagctgcccatgcaggccatcaagtgcgtgctggccggcgtgaagcccagcctgggcatctggacccccgaggccatctgcctgatgaagaagctggtgcagaacaagatcatcaccgtgaaggtggtggacaagctggagaacagcagcctggtggagctgatcgacaagagcgagaccccccacgtgagcgtgagcaaggtgctgctggacgccggcttcgccgtgggcgagcagagcatggtgaccgacaagcccagcgacgtgaaggagaccagcgtgcccctgggcgtggagggcaaggtgaaccccctggagtggacctgggtggagctgggcgtggaccagaccgtggacgtggtggtgtgcgtgatctacagccccggcgagttctactgccacgtgctgaaggaggacgccctgaagaagctgaacgacctgaacaagagcctggccgagcactgccagcagaagctgcccaacggcttcaaggccgagatcggccagccctgctgcgccttcttcgccggcgacggcagctggtacagagccctggtgaaggagatcctgcccaacggccacgtgaaggtgcacttcgtggactacggcaacatcgaggaggtgaccgccgacgagctgagaatgatcagcagcaccttcctgaacctgcccttccagggcatcagatgccagctggccgacatccagagcagaaacaagcactggagcgaggaggccatcaccagattccagatgtgcgtggccggcatcaagctgcaggccagagtggtggaggtgaccgagaacggcatcggcgtggagctgaccgacctgagcacctgctaccccagaatcatcagcgacgtgctgatcgacgagcacctggtgctgaagagcgccagcccccacaaggacctgcccaacgacagactggtgaacaagcacgagctgcaggtgcacgtgcagggcctgcaggccaccagcagcgccgagcagtggaagaccatcgagctgcccgtggacaagaccatccaggccaacgtgctggagatcatcagccccaacctgttctacgccctgcccaagggcatgcccgagaaccaggagaagctgtgcatgctgaccgccgagctgctggagtactgcaacgcccccaagagcagacccccctacagacccagaatcggcgacgcctgctgcgccaagtacaccagcgacgacttctggtacagagccgtggtgctgggcaccagcgacaccgacgtggaggtgctgtacgccgactacggcaacatcgagaccctgcccctgtgcagagtgcagcccatcaccagcagccacctggccctgcccttccagatcatcagatgcagcctggaggagaagatgtacagaatgaactgctgctgcaccgagctgcagaagcaggtggagaagcacgagcacatcctgctgttcctgctgaacaacagcaccaaccagaacaagttcatcgagatgaagaagctgctgaagaagaccgccagcctgggcggcaagcccctgtag

SEQ ID NO: 104008 - DNA, 2154 bp, synthetic construct
  misc_feature 1..2154: note = Description of Artificial Sequence: Synthetic coding sequence
  source 1..2154: mol_type = other DNA
atgaaccagctgagcgccagcctgaaggagacctacgccaacgtgcacgagaaggactacatccccgtgaagggcgaggtgtgcatcgccaagtacaccgtggaccaggccatcaagtgcttcgtggccaacgtgatccccgccgagggcaactggagcagcgactgcatcaaggccaccaagcccctgctgatggagcagtactgcagcatcaagatcgtggacatcctggaggaggaggtggtgaccttcgccgtggaggtggagctgcccaacagcggcaagctgctggaccacgtgctgatcgagatgggctacggcctgaagcccagcggccaggacagcaagaaggagaacgccgaccagagcgaccccgaggacgtgggcaagatgaccaccgagaacaacatcgtggtggacaagagcgacctgatccccaaggtgctgaccctgaacgtgggcgacgagttctgcggcgtggtggcccacatccagacccccgaggacttcttctgccagcagctgcagagcggcagaaagctggccgagctgcaggccagcctgagcaagtactgcgaccagctgccccccagaagcgacttctaccccgccatcggcgacatctgctgcgcccagttcagcggcgtgaagcccagcctgggcatctggacccccgaggccatctgcctgatgaagaagctggtgcagaacaagatcatcaccgtgaaggtggtggacaagctggagaacagcagcctggtggagctgatcgacaagagcgagaccccccacgtgagcgtgagcaaggtgctgctggacgccggcttcgccgtgggcgagcagagcatggtgaccgacaagcccagcgacgtgaaggagaccagcgtgcccctgggcgtggagggcaaggtgaaccccctggagtggacctgggtggagctgggcgtggaccagaccgtggacgtggtggtgtgcgtgatctacagccccggcgagttctactgccacgtgctgaaggaggacgccctgaagaagctgaacgacctgaacaagagcctggccgagcactgccagcagaagctgcccaacggcttcaaggccgagatcggccagccctgctgcgccttcttcgccggcgacggcagctggtacagagccctggtgaaggagatcctgcccaacggccacgtgaaggtgcacttcgtggactacggcaacatcgaggaggtgaccgccgacgagctgagaatgatcagcagcaccttcctgaacctgcccttccagggcatcagatgccagctggccgacatccagagcagaaacaagcactggagcgaggaggccatcaccagattccagatgtgcgtggccggcatcaagctgcaggccagagtggtggaggtgaccgagaacggcatcggcgtggagctgaccgacctgagcacctgctaccccagaatcatcagcgacgtgctgatcgacgagcacctggtgctgaagagcgccagcccccacaaggacctgcccaacgacagactggtgaacaagcacgagctgcaggtgcacgtgcagggcctgcaggccaccagcagcgccgagcagtggaagaccatcgagctgcccgtggacaagaccatccaggccaacgtgctggagatcatcagccccaacctgttctacgccctgcccaagggcatgcccgagaaccaggagaagctgtgcatgctgaccgccgagctgctggagtactgcaacgcccccaagagcagacccccctacagacccagaatcggcgacgcctgctgcgccaagtacaccagcgacgacttctggtacagagccgtggtgctgggcaccagcgacaccgacgtggaggtgctgtacgccgactacggcaacatcgagaccctgcccctgtgcagagtgcagcccatcaccagcagccacctggccctgcccttccagatcatcagatgcagcctggaggagaagatgtacagaatgaactgctgctgcaccgagctgcagaagcaggtggagaagcacgagcacatcctgctgttcctgctgaacaacagcaccaaccagaacaagttcatcgagatgaagaagctgctgaagaagaccgccagcctgggcggcaagcccctgtag

SEQ ID NO: 104009 - DNA, 1956 bp, synthetic construct
  misc_feature 1..1956: note = Description of Artificial Sequence: Synthetic coding sequence
  source 1..1956: mol_type = other DNA
atgctgagactgcagatgaccgacggccacatcagctgcaccgccgtggagttcagctacatgagcaagatcagcctgaacaccccccccggcaccaaggtgaagctgagcggcatcgtggacatcaagaacggcttcctgctgctgaacgacagcaacaccaccgtgctgggcggcgaggtggagcacctgatcgagaagtgggagctgcagagaagcctgagcaagcacaacagaagcaacatcggcaccgagggcggccccccccccttcgtgcccttcggccagaagtgcgtgagccacgtgcaggtggacagcagagagctggacagaagaaagaccctgcaggtgaccatgcccgtgaagcccaccaacgacaacgacgagttcgagaagcagagaaccgccgccatcgccgaggtggccaagagcaaggagaccaagaccttcggcggcggcggcggcggcgccagaagcaacctgaacatgaacgccgccggcaacagaaacagagaggtgctgcagaaggagaagagcaccaagagcgagggcaagcacgagggcgtgtacagagagctggtggacgagaaggccctgaagcacatcaccgagatgggcttcagcaaggaggccagcagacaggccctgatggacaacggcaacaacctggaggccgccctgaacgtgctgctgaccagcaacaagcagaagcccgtgatgggcccccccctgagaggcagaggcaagggcagaggcagaatcagaagcgaggacgaggaggacctgggcaacgccagacccagcgcccccagcaccctgttcgacttcctggagagcaagatgggcaccctgaacgtggaggagcccaagagccagccccagcagctgcaccagggccagtacagaagcagcaacaccgagcagaacggcgtgaaggacaacaaccacctgagacacccccccagaaacgacaccagacagcccagaaacgagaagccccccagattccagagagacagccagaacagcaagagcgtgctggagggcagcggcctgcccagaaacagaggcagcgagagacccagcaccagcagcgtgagcgaggtgtgggccgaggacagaatcaagtgcgacagaccctacagcagatacgacagaaccaaggacaccagctaccccctgggcagccagcacagcgacggcgccttcaagaagagagacaacagcatgcagagcagaagcggcaagggccccagcttcgccgaggccaaggagaaccccctgccccagggcagcgtggactacaacaaccagaagagaggcaagagagagagccagaccagcatccccgactacttctacgacagaaagagccagaccatcaacaacgaggccttcagcggcatcaagatcgagaagcacttcaacgtgaacaccgactaccagaaccccgtgagaagcaacagcttcatcggcgtgcccaacggcgaggtggagatgcccctgaagggcagaagaatcggccccatcaagcccgccggccccgtgaccgccgtgccctgcgacgacaagatcttctacaacagcggccccaagagaagaagcggccccatcaagcccgagaagatcctggagagcagcatccccatggagtacgccaagatgtggaagcccggcgacgagtgcttcgccctgtactgggaggacaacaagttctacagagccgaggtggaggccctgcacagcagcggcatgaccgccgtggtgaagttcatcgactacggcaactacgaggaggtgctgctgagcaacatcaagcccatccagaccgaggcctgggaggaggagggcacctacgaccagaccctggagttcagaagaggcggcgacggccagcccagaagaagcaccagacccacccagcagttctaccagccccccagagccagaaactag

SEQ ID NO: 104010 - DNA, 1956 bp, synthetic construct; identical to SEQ ID NO: 104009
  misc_feature 1..1956: note = Description of Artificial Sequence: Synthetic coding sequence
  source 1..1956: mol_type = other DNA

SEQ ID NO: 104011 - DNA, 390 bp, synthetic construct
  misc_feature 1..390: note = Description of Artificial Sequence: Synthetic coding sequence
  source 1..390: mol_type = other DNA
atgctgagactgcagatgaccgacggccacatcagctgcaccgccgtggagttcagctacatgagcaagatcagcctgaacaccccccccggcaccaaggtgaagctgagcggcatcgtggacatcaagaacggcttcctgctgctgaacgacagcaacaccaccgtgctgggcggcgaggtggagcacctgatcgagaagtgggagctgcagagaagcctgagcaagcacaacagaagcaacatcggcaccgagggcggccccccccccttcgtgcccttcggccagaagtgcgtgagccacgtgcaggtggacagcagagagctggacagaagaaagaccctgcaggtgaccatgcccgtgaagcccaccaacgacaacgacgagtag

SEQ ID NO: 104012 - DNA, 1956 bp, synthetic construct; identical to SEQ ID NO: 104009
  misc_feature 1..1956: note = Description of Artificial Sequence: Synthetic coding sequence
  source 1..1956: mol_type = other DNA

SEQ ID NO: 104013 - DNA, 2235 bp, synthetic construct
  misc_feature 1..2235: note = Description of Artificial Sequence: Synthetic coding sequence
  source 1..2235: mol_type = other DNA
atggcccaggtggccggcgccgccctgagccaggccggctggtacctgagcgacgagggcatcgaggcctgcaccagcagccccgacaaggtgaacgtgaacgacatcatcctgatcgccctgaacaccgacctgagaaccatcggcaagaagttcctgcccagcgacatcaacagcggcaaggtggagaagctggagggcccctgcgtgctgcagatccagaagatcagaaacgtggccgcccccaaggacaacgaggagagccaggccgcccccagaatgctgagactgcagatgaccgacggccacatcagctgcaccgccgtggagttcagctacatgagcaagatcagcctgaacaccccccccggcaccaaggtgaagctgagcggcatcgtggacatcaagaacggcttcctgctgctgaacgacagcaacaccaccgtgctgggcggcgaggtggagcacctgatcgagaagtgggagctgcagagaagcctgagcaagcacaacagaagcaacatcggcaccgagggcggccccccccccttcgtgcccttcggccagaagtgcgtgagccacgtgcaggtggacagcagagagctggacagaagaaagaccctgcaggtgaccatgcccgtgaagcccaccaacgacaacgacgagttcgagaagcagagaaccgccgccatcgccgaggtggccaagagcaaggagaccaagaccttcggcggcggcggcggcggcgccagaagcaacctgaacatgaacgccgccggcaacagaaacagagaggtgctgcagaaggagaagagcaccaagagcgagggcaagcacgagggcgtgtacagagagctggtggacgagaaggccctgaagcacatcaccgagatgggcttcagcaaggaggccagcagacaggccctgatggacaacggcaacaacctggaggccgccctgaacgtgctgctgaccagcaacaagcagaagcccgtgatgggcccccccctgagaggcagaggcaagggcagaggcagaatcagaagcgaggacgaggaggacctgggcaacgccagacccagcgcccccagcaccctgttcgacttcctggagagcaagatgggcaccctgaacgtggaggagcccaagagccagccccagcagctgcaccagggccagtacagaagcagcaacaccgagcagaacggcgtgaaggacaacaaccacctgagacacccccccagaaacgacaccagacagcccagaaacgagaagccccccagattccagagagacagccagaacagcaagagcgtgctggagggcagcggcctgcccagaaacagaggcagcgagagacccagcaccagcagcgtgagcgaggtgtgggccgaggacagaatcaagtgcgacagaccctacagcagatacgacagaaccaaggacaccagctaccccctgggcagccagcacagcgacggcgccttcaagaagagagacaacagcatgcagagcagaagcggcaagggccccagcttcgccgaggccaaggagaaccccctgccccagggcagcgtggactacaacaaccagaagagaggcaagagagagagccagaccagcatccccgactacttctacgacagaaagagccagaccatcaacaacgaggccttcagcggcatcaagatcgagaagcacttcaacgtgaacaccgactaccagaaccccgtgagaagcaacagcttcatcggcgtgcccaacggcgaggtggagatgcccctgaagggcagaagaatcggccccatcaagcccgccggccccgtgaccgccgtgccctgcgacgacaagatcttctacaacagcggccccaagagaagaagcggccccatcaagcccgagaagatcctggagagcagcatccccatggagtacgccaagatgtggaagcccggcgacgagtgcttcgccctgtactgggaggacaacaagttctacagagccgaggtggaggccctgcacagcagcggcatgaccgccgtggtgaagttcatcgactacggcaactacgaggaggtgctgctgagcaacatcaagcccatccagaccgaggcctgggaggaggagggcacctacgaccagaccctggagttcagaagaggcggcgacggccagcccagaagaagcaccagacccacccagcagttctaccagccccccagagccagaaactag

SEQ ID NO: 104014 - DNA, 3297 bp, synthetic construct
  misc_feature 1..3297: note = Description of Artificial Sequence: Synthetic coding sequence
  source 1..3297: mol_type = other DNA
atgctggagggcgacctggtgagcaagatgctgagagccgtgctgcagagccacaagaacggcgtggccctgcccagactgcagggcgagtacagaagcctgaccggcgactggatccccttcaagcagctgggcttccccaccctggaggcctacctgagaagcgtgcccgccgtggtgagaatcgagaccagcagaagcggcgagatcacctgctacgccatggcctgcaccgagaccgccagaatcgcccagctggtggccagacagagaagcagcaagagaaagaccggcagacaggtgaactgccagatgagagtgaagaagaccatgcccttcttcctggagggcaagcccaaggccaccctgagacagcccggcttcgccagcaacttcagcgtgggcaagaagcccaaccccgcccccctgagagacaagggcaacagcgtgggcgtgaagcccgacgccgagatgagcccctacatgctgcacaccaccctgggcaacgaggccttcaaggacatccccgtgcagagacacgtgaccatgagcaccaacaacagattcagccccaaggccagcctgcagccccccctgcagatgcacctgagcagaaccagcaccaaggagatgagcgacaacctgaaccagaccgtggagaagcccaacgtgaagccccccgccagctacacctacaagatggacgaggtgcagaacagaatcaaggagatcctgaacaagcacaacaacggcatctggatcagcaagctgccccacttctacaaggagctgtacaaggaggacctgaaccagggcatcctgcagcagttcgagcactggccccacatctgcaccgtggagaagccctgcagcggcggccaggacctgctgctgtaccccgccaagagaaagcagctgctgagaagcgagctggacaccgagaaggtgcccctgagccccctgcccggccccaagcagaccccccccctgaagggctgccccaccgtgatggccggcgacttcaaggagaaggtggccgacctgctggtgaagtacaccagcggcctgtgggccagcgccctgcccaaggccttcgaggagatgtacaaggtgaagttccccgaggacgccctgaagaacctggccagcctgagcgacgtgtgcagcatcgactacatcagcggcaacccccagaaggccatcctgtacgccaagctgcccctgcccaccgacaagatccagaaggacgccggccaggcccacggcgacaacgacatcaaggccatggtggagcaggagtacctgcaggtggaggagagcatcgccgagagcgccaacaccttcatggaggacatcaccgtgccccccctgatgatccccaccgaggccagccccagcgtgctggtggtggagctgagcaacaccaacgaggtggtgatcagatacgtgggcaaggactacagcgccgcccaggagctgatggaggacgagatgaaggagtactacagcaagaaccccaagatcacccccgtgcaggccgtgaacgtgggccagctgctggccgtgaacgccgaggaggacgcctggctgagagcccaggtgatcagcaccgaggagaacaagatcaaggtgtgctacgtggactacggcttcagcgagaacgtggagaagagcaaggcctacaagctgaaccccaagttctgcagcctgagcttccaggccaccaagtgcaagctggccggcctggaggtgctgagcgacgaccccgacctggtgaaggtggtggagagcctgacctgcggcaagatcttcgccgtggagatcctggacaaggccgacatccccctggtggtgctgtacgacaccagcggcgaggacgacatcaacatcaacgccacctgcctgaaggccatctgcgacaagagcctggaggtgcacctgcaggtggacgccatgtacaccaacgtgaaggtgaccaacatctgcagcgacggcaccctgtactgccaggtgccctgcaagggcctgaacaagctgagcgacctgctgagaaagatcgaggactacttccactgcaagcacatgaccagcgagtgcttcgtgagcctgcccttctgcggcaagatctgcctgttccactgcaagggcaagtggctgagagtggagatcaccaacgtgcacagcagcagagccctggacgtgcagttcctggacagcggcaccgtgaccagcgtgaaggtgagcgagctgagagagatcccccccagattcctgcaggagatgatcgccatccccccccaggccatcaagtgctgcctggccgacctgccccagagcatcggcatgtggacccccgacgccgtgctgtggctgagagacagcgtgctgaactgcagcgactgcagcatcaaggtgaccaaggtggacgagaccagaggcatcgcccacgtgtacctgttcacccccaagaacttccccgacccccacagaagcatcaacagacagatcaccaacgccgacctgtggaagcaccagaaggacgtgttcctgagcgccatcagcagcggcgccgacagccccaacagcaagaacggcaacatgcccatgagcggcaacaccggcgagaacttcagaaagaacctgaccgacgtgatcaagaagagcatggtggaccacaccagcgccttcagcaccgaggagctgcccccccccgtgcacctgagcaagcccggcgagcacatggacgtgtacgtgcccgtggcctgccaccccggctacttcgtgatccagccctggcaggagatccacaagctggaggtgctgatggaggagatgatcctgtactacagcgtgagcgaggagagacacatcgccgtggagaaggaccaggtgtacgccgccaaggtggagaacaagtggcacagagtgctgctgaagggcatcctgaccaacggcctggtgagcgtgtacgagctggactacggcaagcacgagctggtgaacatcagaaaggtgcagcccctggtggacatgttcagaaagctgcccttccaggccgtgaccgcccagctggccggcgtgaagtgcaaccagtggagcgaggaggccagcatggtgttcagaaaccacgtggagaagaagcccctggtggccctggtgcagaccgtgatcgagaacgccaacccctgggacagaaaggtggtggtgtacctggtggacaccagcctgcccgacaccgacacctggatccacgacttcatgagcgagtacctgatcgagctgagcaaggtgaactag

SEQ ID NO: 104015 - DNA, 3075 bp, synthetic construct
  misc_feature 1..3075: note = Description of Artificial Sequence: Synthetic coding sequence
  source 1..3075: mol_type = other DNA
atggcctgcaccgagaccgccagaatcgcccagctggtggccagacagagaagcagcaagagaaagaccggcagacaggtgaactgccagatgagagtgaagaagaccatgcccttcttcctggagggcaagcccaaggccaccctgagacagcccggcttcgccagcaacttcagcgtgggcaagaagcccaaccccgcccccctgagagacaagggcaacagcgtgggcgtgaagcccgacgccgagatgagcccctacatgctgcacaccaccctgggcaacgaggccttcaaggacatccccgtgcagagacacgtgaccatgagcaccaacaacagattcagccccaaggccagcctgcagccccccctgcagatgcacctgagcagaaccagcaccaaggagatgagcgacaacctgaaccagaccgtggagaagcccaacgtgaagccccccgccagctacacctacaagatggacgaggtgcagaacagaatcaaggagatcctgaacaagcacaacaacggcatctggatcagcaagctgccccacttctacaaggagctgtacaaggaggacctgaaccagggcatcctgcagcagttcgagcactggccccacatctgcaccgtggagaagccctgcagcggcggccaggacctgctgctgtaccccgccaagagaaagcagctgctgagaagcgagctggacaccgagaaggtgcccctgagccccctgcccggccccaagcagaccccccccctgaagggctgccccaccgtgatggccggcgacttcaaggagaaggtggccgacctgctggtgaagtacaccagcggcctgtgggccagcgccctgcccaaggccttcgaggagatgtacaaggtgaagttccccgaggacgccctgaagaacctggccagcctgagcgacgtgtgcagcatcgactacatcagcggcaacccccagaaggccatcctgtacgccaagctgcccctgcccaccgacaagatccagaaggacgccggccaggcccacggcgacaacgacatcaaggccatggtggagcaggagtacctgcaggtggaggagagcatcgccgagagcgccaacaccttcatggaggacatcaccgtgccccccctgatgatccccaccgaggccagccccagcgtgctggtggtggagctgagcaacaccaacgaggtggtgatcagatacgtgggcaaggactacagcgccgcccaggagctgatggaggacgagatgaaggagtactacagcaagaaccccaagatcacccccgtgcaggccgtgaacgtgggccagctgctggccgtgaacgccgaggaggacgcctggctgagagcccaggtgatcagcaccgaggagaacaagatcaaggtgtgctacgtggactacggcttcagcgagaacgtggagaagagcaaggcctacaagctgaaccccaagttctgcagcctgagcttccaggccaccaagtgcaagctggccggcctggaggtgctgagcgacgaccccgacctggtgaaggtggtggagagcctgacctgcggcaagatcttcgccgtggagatcctggacaaggccgacatccccctggtggtgctgtacgacaccagcggcgaggacgacatcaacatcaacgccacctgcctgaaggccatctgcgacaagagcctggaggtgcacctgcaggtggacgccatgtacaccaacgtgaaggtgaccaacatctgcagcgacggcaccctgtactgccaggtgccctgcaagggcctgaacaagctgagcgacctgctgagaaagatcgaggactacttccactgcaagcacatgaccagcgagtgcttcgtgagcctgcccttctgcggcaagatctgcctgttccactgcaagggcaagtggctgagagtggagatcaccaacgtgcacagcagcagagccctggacgtgcagttcctggacagcggcaccgtgaccagcgtgaaggtgagcgagctgagagagatcccccccagattcctgcaggagatgatcgccatccccccccaggccatcaagtgctgcctggccgacctgccccagagcatcggcatgtggacccccgacgccgtgctgtggctgagagacagcgtgctgaactgcagcgactgcagcatcaaggtgaccaaggtggacgagaccagaggcatcgcccacgtgtacctgttcacccccaagaacttccccgacccccacagaagcatcaacagacagatcaccaacgccgacctgtggaagcaccagaaggacgtgttcctgagcgccatcagcagcggcgccgacagccccaacagcaagaacggcaacatgcccatgagcggcaacaccggcgagaacttcagaaagaacctgaccgacgtgatcaagaagagcatggtggaccacaccagcgccttcagcaccgaggagctgcccccccccgtgcacctgagcaagcccggcgagcacatggacgtgtacgtgcccgtggcctgccaccccggctacttcgtgatccagccctggcaggagatccacaagctggaggtgctgatggaggagatgatcctgtactacagcgtgagcgaggagagacacatcgccgtggagaaggaccaggtgtacgccgccaaggtggagaacaagtggcacagagtgctgctgaagggcatcctgaccaacggcctggtgagcgtgtacgagctggactacggcaagcacgagctggtgaacatcagaaaggtgcagcccctggtggacatgttcagaaagctgcccttccaggccgtgaccgcccagctggccggcgtgaagtgcaaccagtggagcgaggaggccagcatggtgttcagaaaccacgtggagaagaagcccctggtggccctggtgcagaccgtgatcgagaacgccaacccctgggacagaaaggtggtggtgtacctggtggacaccagcctgcccgacaccgacacctggatccacgacttcatgagcgagtacctgatcgagctgagcaaggtgaactag

SEQ ID NO: 104016 - DNA, 1257 bp, synthetic construct
  misc_feature 1..1257: note = Description of Artificial Sequence: Synthetic coding sequence
  source 1..1257: mol_type = other DNA
atgtacaccaacgtgaaggtgaccaacatctgcagcgacggcaccctgtactgccaggtgccctgcaagggcctgaacaagctgagcgacctgctgagaaagatcgaggactacttccactgcaagatcaccaacgtgcacagcagcagagccctggacgtgcagttcctggacagcggcaccgtgaccagcgtgaaggtgagcgagctgagagagatcccccccagattcctgcaggagatgatcgccatccccccccaggccatcaagtgctgcctggccgacctgccccagagcatcggcatgtggacccccgacgccgtgctgtggctgagagacagcgtgctgaactgcagcgactgcagcatcaaggtgaccaaggtggacgagaccagaggcatcgcccacgtgtacctgttcacccccaagaacttccccgacccccacagaagcatcaacagacagatcaccaacgccgacctgtggaagcaccagaaggacgtgttcctgagcgccatcagcagcggcgccgacagccccaacagcaagaacggcaacatgcccatgagcggcaacaccggcgagaacttcagaaagaacctgaccgacgtgatcaagaagagcatggtggaccacaccagcgccttcagcaccgaggagctgcccccccccgtgcacctgagcaagcccggcgagcacatggacgtgtacgtgcccgtggcctgccaccccggctacttcgtgatccagccctggcaggagatccacaagctggaggtgctgatggaggagatgatcctgtactacagcgtgagcgaggagagacacatcgccgtggagaaggaccaggtgtacgccgccaaggtggagaacaagtggcacagagtgctgctgaagggcatcctgaccaacggcctggtgagcgtgtacgagctggactacggcaagcacgagctggtgaacatcagaaaggtgcagcccctggtggacatgttcagaaagctgcccttccaggccgtgaccgcccagctggccggcgtgaagtgcaaccagtggagcgaggaggccagcatggtgttcagaaaccacgtggagaagaagcccctggtggccctggtgcagaccgtgatcgagaacgccaacccctgggacagaaaggtggtggtgtacctggtggacaccagcctgcccgacaccgacacctggatccacgacttcatgagcgagtacctgatcgagctgagcaaggtgaactag

SEQ ID NO: 104017 - DNA, 2514 bp, synthetic construct
  misc_feature 1..2514: note = Description of Artificial Sequence: Synthetic coding sequence
  source 1..2514: mol_type = other DNA
atgagcctgagccacctgtacagagacggcgagggcagaatcgacgacgacgacgacgagagagagaacttcgagatcaccgactgggacctgcagaacgagttcaaccccaacagacagagacactggcagaccaaggaggaggccacctacggcgtgtgggccgagagagacagcgacgacgagagacccagcttcggcggcaagagagccagagactacagcgcccccgtgaacttcatcagcgccggcctgaagaagggcgccgccgaggaggccgagctggaggacagcgacgacgaggagaagcccgtgaagcaggacgacttccccaaggacttcggccccagaaagctgaagaccggcggcaacttcaagcccagccagaagggcttcgccggcggcaccaagagcttcatggacttcggcagctgggagagacacaccaagggcatcggccagaagctgctgcagaagatgggctacgtgcccggcagaggcctgggcaagaacgcccagggcatcatcaaccccatcgaggccaagcagagaaagggcaagggcgccgtgggcgcctacggcagcgagagaaccacccagagcatgcaggacttccccgtggtggacagcgaggaggaggccgaggaggagttccagaaggagctgagccagtggagaaaggaccccagcggcagcaagaagaagcccaagtacagctacaagaccgtggaggagctgaaggccaagggcagaatcagcaagaagctgaccgccccccagaaggagctgagccaggtgaaggtgatcgacatgaccggcagagagcagaaggtgtactacagctacagccagatcagccacaagcacaacgtgcccgacgacggcctgcccctgcagagccagcagctgccccagagcggcaaggaggccaaggcccccggcttcgccctgcccgagctggagcacaacctgcagctgctgatcgacctgaccgagcaggagatcatccagaacgacagacagctgcagtacgagagagacatggtggtgaacctgttccacgagctggagaagatgaccgaggtgctggaccacgaggagagagtgatcagcaacctgagcaaggtgctggagatggtggaggagtgcgagagaagaatgcagcccgactgcagcaaccccctgaccctggacgagtgcgccagaatcttcgagaccctgcaggacaagtactacgaggagtacagaatgagcgacagagtggacctggccgtggccatcgtgtaccccctgatgaaggagtacttcaaggagtgggaccccctgaaggactgcacctacggcaccgagatcatcagcaagtggaagagcctgctggagaacgaccagctgctgagccacggcggccaggacctgagcgccgacgccttccacagactgatctgggaggtgtggatgcccttcgtgagaaacatcgtgacccagtggcagcccagaaactgcgaccccatggtggacttcctggacagctgggtgcacatcatccccgtgtggatcctggacaacatcctggaccagctgatcttccccaagctgcagaaggaggtggagaactggaaccccctgaccgacaccgtgcccatccacagctggatccacccctggctgcccctgatgcaggccagactggagcccctgtacagccccatcagaagcaagctgagcagcgccctgcagaagtggcaccccagcgacagcagcgccaagctgatcctgcagccctggaaggacgtgttcacccccggcagctgggaggccttcatggtgaagaacatcgtgcccaagctgggcatgtgcctgggcgagctggtgatcaacccccaccagcagcacatggacgccttctactgggtgatcgactgggagggcatgatcagcgtgagcagcctggtgggcctgctggagaagcacttcttccccaagtggctgcaggtgctgtgcagctggctgagcaacagccccaactacgaggagatcaccaagtggtacctgggctggaagagcatgttcagcgaccaggtgctggcccaccccagcgtgaaggacaagttcaacgaggccctggacatcatgaacagagccgtgagcagcaacgtgggcgcctacatgcagcccggcgccagagagaacatcgcctacctgacccacaccgagagaagaaaggacttccagtacgaggccatgcaggagagaagagaggccgagaacatggcccagagaggcatcggcgtggccgccagcagcgtgcccatgaacttcaaggacctgatcgagaccaaggccgaggagcacaacatcgtgttcatgcccgtgatcggcaagagacacgagggcaagcagctgtacaccttcggcagaatcgtgatctacatcgacagaggcgtggtgttcgtgcagggcgagaagacctgggtgcccaccagcctgcagagcctgatcgacatggccaagtag

SEQ ID NO: 104018 - DNA, 2514 bp, synthetic construct; identical to SEQ ID NO: 104017
  misc_feature 1..2514: note = Description of Artificial Sequence: Synthetic coding sequence
  source 1..2514: mol_type = other DNA

SEQ ID NO: 104019 - DNA, 2514 bp, synthetic construct; identical to SEQ ID NO: 104017
  misc_feature 1..2514: note = Description of Artificial Sequence: Synthetic coding sequence
  source 1..2514: mol_type = other DNA

SEQ ID NO: 104020 - DNA, 2514 bp, synthetic construct; identical to SEQ ID NO: 104017
  misc_feature 1..2514: note = Description of Artificial Sequence: Synthetic coding sequence
  source 1..2514: mol_type = other DNA

SEQ ID NO: 104021 - DNA, 267 bp, synthetic construct
  misc_feature 1..267: note = Description of Artificial Sequence: Synthetic coding sequence
  source 1..267: mol_type = other DNA
atgagcctgagccacctgtacagagacggcgagggcagaatcgacgacgacgacgacgagagagagaacttcgagatcaccgactgggacctgcagaacgagttcaaccccaacagacagagacactggcagaccaaggaggaggccacctacggcgtgtgggccgagagagacagcgacgacgagagacccagcttcggcggcaagagagccagagactacagcgcccccgtgaacttcatcagcgccggcctgaagaagggctag

SEQ ID NO: 104022 - DNA, 261 bp, synthetic construct
  misc_feature 1..261: note = Description of Artificial Sequence: Synthetic coding sequence
  source 1..261: mol_type = other DNA
atgagcctgagccacctgtacagagacggcgagggcagaatcgacgacgacgacgacgagagagagaacttcgagatcaccgactgggacctgcagaacgagttcaaccccaacagacagagacactggcagaccaaggaggaggccacctacggcgtgtgggccgagagagacagcgacgacgagagacccagcttcggcggcaagagagccagagactacagcgcccccgtgaacttcatcagcgccggcctgaagtag

SEQ ID NO: 104023 - DNA, 129 bp, synthetic construct
  misc_feature 1..129: note = Description of Artificial Sequence: Synthetic coding sequence
  source 1..129: mol_type = other DNA
atgagcctgagccacctgtacagagacggcgagggcagaatcgacgacgacgacgacgagagagagaacttcgagatcaccgactgggacctgcagaacgagttcaaccccaacagacagagacactag

SEQ ID NO: 104024 - DNA, 1569 bp, synthetic construct
  misc_feature 1..1569: note = Description of Artificial Sequence: Synthetic coding sequence
  source 1..1569: mol_type = other DNA
atgagcctgagccacctgtacagagacggcgagggcagaatcgacgacgacgacgacgagagagagaacttcgagatcaccgactgggacctgcagaacgagttcaacctgttccacgagctggagaagatgaccgaggtgctggaccacgaggagagagtgatcagcaacctgagcaaggtgctggagatggtggaggagtgcgagagaagaatgcagcccgactgcagcaaccccctgaccctggacgagtgcgccagaatcttcgagaccctgcaggacaagtactacgaggagtacagaatgagcgacagagtggacctggccgtggccatcgtgtaccccctgatgaaggagtacttcaaggagtgggaccccctgaaggactgcacctacggcaccgagatcatcagcaagtggaagagcctgctggagaacgaccagctgctgagccacggcggccaggacctgagcgccgacgccttccacagactgatctgggaggtgtggatgcccttcgtgagaaacatcgtgacccagtggcagcccagaaactgcgaccccatggtggacttcctggacagctgggtgcacatcatccccgtgtggatcctggacaacatcctggaccagctgatcttccccaagctgcagaaggaggtggagaactggaaccccctgaccgacaccgtgcccatccacagctggatccacccctggctgcccctgatgcaggccagactggagcccctgtacagccccatcagaagcaagctgagcagcgccctgcagaagtggcaccccagcgacagcagcgccaagctgatcctgcagccctggaaggacgtgttcacccccggcagctgggaggccttcatggtgaagaacatcgtgcccaagctgggcatgtgcctgggcgagctggtgatcaacccccaccagcagcacatggacgccttctactgggtgatcgactgggagggcatgatcagcgtgagcagcctggtgggcctgctggagaagcacttcttccccaagtggctgcaggtgctgtgcagctggctgagcaacagccccaactacgaggagatcaccaagtggtacctgggctggaagagcatgttcagcgaccaggtgctggcccaccccagcgtgaaggacaagttcaacgaggccctggacatcatgaacagagccgtgagcagcaacgtgggcgcctacatgcagcccggcgccagagagaacatcgcctacctgacccacaccgagagaagaaaggacttccagtacgaggccatgcaggagagaagagaggccgagaacatggcccagagaggcatcggcgtggccgccagcagcgtgcccatgaacttcaaggacctgatcgagaccaaggccgaggagcacaacatcgtgttcatgcccgtgatcggcaagagacacgagggcaagcagctgtacaccttcggcagaatcgtgatctacatcgacagaggcgtggtgttcgtgcagggcgagaagacctgggtgcccaccagcctgcagagcctgatcgacatggccaagtag

SEQ ID NO: 104025 - DNA, 576 bp, synthetic construct
  misc_feature 1..576: note = Description of Artificial Sequence: Synthetic coding sequence
  source 1..576: mol_type = other DNA
tgaggcagaggcctgggcaagaacgcccagggcatcatcaaccccatcgaggccaagcagagaaagggcaagggcgccgtgggcgcctacggcagcgagagaaccacccagagcatgcaggacttccccgtggtggacagcgaggaggaggccgaggagtggctgttcctggccgccagcgactgcatcctgctggtgcaggagttccagaaggagctgagccagtggagaaaggaccccagcggcagcaagaagaagcccaagtacagctacaagaccgtggaggagctgaaggccaagggcagaatcagcaagaagctgaccgccccccagaaggagctgagccaggtgaaggtgatcgacatgaccggcagagagcagaaggtgtactacagctacagccagatcagccacaagcacaacgtgcccgacgacggcctgcccctgcagagccagcagctgccccagagcggcaaggaggccaaggcccccggcttcgccctgcccgagctggagcacaacctgcagctgctgatcgacctgaccgagcaggagatcatccagaacgacagatag

SEQ ID NO: 104026 - DNA, 366 bp, synthetic construct
  misc_feature 1..366: note = Description of Artificial Sequence: Synthetic coding sequence
  source 1..366: mol_type = other DNA
atgagcctgagccacctgtacagagacggcgagggcagaatcgacgacgacgacgacgagagagagaacttcgagatcaccgactgggacctgcagaacgagttcaaccccaacagacagagacactggcagaccaaggaggaggccacctacggcgtgtgggccgagagagacagcgacgacgagagacccagcttcggcggcaagagagccagagactacagcgcccccgtgaacttcatcagcgccggcctgaagaagggcgccgccgaggaggccgagctggaggacagcgacgacgaggagaagcccgtgaagcaggacgacttccccaaggacttcggccccagaaagctgaagacctag

SEQ ID NO: 104027 - DNA, 723 bp, synthetic construct
  misc_feature 1..723: note = Description of Artificial Sequence: Synthetic coding sequence
  source 1..723: mol_type = other DNA
atggaggagagcgtggtgagacccagcgtgttcgtggtggacggccagaccgacatccccttcaccagactgggcagaagccacagaagacagagctgcagcgtggccagagtgggcctgggcctgctgctgctgctgatgggcgccggcctggccgtgcagggctggttcctgctgcagctgcactggagactgggcgagatggtgaccagactgcccgacggccccgccggcagctgggagcagctgatccaggagagaagaagccacgaggtgaaccccgccgcccacctgaccggcgccaacagcagcctgaccggcagcggcggccccctgctgtgggagacccagctgggcctggccttcctgagaggcctgagctaccacgacggcgccctggtggtgaccaaggccggctactactacatctacagcaaggtgcagctgggcggcgtgggctgccccctgggcctggccagcaccatcacccacggcctgtacaagagaacccccagataccccgaggagctggagctgctggtgagccagcagagcccctgcggcagagccaccagcagcagcagagtgtggtgggacagcagcttcctgggcggcgtggtgcacctggaggccggcgagaaggtggtggtgagagtgctggacgagagactggtgagactgagagacggcaccagaagctacttcggcgccttcatggtgtag

SEQ ID NO: 104028 - DNA, 954 bp, synthetic construct
  misc_feature 1..954: note = Description of Artificial Sequence: Synthetic coding sequence
  source 1..954: mol_type = other DNA
atgagaagagccagcagagactacaccaagtacctgagaggcagcgaggagatgggcggcggccccggcgccccccacgagggccccctgcacgccccccccccccccgccccccaccagccccccgccgccagcagaagcatgttcgtggccctgctgggcctgggcctgggccaggtggtgtgcagcgtggccctgttcttctacttcagagcccagatggaccccaacagaatcagcgaggacggcacccactgcatctacagaatcctgagactgcacgagaacgccgacttccaggacaccaccctggagagccaggacaccaagctgatccccgacagctgcagaagaatcaagcaggccttccagggcgccgtgcagaaggagctgcagcacatcgtgggcagccagcacatcagagccgagaaggccatggtggacggcagctggctggacctggccaagagaagcaagctggaggcccagcccttcgcccacctgaccatcaacgccaccgacatccccagcggcagccacaaggtgagcctgagcagctggtaccacgacagaggctgggccaagatcagcaacatgaccttcagcaacggcaagctgatcgtgaaccaggacggcttctactacctgtacgccaacatctgcttcagacaccacgagaccagcggcgacctggccaccgagtacctgcagctgatggtgtacgtgaccaagaccagcatcaagatccccagcagccacaccctgatgaagggcggcagcaccaagtactggagcggcaacagcgagttccacttctacagcatcaacgtgggcggcttcttcaagctgagaagcggcgaggagatcagcatcgaggtgagcaaccccagcctgctggaccccgaccaggacgccacctacttcggcgccttcaaggtgagagacatcgactag

SEQ ID NO: 104029 - DNA, 735 bp, synthetic construct
  misc_feature 1..735: note = Description of Artificial Sequence: Synthetic coding sequence
  source 1..735: mol_type = other DNA
atggaccccaacagaatcagcgaggacggcacccactgcatctacagaatcctgagactgcacgagaacgccgacttccaggacaccaccctggagagccaggacaccaagctgatccccgacagctgcagaagaatcaagcaggccttccagggcgccgtgcagaaggagctgcagcacatcgtgggcagccagcacatcagagccgagaaggccatggtggacggcagctggctggacctggccaagagaagcaagctggaggcccagcccttcgcccacctgaccatcaacgccaccgacatccccagcggcagccacaaggtgagcctgagcagctggtaccacgacagaggctgggccaagatcagcaacatgaccttcagcaacggcaagctgatcgtgaaccaggacggcttctactacctgtacgccaacatctgcttcagacaccacgagaccagcggcgacctggccaccgagtacctgcagctgatggtgtacgtgaccaagaccagcatcaagatccccagcagccacaccctgatgaagggcggcagcaccaagtactggagcggcaacagcgagttccacttctacagcatcaacgtgggcggcttcttcaagctgagaagcggcgaggagatcagcatcgaggtgagcaaccccagcctgctggaccccgaccaggacgccacctacttcggcgccttcaaggtgagagacatcgactag

SEQ ID NO: 104030 - DNA, 735 bp, synthetic construct; identical to SEQ ID NO: 104029
  misc_feature 1..735: note = Description of Artificial Sequence: Synthetic coding sequence
  source 1..735: mol_type = other DNA

SEQ ID NO: 104031 - DNA, 735 bp, synthetic construct; identical to SEQ ID NO: 104029
  misc_feature 1..735: note = Description of Artificial Sequence: Synthetic coding sequence
  source 1..735: mol_type = other DNA

SEQ ID NO: 104032 - DNA, 735 bp, synthetic construct; identical to SEQ ID NO: 104029
  misc_feature 1..735: note = Description of Artificial Sequence: Synthetic coding sequence
  source 1..735: mol_type = other DNA

SEQ ID NO: 104033 - DNA, 750 bp, synthetic construct
  misc_feature 1..750: note = Description of Artificial Sequence: Synthetic coding sequence
  source 1..750: mol_type = other DNA
atggccgccagaagaagccagagaagaagaggcagaagaggcgagcccggcaccgccctgctggtgcccctggccctgggcctgggcctggccctggcctgcctgggcctgctgctggccgtggtgagcctgggcagcagagccagcctgagcgcccaggagcccgcccaggaggagctggtggccgaggaggaccaggaccccagcgagctgaacccccagaccgaggagagccaggaccccgcccccttcctgaacagactggtgagacccagaagaagcgcccccaagggcagaaagaccagagccagaagagccatcgccgcccactacgaggtgcaccccagacccggccaggacggcgcccaggccggcgtggacggcaccgtgagcggctgggaggaggccagaatcaacagcagcagccccctgagatacaacagacagatcggcgagttcatcgtgaccagagccggcctgtactacctgtactgccaggtgcacttcgacgagggcaaggccgtgtacctgaagctggacctgctggtggacggcgtgctggccctgagatgcctggaggagttcagcgccaccgccgccagcagcctgggcccccagctgagactgtgccaggtgagcggcctgctggccctgagacccggcagcagcctgagaatcagaaccctgccctgggcccacctgaaggccgcccccttcctgacctacttcggcctgttccaggtgcactag

SEQ ID NO: 104034 - DNA, 993 bp, synthetic construct
  misc_feature 1..993: note = Description of Artificial Sequence: Synthetic coding sequence
  source 1..993: mol_type = other DNA
atggccgccagaagaagccagagaagaagaggcagaagaggcgagcccggcaccgccctgctggtgcccctggccctgggcctgggcctggccctggcctgcctgggcctgctgctggccgtggtgagcctgggcagcagagccagcctgagcgcccaggagcccgcccaggaggagctggtggccgaggaggaccaggaccccagcgagctgaacccccagaccgaggagagccaggaccccgcccccttcctgaacagactggtgagacccagaagaagcgcccccaagggcagaaagaccagagccagaagagccatcgccgcccactacgaggtgcaccccagacccggccaggacggcgcccaggccggcgtggacggcaccgtgagcggctgggaggaggccagaatcaacagcagcagccccctgagatacaacagacagatcggcgagttcatcgtgaccagagccggcctgtactacctgtactgccagagcagcgacgccctggaggcctgggagaacggcgagagaagcagaaagagaagagccgtgctgacccagaagcagaagaagcagcacagcgtgctgcacctggtgcccatcaacgccaccagcaaggacgacagcgacgtgaccgaggtgatgtggcagcccgccctgagaagaggcagaggcctgcaggcccagggctacggcgtgagaatccaggacgccggcgtgtacctgctgtacagccaggtgctgttccaggacgtgaccttcaccatgggccaggtggtgagcagagagggccagggcagacaggagaccctgttcagatgcatcagaagcatgcccagccaccccgacagagcctacaacagctgctacagcgccggcgtgttccacctgcaccagggcgacatcctgagcgtgatcatccccagagccagagccaagctgaacctgagcccccacggcaccttcctgggcttcgtgaagctgtag

SEQ ID NO: 104035 - DNA, 723 bp, synthetic construct; identical to SEQ ID NO: 104027
  misc_feature 1..723: note = Description of Artificial Sequence: Synthetic coding sequence
  source 1..723: mol_type = other DNA

SEQ ID NO: 104036 - DNA, 615 bp, synthetic construct
  misc_feature 1..615: note = Description of Artificial Sequence: Synthetic coding sequence
  source 1..615: mol_type = other DNA
atggaggagagcgtggtgagacccagcgtgttcgtggtggacggccagaccgacatccccttcaccagactgggcagaagccacagaagacagagctgcagcgtggccagagacggccccgccggcagctgggagcagctgatccaggagagaagaagccacgaggtgaaccccgccgcccacctgaccggcgccaacagcagcctgaccggcagcggcggccccctgctgtgggagacccagctgggcctggccttcctgagaggcctgagctaccacgacggcgccctggtggtgaccaaggccggctactactacatctacagcaaggtgcagctgggcggcgtgggctgccccctgggcctggccagcaccatcacccacggcctgtacaagagaacccccagataccccgaggagctggagctgctggtgagccagcagagcccctgcggcagagccaccagcagcagcagagtgtggtgggacagcagcttcctgggcggcgtggtgcacctggaggccggcgagaaggtggtggtgagagtgctggacgagagactggtgagactgagagacggcaccagaagctacttcggcgccttcatggtgtag

SEQ ID NO: 104037 - DNA, 525 bp, synthetic construct
  misc_feature 1..525: note = Description of Artificial Sequence: Synthetic coding sequence
  source 1..525: mol_type = other DNA
atgagacacttcctgagcaaggtgtacagcttccccatgagaaagctgatcctgttcctggtgttccccgtggtgagacagacccccacccagcacttcaagaaccagttccccgccctgcactgggagcacgagctgggcctggccttcaccaagaacagaatgaactacaccaacaagttcctgctgatccccgagagcggcgactacttcatctacagccaggtgaccttcagaggcatgaccagcgagtgcagcgagatcagacaggccggcagacccaacaagcccgacagcatcaccgtggtgatcaccaaggtgaccgacagctaccccgagcccacccagctgctgatgggcaccaagagcgtgtgcgaggtgggcagcaactggttccagcccatctacctgggcgccatgttcagcctgcaggagggcgacaagctgatggtgaacgtgagcgacatcagcctggtggactacaccaaggaggacaagaccttcttcggcgccttcctgctgtag

SEQ ID NO: 104038 - DNA, 756 bp, synthetic construct
  misc_feature 1..756: note = Description of Artificial Sequence: Synthetic coding sequence
  source 1..756: mol_type = other DNA
atggccgaggacctgggcctgagcttcggcgagaccgccagcgtggagatgctgcccgagcacggcagctgcagacccaaggccagaagcagcagcgccagatgggccctgacctgctgcctggtgctgctgcccttcctggccggcctgaccacctacctgctggtgagccagctgagagcccagggcgaggcctgcgtgcagttccaggccctgaagggccaggagttcgcccccagccaccagcaggtgtacgcccccctgagagccgacggcgacaagcccagagcccacctgaccgtggtgagacagacccccacccagcacttcaagaaccagttccccgccctgcactgggagcacgagctgggcctggccttcaccaagaacagaatgaactacaccaacaagttcctgctgatccccgagagcggcgactacttcatctacagccaggtgaccttcagaggcatgaccagcgagtgcagcgagatcagacaggccggcagacccaacaagcccgacagcatcaccgtggtgatcaccaaggtgaccgacagctaccccgagcccacccagctgctgatgggcaccaagagcgtgtgcgaggtgggcagcaactggttccagcccatctacctgggcgccatgttcagcctgcaggagggcgacaagctgatggtgaacgtgagcgacatcagcctggtggactacaccaaggaggacaagaccttcttcggcgccttcctgctgtag

SEQ ID NO: 104039 - DNA, 534 bp, synthetic construct
  misc_feature 1..534: note = Description of Artificial Sequence: Synthetic coding sequence
  source 1..534: mol_type = other DNA
atgtgcctgagccacctggagaacatgcccctgagccacagcagaacccagggcgcccagagaagcagctggaagctgtggctgttctgcagcatcgtgatgctgctgttcctgtgcagcttcagctggctgatcttcatcttcctgcagctggagaccgccaaggagccctgcatggccaagttcggccccctgcccagcaagtggcagatggccagcagcgagcccccctgcgtgaacaaggtgagcgactggaagctggagatcctgcagaacggcctgtacctgatctacggccaggtggcccccaacgccaactacaacgacgtggcccccttcgaggtgagactgtacaagaacaaggacatgatccagaccctgaccaacaagagcaagatccagaacgtgggcggcacctacgagctgcacgtgggcgacaccatcgacctgatcttcaacagcgagcaccaggtgctgaagaacaacacctactggggcatcatcctgctggccaacccccagttcatcagctag

SEQ ID NO: 104040 - DNA, 600 bp, synthetic construct
  misc_feature 1..600: note = Description of Artificial Sequence: Synthetic coding sequence
  source 1..600: mol_type = other DNA
atgaccctgcaccccagccccatcacctgcgagttcctgttcagcaccgccctgatcagccccaagatgtgcctgagccacctggagaacatgcccctgagccacagcagaacccagggcgcccagagaagcagctggaagctgtggctgttctgcagcatcgtgatgctgctgttcctgtgcagcttcagctggctgatcttcatcttcctgcagctggagaccgccaaggagccctgcatggccaagttcggccccctgcccagcaagtggcagatggccagcagcgagcccccctgcgtgaacaaggtgagcgactggaagctggagatcctgcagaacggcctgtacctgatctacggccaggtggcccccaacgccaactacaacgacgtggcccccttcgaggtgagactgtacaagaacaaggacatgatccagaccctgaccaacaagagcaagatccagaacgtgggcggcacctacgagctgcacgtgggcgacaccatcgacctgatcttcaacagcgagcaccaggtgctgaagaacaacacctactggggcatcatcctgctggccaacccccagttcatcagctag

SEQ ID NO: 104041 - DNA, 552 bp, synthetic construct
  misc_feature 1..552: note = Description of Artificial Sequence: Synthetic coding sequence
  source 1..552: mol_type = other DNA
atggagagagtgcagcccctggaggagaacgtgggcaacgccgccagacccagattcgagagaaacaagctgctgctggtggccagcgtgatccagggcctgggcctgctgctgtgcttcacctacatctgcctgcacttcagcgccctgcaggtgagccacagataccccagaatccagagcatcaaggtgcagttcaccgagtacaagaaggagaagggcttcatcctgaccagccagaaggaggacgagatcatgaaggtgcagaacaacagcgtgatcatcaactgcgacggcttctacctgatcagcctgaagggctacttcagccaggaggtgaacatcagcctgcactaccagaaggacgaggagcccctgttccagctgaagaaggtgagaagcgtgaacagcctgatggtggccagcctgacctacaaggacaaggtgtacctgaacgtgaccaccgacaacaccagcctggacgacttccacgtgaacggcggcgagctgatcctgatccaccagaaccccggcgagttctgcgtgctgtag

SEQ ID NO: 104042 - DNA, 402 bp, synthetic construct
  misc_feature 1..402: note = Description of Artificial Sequence: Synthetic coding sequence
  source 1..402: mol_type = other DNA
atggtgagccacagataccccagaatccagagcatcaaggtgcagttcaccgagtacaagaaggagaagggcttcatcctgaccagccagaaggaggacgagatcatgaaggtgcagaacaacagcgtgatcatcaactgcgacggcttctacctgatcagcctgaagggctacttcagccaggaggtgaacatcagcctgcactaccagaaggacgaggagcccctgttccagctgaagaaggtgagaagcgtgaacagcctgatggtggccagcctgacctacaaggacaaggtgtacctgaacgtgaccaccgacaacaccagcctggacgacttccacgtgaacggcggcgagctgatcctgatccaccagaaccccggcgagttctgcgtgctgtag

SEQ ID NO: 104043 - DNA, 402 bp, synthetic construct; identical to SEQ ID NO: 104042
  misc_feature 1..402: note = Description of Artificial Sequence: Synthetic coding sequence
  source 1..402: mol_type = other DNA

SEQ ID NO: 104044 - DNA, 765 bp, synthetic construct
  misc_feature 1..765: note = Description of Artificial Sequence: Synthetic coding sequence
  source 1..765: mol_type = other DNA
atggagtacgccagcgacgccagcctggaccccgaggccccctggccccccgcccccagagccagagcctgcagagtgctgccctgggccctggtggccggcctgctgctgctgctgctgctggccgccgcctgcgccgtgttcctggcctgcccctgggccgtgagcggcgccagagccagccccggcagcgccgccagccccagactgagagagggccccgagctgagccccgacgaccccgccggcctgctggacctgagacagggcatgttcgcccagctggtggcccagaacgtgctgctgatcgacggccccctgagctggtacagcgaccccggcctggccggcgtgagcctgaccggcggcctgagctacaaggaggacaccaaggagctggtggtggccaaggccggcgtgtactacgtgttcttccagctggagctgagaagagtggtggccggcgagggcagcggcagcgtgagcctggccctgcacctgcagcccctgagaagcgccgccggcgccgccgccctggccctgaccgtggacctgccccccgccagcagcgaggccagaaacagcgccttcggcttccagggcagactgctgcacctgagcgccggccagagactgggcgtgcacctgcacaccgaggccagagccagacacgcctggcagctgacccagggcgccaccgtgctgggcctgttcagagtgacccccgagatccccgccggcctgcccagccccagaagcgagtag

SEQ ID NO: 104045 - DNA, 1851 bp, synthetic construct
  misc_feature 1..1851: note = Description of Artificial Sequence: Synthetic coding sequence
  source 1..1851: mol_type = other DNA
atggcccccagagccagaagaagaagacccctgttcgccctgctgctgctgtgcgccctgctggccagactgcaggtggccctgcagatcgcccccccctgcaccagcgagaagcactacgagcacctgggcagatgctgcaacaagtgcgagcccggcaagtacatgagcagcaagtgcaccaccaccagcgacagcgtgtgcctgccctgcggccccgacgagtacctggacagctggaacgaggaggacaagtgcctgctgcacaaggtgtgcgacaccggcaaggccctggtggccgtggtggccggcaacagcaccacccccagaagatgcgcctgcaccgccggctaccactggagccaggactgcgagtgctgcagaagaaacaccgagtgcgcccccggcctgggcgcccagcaccccctgcagctgaacaaggacaccgtgtgcaagccctgcctggccggctacttcagcgacgccttcagcagcaccgacaagtgcagaccctggaccaactgcaccttcctgggcaagagagtggagcaccacggcaccgagaagagcgacgccgtgtgcagcagcagcctgcccgccagaaagccccccaacgagccccacgtgtacctgcccggcctgatcatcctgctgctgttcgccagcgtggccctggtggccgccatcatcttcggcgtgtgctacagaaagaagggcaaggccctgaccgccaacctgtggcactggatcaacgaggcctgcggcagactgagcggcgacaaggagagcagcggcgacagctgcgtgagcacccacaccgccaacttcggccagcagggcgcctgcgagggcgtgctgctgctgaccctggaggagaagaccttccccgaggacatgtgctaccccgaccagggcggcgtgtgccagggcacctgcgtgggcggcggcccctacgcccagggcgaggacgccagaatgctgagcctggtgagcaagaccgagatcgaggaggacagcttcagacagatgcccaccgaggacgagtacatggacagacccagccagcccaccgaccagctgctgttcctgaccgagcccggcagcaagagcaccccccccttcagcgagcccctggaggtgggcgagaacgacagcctgagccagtgcttcaccggcacccagagcaccgtgggcagcgagagctgcaactgcaccgagcccctgtgcagaaccgactggacccccatgagcagcgagaactacctgcagaaggaggtggacagcggccactgcccccactgggccgccagccccagccccaactgggccgacgtgtgcaccggctgcagaaacccccccggcgaggactgcgagcccctggtgggcagccccaagagaggccccctgccccagtgcgcctacggcatgggcctgccccccgaggaggaggccagcagaaccgaggccagagaccagcccgaggacggcgccgacggcagactgcccagcagcgccagagccggcgccggcagcggcagcagccccggcggccagagccccgccagcggcaacgtgaccggcaacagcaacagcaccttcatcagcagcggccaggtgatgaacttcaagggcgacatcatcgtggtgtacgtgagccagaccagccaggagggcgccgccgccgccgccgagcccatgggcagacccgtgcaggaggagaccctggccagaagagacagcttcgccggcaacggccccagattccccgacccctgcggcggccccgagggcctgagagagcccgagaaggccagcagacccgtgcaggagcagggcggcgccaaggcctag

SEQ ID NO: 104046 - DNA, 780 bp, synthetic construct
  misc_feature 1..780: note = Description of Artificial Sequence: Synthetic coding sequence
  source 1..780: mol_type = other DNA
atggccagaatccccaagaccctgaagttcgtggtggtgatcgtggccgtgctgctgcccgtgctggcctacagcgccaccaccgccagacaggaggaggtgccccagcagaccgtggccccccagcagcagagacacagcttcaagggcgaggagtgccccgccggcagccacagaagcgagcacaccggcgcctgcaacccctgcaccgagggcgtggactacaccaacgccagcaacaacgagcccagctgcttcccctgcaccgtgtgcaagagcgaccagaagcacaagagcagctgcaccatgaccagagacaccgtgtgccagtgcaaggagggcaccttcagaaacgagaacagccccgagatgtgcagaaagtgcagcagatgccccagcggcgaggtgcaggtgagcaactgcaccagctgggacgacatccagtgcgtggaggagttcggcgccaacgccaccgtggagacccccgccgccgaggagaccatgaacaccagccccggcacccccgcccccgccgccgaggagaccatgaacaccagccccggcacccccgcccccgccgccgaggagaccatgaccaccagccccggcacccccgcccccgccgccgaggagaccatgaccaccagccccggcacccccgcccccgccgccgaggagaccatgatcaccagccccggcacccccgccagcagccactacctgagctgcaccatcgtgggcatcatcgtgctgatcgtgctgctgatcgtgttcgtgtag

SEQ ID NO: 104047 - DNA, 474 bp, synthetic construct
  misc_feature 1..474: note = Description of Artificial Sequence: Synthetic coding sequence
  source 1..474: mol_type = other DNA
atgaccagagacaccgtgtgccagtgcaaggagggcaccttcagaaacgagaacagccccgagatgtgcagaaagtgcagcagatgccccagcggcgaggtgcaggtgagcaactgcaccagctgggacgacatccagtgcgtggaggagttcggcgccaacgccaccgtggagacccccgccgccgaggagaccatgaacaccagccccggcacccccgcccccgccgccgaggagaccatgaacaccagccccggcacccccgcccccgccgccgaggagaccatgaccaccagccccggcacccccgcccccgccgccgaggagaccatgaccaccagccccggcacccccgcccccgccgccgaggagaccatgatcaccagccccggcacccccgccagcagccactacctgagctgcaccatcgtgggcatcatcgtgctgatcgtgctgctgatcgtgttcgtgtag

SEQ ID NO: 104048 - DNA, 834 bp, synthetic construct
  misc_feature 1..834: note = Description of Artificial Sequence: Synthetic coding sequence
  source 1..834: mol_type = other DNA
atggccagaatccccaagaccctgaagttcgtggtggtgatcgtggccgtgctgctgcccgtgctggcctacagcgccaccaccgccagacaggaggaggtgccccagcagaccgtggccccccagcagcagagacacagcttcaagggcgaggagtgccccgccggcagccacagaagcgagcacaccggcgcctgcaacccctgcaccgagggcgtggactacaccaacgccagcaacaacgagcccagctgcttcccctgcaccgtgtgcaagagcgaccagaagcacaagagcagctgcaccatgaccagagacaccgtgtgccagtgcaaggagggcaccttcagaaacgagaacagccccgagatgtgcagaaagtgcagcagatgccccagcggcgaggtgcaggtgagcaactgcaccagctgggacgacatccagtgcgtggaggagttcggcgccaacgccaccgtggagacccccgccgccgaggagaccatgaacaccagccccggcacccccgcccccgccgccgaggagaccatgaacaccagccccggcacccccgcccccgccgccgaggagaccatgaccaccagccccggcacccccgcccccgccgccgaggagaccatgaccaccagccccggcacccccgcccccgccgccgaggagaccatgatcaccagccccggcacccccgccagcagccactacctgagctgcaccatcgtgggcatcatcgtgctgatcgtgctgctgatcgtgccctacctgaagaagaagaagaagaagaagctgaagaagaagcagaagagaaagagcaagtag

SEQ ID NO: 104049 - DNA, 1851 bp, synthetic construct; identical to SEQ ID NO: 104045
  misc_feature 1..1851: note = Description of Artificial Sequence: Synthetic coding sequence
  source 1..1851: mol_type = other DNA

SEQ ID NO: 104050 - DNA, 966 bp, synthetic construct
  misc_feature 1..966: note = Description of Artificial Sequence: Synthetic coding sequence
  source 1..966: mol_type = other DNA
ggcagcagagccagatgggccaccgaggccgccgaggccgccgcccccgccagcctgagcagagccatggcccccagagccagaagaagaagacccctgttcgccctgctgctgctgtgcgccctgctggccagactgcaggtggccctgcagatcgcccccccctgcaccagcgagaagcactacgagcacctgggcagatgctgcaacaagtgcgagcccggcaagtacatgagcagcaagtgcaccaccaccagcgacagcgtgtgcctgccctgcggccccgacgagtacctggacagctggaacgaggaggacaagtgcctgctgcacaaggtgtgcgacaccggcaaggccctggtggccgtggtggccggcaacagcaccacccccagaagatgcgcctgcaccgccggctaccactggagccaggactgcgagtgctgcagaagaaacaccgagtgcgcccccggcctgggcgcccagcaccccctgcagctgaacaaggacaccgtgtgcaagccctgcctggccggctacttcagcgacgccttcagcagcaccgacaagtgcagaccctggaccaactgcaccttcctgggcaagagagtggagcaccacggcaccgagaagagcgacgccgtgtgcagcagcagcctgcccgccagaaagccccccaacggcaacgtgaccggcaacagcaacagcaccttcatcagcagcggccaggtgatgaacttcaagggcgacatcatcgtggtgtacgtgagccagaccagccaggagggcgccgccgccgccgccgagcccatgggcagacccgtgcaggaggagaccctggccagaagagacagcttcgccggcaacggccccagattccccgacccctgcggcggccccgagggcctgagagagcccgagaaggccagcagacccgtgcaggagcagggcggcgccaaggcctag

SEQ ID NO: 104051 - DNA, 1206 bp, synthetic construct
  misc_feature 1..1206: note = Description of Artificial Sequence: Synthetic coding sequence
  source 1..1206: mol_type = other DNA
atgaacaacctgctgtgctgcgccctggtgttcctggacatcagcatcaagtggaccacccaggagaccttcccccccaagtacctgcactacgacgaggagaccagccaccagctgctgtgcgacaagtgcccccccggcacctacctgaagcagcactgcaccgccaagtggaagaccgtgtgcgccccctgccccgaccactactacaccgacagctggcacaccagcgacgagtgcctgtactgcagccccgtgtgcaaggagctgcagtacgtgaagcaggagtgcaacagaacccacaacagagtgtgcgagtgcaaggagggcagatacctggagatcgagttctgcctgaagcacagaagctgcccccccggcttcggcgtggtgcaggccggcacccccgagagaaacaccgtgtgcaagagatgccccgacggcttcttcagcaacgagaccagcagcaaggccccctgcagaaagcacaccaactgcagcgtgttcggcctgctgctgacccagaagggcaacgccacccacgacaacatctgcagcggcaacagcgagagcacccagaagtgcggcatcgacgtgaccctgtgcgaggaggccttcttcagattcgccgtgcccaccaagttcacccccaactggctgagcgtgctggtggacaacctgcccggcaccaaggtgaacgccgagagcgtggagagaatcaagagacagcacagcagccaggagcagaccttccagctgctgaagctgtggaagcaccagaacaaggaccaggacatcgtgaagaagatcatccaggacatcgacctgtgcgagaacagcgtgcagagacacatcggccacgccaacctgaccttcgagcagctgagaagcctgatggagagcctgcccggcaagaaggtgggcgccgaggacatcgagaagaccatcaaggcctgcaagcccagcgaccagatcctgaagctgctgagcctgtggagaatcaagaacggcgaccaggacaccctgaagggcctgatgcacgccctgaagcacagcaagacctaccacttccccaagaccgtgacccagagcctgaagaagaccatcagattcctgcacagcttcaccatgtacaagctgtaccagaagctgttcctggagatgatcggcaaccaggtgcagagcgtgaagatcagctgcctgtag

SEQ ID NO: 104052 - DNA, 390 bp, synthetic construct
  misc_feature 1..390: note = Description of Artificial Sequence: Synthetic coding sequence
  source 1..390: mol_type = other DNA
atggccagaggcagcctgagaagactgctgagactgctggtgctgggcctgtggctggccctgctgagaagcgtggccggcgagcaggcccccggcaccgccccctgcagcagaggcagcagctggagcgccgacctggacaagtgcatggactgcgccagctgcagagccagaccccacagcgacttctgcctgggctgcgccgccgccccccccgcccccttcagactgctgtggcccatcctgggcggcgccctgagcctgaccttcgtgctgggcctgctgagcggcttcctggtgtggagaagatgcagaagaagagagaagttcaccacccccatcgaggagaccggcggcgagggctgccccgccgtggccctgatccagtag

SEQ ID NO: 104053 - DNA, 285 bp, synthetic construct
  misc_feature 1..285: note = Description of Artificial Sequence: Synthetic coding sequence
  source 1..285: mol_type = other DNA
atggccagaggcagcctgagaagactgctgagactgctggtgctgggcctgtggctggccctgctgagaagcgtggccggcgagcaggcccccggcgccgccgccccccccgcccccttcagactgctgtggcccatcctgggcggcgccctgagcctgaccttcgtgctgggcctgctgagcggcttcctggtgtggagaagatgcagaagaagagagaagttcaccacccccatcgaggagaccggcggcgagggctgccccgccgtggccctgatccagtag

SEQ ID NO: 104054 - DNA, 882 bp, synthetic construct
  misc_feature 1..882: note = Description of Artificial Sequence: Synthetic coding sequence
  source 1..882: mol_type = other DNA
atgagcggcctgggcagaagcagaagaggcggcagaagcagagtggaccaggaggagagattcccccagggcctgtggaccggcgtggccatgagaagctgccccgaggagcagtactgggaccccctgctgggcacctgcatgagctgcaagaccatctgcaaccaccagagccagagaacctgcgccgccttctgcagaagcctgagctgcagaaaggagcagggcaagttctacgaccacctgctgagagactgcatcagctgcgccagcatctgcggccagcaccccaagcagtgcgcctacttctgcgagaacaagctgagaagccccgtgaacctgccccccgagctgagaagacagagaagcggcgaggtggagaacaacagcgacaacagcggcagataccagggcctggagcacagaggcagcgaggccagccccgccctgcccggcctgaagctgagcgccgaccaggtggccctggtgtacagcaccctgggcctgtgcctgtgcgccgtgctgtgctgcttcctggtggccgtggcctgcttcctgaagaagagaggcgacccctgcagctgccagcccagaagcagacccagacagagccccgccaagagcagccaggaccacgccatggaggccggcagccccgtgagcaccagccccgagcccgtggagacctgcagcttctgcttccccgagtgcagagcccccacccaggagagcgccgtgacccccggcacccccgaccccacctgcgccggcagatggggctgccacaccagaaccaccgtgctgcagccctgcccccacatccccgacagcggcctgggcatcgtgtgcgtgcccgcccaggagggcggccccggcgcctag

SEQ ID NO: 104055 - DNA, 747 bp, synthetic construct
  misc_feature 1..747: note = Description of Artificial Sequence: Synthetic coding sequence
  source 1..747: mol_type = other DNA
atgagcggcctgggcagaagcagaagaggcggcagaagcagagtggaccaggaggagagatggagcctgagctgcagaaaggagcagggcaagttctacgaccacctgctgagagactgcatcagctgcgccagcatctgcggccagcaccccaagcagtgcgcctacttctgcgagaacaagctgagaagccccgtgaacctgccccccgagctgagaagacagagaagcggcgaggtggagaacaacagcgacaacagcggcagataccagggcctggagcacagaggcagcgaggccagccccgccctgcccggcctgaagctgagcgccgaccaggtggccctggtgtacagcaccctgggcctgtgcctgtgcgccgtgctgtgctgcttcctggtggccgtggcctgcttcctgaagaagagaggcgacccctgcagctgccagcccagaagcagacccagacagagccccgccaagagcagccaggaccacgccatggaggccggcagccccgtgagcaccagccccgagcccgtggagacctgcagcttctgcttccccgagtgcagagcccccacccaggagagcgccgtgacccccggcacccccgaccccacctgcgccggcagaaagaccaagcccccccccgtgctgaccgccggcaactgcggcgtgcacagacccccccccgagaccagcaccggcagccccagaggccagagactgctgtggacccagtag

SEQ ID NO: 104056 - DNA, 555 bp, synthetic construct
  misc_feature 1..555: note = Description of Artificial Sequence: Synthetic coding sequence
  source 1..555: mol_type = other DNA
atgagaagaggccccagaagcctgagaggcagagacgcccccgcccccaccccctgcgtgcccgccgagtgcttcgacctgctggtgagacactgcgtggcctgcggcctgctgagaacccccagacccaagcccgccggcgccagcagccccgcccccagaaccgccctgcagccccaggagagcgtgggcgccggcgccggcgaggccgccctgcccctgcccggcctgctgttcggcgcccccgccctgctgggcctggccctggtgctggccctggtgctggtgggcctggtgagctggagaagaagacagagaagactgagaggcgccagcagcgccgaggcccccgacggcgacaaggacgcccccgagcccctggacaaggtgatcatcctgagccccggcatcagcgacgccaccgcccccgcctggcccccccccggcgaggaccccggcaccaccccccccggccacagcgtgcccgtgcccgccaccgagctgggcagcaccgagctggtgaccaccaagaccgccggccccgagcagcagtag

SEQ ID NO: 104057 - DNA, 852 bp, synthetic construct
  misc_feature 1..852: note = Description of Artificial Sequence: Synthetic coding sequence
  source 1..852: mol_type = other DNA
atggagccccccggcgactggggcccccccccctggagaagcacccccaagaccgacgtgctgagactggtgctgtacctgaccttcctgggcgccccctgctacgcccccgccctgcccagctgcaaggaggacgagtaccccgtgggcagcgagtgctgccccaagtgcagccccggctacagagtgaaggaggcctgcggcgagctgaccggcaccgtgtgcgagccctgcccccccggcacctacatcgcccacctgaacggcctgagcaagtgcctgcagtgccagatgtgcgaccccgccatgggcctgagagccagcagaaactgcagcagaaccgagaacgccgtgtgcggctgcagccccggccacttctgcatcgtgcaggacggcgaccactgcgccgcctgcagagcctacgccaccagcagccccggccagagagtgcagaagggcggcaccgagagccaggacaccctgtgccagaactgcccccccggcaccttcagccccaacggcaccctggaggagtgccagcaccagaccaagtgcagctggctggtgaccaaggccggcgccggcaccagcagcagccactgggtgtggtggttcctgagcggcagcctggtgatcgtgatcgtgtgcagcaccgtgggcctgatcatctgcgtgaagagaagaaagcccagaggcgacgtggtgaaggtgatcgtgagcgtgcagagaaagagacaggaggccgagggcgaggccaccgtgatcgaggccctgcaggccccccccgacgtgaccaccgtggccgtggaggagaccatccccagcttcaccggcagaagccccaaccactag

SEQ ID NO: 104058 - DNA, 522 bp, synthetic construct
  misc_feature 1..522: note = Description of Artificial Sequence: Synthetic coding sequence
  source 1..522: mol_type = other DNA
atggagccccccggcgactggggcccccccccctggagaagcacccccaagaccgacgtgctgagactggtgctgtacctgaccttcctgggcgccccctgctacgcccccgccctgcccagctgcaaggaggacgagtaccccgtgggcagcgagtgctgccccaagtgcagccccggctacagagtgaaggaggcctgcggcgagctgaccggcaccgtgtgcgagccctgcccccccggcacctacatcgcccacctgaacggcctgagcaagtgcctgcagtgccagatgtgcgaccccgacatcggcagcccctgcgacctgagaggcagaggccacctggaggccggcgcccacctgagccccggcagacagaagggcgagcccgaccccgaggtggccttcgagagcctgagcgccgagccccacgccagactgagcatggccagcgccccctgcggccaggccggcctgcacctgagagacagagccgacggcacccccggcggcagagcctag

SEQ ID NO: 104059 - DNA, 552 bp, synthetic construct
  misc_feature 1..552: note = Description of Artificial Sequence: Synthetic coding sequence
  source 1..552: mol_type = other DNA
atggagccccccggcgactggggcccccccccctggagaagcacccccaagaccgacgtgctgagactggtgctgtacctgaccttcctgggcgccccctgctacgcccccgccctgcccagctgcaaggaggacgagtaccccgtgggcagcgagtgctgccccaagtgcagccccggctacagagtgaaggaggcctgcggcgagctgaccggcaccgtgtgcgagccctgcccccccggcacctacatcgcccacctgaacggcctgagcaagtgcctgcagtgccagatgtgcgaccccgccatgggcctgagagccagcagaaactgcagcagaaccgagaacgccgtgtgcggctgcagccccggccacttctgcatcgtgcaggacggcgaccactgcgccgcctgcagagcctacgccaccagcagccccggccagagagtgcagaagggcggcaccgagagccaggacaccctgtgccagaactgcccccccggcaccttcagccccaacggcaccctggaggagtgccagcaccagacctag

SEQ ID NO: 104060 - DNA, 696 bp, synthetic construct
  misc_feature 1..696: note = Description of Artificial Sequence: Synthetic coding sequence
  source 1..696: mol_type = other DNA
atggagccccccggcgactggggcccccccccctggagaagcacccccaagaccgacgtgctgagactggtgctgtacctgaccttcctgggcgccccctgctacgcccccgccctgcccagctgcaaggaggacgagtaccccgtgggcagcgagtgctgccccaagtgcagccccggctacagagtgaaggaggcctgcggcgagctgaccggcaccgtgtgcgagccctgcccccccggcacctacatcgcccacctgaacggcctgagcaagtgcctgcagtgccagatgtgcgaccccgccatgggcctgagagccagcagaaactgcagcagaaccgagaacgccgtgtgcggctgcagccccggccacttctgcatcgtgcaggacggcgaccactgcgccgcctgcagagcctacgccaccagcagccccggccagagagtgcagaagggcggcaccgagagccaggacaccctgtgccagaactgcccccccggcaccttcagccccaacggcaccctggaggagtgccagcaccagaccaagtgcagctggctggtgaccaaggccggcgccggcaccagcagcagccactgggtgtggtggttcctgagcggcagcctggtgatcgtgatcgtgtgcagcaccgtgggcctgatcatctgcgtgaagagaagaaagcccagatag

SEQ ID NO: 104061 - DNA, 696 bp, synthetic construct; identical to SEQ ID NO: 104060
  misc_feature 1..696: note = Description of Artificial Sequence: Synthetic coding sequence
  source 1..696: mol_type = other DNA

SEQ ID NO: 104062 - DNA, 696 bp, synthetic construct; identical to SEQ ID NO: 104060
  misc_feature 1..696: note = Description of Artificial Sequence: Synthetic coding sequence
  source 1..696: mol_type = other DNA

SEQ ID NO: 104063 - DNA, 555 bp, synthetic construct
  misc_feature 1..555: note = Description of Artificial Sequence: Synthetic coding sequence
  source 1..555: mol_type = other DNA
atgctgcagatggccggccagtgcagccagaacgagtacttcgacagcctgctgcacgcctgcatcccctgccagctgagatgcagcagcaacaccccccccctgacctgccagagatactgcaacgccagcgtgaccaacagcgtgaagggcaccaacgccatcctgtggacctgcctgggcctgagcctgatcatcagcctggccgtgttcgtgctgatgttcctgctgagaaagatcaacagcgagcccctgaaggacgagttcaagaacaccggcagcggcctgctgggcatggccaacatcgacctggagaagagcagaaccggcgacgagatcatcctgcccagaggcctggagtacaccgtggaggagtgcacctgcgaggactgcatcaagagcaagcccaaggtggacagcgaccactgcttccccctgcccgccatggaggagggcgccaccatcctggtgaccaccaagaccaacgactactgcaagagcctgcccgccgccctgagcgccaccgagatcgagaagagcatcagcgccagatag

SEQ ID NO: 104064 - DNA, 408 bp, synthetic construct
  misc_feature 1..408: note = Description of Artificial Sequence: Synthetic coding sequence
  source 1..408: mol_type = other DNA
atgctgcagatggccggccagtgcagccagaacgagtacttcgacagcctgctgcacgcctgcatcccctgccagctgagatgcagcagcaacaccccccccctgacctgccagagatactgcaacgccagaagcggcctgctgggcatggccaacatcgacctggagaagagcagaaccggcgacgagatcatcctgcccagaggcctggagtacaccgtggaggagtgcacctgcgaggactgcatcaagagcaagcccaaggtggacagcgaccactgcttccccctgcccgccatggaggagggcgccaccatcctggtgaccaccaagaccaacgactactgcaagagcctgcccgccgccctgagcgccaccgagatcgagaagagcatcagcgccagatag

SEQ ID NO: 104065 - DNA, 417 bp, synthetic construct
  misc_feature 1..417: note = Description of Artificial Sequence: Synthetic coding sequence
  source 1..417: mol_type = other DNA
atggccggccagtgcagccagaacgagtacttcgacagcctgctgcacgcctgcatcccctgccagctgagatgcagcagcaacaccccccccctgacctgccagagatactgcaacgccagcgtgaccaacagcgtgaagggcaccaacgccatcctgtggacctgcctgggcctgagcctgatcatcagcctggccgtgttcgtgctgatgttcctgctgagaaagatcaacagcgagcccctgaaggacgagttcaagaacaccgagatggagagcagaagcgtggcccaggccggcgtgcagtggagagacctgaacagcctgcagcccctgcccctgggcttcaagcagttcagccacctgagcctgctgagcaactgggactacagaatcagaagccccggccacggctag

SEQ ID NO: 104066 - DNA, 768 bp, synthetic construct
  misc_feature 1..768: note = Description of Artificial Sequence: Synthetic coding sequence
  source 1..768: mol_type = other DNA
atggcccagcacggcgccatgggcgccttcagagccctgtgcggcctggccctgctgtgcgccctgagcctgggccagagacccaccggcggccccggctgcggccccggcagactgctgctgggcaccggcaccgacgccagatgctgcagagtgcacaccaccagatgctgcagagactaccccggcgaggagtgctgcagcgagtgggactgcatgtgcgtgcagcccgagttccactgcggcgacccctgctgcaccacctgcagacaccacccctgcccccccggccagggcgtgcagagccagggcaagttcagcttcggcttccagtgcatcgactgcgccagcggcaccttcagcggcggccacgagggccactgcaagccctggaccgactgctgctggagatgcagaagaagacccaagacccccgaggccgccagcagccccagaaagagcggcgccagcgacagacagagaagaagaggcggctgggagacctgcggctgcgagcccggcagaccccccggcccccccaccgccgccagccccagccccggcgccccccaggccgccggcgccctgagaagcgccctgggcagagccctgctgccctggcagcagaagtgggtgcaggagggcggcagcgaccagagacccggcccctgcagcagcgccgccgccgccggcccctgcagaagagagagagagacccagagctggccccccagcagcctggccggccccgacggcgtgggcagctag

SEQ ID NO: 104067 - DNA, 705 bp, synthetic construct
  misc_feature 1..705: note = Description of Artificial Sequence: Synthetic coding sequence
  source 1..705: mol_type = other DNA
atggcccagcacggcgccatgggcgccttcagagccctgtgcggcctggccctgctgtgcgccctgagcctgggccagagacccaccggcggccccggctgcggccccggcagactgctgctgggcaccggcaccgacgccagatgctgcagagtgcacaccaccagatgctgcagagactaccccggcgaggagtgctgcagcgagtgggactgcatgtgcgtgcagcccgagttccactgcggcgacccctgctgcaccacctgcagacaccacccctgcccccccggccagggcgtgcagagccagggcaagttcagcttcggcttccagtgcatcgactgcgccagcggcaccttcagcggcggccacgagggccactgcaagccctggaccgactgcacccagttcggcttcctgaccgtgttccccggcaacaagacccacaacgccgtgtgcgtgcccggcagcccccccgccgagcccctgggctggctgaccgtggtgctgctggccgtggccgcctgcgtgctgctgctgaccagcgcccagctgggcctgcacatctggcagctgagaaagacccagctgctgctggaggtgccccccagcaccgaggacgccagaagctgccagttccccgaggaggagagaggcgagagaagcgccgaggagaagggcagactgggcgacctgtgggtgtag

SEQ ID NO: 104068 - DNA, 726 bp, synthetic construct
  misc_feature 1..726: note = Description of Artificial Sequence: Synthetic coding sequence
  source 1..726: mol_type = other DNA
atggcccagcacggcgccatgggcgccttcagagccctgtgcggcctggccctgctgtgcgccctgagcctgggccagagacccaccggcggccccggctgcggccccggcagactgctgctgggcaccggcaccgacgccagatgctgcagagtgcacaccaccagatgctgcagagactaccccggcgaggagtgctgcagcgagtgggactgcatgtgcgtgcagcccgagttccactgcggcgacccctgctgcaccacctgcagacaccacccctgcccccccggccagggcgtgcagagccagggcaagttcagcttcggcttccagtgcatcgactgcgccagcggcaccttcagcggcggccacgagggccactgcaagccctggaccgactgcacccagttcggcttcctgaccgtgttccccggcaacaagacccacaacgccgtgtgcgtgcccggcagcccccccgccgagcccctgggctggctgaccgtggtgctgctggccgtggccgcctgcgtgctgctgctgaccagcgcccagctgggcctgcacatctggcagctgagaagccagtgcatgtggcccagagagacccagctgctgctggaggtgccccccagcaccgaggacgccagaagctgccagttccccgaggaggagagaggcgagagaagcgccgaggagaagggcagactgggcgacctgtgggtgtag

SEQ ID NO: 104069 - DNA, 834 bp, synthetic construct
  misc_feature 1..834: note = Description of Artificial Sequence: Synthetic coding sequence
  source 1..834: mol_type = other DNA
atgtgcgtgggcgccagaagactgggcagaggcccctgcgccgccctgctgctgctgggcctgggcctgagcaccgtgaccggcctgcactgcgtgggcgacacctaccccagcaacgacagatgctgccacgagtgcagacccggcaacggcatggtgagcagatgcagcagaagccagaacaccgtgtgcagaccctgcggccccggcttctacaacgacgtggtgagcagcaagccctgcaagccctgcacctggtgcaacctgagaagcggcagcgagagaaagcagctgtgcaccgccacccaggacaccgtgtgcagatgcagagccggcacccagcccctggacagctacaagcccggcgtggactgcgccccctgcccccccggccacttcagccccggcgacaaccaggcctgcaagccctggaccaactgcaccctggccggcaagcacaccctgcagcccgccagcaacagcagcgacgccatctgcgaggacagagacccccccgccacccagccccaggagacccagggcccccccgccagacccatcaccgtgcagcccaccgaggcctggcccagaaccagccagggccccagcaccagacccgtggaggtgcccggcggcagagccgtggccgccatcctgggcctgggcctggtgctgggcctgctgggccccctggccatcctgctggccctgtacctgctgagaagagaccagagactgccccccgacgcccacaagccccccggcggcggcagcttcagaacccccatccaggaggagcaggccgacgcccacagcaccctggccaagatctag

SEQ ID NO: 104070 - DNA, 399 bp, synthetic construct
  misc_feature 1..399: note = Description of Artificial Sequence: Synthetic coding sequence
  source 1..399: mol_type = other DNA
tgacccggcgccccccccctgccccccggcgcccagaccagacccagacccagaggcgtgggcgagaccaccctggccatgtggcccggcctggccggcctgagcagaagcggcagcgagagaaagcagctgtgcaccgccacccaggacaccgtgtgcagatgcagagccggcacccagcccctggacagctacaagcccggcgtggactgcgccccctgcccccccggccacttcagccccggcgacaaccaggcctgcaagccctggaccaactgcaccctggccggcaagcacaccctgcagcccgccagcaacagcagcgacgccatctgcgaggacagagacccccccgccacccagccccaggagacccagggcccccccgccagaccctag

SEQ ID NO: 104071 - DNA, 423 bp, synthetic construct
  misc_feature 1..423: note = Description of Artificial Sequence: Synthetic coding sequence
  source 1..423: mol_type = other DNA
atgagagccctggagggccccggcctgagcctgctgtgcctggtgctggccctgcccgccctgctgcccgtgcccgccgtgagaggcgtggccgagacccccacctacccctggagagacgccgagaccggcgagagactggtgtgcgcccagtgcccccccggcaccttcgtgcagagaccctgcagaagagacagccccaccacctgcggcccctgcccccccagacactacacccagttctggaactacctggagagatgcagatactgcaacgtgctgtgcggcgagagagaggaggaggccagagcctgccacgccacccacaacagagcctgctgcggctgctgcagaagatgcgcctggcccggctgccccggctggagcggcgccagcgtgagcgccagcagcctgtgcacctag

SEQ ID NO: 104072 - DNA, 903 bp, synthetic construct
  misc_feature 1..903: note = Description of Artificial Sequence: Synthetic coding sequence
  source 1..903: mol_type = other DNA
atgagagccctggagggccccggcctgagcctgctgtgcctggtgctggccctgcccgccctgctgcccgtgcccgccgtgagaggcgtggccgagacccccacctacccctggagagacgccgagaccggcgagagactggtgtgcgcccagtgcccccccggcaccttcgtgcagagaccctgcagaagagacagccccaccacctgcggcccctgcccccccagacactacacccagttctggaactacctggagagatgcagatactgcaacgtgctgtgcggcgagagagaggaggaggccagagcctgccacgccacccacaacagagcctgcagatgcagaaccggcttcttcgcccacgccggcttctgcctggagcacgccagctgcccccccggcgccggcgtgatcgcccccggcacccccagccagaacacccagtgccagccctgcccccccggcaccttcagcgccagcagcagcagcagcgagcagtgccagccccacagaaactgcaccgccctgggcctggccctgaacgtgcccggcagcagcagccacgacaccctgtgcaccagctgcaccggcttccccctgagcaccagagtgcccggcgccgaggagtgcgagagagccgtgatcgacttcgtggccttccaggacatcagcatcaagagactgcagagactgctgcaggccctggaggcccccgagggctggggccccacccccagagccggcagagccgccctgcagctgaagctgagaagaagactgaccgagctgctgggcgcccaggacggcgccctgctggtgagactgctgcaggccctgagagtggccagaatgcccggcctggagagaagcgtgagagagagattcctgcccgtgcactag

SEQ ID NO: 104073 - DNA, 903 bp, synthetic construct; identical to SEQ ID NO: 104072
  misc_feature 1..903: note = Description of Artificial Sequence: Synthetic coding sequence
  source 1..903: mol_type = other DNA

SEQ ID NO: 104074 - DNA, 1788 bp, synthetic construct
  misc_feature 1..1788: note = Description of Artificial Sequence: Synthetic coding sequence
  source 1..1788: mol_type = other DNA
atgagagtgctgctggccgccctgggcctgctgttcctgggcgccctgagagccttcccccaggacagacccttcgaggacacctgccacggcaaccccagccactactacgacaaggccgtgagaagatgctgctacagatgccccatgggcctgttccccacccagcagtgcccccagagacccaccgactgcagaaagcagtgcgagcccgactactacctggacgaggccgacagatgcaccgcctgcgtgacctgcagcagagacgacctggtggagaagaccccctgcgcctggaacagcagcagagtgtgcgagtgcagacccggcatgttctgcagcaccagcgccgtgaacagctgcgccagatgcttcttccacagcgtgtgccccgccggcatgatcgtgaagttccccggcaccgcccagaagaacaccgtgtgcgagcccgccagccccggcgtgagccccgcctgcgccagccccgagaactgcaaggagcccagcagcggcaccatcccccaggccaagcccacccccgtgagccccgccaccagcagcgccagcaccatgcccgtgagaggcggcaccagactggcccaggaggccgccagcaagctgaccagagcccccgacagccccagcagcgtgggcagacccagcagcgaccccggcctgagccccacccagccctgccccgagggcagcggcgactgcagaaagcagtgcgagcccgactactacctggacgaggccggcagatgcaccgcctgcgtgagctgcagcagagacgacctggtggagaagaccccctgcgcctggaacagcagcagaacctgcgagtgcagacccggcatgatctgcgccaccagcgccaccaacagcagagccagatgcgtgccctaccccatctgcgccgccgagaccgtgaccaagccccaggacatggccgagaaggacaccaccttcgaggccccccccctgggcacccagcccgactgcaaccccacccccgagaacggcgaggcccccgccagcaccagccccacccagagcctgctggtggacagccaggccagcaagaccctgcccatccccaccagcgcccccgtggccctgagcagcaccggcaagcccgtgctggacgccggccccgtgctgttctgggtgatcctggtgctggtggtggtggtgggcagcagcgccttcctgctgtgccacagaagagcctgcagaaagagaatcagacagaagctgcacctgtgctaccccgtgcagaccagccagcccaagctggagctggtggacagcagacccagaagaagcagcacccagctgagaagcggcgccagcgtgaccgagcccgtggccgaggagagaggcctgatgagccagcccctgatggagacctgccacagcgtgggcgccgcctacctggagagcctgcccctgcaggacgccagccccgccggcggccccagcagccccagagacctgcccgagcccagagtgagcaccgagcacaccaacaacaagatcgagaagatctacatcatgaaggccgacaccgtgatcgtgggcaccgtgaaggccgagctgcccgagggcagaggcctggccggccccgccgagcccgagctggaggaggagctggaggccgaccacaccccccactaccccgagcaggagaccgagccccccctgggcagctgcagcgacgtgatgctgagcgtggaggaggagggcaaggaggaccccctgcccaccgccgccagcggcaagtag

SEQ ID NO: 104075 - DNA, 399 bp, synthetic construct
  misc_feature 1..399: note = Description of Artificial Sequence: Synthetic coding sequence
  source 1..399: mol_type = other DNA
atgagccagcccctgatggagacctgccacagcgtgggcgccgcctacctggagagcctgcccctgcaggacgccagccccgccggcggccccagcagccccagagacctgcccgagcccagagtgagcaccgagcacaccaacaacaagatcgagaagatctacatcatgaaggccgacaccgtgatcgtgggcaccgtgaaggccgagctgcccgagggcagaggcctggccggccccgccgagcccgagctggaggaggagctggaggccgaccacaccccccactaccccgagcaggagaccgagccccccctgggcagctgcagcgacgtgatgctgagcgtggaggaggagggcaaggaggaccccctgcccaccgccgccagcggcaagtag

SEQ ID NO: 104076 - DNA, 1452 bp, synthetic construct
  misc_feature 1..1452: note = Description of Artificial Sequence: Synthetic coding sequence
  source 1..1452: mol_type = other DNA
atgttctgcagcaccagcgccgtgaacagctgcgccagatgcttcttccacagcgtgtgccccgccggcatgatcgtgaagttccccggcaccgcccagaagaacaccgtgtgcgagcccgccagccccggcgtgagccccgcctgcgccagccccgagaactgcaaggagcccagcagcggcaccatcccccaggccaagcccacccccgtgagccccgccaccagcagcgccagcaccatgcccgtgagaggcggcaccagactggcccaggaggccgccagcaagctgaccagagcccccgacagccccagcagcgtgggcagacccagcagcgaccccggcctgagccccacccagccctgccccgagggcagcggcgactgcagaaagcagtgcgagcccgactactacctggacgaggccggcagatgcaccgcctgcgtgagctgcagcagagacgacctggtggagaagaccccctgcgcctggaacagcagcagaacctgcgagtgcagacccggcatgatctgcgccaccagcgccaccaacagcagagccagatgcgtgccctaccccatctgcgccgccgagaccgtgaccaagccccaggacatggccgagaaggacaccaccttcgaggccccccccctgggcacccagcccgactgcaaccccacccccgagaacggcgaggcccccgccagcaccagccccacccagagcctgctggtggacagccaggccagcaagaccctgcccatccccaccagcgcccccgtggccctgagcagcaccggcaagcccgtgctggacgccggccccgtgctgttctgggtgatcctggtgctggtggtggtggtgggcagcagcgccttcctgctgtgccacagaagagcctgcagaaagagaatcagacagaagctgcacctgtgctaccccgtgcagaccagccagcccaagctggagctggtggacagcagacccagaagaagcagcaccctgagaagcggcgccagcgtgaccgagcccgtggccgaggagagaggcctgatgagccagcccctgatggagacctgccacagcgtgggcgccgcctacctggagagcctgcccctgcaggacgccagccccgccggcggccccagcagccccagagacctgcccgagcccagagtgagcaccgagcacaccaacaacaagatcgagaagatctacatcatgaaggccgacaccgtgatcgtgggcaccgtgaaggccgagctgcccgagggcagaggcctggccggccccgccgagcccgagctggaggaggagctggaggccgaccacaccccccactaccccgagcaggagaccgagccccccctgggcagctgcagcgacgtgatgctgagcgtggaggaggagggcaaggaggaccccctgcccaccgccgccagcggcaagtag

SEQ ID NO: 104077 - DNA, 1437 bp, synthetic construct
  misc_feature 1..1437: note = Description of Artificial Sequence: Synthetic coding sequence
  source 1..1437: mol_type = other DNA
atggcccccctgagacccctgctgatcctggccctgctggcctgggtggccctggccgaccaggagagctgcaagggcagatgcaccgagggcttcaacgtggacaagaagtgccagtgcgacgagctgtgcagctactaccagagctgctgcaccgactacaccgccgagtgcaagccccaggtgaccagaggcgacgtgttcaccatgcccgaggacgagtacaccgtgtacgacgacggcgaggagaagaacaacgccaccgtgcacgagcaggtgggcggccccagcctgaccagcgacctgcaggcccagagcaagggcaaccccgagcagacccccgtgctgaagcccgaggaggaggcccccgcccccgaggtgggcgccagcaagcccgagggcatcgacagcagacccgagaccctgcaccccggcagaccccagccccccgccgaggaggagctgtgcagcggcaagcccttcgacgccttcaccgacctgaagaacggcagcctgttcgccttcagaggccagtactgctacgagctggacgagaaggccgtgagacccggctaccccaagctgatcagagacgtgtggggcatcgagggccccatcgacgccgccttcaccagaatcaactgccagggcaagacctacctgttcaagggcagccagtactggagattcgaggacggcgtgctggaccccgactaccccagaaacatcagcgacggcttcgacggcatccccgacaacgtggacgccgccctggccctgcccgcccacagctacagcggcagagagagagtgtacttcttcaagggcaagcagtactgggagtaccagttccagcaccagcccagccaggaggagtgcgagggcagcagcctgagcgccgtgttcgagcacttcgccatgatgcagagagacagctgggaggacatcttcgagctgctgttctggggcagaaccagcgccggcaccagacagccccagttcatcagcagagactggcacggcgtgcccggccaggtggacgccgccatggccggcagaatctacatcagcggcatggcccccagacccagcctggccaagaagcagagattcagacacagaaacagaaagggctacagaagccagagaggccacagcagaggcagaaaccagaacagcagaagacccagcagagccacctggctgagcctgttcagcagcgaggagagcaacctgggcgccaacaactacgacgactacagaatggactggctggtgcccgccacctgcgagcccatccagagcgtgttcttcttcagcggcgacaagtactacagagtgaacctgagaaccagaagagtggacaccgtggaccccccctaccccagaagcatcgcccagtactggctgggctgccccgcccccggccacctgtag

SEQ ID NO: 104078 - DNA, 639 bp, synthetic construct
  misc_feature 1..639: note = Description of Artificial Sequence: Synthetic coding sequence
  source 1..639: mol_type = other DNA
atggccgaggccaagtactacctgatccagggcctggtgaacatgtgccagagcgccctgcaggacaagaaggacagctaccagcccgtgtgcaacatccccatcatcaccagcctgaaggaggaggagagactgatcgagagcagcaccaagcccgtggtgaagctgctgtacaacagaagcaacaacaagtacagctacaccagcaacagcgacgaccacctgctgaagaacatcgagctgttcgacaagctgagcctgagattcaacggcagagtgctgttcatcaaggacgtgatcggcgacgagatctgctgctggagcttctacggccagggcagaaagctggccgaggtgtgctgcaccagcatcgtgtacgccaccgagaagaagcagaccaaggtggagttccccgaggccagaatctacgaggagaccctgaacgtgctgctgtacgagacccccagagtgcccgacaacagcctgctggaggccaccagcagaagcagaagccaggccagccccagcgaggacgaggagaccttcgagctgagagacagagtgagaagaatccacgtgaagagatacagcacctacgacgacagacagctgggccaccagagcacccacagagactag

SEQ ID NO: 104079 - DNA, 1965 bp, synthetic construct
  misc_feature 1..1965: note = Description of Artificial Sequence: Synthetic coding sequence
  source 1..1965: mol_type = other DNA
atgagcgaggccagcagcgaggacctggtgccccccctggaggccggcgccgccccctacagagaggaggaggaggccgccaagaagaagaaggagaagaagaagaagagcaagggcctggccaacgtgttctgcgtgttcaccaagggcaagaagaagaagggccagcccagcagcgccgagcccgaggacgccgccggcagcagacagggcctggacggccccccccccaccgtggaggagctgaaggccgccctggagagaggccagctggaggccgccagacccctgctggccctggagagagagctggccgccgccgccgccgccggcggcgtgagcgaggaggagctggtgagaagacagagcaaggtggaggccctgtacgagctgctgagagaccaggtgctgggcgtgctgagaagacccctggaggccccccccgagagactgagacaggccctggccgtggtggccgagcaggagagagaggacagacaggccgccgccgccggccccggcaccagcggcctggccgccaccagacccagaagatggctgcagctgtggagaagaggcgtggccgaggccgccgaggagagaatgggccagagacccgccgccggcgccgaggtgcccgagagcgtgttcctgcacctgggcagaaccatgaaggaggacctggaggccgtggtggagagactgaagcccctgttccccgccgagttcggcgtggtggccgcctacgccgagagctaccaccagcacttcgccgcccacctggccgccgtggcccagttcgagctgtgcgagagagacacctacatgctgctgctgtgggtgcagaacctgtaccccaacgacatcatcaacagccccaagctggtgggcgagctgcagggcatgggcctgggcagcctgctgccccccagacagatcagactgctggaggccaccttcctgagcagcgaggccgccaacgtgagagagctgatggacagagccctggagctggaggccagaagatgggccgaggacgtgcccccccagagactggacggccactgccacagcgagctggccatcgacatcatccagatcaccagccaggcccaggccaaggccgagagcatcaccctggacctgggcagccagatcaagagagtgctgctggtggagctgcccgccttcctgagaagctaccagagagccttcaacgagttcctggagagaggcaagcagctgaccaactacagagccaacgtgatcgccaacatcaacaactgcctgagcttcagaatgagcatggagcagaactggcaggtgccccaggacaccctgagcctgctgctgggccccctgggcgagctgaagagccacggcttcgacaccctgctgcagaacctgcacgaggacctgaagcccctgttcaagagattcacccacaccagatgggccgcccccgtggagaccctggagaacatcatcgccaccgtggacaccagactgcccgagttcagcgagctgcagggctgcttcagagaggagctgatggaggccctgcacctgcacctggtgaaggagtacatcatccagctgagcaagggcagactggtgctgaagaccgccgagcagcagcagcagctggccggctacatcctggccaacgccgacaccatccagcacttctgcacccagcacggcagccccgccacctggctgcagcccgccctgcccaccctggccgagatcatcagactgcaggaccccagcgccatcaagatcgaggtggccacctacgccacctgctaccccgacttcagcaagggccacctgagcgccatcctggccatcaagggcaacctgagcaacagcgaggtgaagagaatcagaagcatcctggacgtgagcatgggcgcccaggagcccagcagacccctgttcagcctgatcaaggtgggctag

SEQ ID NO: 104080 - DNA, 972 bp, synthetic construct
  misc_feature 1..972: note = Description of Artificial Sequence: Synthetic coding sequence
  source 1..972: mol_type = other DNA
atggacagagccctggagctggaggccagaagatgggccgaggacgtgcccccccagagactggacggccactgccacagcgagctggccatcgacatcatccagatcaccagccaggcccaggccaaggccgagagcatcaccctggacctgggcagccagatcaagagagtgctgctggtggagctgcccgccttcctgagaagctaccagagagccttcaacgagttcctggagagaggcaagcagctgaccaactacagagccaacgtgatcgccaacatcaacaactgcctgagcttcagaatgagcatggagcagaactggcaggtgccccaggacaccctgagcctgctgctgggccccctgggcgagctgaagagccacggcttcgacaccctgctgcagaacctgcacgaggacctgaagcccctgttcaagagattcacccacaccagatgggccgcccccgtggagaccctggagaacatcatcgccaccgtggacaccagactgcccgagttcagcgagctgcagggctgcttcagagaggagctgatggaggccctgcacctgcacctggtgaaggagtacatcatccagctgagcaagggcagactggtgctgaagaccgccgagcagcagcagcagctggccggctacatcctggccaacgccgacaccatccagcacttctgcacccagcacggcagccccgccacctggctgcagcccgccctgcccaccctggccgagatcatcagactgcaggaccccagcgccatcaagatcgaggtggccacctacgccacctgctaccccgacttcagcaagggccacctgagcgccatcctggccatcaagggcaacctgagcaacagcgaggtgaagagaatcagaagcatcctggacgtgagcatgggcgcccaggagcccagcagacccctgttcagcctgatcaaggtgggctag

SEQ ID NO: 104081 - DNA, 600 bp, synthetic construct
  misc_feature 1..600: note = Description of Artificial Sequence: Synthetic coding sequence
  source 1..600: mol_type = other DNA
atggaggccctgcacctgcacctggtgaaggagtacatcatccagctgagcaagggcagactggtgctgaagaccgccgagcagcagcagcagctggccggctacatcctggccaacgccgacaccatccagcacttctgcacccagcacggcagccccgccacctggctgcagcccgccctgcccaccctggccgagatcatcagactgcaggaccccagcgccatcaagatcgaggtggccacctacgccacctgctaccccgacttcagcaagggccacctgagcgccatcctggccatcaagggcaacctgagcaacagcgaggtgaagagaatcagaagcatcctggacgtgagcatgggcgcccaggagcccagcagacccctgttcagcctgatcaagcccagagccgccgtgagcggcatccagcagtggtggaacggcagacagaactggaagagaaagaaggagaagatgagcagcagactggccggcgccttcagagtgctgtggagagccgtgagcaccgccagcatcagaagacacatccaggtggcccccagacccctgcaggccggccccgccatgggcccctag

SEQ ID NO: 104082 - DNA, 120 bp, synthetic construct
  misc_feature 1..120: note = Description of Artificial Sequence: Synthetic coding sequence
  source 1..120: mol_type = other DNA
atgagcgaggccagcagcgaggacctggtgccccccctggaggccggcgccgccccctacagagaggaggaggaggccgccaagaagaagaaggagaagaagaagaagagcaagggctag

SEQ ID NO: 104083 - DNA, 1965 bp, synthetic construct; identical to SEQ ID NO: 104079
  misc_feature 1..1965: note = Description of Artificial Sequence: Synthetic coding sequence
  source 1..1965: mol_type = other DNA

SEQ ID NO: 104084 - DNA, 2373 bp, synthetic construct
  misc_feature 1..2373: note = Description of Artificial Sequence: Synthetic coding sequence
  source 1..2373: mol_type = other DNA
atggccgagcaggtgctgccccaggccctgtacctgagcaacatgagaaaggccgtgaagatcagagagagaacccccgaggacatcttcaagcccaccaacggcatcatccaccacttcaagaccatgcacagatacaccctggagatgttcagaacctgccagttctgcccccagttcagagagatcatccacaaggccctgatcgacagaaacatccaggccaccctggagagccagaagaagctgaactggtgcagagaggtgagaaagctggtggccctgaagaccaacggcgacggcaactgcctgatgcacgccaccagccagtacatgtggggcgtgcaggacaccgacctggtgctgagaaaggccctgttcagcaccctgaaggagaccgacaccagaaacttcaagttcagatggcagctggagagcctgaagagccaggagttcgtggagaccggcctgtgctacgacaccagaaactggaacgacgagtgggacaacctgatcaagatggccagcaccgacacccccatggccagaagcggcctgcagtacaacagcctggaggagatccacatcttcgtgctgtgcaacatcctgagaagacccatcatcgtgatcagcgacaagatgctgagaagcctggagagcggcagcaacttcgcccccctgaaggtgggcggcatctacctgcccctgcactggcccgcccaggagtgctacagataccccatcgtgctgggctacgacagccaccacttcgtgcccctggtgaccctgaaggacagcggccccgagatcagagccgtgcccctggtgaacagagacagaggcagattcgaggacctgaaggtgcacttcctgaccgaccccgagaacgagatgaaggagaagctgctgaaggagtacctgatggtgatcgagatccccgtgcagggctgggaccacggcaccacccacctgatcaacgccgccaagctggacgaggccaacctgcccaaggagatcaacctggtggacgactacttcgagctggtgcagcacgagtacaagaagtggcaggagaacagcgagcagggcagaagagagggccacgcccagaaccccatggagcccagcgtgccccagctgagcctgatggacgtgaagtgcgagacccccaactgccccttcttcatgagcgtgaacacccagcccctgtgccacgagtgcagcgagagaagacagaagaaccagaacaagctgcccaagctgaacagcaagcccggccccgagggcctgcccggcatggccctgggcgccagcagaggcgaggcctacgagcccctggcctggaaccccgaggagagcaccggcggcccccacagcgccccccccaccgcccccagccccttcctgttcagcgagaccaccgccatgaagtgcagaagccccggctgccccttcaccctgaacgtgcagcacaacggcttctgcgagagatgccacaacgccagacagctgcacgccagccacgcccccgaccacaccagacacctggaccccggcaagtgccaggcctgcctgcaggacgtgaccagaaccttcaacggcatctgcagcacctgcttcaagagaaccaccgccgaggccagcagcagcctgagcaccagcctgccccccagctgccaccagagaagcaagagcgaccccagcagactggtgagaagccccagcccccacagctgccacagagccggcaacgacgcccccgccggctgcctgagccaggccgccagaacccccggcgacagaaccggcaccagcaagtgcagaaaggccggctgcgtgtacttcggcacccccgagaacaagggcttctgcaccctgtgcttcatcgagtacagagagaacaagcacttcgccgccgccagcggcaaggtgagccccaccgccagcagattccagaacaccatcccctgcctgggcagagagtgcggcaccctgggcagcaccatgttcgagggctactgccagaagtgcttcatcgaggcccagaaccagagattccacgaggccaagagaaccgaggagcagctgagaagcagccagagaagagacgtgcccagaaccacccagagcaccagcagacccaagtgcgccagagccagctgcaagaacatcctggcctgcagaagcgaggagctgtgcatggagtgccagcaccccaaccagagaatgggccccggcgcccacagaggcgagcccgcccccgaggacccccccaagcagagatgcagagcccccgcctgcgaccacttcggcaacgccaagtgcaacggctactgcaacgagtgcttccagttcaagcagatgtacggctag

SEQ ID NO: 104085 - DNA, 489 bp, synthetic construct
  misc_feature 1..489: note = Description of Artificial Sequence: Synthetic coding sequence
  source 1..489: mol_type = other DNA
atggccgagcaggtgctgccccaggccctgtacctgagcaacatgagaaaggccgtgaagatcagagagagaacccccgaggacatcttcaagcccaccaacggcatcatccaccacttcaagaccatgcacagatacaccctggagatgttcagaacctgccagttctgcccccagttcagagagatcatccacaaggccctgatcgacagaaacatccaggccaccctggagagccagaagaagctgaactggtgcagagaggtgagaaagctggtggccctgaagaccaacggcgacggcaactgcctgatgcacgccaccagccagtacatgtggggcgtgcaggacaccgacctggtgctgagaaaggccctgttcagcaccctgaaggagaccgacaccagaaacttcaagttcagatggcagctggagagcctgaagagccaggagttcgtggagaccggcctgtgctacgacaccagatag

SEQ ID NO: 104086 - DNA, 81 bp, synthetic construct
  misc_feature 1..81: note = Description of Artificial Sequence: Synthetic coding sequence
  source 1..81: mol_type = other DNA
atggccgagcaggtgctgccccaggccctgtacctgagcaacatgagaaaggccgtgaagatcagagagagaaccccctag

SEQ ID NO: 104087 - DNA, 297 bp, synthetic construct
  misc_feature 1..297: note = Description of Artificial Sequence: Synthetic coding sequence
  source 1..297: mol_type = other DNA
atggccgagcaggtgctgccccaggccctgtacctgagcaacatgagaaaggccgtgaagatcagagagagaacccccgaggacatcttcaagcccaccaacggcatcatccaccacttcaagaccatgcacagatacaccctggagatgttcagaacctgccagttctgcccccagttcagagagatcatccacaaggccctgatcgacagaaacatccaggccaccctggagagccagaagaagctgaactggtgcagagaggtgagaaagctggtggccctgaagaccaactag

SEQ ID NO: 104088 - DNA, 813 bp, synthetic construct
  misc_feature 1..813: note = Description of Artificial Sequence: Synthetic coding sequence
  source 1..813: mol_type = other DNA
atggccgagcaggtgctgccccaggccctgtacctgagcaacatgagaaaggccgtgaagatcagagagagaacccccgaggacatcttcaagcccaccaacggcatcatccaccacttcaagaccatgcacagatacaccctggagatgttcagaacctgccagttctgcccccagttcagagagatcatccacaaggccctgatcgacagaaacatccaggccaccctggagagccagaagaagctgaactggtgcagagaggtgagaaagctggtggccctgaagaccaacggcgacggcaactgcctgatgcacgccaccagccagtacatgtggggcgtgcaggacaccgacctggtgctgagaaaggccctgttcagcaccctgaaggagaccgacaccagaaacttcaagttcagatggcagctggagagcctgaagagccaggagttcgtggagaccggcctgtgctacgacaccagaaactggaacgacgagtgggacaacctgatcaagatggccagcaccgacacccccatggccagaagcggcctgcagtacaacagcctggaggagatccacatcttcgtgctgtgcaacatcctgagaagacccatcatcgtgatcagcgacaagatgctgagaagcctggagagcggcagcaacttcgcccccctgaaggtgggcggcatctacctgcccctgcactggcccgcccaggagtgctacagataccccatcgtgctgggctacgacagccaccacttcgtgcccctggtgaccctgaaggacagcggccccgacatctag

SEQ ID NO: 104089 - DNA, 2250 bp, synthetic construct
  misc_feature 1..2250: note = Description of Artificial Sequence: Synthetic coding sequence
  source 1..2250: mol_type = other DNA
atggccgagcaggtgctgccccaggccctgtacctgagcaacatgagaaaggccgtgaagatcagagagagaacccccgaggacatcttcaagcccaccaacggcatcatccaccacttcaagaccatgcacagatacaccctggagatgttcagaacctgccagttctgcccccagttcagagagatcatccacaaggccctgatcgacagaaacatccaggccaccctggagagccagaagaagctgaactggtgcagagaggtgagaaagctggtggccctgaagaccaacggcgacggcaactgcctgatgcacgccaccagccagtacatgtggggcgtgcaggacaccgacctggtgctgagaaaggccctgttcagcaccctgaaggagaccgacaccagaaacttcaagttcagatggcagctggagagcctgaagagccaggagttcgtggagaccggcctgtgctacgacaccagaaactggaacgacgagtgggacaacctgatcaagatggccagcaccgacacccccatggccagaagcggcctgcagtacaacagcctggaggagatccacatcttcgtgctgtgcaacatcctgagaagacccatcatcgtgatcagcgacaagatgctgagaagcctggagagcggcagcaacttcgcccccctgaaggtgggcggcatctacctgcccctgcactggcccgcccaggagtgctacagataccccatcgtgctgggctacgacagccaccacttcgtgcccctggtgaccctgaaggacagcggccccgagatcagagccgtgcccctggtgaacagagacagaggcagattcgaggacctgaaggtgcacttcctgaccgaccccgagaacgagatgaaggagaagctgctgaaggagtacctgatggtgatcgagatccccgtgcagggctgggaccacggcaccacccacctgatcaacgccgccaagctggacgaggccaacctgcccaaggagatcaacctggtggacgactacttcgagctggtgcagcacgagtacaagaagtggcaggagaacagcgagcagggcagaagagagggccacgcccagaaccccatggagcccagcgtgccccagctgagcctgatggacgtgaagtgcgagacccccaactgccccttcttcatgagcgtgaacacccagcccctgtgccacgagtgcagcgagagaagacagaagaaccagaacaagctgcccaagctgaacagcaagcccggccccgagggcctgcccggcatggccctgggcgccagcagaggcgaggcctacgagcccctggcctggaaccccgaggagagcaccggcggcccccacagcgccccccccaccgcccccagccccttcctgttcagcgagaccaccgccatgaagtgcagaagccccggctgccccttcaccctgaacgtgcagcacaacggcttctgcgagagatgccacaacgccagacagctgcacgccagccacgcccccgaccacaccagacacctggaccccggcaagtgccaggcctgcctgcaggacgtgaccagaaccttcaacggcatctgcagcacctgcttcaagagaaccaccgccgaggccagcagcagcctgagcaccagcctgccccccagctgccaccagagaagcaagagcgaccccagcagactggtgagaagccccagcccccacagctgccacagagccggcaacgacgcccccgccggctgcctgagccaggccgccagaacccccggcgacagaaccggcaccagcaagtgcagaaaggccggctgcgtgtacttcggcacccccgagaacaagggcttctgcaccctgtgcttcatcgagtacagagagaacaagcacttcgccgccgccagcggcaaggtgagccccaccgccagcagattccagaacaccatcccctgcctgggcagagagtgcggcaccctgggcagcaccatgttcgagggctactgccagaagtgcttcatcgaggcccagaaccagagattccacgaggccaagagaaccgaggagcagctgagaagcagccagagaagagacgtgcccagaaccacccagagcaccagcagacccaagtgcgccagagccagctgcaagaacatcctggcctgcagaagcgaggagctgtgcatggagtgccagcaccagcccgaggacggcccctggggcccccccggctag

SEQ ID NO: 104090 - DNA, 459 bp, synthetic construct
  misc_feature 1..459: note = Description of Artificial Sequence: Synthetic coding sequence
  source 1..459: mol_type = other DNA
atggccgagcaggtgctgccccaggccctgtacctgagcaacatgagaaaggccgtgaagatcagagagagaacccccgaggacatcttcaagcccaccaacggcatcatccaccacttcaagaccatgcacagatacaccctggagatgttcagaacctgccagttctgcccccagttcagagagatcatccacaaggccctgatcgacagaaacatccaggccaccctggagagccagaagaagctgaactggtgcagagaggtgagaaagctggtggccctgaagaccaacggcgacggcaactgcctgatgcacgccaccagccagtacatgtggggcgtgcaggacaccgacctggtgctgagaaaggccctgttcagcaccctgaaggagaccgacaccagaaacttcaagttcagatggcagctggagagccagatcagcggcatctgctag

SEQ ID NO: 104091 - DNA, 645 bp, synthetic construct
  misc_feature 1..645: note = Description of Artificial Sequence: Synthetic coding sequence
  source 1..645: mol_type = other DNA
atggccgagcaggtgctgccccaggccctgtacctgagcaacatgagaaaggccgtgaagatcagagagagaacccccgaggacatcttcaagcccaccaacggcatcatccaccacttcaagaccatgcacagatacaccctggagatgttcagaacctgccagttctgcccccagttcagagagatcatccacaaggccctgatcgacagaaacatccaggccaccctggagagccagaagaagctgaactggtgcagagaggtgagaaagctggtggccctgaagaccaacggcgacggcaactgcctgatgcacgccaccagccagtacatgtggggcgtgcaggacaccgacctggtgctgagaaaggccctgttcagcaccctgaaggagaccgacaccagaaacttcaagttcagatggcagctggagagcctgaagagccaggagttcgtggagaccggcctgtgctacgacaccagaaactggaacgacgagtgggacaacctgatcaagtggctgccccagacccacccctggcccgaggtggacttcagcaccacccactggaagaagtacacctacctgagcttcgccaccagcagcgagggccagagcctgagcttccagaccaagtgctag

SEQ ID NO: 104092 - DNA, 2010 bp, synthetic construct
  misc_feature 1..2010: note = Description of Artificial Sequence: Synthetic coding sequence
  source 1..2010: mol_type = other DNA
atggccgagcaggtgctgccccaggccctgtacctgagcaacatgagaaaggccgtgaagatcagagagagaacccccgaggacatcttcaagcccaccaacggcatcatccaccacttcaagaccatgcacagatacaccctggagatgttcagaacctgccagttctgcccccagttcagagagatcatccacaaggccctgatcgacagaaacatccaggccaccctggagagccagaagaagctgaactggtgcagagaggtgagaaagctggtggccctgaagaccaacggcgacggcaactgcctgatgcacgccaccagccagtacatgtggggcgtgcaggacaccgacctggtgctgagaaaggccctgttcagcaccctgaaggagaccgacaccagaaacttcaagttcagatggcagctggagagcctgaagagccaggagttcgtggagaccggcctgtgctacgacaccagaaactggaacgacgagtgggacaacctgatcaagatggccagcaccgacacccccatggccagaagcggcctgcagtacaacagcctggaggagatccacatcttcgtgctgtgcaacatcctgagaagacccatcatcgtgatcagcgacaagatgctgagaagcctggagagcggcagcaacttcgcccccctgaaggtgggcggcatctacctgcccctgcactggcccgcccaggagtgctacagataccccatcgtgctgggctacgacagccaccacttcgtgcccctggtgaccctgaaggacagcggccccgagatcagagccgtgcccctggtgaacagagacagaggcagattcgaggacctgaaggtgcacttcctgaccgaccccgagaacgagatgaaggagaagctgctgaaggagtacctgatggtgatcgagatccccgtgcagggctgggaccacggcaccacccacctgatcaacgccgccaagctggacgaggccaacctgcccaaggagatcaacctggtggacgactacttcgagctggtgcagcacgagtacaagaagtggcaggagaacagcgagcagggcagaagagagggccacgcccagaaccccatggagcccagcgtgccccagctgagcctgatggacgtgaagtgcgagacccccaactgccccttcttcatgagcgtgaacacccagcccctgtgccacgagtgcagcgagagaagacagaagaaccagaacaagctgcccaagctgaacagcaagcccggccccgagggcctgcccggcatggccctgggcgccagcagaggcgaggcctacgagcccctggcctggaaccccgaggagagcaccggcggcccccacagcgccccccccaccgcccccagccccttcctgttcagcgagaccaccgccatgaagtgcagaagccccggctgccccttcaccctgaacgtgcagcacaacggcttctgcgagagatgccacaacgccagacagctgcacgccagccacgcccccgaccacaccagacacctggaccccggcaagtgccaggcctgcctgcaggacgtgaccagaaccttcaacggcatctgcagcacctgcttcaagagaaccaccgccgaggccagcagcagcctgagcaccagcctgccccccagctgccaccagagaagcaagagcgaccccagcagactggtgagaagccccagcccccacagctgccacagagccggcaacgacgcccccgccggctgcctgagccaggccgccagaacccccggcgacagaaccggcaccagcaagtgcagaaaggccggctgcgtgtacttcggcacccccgagaacaagggcttctgcaccctgttccacagagtgcagagaaagcagaccttctgctgctgcctgagagagagccagagccacagcgtgcaggtgcccgagcaccacagcgtgcccggcgagggcatgagacacccctggaagcaccacgtgtag

SEQ ID NO: 104093 - DNA, 834 bp, synthetic construct
  misc_feature 1..834: note = Description of Artificial Sequence: Synthetic coding sequence
  source 1..834: mol_type = other DNA
atgatcatcctgatctacctgttcctgctgctgtgggaggacacccagggctggggcttcaaggacggcatcttccacaacagcatctggctggagagagccgccggcgtgtaccacagagaggccagaagcggcaagtacaagctgacctacgccgaggccaaggccgtgtgcgagttcgagggcggccacctggccacctacaagcagctggaggccgccagaaagatcggcttccacgtgtgcgccgccggctggatggccaagggcagagtgggctaccccatcgtgaagcccggccccaactgcggcttcggcaagaccggcatcatcgactacggcatcagactgaacagaagcgagagatgggacgcctactgctacaacccccacgccaaggagtgcggcggcgtgttcaccgaccccaagcagatcttcaagagccccggcttccccaacgagtacgaggacaaccagatctgctactggcacatcagactgaagtacggccagagaatccacctgagcttcctggacttcgacctggaggacgaccccggctgcctggccgactacgtggagatctacgacagctacgacgacgtgcacggcttcgtgggcagatactgcggcgacgagctgcccgacgacatcatcagcaccggcaacgtgatgaccctgaagttcctgagcgacgccagcgtgaccgccggcggcttccagatcaagtacgtggccatggaccccgtgagcaagagcagccagggcaagaacaccagcaccaccagcaccggcaacaagaacttcctggccggcagattcagccacctgtag

SEQ ID NO: 104094 - DNA, 567 bp, synthetic construct
  misc_feature 1..567: note = Description of Artificial Sequence: Synthetic coding sequence
  source 1..567: mol_type = other DNA
atggccaccgacgtgttcaacagcaagaacctggccgtgcaggcccagaagaagatcctgggcaagatggtgagcaagagcatcgccaccaccctgatcgacgacaccagcagcgaggtgctggacgagctgtacagagtgaccagagagtacacccagaacaagaaggaggccgagaagatcatcaagaacctgatcaagaccgtgatcaagctggccatcctgtacagaaacaaccagttcaaccaggacgagctggccctgatggagaagttcaagaagaaggtgcaccagctggccatgaccgtggtgagcttccaccaggtggactacaccttcgacagaaacgtgctgagcagactgctgaacgagtgcagagagatgctgcaccagatcatccagagacacctgaccgccaagagccacggcagagtgaacaacgtgttcgaccacttcagcgactgcgagttcctggccgccctgtacaaccccttcggcaacttcaagccccacctgcagaagctgtgcgacggcatcaacaagatgctggacgaggagaacatctag

SEQ ID NO: 104095 - DNA, 597 bp, synthetic construct
  misc_feature 1..597: note = Description of Artificial Sequence: Synthetic coding sequence
  source 1..597: mol_type = other DNA
atgcacagcgaggccgaggagagcaaggaggtggccaccgacgtgttcaacagcaagaacctggccgtgcaggcccagaagaagatcctgggcaagatggtgagcaagagcatcgccaccaccctgatcgacgacaccagcagcgaggtgctggacgagctgtacagagtgaccagagagtacacccagaacaagaaggaggccgagaagatcatcaagaacctgatcaagaccgtgatcaagctggccatcctgtacagaaacaaccagttcaaccaggacgagctggccctgatggagaagttcaagaagaaggtgcaccagctggccatgaccgtggtgagcttccaccaggtggactacaccttcgacagaaacgtgctgagcagactgctgaacgagtgcagagagatgctgcaccagatcatccagagacacctgaccgccaagagccacggcagagtgaacaacgtgttcgaccacttcagcgactgcgagttcctggccgccctgtacaaccccttcggcaacttcaagccccacctgcagaagctgtgcgacggcatcaacaagatgctggacgaggagaacatctag

SEQ ID NO: 104096 - DNA, 597 bp, synthetic construct; identical to SEQ ID NO: 104095
  misc_feature 1..597: note = Description of Artificial Sequence: Synthetic coding sequence
  source 1..597: mol_type = other DNA

SEQ ID NO: 104097 - DNA, 555 bp, synthetic construct
  misc_feature 1..555: note = Description of Artificial Sequence: Synthetic coding sequence
  source 1..555: mol_type = other DNA
atggagagcttcagcagcaagagcctggccctgcaggccgagaagaagctgctgagcaagatggccggcagaagcgtggcccacctgttcatcgacgagaccagcagcgaggtgctggacgagctgtacagagtgagcaaggagtacacccacagcagaccccaggcccagagagtgatcaaggacctgatcaaggtggccatcaaggtggccgtgctgcacagaaacggcagcttcggccccagcgagctggccctggccaccagattcagacagaagctgagacagggcgccatgaccgccctgagcttcggcgaggtggacttcaccttcgaggccgccgtgctggccggcctgctgaccgagtgcagagacgtgctgctggagctggtggagcaccacctgacccccaagagccacggcagaatcagacacgtgttcgaccacttcagcgaccccggcctgctgaccgccctgtacggccccgacttcacccagcacctgggcaagatctgcgacggcctgagaaagctgctggacgagggcaagctgtag

SEQ ID NO: 104098 - DNA, 1296 bp, synthetic construct
  misc_feature 1..1296: note = Description of Artificial Sequence: Synthetic coding sequence
  source 1..1296: mol_type = other DNA
atgtacagaaccaaggtgggcctgaaggacagacagcagctgtacaagctgatcatcagccagctgctgtacgacggctacatcagcatcgccaacggcctgatcaacgagatcaagccccagagcgtgtgcgcccccagcgagcagctgctgcacctgatcaagctgggcatggagaacgacgacaccgccgtgcagtacgccatcggcagaagcgacaccgtggcccccggcaccggcatcgacctggagttcgacgccgacgtgcagaccatgagccccgaggccagcgagtacgagacctgctacgtgaccagccacaagggcccctgcagagtggccacctacagcagagacggccagctgatcgccaccggcagcgccgacgccagcatcaagatcctggacaccgagagaatgctggccaagagcgccatgcccatcgaggtgatgatgaacgagaccgcccagcagaacatggagaaccaccccgtgatcagaaccctgtacgaccacgtggacgaggtgacctgcctggccttccaccccaccgagcagatcctggccagcggcagcagagactacaccctgaagctgttcgactacagcaagcccagcgccaagagagccttcaagtacatccaggaggccgagatgctgagaagcatcagcttccaccccagcggcgacttcatcctggtgggcacccagcaccccaccctgagactgtacgacatcaacaccttccagtgcttcgtgagctgcaacccccaggaccagcacaccgacgccatctgcagcgtgaactacaacagcagcgccaacatgtacgtgaccggcagcaaggacggctgcatcaagctgtgggacggcgtgagcaacagatgcatcaccaccttcgagaaggcccacgacggcgccgaggtgtgcagcgccatcttcagcaagaacagcaagtacatcctgagcagcggcaaggacagcgtggccaagctgtgggagatcagcaccggcagaaccctggtgagatacaccggcgccggcctgagcggcagacaggtgcacagaacccaggccgtgttcaaccacaccgaggactacgtgctgctgcccgacgagagaaccatcagcctgtgctgctgggacagcagaaccgccgagagaagaaacctgctgagcctgggccacaacaacatcgtgagatgcatcgtgcacagccccaccaaccccggcttcatgacctgcagcgacgacttcagagccagattctggtacagaagaagcaccaccgactag

SEQ ID NO: 104099 - DNA, 621 bp, synthetic construct
  misc_feature 1..621: note = Description of Artificial Sequence: Synthetic coding sequence
  source 1..621: mol_type = other DNA
atggacagcgccggccaggacatcaacctgaacagccccaacaagggcctgctgagcgacagcatgaccgacgtgcccgtggacaccggcgtggccgccagaacccccgccgtggagggcctgaccgaggccgaggaggaggagctgagagccgagctgaccaaggtggaggaggagatcgtgaccctgagacaggtgctggccgccaaggagagacactgcggcgagctgaagagaagactgggcctgagcaccctgggcgagctgaagcagaacctgagcagaagctggcacgacgtgcaggtgagcagcgcctacgtgaagaccagcgagaagctgggcgagtggaacgagaaggtgacccagagcgacctgtacaagaagacccaggagaccctgagccaggccggccagaagaccagcgccgccctgagcaccgtgggcagcgccatcagcagaaagctgggcgacatgagaaacagcgccaccttcaagagcttcgaggacagagtgggcaccatcaagagcaaggtggtgggcgacagagagaacggcagcgacaacctgcccagcagcgccggcagcggcgacaagcccctgagcgaccccgcccccttctag

SEQ ID NO: 104100 - DNA, 561 bp, synthetic construct
  misc_feature 1..561: note = Description of Artificial Sequence: Synthetic coding sequence
  source 1..561: mol_type = other DNA
atggacagcgccggccaggacatcaacctgaacagccccaacaagggcctgctgagcgacagcatgaccgacgtgcccgtggacaccggcgtggccgccagaacccccgccgtggagggcctgaccgaggccgaggaggaggagctgagagccgagctgaccaaggtggaggaggagatcgtgaccctgagacaggtgctggccgccaaggagagacactgcggcgagctgaagagaagactgggcctgagcaccctgggcgagctgaagcagaacctgagcagaagctggcacgacgtgcaggtgagcagcgcctacaagaagacccaggagaccctgagccaggccggccagaagaccagcgccgccctgagcaccgtgggcagcgccatcagcagaaagctgggcgacatgagaaacagcgccaccttcaagagcttcgaggacagagtgggcaccatcaagagcaaggtggtgggcgacagagagaacggcagcgacaacctgcccagcagcgccggcagcggcgacaagcccctgagcgaccccgcccccttctag

SEQ ID NO: 104101 - DNA, 630 bp, synthetic construct
  misc_feature 1..630: note = Description of Artificial Sequence: Synthetic coding sequence
  source 1..630: mol_type = other DNA
atggacagcgccggccaggacatcaacctgaacagccccaacaagggcctgctgagcgacagcatgaccgacgtgcccgtggacaccggcgtggccgccagaacccccgccgtggagggcctgaccgaggccgaggaggaggagctgagagccgagctgaccaaggtggaggaggagatcgtgaccctgagacaggtgctggccgccaaggagagacactgcggcgagctgaagagaagactgggcctgagcaccctgggcgagctgaagcagaacctgagcagaagctggcacgacgtgcaggtgagcagcgcctacaagaagacccaggagaccctgagccaggccggccagaagaccagcgccgccctgagcaccgtgggcagcgccatcagcagaaagctgggcgacatgagagcccaccccttcagccacagcttcagcagctacagcatcagacacagcatcagcatgcccgccatgagaaacagcgccaccttcaagagcttcgaggacagagtgggcaccatcaagagcaaggtggtgggcgacagagagaacggcagcgacaacctgcccagcagcgccggcagcggcgacaagcccctgagcgaccccgcccccttctag

SEQ ID NO: 104102 - DNA, 663 bp, synthetic construct
  misc_feature 1..663: note = Description of Artificial Sequence: Synthetic coding sequence
  source 1..663: mol_type = other DNA
atggacagcgccggccaggacatcaacctgaacagccccaacaagggcctgctgagcgacagcatgaccgacgtgcccgtggacaccggcgtggccgccagaacccccgccgtggagggcctgaccgaggccgaggaggaggagctgagagccgagctgaccaaggtggaggaggagatcgtgaccctgagacaggtgctggccgccaaggagagacactgcggcgagctgaagagaagactgggcctgagcaccctgggcgagctgaagcagaacctgagcagaagctggcacgacgtgcaggtgagcagcgcctacgtgaagaccagcgagaagctgggcgagtggaacgagaaggtgacccagagcgacctgtacaagaagacccaggagaccctgagccaggccggccagaagaccagcgccgccctgagcaccgtgggcagcgccatcagcagaaagctgggcgacatgagcagctacagcatcagacacagcatcagcatgcccgccatgagaaacagcgccaccttcaagagcttcgaggacagagtgggcaccatcaagagcaaggtggtgggcgacagagagaacggcagcgacaacctgcccagcagcgccggcagcggcgacaagcccctgagcgaccccgcccccttctag

SEQ ID NO: 104103 - DNA, 603 bp, synthetic construct
  misc_feature 1..603: note = Description of Artificial Sequence: Synthetic coding sequence
  source 1..603: mol_type = other DNA
atggacagcgccggccaggacatcaacctgaacagccccaacaagggcctgctgagcgacagcatgaccgacgtgcccgtggacaccggcgtggccgccagaacccccgccgtggagggcctgaccgaggccgaggaggaggagctgagagccgagctgaccaaggtggaggaggagatcgtgaccctgagacaggtgctggccgccaaggagagacactgcggcgagctgaagagaagactgggcctgagcaccctgggcgagctgaagcagaacctgagcagaagctggcacgacgtgcaggtgagcagcgcctacaagaagacccaggagaccctgagccaggccggccagaagaccagcgccgccctgagcaccgtgggcagcgccatcagcagaaagctgggcgacatgagcagctacagcatcagacacagcatcagcatgcccgccatgagaaacagcgccaccttcaagagcttcgaggacagagtgggcaccatcaagagcaaggtggtgggcgacagagagaacggcagcgacaacctgcccagcagcgccggcagcggcgacaagcccctgagcgaccccgcccccttctag

SEQ ID NO: 104104 - DNA, 492 bp, synthetic construct
  misc_feature 1..492: note = Description of Artificial Sequence: Synthetic coding sequence
  source 1..492: mol_type = other DNA
atggacagcgccggccagggcgtggccgccagaacccccgccgtggagggcctgaccgaggccgaggaggaggagctgagagccgagctgaccaaggtggaggaggagatcgtgaccctgagacaggtgctggccgccaaggagagacactgcggcgagctgaagagaagactgggcctgagcaccctgggcgagctgaagcagaacctgagcagaagctggcacgacgtgcaggtgagcagcgcctacaagaagacccaggagaccctgagccaggccggccagaagaccagcgccgccctgagcaccgtgggcagcgccatcagcagaaagctgggcgacatgagaaacagcgccaccttcaagagcttcgaggacagagtgggcaccatcaagagcaaggtggtgggcgacagagagaacggcagcgacaacctgcccagcagcgccggcagcggcgacaagcccctgagcgaccccgcccccttctag

SEQ ID NO: 104105 - DNA, 3405 bp, synthetic construct
  misc_feature 1..3405: note = Description of Artificial Sequence: Synthetic coding sequence
  source 1..3405: mol_type = other DNA
atgagattcggcagcaagatgatgcccatgttcctgaccgtgtacctgagcaacaacgagcagcacttcaccgaggtgcccgtgacccccgagaccatctgcagagacgtggtggacctgtgcaaggagcccggcgagagcgactgccacctggccgaggtgtggtgcggcagcgagagacccgtggccgacaacgagagaatgttcgacgtgctgcagagattcggcagccagagaaacgaggtgagattcttcctgagacacgagagaccccccggcagagacatcgtgagcggccccagaagccaggaccccagcctgaagagaaacggcgtgaaggtgcccggcgagtacagaagaaaggagaacggcgtgaacagccccagaatggacctgaccctggccgagctgcaggagatggccagcagacagcagcagcagatcgaggcccagcagcagctgctggccaccaaggagcagagactgaagttcctgaagcagcaggaccagagacagcagcagcaggtggccgagcaggagaagctgaagagactgaaggagatcgccgagaaccaggaggccaagctgaagaaggtgagagccctgaagggccacgtggagcagaagagactgagcaacggcaagctggtggaggagatcgagcagatgaacaacctgttccagcagaagcagagagagctggtgctggccgtgagcaaggtggaggagctgaccagacagctggagatgctgaagaacggcagaatcgacagccaccacgacaaccagagcgccgtggccgagctggacagactgtacaaggagctgcagctgagaaacaagctgaaccaggagcagaacgccaagctgcagcagcagagagagtgcctgaacaagagaaacagcgaggtggccgtgatggacaagagagtgaacgagctgagagacagactgtggaagaagaaggccgccctgcagcagaaggagaacctgcccgtgagcagcgacggcaacctgccccagcaggccgccagcgcccccagcagagtggccgccgtgggcccctacatccagagcagcaccatgcccagaatgcccagcagacccgagctgctggtgaagcccgccctgcccgacggcagcctggtgatccaggccagcgagggccccatgaagatccagaccctgcccaacatgagaagcggcgccgccagccagaccaagggcagcaagatccaccccgtgggccccgactggagccccagcaacgccgacctgttccccagccagggcagcgccagcgtgccccagagcaccggcaacgccctggaccaggtggacgacggcgaggtgcccctgagagagaaggagaagaaggtgagacccttcagcatgttcgacgccgtggaccagagcaacgccccccccagcttcggcaccctgagaaagaaccagagcagcgaggacatcctgagagacgcccaggtggccaacaagaacgtggccaaggtgcccccccccgtgcccaccaagcccaagcagatcaacctgccctacttcggccagaccaaccagccccccagcgacatcaagcccgacggcagcagccagcagctgagcaccgtggtgcccagcatgggcaccaagcccaagcccgccggccagcagcccagagtgctgctgagccccagcatccccagcgtgggccaggaccagaccctgagccccggcagcaagcaggagagcccccccgccgccgccgtgagacccttcaccccccagcccagcaaggacaccctgctgccccccttcagaaagccccagaccgtggccgccagcagcatctacagcatgtacacccagcagcaggcccccggcaagaacttccagcaggccgtgcagagcgccctgaccaagacccacaccagaggcccccacttcagcagcgtgtacggcaagcccgtgatcgccgccgcccagaaccagcagcagcaccccgagaacatctacagcaacagccagggcaagcccggcagccccgagcccgagaccgagcccgtgagcagcgtgcaggagaaccacgagaacgagagaatccccagacccctgagccccaccaagctgctgcccttcctgagcaacccctacagaaaccagagcgacgccgacctggaggccctgagaaagaagctgagcaacgcccccagacccctgaagaagagaagcagcatcaccgagcccgagggccccaacggccccaacatccagaagctgctgtaccagagaaccaccatcgccgccatggagaccatcagcgtgcccagctaccccagcaagagcgccagcgtgaccgccagcagcgagagccccgtggagatccagaacccctacctgcacgtggagcccgagaaggaggtggtgagcctggtgcccgagagcctgagccccgaggacgtgggcaacgccagcaccgagaacagcgacatgcccgcccccagccccggcctggactacgagcccgagggcgtgcccgacaacagccccaacctgcagaacaaccccgaggagcccaaccccgaggccccccacgtgctggacgtgtacctggaggagtaccccccctaccccccccccccctaccccagcggcgagcccgagggccccggcgaggacagcgtgagcatgagaccccccgagatcaccggccaggtgagcctgccccccggcaagagaaccaacctgagaaagaccggcagcgagagaatcgcccacggcatgagagtgaagttcaaccccctggccctgctgctggacagcagcctggagggcgagttcgacctggtgcagagaatcatctacgaggtggacgaccccagcctgcccaacgacgagggcatcaccgccctgcacaacgccgtgtgcgccggccacaccgagatcgtgaagttcctggtgcagttcggcgtgaacgtgaacgccgccgacagcgacggctggacccccctgcactgcgccgccagctgcaacaacgtgcaggtgtgcaagttcctggtggagagcggcgccgccgtgttcgccatgacctacagcgacatgcagaccgccgccgacaagtgcgaggagatggaggagggctacacccagtgcagccagttcctgtacggcgtgcaggagaagatgggcatcatgaacaagggcgtgatctacgccctgtgggactacgagccccagaacgacgacgagctgcccatgaaggagggcgactgcatgaccatcatccacagagaggacgaggacgagatcgagtggtggtgggccagactgaacgacaaggagggctacgtgcccagaaacctgctgggcctgtaccccagaatcaagcccagacagagaagcctggcctag

SEQ ID NO: 104106 - DNA, 3018 bp, synthetic construct
  misc_feature 1..3018: note = Description of Artificial Sequence: Synthetic coding sequence
  source 1..3018: mol_type = other DNA
atggacctgaccctggccgagctgcaggagatggccagcagacagcagcagcagatcgaggcccagcagcagctgctggccaccaaggagcagagactgaagttcctgaagcagcaggaccagagacagcagcagcaggtggccgagcaggagaagctgaagagactgaaggagatcgccgagaaccaggaggccaagctgaagaaggtgagagccctgaagggccacgtggagcagaagagactgagcaacggcaagctggtggaggagatcgagcagatgaacaacctgttccagcagaagcagagagagctggtgctggccgtgagcaaggtggaggagctgaccagacagctggagatgctgaagaacggcagaatcgacagccaccacgacaaccagagcgccgtggccgagctggacagactgtacaaggagctgcagctgagaaacaagctgaaccaggagcagaacgccaagctgcagcagcagagagagtgcctgaacaagagaaacagcgaggtggccgtgatggacaagagagtgaacgagctgagagacagactgtggaagaagaaggccgccctgcagcagaaggagaacctgcccgtgagcagcgacggcaacctgccccagcaggccgccagcgcccccagcagagtggccgccgtgggcccctacatccagagcagcaccatgcccagaatgcccagcagacccgagctgctggtgaagcccgccctgcccgacggcagcctggtgatccaggccagcgagggccccatgaagatccagaccctgcccaacatgagaagcggcgccgccagccagaccaagggcagcaagatccaccccgtgggccccgactggagccccagcaacgccgacctgttccccagccagggcagcgccagcgtgccccagagcaccggcaacgccctggaccaggtggacgacggcgaggtgcccctgagagagaaggagaagaaggtgagacccttcagcatgttcgacgccgtggaccagagcaacgccccccccagcttcggcaccctgagaaagaaccagagcagcgaggacatcctgagagacgcccaggtggccaacaagaacgtggccaaggtgcccccccccgtgcccaccaagcccaagcagatcaacctgccctacttcggccagaccaaccagccccccagcgacatcaagcccgacggcagcagccagcagctgagcaccgtggtgcccagcatgggcaccaagcccaagcccgccggccagcagcccagagtgctgctgagccccagcatccccagcgtgggccaggaccagaccctgagccccggcagcaagcaggagagcccccccgccgccgccgtgagacccttcaccccccagcccagcaaggacaccctgctgccccccttcagaaagccccagaccgtggccgccagcagcatctacagcatgtacacccagcagcaggcccccggcaagaacttccagcaggccgtgcagagcgccctgaccaagacccacaccagaggcccccacttcagcagcgtgtacggcaagcccgtgatcgccgccgcccagaaccagcagcagcaccccgagaacatctacagcaacagccagggcaagcccggcagccccgagcccgagaccgagcccgtgagcagcgtgcaggagaaccacgagaacgagagaatccccagacccctgagccccaccaagctgctgcccttcctgagcaacccctacagaaaccagagcgacgccgacctggaggccctgagaaagaagctgagcaacgcccccagacccctgaagaagagaagcagcatcaccgagcccgagggccccaacggccccaacatccagaagctgctgtaccagagaaccaccatcgccgccatggagaccatcagcgtgcccagctaccccagcaagagcgccagcgtgaccgccagcagcgagagccccgtggagatccagaacccctacctgcacgtggagcccgagaaggaggtggtgagcctggtgcccgagagcctgagccccgaggacgtgggcaacgccagcaccgagaacagcgacatgcccgcccccagccccggcctggactacgagcccgagggcgtgcccgacaacagccccaacctgcagaacaaccccgaggagcccaaccccgaggccccccacgtgctggacgtgtacctggaggagtaccccccctaccccccccccccctaccccagcggcgagcccgagggccccggcgaggacagcgtgagcatgagaccccccgagatcaccggccaggtgagcctgccccccggcaagagaaccaacctgagaaagaccggcagcgagagaatcgcccacggcatgagagtgaagttcaaccccctggccctgctgctggacagcagcctggagggcgagttcgacctggtgcagagaatcatctacgaggtggacgaccccagcctgcccaacgacgagggcatcaccgccctgcacaacgccgtgtgcgccggccacaccgagatcgtgaagttcctggtgcagttcggcgtgaacgtgaacgccgccgacagcgacggctggacccccctgcactgcgccgccagctgcaacaacgtgcaggtgtgcaagttcctggtggagagcggcgccgccgtgttcgccatgacctacagcgacatgcagaccgccgccgacaagtgcgaggagatggaggagggctacacccagtgcagccagttcctgtacggcgtgcaggagaagatgggcatcatgaacaagggcgtgatctacgccctgtgggactacgagccccagaacgacgacgagctgcccatgaaggagggcgactgcatgaccatcatccacagagaggacgaggacgagatcgagtggtggtgggccagactgaacgacaaggagggctacgtgcccagaaacctgctgggcctgtaccccagaatcaagcccagacagagaagcctggcctag

SEQ ID NO: 104107 - DNA, 1104 bp, synthetic construct
  misc_feature 1..1104: note = Description of Artificial Sequence: Synthetic coding sequence
  source 1..1104: mol_type = other DNA
atggagaccatcagcgtgcccagctaccccagcaagagcgccagcgtgaccgccagcagcgagagccccgtggagatccagaacccctacctgcacgtggagcccgagaaggaggtggtgagcctggtgcccgagagcctgagccccgaggacgtgggcaacgccagcaccgagaacagcgacatgcccgcccccagccccggcctggactacgagcccgagggcgtgcccgacaacagccccaacctgcagaacaaccccgaggagcccaaccccgaggccccccacgtgctggacgtgtacctggaggagtaccccccctaccccccccccccctaccccagcggcgagcccgagggccccggcgaggacagcgtgagcatgagaccccccgagatcaccggccaggtgagcctgccccccggcaagagaaccaacctgagaaagaccggcagcgagagaatcgcccacggcatgagagtgaagttcaaccccctggccctgctgctggacagcagcctggagggcgagttcgacctggtgcagagaatcatctacgaggtggacgaccccagcctgcccaacgacgagggcatcaccgccctgcacaacgccgtgtgcgccggccacaccgagatcgtgaagttcctggtgcagttcggcgtgaacgtgaacgccgccgacagcgacggctggacccccctgcactgcgccgccagctgcaacaacgtgcaggtgtgcaagttcctggtggagagcggcgccgccgtgttcgccatgacctacagcgacatgcagaccgccgccgacaagtgcgaggagatggaggagggctacacccagtgcagccagttcctgtacggcgtgcaggagaagatgggcatcatgaacaagggcgtgatctacgccctgtgggactacgagccccagaacgacgacgagctgcccatgaaggagggcgactgcatgaccatcatccacagagaggacgaggacgagatcgagtggtggtgggccagactgaacgacaaggagggctacgtgcccagaaacctgctgggcctgtaccccagaatcaagcccagacagagaagcctggcctag

SEQ ID NO: 104108 - DNA, 2043 bp, synthetic construct
  misc_feature 1..2043: note = Description of Artificial Sequence: Synthetic coding sequence
  source 1..2043: mol_type = other DNA
atgaacttcgagaccagcagatgcgccaccctgcagtactgccccgacccctacatccagagattcgtggagacccccgcccacttcagctggaaggagagctactacagaagcaccatgagccagagcacccagaccaacgagttcctgagccccgaggtgttccagcacatctgggacttcctggagcagcccatctgcagcgtgcagcccatcgacctgaacttcgtggacgagcccagcgaggacggcgccaccaacaagatcgagatcagcatggactgcatcagaatgcaggacagcgacctgagcgaccccatgtggccccagtacaccaacctgggcctgctgaacagcatggaccagcagatccagaacggcagcagcagcaccagcccctacaacaccgaccacgcccagaacagcgtgaccgcccccagcccctacgcccagcccagcagcaccttcgacgccctgagccccagccccgccatccccagcaacaccgactaccccggcccccacagcttcgacgtgagcttccagcagagcagcaccgccaagagcgccacctggacctacagcaccgagctgaagaagctgtactgccagatcgccaagacctgccccatccagatcaaggtgatgaccccccccccccagggcgccgtgatcagagccatgcccgtgtacaagaaggccgagcacgtgaccgaggtggtgaagagatgccccaaccacgagctgagcagagagttcaacgagggccagatcgccccccccagccacctgatcagagtggagggcaacagccacgcccagtacgtggaggaccccatcaccggcagacagagcgtgctggtgccctacgagcccccccaggtgggcaccgagttcaccaccgtgctgtacaacttcatgtgcaacagcagctgcgtgggcggcatgaacagaagacccatcctgatcatcgtgaccctggagaccagagacggccaggtgctgggcagaagatgcttcgaggccagaatctgcgcctgccccggcagagacagaaaggccgacgaggacagcatcagaaagcagcaggtgagcgacagcaccaagaacggcgacggcaccaagagacccttcagacagaacacccacggcatccagatgaccagcatcaagaagagaagaagccccgacgacgagctgctgtacctgcccgtgagaggcagagagacctacgagatgctgctgaagatcaaggagagcctggagctgatgcagtacctgccccagcacaccatcgagacctacagacagcagcagcagcagcagcaccagcacctgctgcagaagcagaccagcatccagagccccagcagctacggcaacagcagcccccccctgaacaagatgaacagcatgaacaagctgcccagcgtgagccagctgatcaacccccagcagagaaacgccctgacccccaccaccatccccgacggcatgggcgccaacatccccatgatgggcacccacatgcccatggccggcgacatgaacggcctgagccccacccaggccctgcccccccccctgagcatgcccagcaccagccactgcacccccccccccccctaccccaccgactgcagcatcgtgagcttcctggccagactgggctgcagcagctgcctggactacttcaccacccagggcctgaccaccatctaccagatcgagcactacagcatggacgacctggccagcctgaagatccccgagcagttcagacacgccatctggaagggcatcctggaccacagacagctgcacgagttcagcagccccagccacctgctgagaacccccagcagcgccagcaccgtgagcgtgggcagcagcgagaccagaggcgagagagtgatcgacgccgtgagattcaccctgagacagaccatcagcttcccccccagagacgagtggaacgacttcaacttcgacatggacgccagaagaaacaagcagcagagaatcaaggaggagggcgagtag

SEQ ID NO: 104109 - DNA, 1533 bp, synthetic construct
  misc_feature 1..1533: note = Description of Artificial Sequence: Synthetic coding sequence
  source 1..1533: mol_type = other DNA
atgaacttcgagaccagcagatgcgccaccctgcagtactgccccgacccctacatccagagattcgtggagacccccgcccacttcagctggaaggagagctactacagaagcaccatgagccagagcacccagaccaacgagttcctgagccccgaggtgttccagcacatctgggacttcctggagcagcccatctgcagcgtgcagcccatcgacctgaacttcgtggacgagcccagcgaggacggcgccaccaacaagatcgagatcagcatggactgcatcagaatgcaggacagcgacctgagcgaccccatgtggccccagtacaccaacctgggcctgctgaacagcatggaccagcagatccagaacggcagcagcagcaccagcccctacaacaccgaccacgcccagaacagcgtgaccgcccccagcccctacgcccagcccagcagcaccttcgacgccctgagccccagccccgccatccccagcaacaccgactaccccggcccccacagcttcgacgtgagcttccagcagagcagcaccgccaagagcgccacctggacctacagcaccgagctgaagaagctgtactgccagatcgccaagacctgccccatccagatcaaggtgatgaccccccccccccagggcgccgtgatcagagccatgcccgtgtacaagaaggccgagcacgtgaccgaggtggtgaagagatgccccaaccacgagctgagcagagagttcaacgagggccagatcgccccccccagccacctgatcagagtggagggcaacagccacgcccagtacgtggaggaccccatcaccggcagacagagcgtgctggtgccctacgagcccccccaggtgggcaccgagttcaccaccgtgctgtacaacttcatgtgcaacagcagctgcgtgggcggcatgaacagaagacccatcctgatcatcgtgaccctggagaccagagacggccaggtgctgggcagaagatgcttcgaggccagaatctgcgcctgccccggcagagacagaaaggccgacgaggacagcatcagaaagcagcaggtgagcgacagcaccaagaacggcgacggcaccaagagacccttcagacagaacacccacggcatccagatgaccagcatcaagaagagaagaagccccgacgacgagctgctgtacctgcccgtgagaggcagagagacctacgagatgctgctgaagatcaaggagagcctggagctgatgcagtacctgccccagcacaccatcgagacctacagacagcagcagcagcagcagcaccagcacctgctgcagaagcagaccagcatccagagccccagcagctacggcaacagcagcccccccctgaacaagatgaacagcatgaacaagctgcccagcgtgagccagctgatcaacccccagcagagaaacgccctgacccccaccaccatccccgacggcatgggcgccaacagaagcggcaagagcgagaacccctag

SEQ ID NO: 104110 - DNA, 1761 bp, synthetic construct
  misc_feature 1..1761: note = Description of Artificial Sequence: Synthetic coding sequence
  source 1..1761: mol_type = other DNA
atgctgtacctggagaacaacgcccagacccagttcagcgagccccagtacaccaacctgggcctgctgaacagcatggaccagcagatccagaacggcagcagcagcaccagcccctacaacaccgaccacgcccagaacagcgtgaccgcccccagcccctacgcccagcccagcagcaccttcgacgccctgagccccagccccgccatccccagcaacaccgactaccccggcccccacagcttcgacgtgagcttccagcagagcagcaccgccaagagcgccacctggacctacagcaccgagctgaagaagctgtactgccagatcgccaagacctgccccatccagatcaaggtgatgaccccccccccccagggcgccgtgatcagagccatgcccgtgtacaagaaggccgagcacgtgaccgaggtggtgaagagatgccccaaccacgagctgagcagagagttcaacgagggccagatcgccccccccagccacctgatcagagtggagggcaacagccacgcccagtacgtggaggaccccatcaccggcagacagagcgtgctggtgccctacgagcccccccaggtgggcaccgagttcaccaccgtgctgtacaacttcatgtgcaacagcagctgcgtgggcggcatgaacagaagacccatcctgatcatcgtgaccctggagaccagagacggccaggtgctgggcagaagatgcttcgaggccagaatctgcgcctgccccggcagagacagaaaggccgacgaggacagcatcagaaagcagcaggtgagcgacagcaccaagaacggcgacggcaccaagagacccttcagacagaacacccacggcatccagatgaccagcatcaagaagagaagaagccccgacgacgagctgctgtacctgcccgtgagaggcagagagacctacgagatgctgctgaagatcaaggagagcctggagctgatgcagtacctgccccagcacaccatcgagacctacagacagcagcagcagcagcagcaccagcacctgctgcagaagcagaccagcatccagagccccagcagctacggcaacagcagcccccccctgaacaagatgaacagcatgaacaagctgcccagcgtgagccagctgatcaacccccagcagagaaacgccctgacccccaccaccatccccgacggcatgggcgccaacatccccatgatgggcacccacatgcccatggccggcgacatgaacggcctgagccccacccaggccctgcccccccccctgagcatgcccagcaccagccactgcacccccccccccccctaccccaccgactgcagcatcgtgagcttcctggccagactgggctgcagcagctgcctggactacttcaccacccagggcctgaccaccatctaccagatcgagcactacagcatggacgacctggccagcctgaagatccccgagcagttcagacacgccatctggaagggcatcctggaccacagacagctgcacgagttcagcagccccagccacctgctgagaacccccagcagcgccagcaccgtgagcgtgggcagcagcgagaccagaggcgagagagtgatcgacgccgtgagattcaccctgagacagaccatcagcttcccccccagagacgagtggaacgacttcaacttcgacatggacgccagaagaaacaagcagcagagaatcaaggaggagggcgagtag

SEQ ID NO: 104111 - DNA, 1788 bp, synthetic construct
  misc_feature 1..1788: note = Description of Artificial Sequence: Synthetic coding sequence
  source 1..1788: mol_type = other DNA
atgaacttcgagaccagcagatgcgccaccctgcagtactgccccgacccctacatccagagattcgtggagacccccgcccacttcagctggaaggagagctactacagaagcaccatgagccagagcacccagaccaacgagttcctgagccccgaggtgttccagcacatctgggacttcctggagcagcccatctgcagcgtgcagcccatcgacctgaacttcgtggacgagcccagcgaggacggcgccaccaacaagatcgagatcagcatggactgcatcagaatgcaggacagcgacctgagcgaccccatgtggtacagcaccgagctgaagaagctgtactgccagatcgccaagacctgccccatccagatcaaggtgatgaccccccccccccagggcgccgtgatcagagccatgcccgtgtacaagaaggccgagcacgtgaccgaggtggtgaagagatgccccaaccacgagctgagcagagagttcaacgagggccagatcgccccccccagccacctgatcagagtggagggcaacagccacgcccagtacgtggaggaccccatcaccggcagacagagcgtgctggtgccctacgagcccccccaggtgggcaccgagttcaccaccgtgctgtacaacttcatgtgcaacagcagctgcgtgggcggcatgaacagaagacccatcctgatcatcgtgaccctggagaccagagacggccaggtgctgggcagaagatgcttcgaggccagaatctgcgcctgccccggcagagacagaaaggccgacgaggacagcatcagaaagcagcaggtgagcgacagcaccaagaacggcgacggcaccaagagacccttcagacagaacacccacggcatccagatgaccagcatcaagaagagaagaagccccgacgacgagctgctgtacctgcccgtgagaggcagagagacctacgagatgctgctgaagatcaaggagagcctggagctgatgcagtacctgccccagcacaccatcgagacctacagacagcagcagcagcagcagcaccagcacctgctgcagaagcagaccagcatccagagccccagcagctacggcaacagcagcccccccctgaacaagatgaacagcatgaacaagctgcccagcgtgagccagctgatcaacccccagcagagaaacgccctgacccccaccaccatccccgacggcatgggcgccaacatccccatgatgggcacccacatgcccatggccggcgacatgaacggcctgagccccacccaggccctgcccccccccctgagcatgcccagcaccagccactgcacccccccccccccctaccccaccgactgcagcatcgtgagcttcctggccagactgggctgcagcagctgcctggactacttcaccacccagggcctgaccaccatctaccagatcgagcactacagcatggacgacctggccagcctgaagatccccgagcagttcagacacgccatctggaagggcatcctggaccacagacagctgcacgagttcagcagccccagccacctgctgagaacccccagcagcgccagcaccgtgagcgtgggcagcagcgagaccagaggcgagagagtgatcgacgccgtgagattcaccctgagacagaccatcagcttcccccccagagacgagtggaacgacttcaacttcgacatggacgccagaagaaacaagcagcagagaatcaaggaggagggcgagtag

SEQ ID NO: 104112 - DNA, 1668 bp, synthetic construct
  misc_feature 1..1668: note = Description of Artificial Sequence: Synthetic coding sequence
  source 1..1668: mol_type = other DNA
atgaacttcgagaccagcagatgcgccaccctgcagtactgccccgacccctacatccagagattcgtggagacccccgcccacttcagctggaaggagagctactacagaagcaccatgagccagagcacccagaccaacgagttcctgagccccgaggtgttccagcacatctgggacttcctggagcagcccatctgcagcgtgcagcccatcgacctgaacttcgtggacgagcccagcgaggacggcgccaccaacaagatcgagatcagcatggactgcatcagaatgcaggacagcgacctgagcgaccccatgtggccccagtacaccaacctgggcctgctgaacagcatggaccagcagatccagaacggcagcagcagcaccagcccctacaacaccgaccacgcccagaacagcgtgaccgcccccagcccctacgcccagcccagcagcaccttcgacgccctgagccccagccccgccatccccagcaacaccgactaccccggcccccacagcttcgacgtgagcttccagcagagcagcaccgccaagagcgccacctggacctacagcaccgagctgaagaagctgtactgccagatcgccaagacctgccccatccagatcaaggtgatgaccccccccccccagggcgccgtgatcagagccatgcccgtgtacaagaaggccgagcacgtgaccgaggtggtgaagagatgccccaaccacgagctgagcagagagttcaacgagggccagatcgccccccccagccacctgatcagagtggagggcaacagccacgcccagtacgtggaggaccccatcaccggcagacagagcgtgctggtgccctacgagcccccccaggtgggcaccgagttcaccaccgtgctgtacaacttcatgtgcaacagcagctgcgtgggcggcatgaacagaagacccatcctgatcatcgtgaccctggagaccagagacggccaggtgctgggcagaagatgcttcgaggccagaatctgcgcctgccccggcagagacagaaaggccgacgaggacagcatcagaaagcagcaggtgagcgacagcaccaagaacggcgacggcaccaagagacccttcagacagaacacccacggcatccagatgaccagcatcaagaagagaagaagccccgacgacgagctgctgtacctgcccgtgagaggcagagagacctacgagatgctgctgaagatcaaggagagcctggagctgatgcagtacctgccccagcacaccatcgagacctacagacagcagcagcagcagcagcaccagcacctgctgcagaagcagaccagcatccagagccccagcagctacggcaacagcagcccccccctgaacaagatgaacagcatgaacaagctgcccagcgtgagccagctgatcaacccccagcagagaaacgccctgacccccaccaccatccccgacggcatgggcgccaacatccccatgatgggcacccacatgcccatggccggcgacatgaacggcctgagccccacccaggccctgcccccccccctgagcatgcccagcaccagccactgcacccccccccccccctaccccaccgactgcagcatcgtgagaatctggcaggtgtag

SEQ ID NO: 104113 - DNA, 1251 bp, synthetic construct
  misc_feature 1..1251: note = Description of Artificial Sequence: Synthetic coding sequence
  source 1..1251: mol_type = other DNA
atgctgtacctggagaacaacgcccagacccagttcagcgagccccagtacaccaacctgggcctgctgaacagcatggaccagcagatccagaacggcagcagcagcaccagcccctacaacaccgaccacgcccagaacagcgtgaccgcccccagcccctacgcccagcccagcagcaccttcgacgccctgagccccagccccgccatccccagcaacaccgactaccccggcccccacagcttcgacgtgagcttccagcagagcagcaccgccaagagcgccacctggacctacagcaccgagctgaagaagctgtactgccagatcgccaagacctgccccatccagatcaaggtgatgaccccccccccccagggcgccgtgatcagagccatgcccgtgtacaagaaggccgagcacgtgaccgaggtggtgaagagatgccccaaccacgagctgagcagagagttcaacgagggccagatcgccccccccagccacctgatcagagtggagggcaacagccacgcccagtacgtggaggaccccatcaccggcagacagagcgtgctggtgccctacgagcccccccaggtgggcaccgagttcaccaccgtgctgtacaacttcatgtgcaacagcagctgcgtgggcggcatgaacagaagacccatcctgatcatcgtgaccctggagaccagagacggccaggtgctgggcagaagatgcttcgaggccagaatctgcgcctgccccggcagagacagaaaggccgacgaggacagcatcagaaagcagcaggtgagcgacagcaccaagaacggcgacggcaccaagagacccttcagacagaacacccacggcatccagatgaccagcatcaagaagagaagaagccccgacgacgagctgctgtacctgcccgtgagaggcagagagacctacgagatgctgctgaagatcaaggagagcctggagctgatgcagtacctgccccagcacaccatcgagacctacagacagcagcagcagcagcagcaccagcacctgctgcagaagcagaccagcatccagagccccagcagctacggcaacagcagcccccccctgaacaagatgaacagcatgaacaagctgcccagcgtgagccagctgatcaacccccagcagagaaacgccctgacccccaccaccatccccgacggcatgggcgccaacagaagcggcaagagcgagaacccctag

SEQ ID NO: 104114 - DNA, 1386 bp, synthetic construct
  misc_feature 1..1386: note = Description of Artificial Sequence: Synthetic coding sequence
  source 1..1386: mol_type = other DNA
atgctgtacctggagaacaacgcccagacccagttcagcgagccccagtacaccaacctgggcctgctgaacagcatggaccagcagatccagaacggcagcagcagcaccagcccctacaacaccgaccacgcccagaacagcgtgaccgcccccagcccctacgcccagcccagcagcaccttcgacgccctgagccccagccccgccatccccagcaacaccgactaccccggcccccacagcttcgacgtgagcttccagcagagcagcaccgccaagagcgccacctggacctacagcaccgagctgaagaagctgtactgccagatcgccaagacctgccccatccagatcaaggtgatgaccccccccccccagggcgccgtgatcagagccatgcccgtgtacaagaaggccgagcacgtgaccgaggtggtgaagagatgccccaaccacgagctgagcagagagttcaacgagggccagatcgccccccccagccacctgatcagagtggagggcaacagccacgcccagtacgtggaggaccccatcaccggcagacagagcgtgctggtgccctacgagcccccccaggtgggcaccgagttcaccaccgtgctgtacaacttcatgtgcaacagcagctgcgtgggcggcatgaacagaagacccatcctgatcatcgtgaccctggagaccagagacggccaggtgctgggcagaagatgcttcgaggccagaatctgcgcctgccccggcagagacagaaaggccgacgaggacagcatcagaaagcagcaggtgagcgacagcaccaagaacggcgacggcaccaagagacccttcagacagaacacccacggcatccagatgaccagcatcaagaagagaagaagccccgacgacgagctgctgtacctgcccgtgagaggcagagagacctacgagatgctgctgaagatcaaggagagcctggagctgatgcagtacctgccccagcacaccatcgagacctacagacagcagcagcagcagcagcaccagcacctgctgcagaagcagaccagcatccagagccccagcagctacggcaacagcagcccccccctgaacaagatgaacagcatgaacaagctgcccagcgtgagccagctgatcaacccccagcagagaaacgccctgacccccaccaccatccccgacggcatgggcgccaacatccccatgatgggcacccacatgcccatggccggcgacatgaacggcctgagccccacccaggccctgcccccccccctgagcatgcccagcaccagccactgcacccccccccccccctaccccaccgactgcagcatcgtgagaatctggcaggtgtag

SEQ ID NO: 104115 - DNA, 1464 bp, synthetic construct
  misc_feature 1..1464: note = Description of Artificial Sequence: Synthetic coding sequence
  source 1..1464: mol_type = other DNA
atgaacttcgagaccagcagatgcgccaccctgcagtactgccccgacccctacatccagagattcgtggagacccccgcccacttcagctggaaggagagctactacagaagcaccatgagccagagcacccagaccaacgagttcctgagccccgaggtgttccagcacatctgggacttcctggagcagcccatctgcagcgtgcagcccatcgacctgaacttcgtggacgagcccagcgaggacggcgccaccaacaagatcgagatcagcatggactgcatcagaatgcaggacagcgacctgagcgaccccatgtggccccagtacaccaacctgggcctgctgaacagcatggaccagcagatccagaacggcagcagcagcaccagcccctacaacaccgaccacgcccagaacagcgtgaccgcccccagcccctacgcccagcccagcagcaccttcgacgccctgagccccagccccgccatccccagcaacaccgactaccccggcccccacagcttcgacgtgagcttccagcagagcagcaccgccaagagcgccacctggacctacagcaccgagctgaagaagctgtactgccagatcgccaagacctgccccatccagatcaaggtgatgaccccccccccccagggcgccgtgatcagagccatgcccgtgtacaagaaggccgagcacgtgaccgaggtggtgaagagatgccccaaccacgagctgagcagagagttcaacgagggccagatcgccccccccagccacctgatcagagtggagggcaacagccacgcccagtacgtggaggaccccatcaccggcagacagagcgtgctggtgccctacgagcccccccaggtgggcaccgagttcaccaccgtgctgtacaacttcatgtgcaacagcagctgcgtgggcggcatgaacagaagacccatcctgatcatcgtgaccctggagaccagagacggccaggtgctgggcagaagatgcttcgaggccagaatctgcgcctgccccggcagagacagaaaggccgacgaggacagcatcagaaagcagcaggtgagcgacagcaccaagaacggcgacggcaccaagagacccttcagacagaacacccacggcatccagatgaccagcatcaagaagagaagaagccccgacgacgagctgctgtacctgcccgtgagaggcagagagacctacgagatgctgctgaagatcaaggagagcctggagctgatgcagtacctgccccagcacaccatcgagacctacagacagcagcagcagcagcagcaccagcacctgctgcagaagcacctgctgagcgcctgcttcagaaacgagctggtggagcccagaagagagacccccaagcagagcgacgtgttcttcagacacagcaagccccccaacagaagcgtgtacccctag

SEQ ID NO: 104116 - DNA, 1182 bp, synthetic construct
  misc_feature 1..1182: note = Description of Artificial Sequence: Synthetic coding sequence
  source 1..1182: mol_type = other DNA
atgctgtacctggagaacaacgcccagacccagttcagcgagccccagtacaccaacctgggcctgctgaacagcatggaccagcagatccagaacggcagcagcagcaccagcccctacaacaccgaccacgcccagaacagcgtgaccgcccccagcccctacgcccagcccagcagcaccttcgacgccctgagccccagccccgccatccccagcaacaccgactaccccggcccccacagcttcgacgtgagcttccagcagagcagcaccgccaagagcgccacctggacctacagcaccgagctgaagaagctgtactgccagatcgccaagacctgccccatccagatcaaggtgatgaccccccccccccagggcgccgtgatcagagccatgcccgtgtacaagaaggccgagcacgtgaccgaggtggtgaagagatgccccaaccacgagctgagcagagagttcaacgagggccagatcgccccccccagccacctgatcagagtggagggcaacagccacgcccagtacgtggaggaccccatcaccggcagacagagcgtgctggtgccctacgagcccccccaggtgggcaccgagttcaccaccgtgctgtacaacttcatgtgcaacagcagctgcgtgggcggcatgaacagaagacccatcctgatcatcgtgaccctggagaccagagacggccaggtgctgggcagaagatgcttcgaggccagaatctgcgcctgccccggcagagacagaaaggccgacgaggacagcatcagaaagcagcaggtgagcgacagcaccaagaacggcgacggcaccaagagacccttcagacagaacacccacggcatccagatgaccagcatcaagaagagaagaagccccgacgacgagctgctgtacctgcccgtgagaggcagagagacctacgagatgctgctgaagatcaaggagagcctggagctgatgcagtacctgccccagcacaccatcgagacctacagacagcagcagcagcagcagcaccagcacctgctgcagaagcacctgctgagcgcctgcttcagaaacgagctggtggagcccagaagagagacccccaagcagagcgacgtgttcttcagacacagcaagccccccaacagaagcgtgtacccctag

SEQ ID NO: 104117 - DNA, 2031 bp, synthetic construct
  misc_feature 1..2031: note = Description of Artificial Sequence: Synthetic coding sequence
  source 1..2031: mol_type = other DNA
atgaacttcgagaccagcagatgcgccaccctgcagtactgccccgacccctacatccagagattcgtggagacccccgcccacttcagctggaaggagagctactacagaagcaccatgagccagagcacccagaccaacgagttcctgagccccgaggtgttccagcacatctgggacttcctggagcagcccatctgcagcgtgcagcccatcgacctgaacttcgtggacgagcccagcgaggacggcgccaccaacaagatcgagatcagcatggactgcatcagaatgcaggacagcgacctgagcgaccccatgtggccccagtacaccaacctgggcctgctgaacagcatggaccagcagatccagaacggcagcagcagcaccagcccctacaacaccgaccacgcccagaacagcgtgaccgcccccagcccctacgcccagcccagcagcaccttcgacgccctgagccccagccccgccatccccagcaacaccgactaccccggcccccacagcttcgacgtgagcttccagcagagcagcaccgccaagagcgccacctggacctacagcaccgagctgaagaagctgtactgccagatcgccaagacctgccccatccagatcaaggtgatgaccccccccccccagggcgccgtgatcagagccatgcccgtgtacaagaaggccgagcacgtgaccgaggtggtgaagagatgccccaaccacgagctgagcagagagttcaacgagggccagatcgccccccccagccacctgatcagagtggagggcaacagccacgcccagtacgtggaggaccccatcaccggcagacagagcgtgctggtgccctacgagcccccccaggtgggcaccgagttcaccaccgtgctgtacaacttcatgtgcaacagcagctgcgtgggcggcatgaacagaagacccatcctgatcatcgtgaccctggagaccagagacggccaggtgctgggcagaagatgcttcgaggccagaatctgcgcctgccccggcagagacagaaaggccgacgaggacagcatcagaaagcagcaggtgagcgacagcaccaagaacggcgacgccttcagacagaacacccacggcatccagatgaccagcatcaagaagagaagaagccccgacgacgagctgctgtacctgcccgtgagaggcagagagacctacgagatgctgctgaagatcaaggagagcctggagctgatgcagtacctgccccagcacaccatcgagacctacagacagcagcagcagcagcagcaccagcacctgctgcagaagcagaccagcatccagagccccagcagctacggcaacagcagcccccccctgaacaagatgaacagcatgaacaagctgcccagcgtgagccagctgatcaacccccagcagagaaacgccctgacccccaccaccatccccgacggcatgggcgccaacatccccatgatgggcacccacatgcccatggccggcgacatgaacggcctgagccccacccaggccctgcccccccccctgagcatgcccagcaccagccactgcacccccccccccccctaccccaccgactgcagcatcgtgagcttcctggccagactgggctgcagcagctgcctggactacttcaccacccagggcctgaccaccatctaccagatcgagcactacagcatggacgacctggccagcctgaagatccccgagcagttcagacacgccatctggaagggcatcctggaccacagacagctgcacgagttcagcagccccagccacctgctgagaacccccagcagcgccagcaccgtgagcgtgggcagcagcgagaccagaggcgagagagtgatcgacgccgtgagattcaccctgagacagaccatcagcttcccccccagagacgagtggaacgacttcaacttcgacatggacgccagaagaaacaagcagcagagaatcaaggaggagggcgagtag

SEQ ID NO: 104118 - DNA, 1506 bp, synthetic construct
  misc_feature 1..1506: note = Description of Artificial Sequence: Synthetic coding sequence
  source 1..1506: mol_type = other DNA
atgctgtacctggagaacaacgcccagacccagttcagcgagtacagcaccgagctgaagaagctgtactgccagatcgccaagacctgccccatccagatcaaggtgatgaccccccccccccagggcgccgtgatcagagccatgcccgtgtacaagaaggccgagcacgtgaccgaggtggtgaagagatgccccaaccacgagctgagcagagagttcaacgagggccagatcgccccccccagccacctgatcagagtggagggcaacagccacgcccagtacgtggaggaccccatcaccggcagacagagcgtgctggtgccctacgagcccccccaggtgggcaccgagttcaccaccgtgctgtacaacttcatgtgcaacagcagctgcgtgggcggcatgaacagaagacccatcctgatcatcgtgaccctggagaccagagacggccaggtgctgggcagaagatgcttcgaggccagaatctgcgcctgccccggcagagacagaaaggccgacgaggacagcatcagaaagcagcaggtgagcgacagcaccaagaacggcgacggcaccaagagacccttcagacagaacacccacggcatccagatgaccagcatcaagaagagaagaagccccgacgacgagctgctgtacctgcccgtgagaggcagagagacctacgagatgctgctgaagatcaaggagagcctggagctgatgcagtacctgccccagcacaccatcgagacctacagacagcagcagcagcagcagcaccagcacctgctgcagaagcagaccagcatccagagccccagcagctacggcaacagcagcccccccctgaacaagatgaacagcatgaacaagctgcccagcgtgagccagctgatcaacccccagcagagaaacgccctgacccccaccaccatccccgacggcatgggcgccaacatccccatgatgggcacccacatgcccatggccggcgacatgaacggcctgagccccacccaggccctgcccccccccctgagcatgcccagcaccagccactgcacccccccccccccctaccccaccgactgcagcatcgtgagcttcctggccagactgggctgcagcagctgcctggactacttcaccacccagggcctgaccaccatctaccagatcgagcactacagcatggacgacctggccagcctgaagatccccgagcagttcagacacgccatctggaagggcatcctggaccacagacagctgcacgagttcagcagccccagccacctgctgagaacccccagcagcgccagcaccgtgagcgtgggcagcagcgagaccagaggcgagagagtgatcgacgccgtgagattcaccctgagacagaccatcagcttcccccccagagacgagtggaacgacttcaacttcgacatggacgccagaagaaacaagcagcagagaatcaaggaggagggcgagtag

SEQ ID NO: 104119 - DNA, 1749 bp, synthetic construct
  misc_feature 1..1749: note = Description of Artificial Sequence: Synthetic coding sequence
  source 1..1749: mol_type = other DNA
atgctgtacctggagaacaacgcccagacccagttcagcgagccccagtacaccaacctgggcctgctgaacagcatggaccagcagatccagaacggcagcagcagcaccagcccctacaacaccgaccacgcccagaacagcgtgaccgcccccagcccctacgcccagcccagcagcaccttcgacgccctgagccccagccccgccatccccagcaacaccgactaccccggcccccacagcttcgacgtgagcttccagcagagcagcaccgccaagagcgccacctggacctacagcaccgagctgaagaagctgtactgccagatcgccaagacctgccccatccagatcaaggtgatgaccccccccccccagggcgccgtgatcagagccatgcccgtgtacaagaaggccgagcacgtgaccgaggtggtgaagagatgccccaaccacgagctgagcagagagttcaacgagggccagatcgccccccccagccacctgatcagagtggagggcaacagccacgcccagtacgtggaggaccccatcaccggcagacagagcgtgctggtgccctacgagcccccccaggtgggcaccgagttcaccaccgtgctgtacaacttcatgtgcaacagcagctgcgtgggcggcatgaacagaagacccatcctgatcatcgtgaccctggagaccagagacggccaggtgctgggcagaagatgcttcgaggccagaatctgcgcctgccccggcagagacagaaaggccgacgaggacagcatcagaaagcagcaggtgagcgacagcaccaagaacggcgacgccttcagacagaacacccacggcatccagatgaccagcatcaagaagagaagaagccccgacgacgagctgctgtacctgcccgtgagaggcagagagacctacgagatgctgctgaagatcaaggagagcctggagctgatgcagtacctgccccagcacaccatcgagacctacagacagcagcagcagcagcagcaccagcacctgctgcagaagcagaccagcatccagagccccagcagctacggcaacagcagcccccccctgaacaagatgaacagcatgaacaagctgcccagcgtgagccagctgatcaacccccagcagagaaacgccctgacccccaccaccatccccgacggcatgggcgccaacatccccatgatgggcacccacatgcccatggccggcgacatgaacggcctgagccccacccaggccctgcccccccccctgagcatgcccagcaccagccactgcacccccccccccccctaccccaccgactgcagcatcgtgagcttcctggccagactgggctgcagcagctgcctggactacttcaccacccagggcctgaccaccatctaccagatcgagcactacagcatggacgacctggccagcctgaagatccccgagcagttcagacacgccatctggaagggcatcctggaccacagacagctgcacgagttcagcagccccagccacctgctgagaacccccagcagcgccagcaccgtgagcgtgggcagcagcgagaccagaggcgagagagtgatcgacgccgtgagattcaccctgagacagaccatcagcttcccccccagagacgagtggaacgacttcaacttcgacatggacgccagaagaaacaagcagcagagaatcaaggaggagggcgagtag

SEQ ID NO: 104120 - DNA, 567 bp, synthetic construct
  misc_feature 1..567: note = Description of Artificial Sequence: Synthetic coding sequence
  source 1..567: mol_type = other DNA
atgatcatctacagagacctgatcagccacgacgagatgttcagcgacatctacaagatcagagagatcgccgacggcctgtgcctggaggtggagggcaagatggtgagcagaaccgagggcaacatcgacgacagcctgatcggcggcaacgccagcgccgagggccccgagggcgagggcaccgagagcaccgtgatcaccggcgtggacatcgtgatgaaccaccacctgcaggagaccagcttcaccaaggaggcctacaagaagtacatcaaggactacatgaagagcatcaagggcaagctggaggagcagagacccgagagagtgaagcccttcatgaccggcgccgccgagcagatcaagcacatcctggccaacttcaagaactaccagttcttcatcggcgagaacatgaaccccgacggcatggtggccctgctggactacagagaggacggcgtgaccccctacatgatcttcttcaaggacggcctggagatggagaagtgcgtgagcaccagaaagtgggtgaagatcaacaacgtgaagaagaccttctag

SEQ ID NO: 104121 - DNA, 417 bp, synthetic construct
  misc_feature 1..417: note = Description of Artificial Sequence: Synthetic coding sequence
  source 1..417: mol_type = other DNA
atggtgagcagaaccgagggcaacatcgacgacagcctgatcggcggcaacgccagcgccgagggccccgagggcgagggcaccgagagcaccgtgatcaccggcgtggacatcgtgatgaaccaccacctgcaggagaccagcttcaccaaggaggcctacaagaagtacatcaaggactacatgaagagcatcaagggcaagctggaggagcagagacccgagagagtgaagcccttcatgaccggcgccgccgagcagatcaagcacatcctggccaacttcaagaactaccagttcttcatcggcgagaacatgaaccccgacggcatggtggccctgctggactacagagaggacggcgtgaccccctacatgatcttcttcaaggacggcctggagatggagaagtgctag

SEQ ID NO: 104122 - DNA, 417 bp, synthetic construct; identical to SEQ ID NO: 104121
  misc_feature 1..417: note = Description of Artificial Sequence: Synthetic coding sequence
  source 1..417: mol_type = other DNA

SEQ ID NO: 104123 - DNA, 483 bp, synthetic construct
  misc_feature 1..483: note = Description of Artificial Sequence: Synthetic coding sequence
  source 1..483: mol_type = other DNA
atgttcagcgacatctacaagatcagagagatcgccgacggcctgtgcctggaggtggagggcaagatggtgagcagaaccgagggcaacatcgacgacagcctgatcggcggcaacgccagcgccgagggccccgagggcgagggcaccgagagcaccgtgatcaccggcgtggacatcgtgatgaaccaccacctgcaggagaccagcttcaccaaggaggcctacaagaagtacatcaaggactacatgaagagcatcaagggcaagctggaggagcagagacccgagagagtgaagcccttcatgaccggcgccgccgagcagatcaagcacatcctggccaacttcaagaactaccagttcttcatcggcgagaacatgaaccccgacggcatggtggccctgctggactacagagaggacggcgtgaccccctacatgatcttcttcaaggacggcctggagatggagaagtgctag

SEQ ID NO: 104124 - DNA, 519 bp, synthetic construct
  misc_feature 1..519: note = Description of Artificial Sequence: Synthetic coding sequence
  source 1..519: mol_type = other DNA
atgatcatctacagagacctgatcagccacgacgagatgttcagcgacatctacaagatcagagagatcgccgacggcctgtgcctggaggtggagggcaagatggtgagcagaaccgagggcaacatcgacgacagcctgatcggcggcaacgccagcgccgagggccccgagggcgagggcaccgagagcaccgtgatcaccggcgtggacatcgtgatgaaccaccacctgcaggagaccagcttcaccaaggaggcctacaagaagtacatcaaggactacatgaagagcatcaagggcaagctggaggagcagagacccgagagagtgaagcccttcatgaccggcgccgccgagcagatcaagcacatcctggccaacttcaagaactaccagttcttcatcggcgagaacatgaaccccgacggcatggtggccctgctggactacagagaggacggcgtgaccccctacatgatcttcttcaaggacggcctggagatggagaagtgctag

SEQ ID NO: 104125 - DNA, 1164 bp, synthetic construct
  misc_feature 1..1164: note = Description of Artificial Sequence: Synthetic coding sequence
  source 1..1164: mol_type = other DNA
atggaggacgacgcccccgtgatctacggcctggagttccaggccagagccctgaccccccagaccgccgagaccgacgccatcagattcctggtgggcacccagagcctgaagtacgacaaccagatccacatcatcgacttcgacgacgagaacaacatcatcaacaagaacgtgctgctgcaccaggccggcgagatctggcacatcagcgccagccccgccgacagaggcgtgctgaccacctgctacaacagaaccagcgacagcaaggtgctgacctgcgccgccgtgtggagaatgcccaaggagctggagagcggcagccacgagagccccgacgacagcagcagcaccgcccagaccctggagctgctgtgccacctggacaacaccgcccacggcaacatggcctgcgtggtgtgggagcccatgggcgacggcaagaagatcatcagcctggccgacaaccacatcctgctgtgggacctgcaggagagcagcagccaggccgtgctggccagcagcgccagcctggagggcaagggccagctgaagttcaccagcggcagatggagcccccaccacaactgcacccaggtggccaccgccaacgacaccaccctgagaggctgggacaccagaagcatgagccagatctactgcatcgagaacgcccacggccagctggtgagagacctggacttcaaccccaacaagcagtactacctggccagctgcggcgacgactgcaaggtgaagttctgggacaccagaaacgtgaccgagcccgtgaagaccctggaggagcacagccactgggtgtggaacgtgagatacaaccacagccacgaccagctggtgctgaccggcagcagcgacagcagagtgatcctgagcaacatggtgagcatcagcagcgagcccttcggccacctggtggacgacgacgacatcagcgaccaggaggaccacagaagcgaggagaagagcaaggagcccctgcaggacaacgtgatcgccacctacgaggagcacgaggacagcgtgtacgccgtggactggagcagcgccgacccctggctgttcgccagcctgagctacgacggcagactggtgatcaacagagtgcccagagccctgaagtaccacatcctgctgtag

SEQ ID NO: 104126 - DNA, 990 bp, synthetic construct
  misc_feature 1..990: note = Description of Artificial Sequence: Synthetic coding sequence
  source 1..990: mol_type = other DNA
atggccgaggccggcaccggcgagcccagccccagcgtggagggcgagcacggcaccgagtacgacaccctgcccagcgacaccgtgagcctgagcgacagcgacagcgacctgagcctgcccggcggcgccgaggtggaggccctgagccccatgggcctgcccggcgaggaggacagcggccccgacgagccccccagcccccccagcggcctgctgcccgccaccgtgcagcccttccacctgagaggcatgagcagcaccttcagccagagaagcagagacatcttcgactgcctggagggcgccgccagaagagcccccagcagcgtggcccacaccagcatgagcgacaacggcggcttcaagagacccctggcccccagcggcagaagccccgtggagggcctgggcagagcccacagaagccccgccagccccagagtgccccccgtgcccgactacgtggcccaccccgagagatggaccaagtacagcctggaggacgtgaccgaggtgagcgagcagagcaaccaggccaccgccctggccttcctgggcagccagagcctggccgcccccaccgactgcgtgagcagcttcaaccaggaccccagcagctgcggcgagggcagagtgatcttcaccaagcccgtgagaggcgtggaggccagacacgagagaaagagagtgctgggcaaggtgggcgagcccggcagaggcggcctgggcaaccccgccaccgacagaggcgagggccccgtggagctggcccacctggccggccccggcagccccgaggccgaggagtggggcagccaccacggcggcctgcaggaggtggaggccctgagcggcagcgtgcacagcggcagcgtgcccggcctgccccccgtggagaccgtgggcttccacggcagcagaaagagaagcagagaccacttcagaaacaagagcagcagccccgaggaccccggcgccgaggtgtag

SEQ ID NO: 104127 - DNA, 798 bp, synthetic construct
  misc_feature 1..798: note = Description of Artificial Sequence: Synthetic coding sequence
  source 1..798: mol_type = other DNA
atggccgaggccggcaccggcctgctgcccgccaccgtgcagcccttccacctgagaggcatgagcagcaccttcagccagagaagcagagacatcttcgactgcctggagggcgccgccagaagagcccccagcagcgtggcccacaccagcatgagcgacaacggcggcttcaagagacccctggcccccagcggcagaagccccgtggagggcctgggcagagcccacagaagccccgccagccccagagtgccccccgtgcccgactacgtggcccaccccgagagatggaccaagtacagcctggaggacgtgaccgaggtgagcgagcagagcaaccaggccaccgccctggccttcctgggcagccagagcctggccgcccccaccgactgcgtgagcagcttcaaccaggaccccagcagctgcggcgagggcagagtgatcttcaccaagcccgtgagaggcgtggaggccagacacgagagaaagagagtgctgggcaaggtgggcgagcccggcagaggcggcctgggcaaccccgccaccgacagaggcgagggccccgtggagctggcccacctggccggccccggcagccccgaggccgaggagtggggcagccaccacggcggcctgcaggaggtggaggccctgagcggcagcgtgcacagcggcagcgtgcccggcctgccccccgtggagaccgtgggcttccacggcagcagaaagagaagcagagaccacttcagaaacaagagcagcagccccgaggaccccggcgccgaggtgtag

SEQ ID NO: 104128 - DNA, 339 bp, synthetic construct
  misc_feature 1..339: note = Description of Artificial Sequence: Synthetic coding sequence
  source 1..339: mol_type = other DNA
atggccgaggccggcaccggcgagcccagccccagcgtggagggcgagcacggcaccgagtacgacaccctgcccagcgacaccgtgagcctgagcgacagcgacagcgacctgagcctgcccggcggcgccgaggtggaggccctgagccccatgggcctgcccggcgaggaggacagcggccccgacgagccccccagcccccccagcggcctgctgcccgccaccgtgcagcccttccacctgagaggcatgagcagcaccttcagccagagaagcagagacatcttcgactgcctggagggcgccgccagaagagcccccagcagcgtggcctag

SEQ ID NO: 104129 - DNA, 612 bp, synthetic construct
  misc_feature 1..612: note = Description of Artificial Sequence: Synthetic coding sequence
  source 1..612: mol_type = other DNA
atggccgaggccggcaccggcgagcccagccccagcgtggagggcgagcacggcaccgagtacgacaccctgcccagcgacaccgtgagcctgagcgacagcgacagcgacctgagcctgcccggcggcgccgaggtggaggccctgagccccatgggcctgcccggcgaggaggacagcggccccgacgagccccccagcccccccagcggcctgctgcccgccaccgtgcagcccttccacctgagaggcatgagcagcaccttcagccagagaagcagagacatcttcgactgcctggagggcgccgccagaagagcccccagcagcgtggcccacaccagcatgagcgacaacggcggcttcaagagacccctggcccccagcggcagaagccccgtggagggcctgggcagagcccacagaagccccgccagccccagagtgccccccgtgcccgactacgtggcccaccccgagagatggaccaagtacagcctggaggacgtgaccgaggtgagcgagcagagcaaccaggccaccgccctggccttcctgggcagccagagcctggccgcccccaccgactgcgtgagcagcttcaaccagtag

SEQ ID NO: 104130 - DNA, 627 bp, synthetic construct
  misc_feature 1..627: note = Description of Artificial Sequence: Synthetic coding sequence
  source 1..627: mol_type = other DNA
atggccgaggccggcaccggcctgctgcccgccaccgtgcagcccttccacctgagaggcatgagcagcaccttcagccagagaagcagagacatcttcgactgcctggagggcgccgccagaagagcccccagcagcgtggcccacaccagcatgagcgacaacggcggcttcaagagacccctggcccccagcggcagaagccccgtggagggcctgggcagagcccacagaagccccgccagccccagagtgccccccgtgcccgactacgtggcccaccccgagagatggaccaagtacagcctggaggacgtgaccgaggtgagcgagcagagcaaccaggccaccgccctggccttcctgggcagccagagcctggccgcccccaccgactgcgtgagcagcttcaaccaggaccccagcagctgcggcgagggcagagtgatcttcaccaagcccgtgagaggcgtggaggccagacacgagagaaagagagtgctgggcaaggtgggcgagcccggcagaggcggcctgggcaaccccgccaccgacagaggcgagggccccgtggagctggcccacctggccggccccggcagccccgaggccgaggagtggggctag

SEQ ID NO: 104131 - DNA, 990 bp, synthetic construct; identical to SEQ ID NO: 104126
  misc_feature 1..990: note = Description of Artificial Sequence: Synthetic coding sequence
  source 1..990: mol_type = other DNA

SEQ ID NO: 104132 - DNA, 333 bp, synthetic construct
  misc_feature 1..333: note = Description of Artificial Sequence: Synthetic coding sequence
  source 1..333: mol_type = other DNA
atggccgaggccggcaccggcgagcccagccccagcgtggagggcgagcacggcaccgagtacgacaccctgcccagcgacaccgtgagcctgagcgacagcgacagcgacctgagcctgcccggcggcgccgaggtggaggccctgagccccatgggcctgcccggcgaggaggacagcggccccgacgagccccccagcccccccagcggcctgctgcccgccaccgtgcagcccttccacctgagaggcatgagcagcaccttcagccagagaagcagagacatcttcgactgcctggagggcgccgccagaagagcccccagcagctag

SEQ ID NO: 104133 - DNA, 576 bp, synthetic construct
  misc_feature 1..576: note = Description of Artificial Sequence: Synthetic coding sequence
  source 1..576: mol_type = other DNA
atggccgaggccggcaccggcgagcccagccccagcgtggagggcgagcacggcaccgagtacgacaccctgcccagcgacaccgtgagcctgagcgacagcgacagcgacctgagcctgcccggcggcgccgaggtggaggccctgagccccatgggcctgcccggcgaggaggacagcggccccgacgagccccccagcccccccagcggcctgctgcccgccaccgtgcagcccttccacctgagaggcatgagcagcaccttcagccagagaagcagagacatcttcgactgcctggagggcgccgccagaagagcccccagcagcgtggcccacaccagcatgagcgacaacggcggcttcaagagacccctggcccccagcggcagaagccccgtggagggcctgggcagagcccacagaagccccgccagccccagagtgccccccgtgcccgactacgtggcccaccccgagagatggaccaagtacagcctggaggacgtgaccgaggtgagcgagcagagcaaccaggccaccgccctggccttcctgggcagccagagcctgtag

SEQ ID NO: 104134 - DNA, 639 bp, synthetic construct
  misc_feature 1..639: note = Description of Artificial Sequence: Synthetic coding sequence
  source 1..639: mol_type = other DNA
atgggccccatgtggagaatgagaggcggcgccaccagaagaggcagctgctgcggcggcgacggcgccgccgacggcagaggccccggcagaagcggcagagccagaggcggcggcagccccagcggcggcggcggcggcgtgggctggagaggcagagccgacggcgccagacagcagctggaggagagattcgccgacctggccgccagccacctggaggccatcagagccagagacgagtgggacagacagaacgccagactgagacaggagaacgccagactgagactggagaacagaagactgaagagagagaacagaagcctgttcagacaggccctgagactgcccggcgagggcggcaacggcacccccgccgaggccagaagagtgcccgaggaggccagcaccaacagaagagccagagacagcggcagagaggacgagcccggcagccccagagccctgagagccagactggagaagctggaggccatgtacagaagagccctgctgcagctgcacctggagcagagaggccccagacccagcggcgacaaggaggagcagcccctgcaggagcccgacagcggcctgagaagcagagacagcgagcccagcggcccctggctgtag

SEQ ID NO: 104135 - DNA, 1047 bp, synthetic construct
  misc_feature 1..1047: note = Description of Artificial Sequence: Synthetic coding sequence
  source 1..1047: mol_type = other DNA
atgggcgccagaggcgcccccagcagaagaagacaggccggcagaagactgagatacctgcccaccggcagcttccccttcctgctgctgctgctgctgctgtgcatccagctgggcggcggccagaagaagaaggagaacctgctggccgagaaggtggagcagctgatggagtggagcagcagaagaagcatcttcagaatgaacggcgacaagttcagaaagttcatcaaggccccccccagaaactacagcatgatcgtgatgttcaccgccctgcagccccagagacagtgcagcgtgtgcagacaggccaacgaggagtaccagatcctggccaacagctggagatacagcagcgccttctgcaacaagctgttcttcagcatggtggactacgacgagggcaccgacgtgttccagcagctgaacatgaacagcgcccccaccttcatgcacttcccccccaagggcagacccaagagagccgacaccttcgacctgcagagaatcggcttcgccgccgagcagctggccaagtggatcgccgacagaaccgacgtgcacatcagagtgttcagaccccccaactacagcggcaccatcgccctggccctgctggtgagcctggtgggcggcctgctgtacctgagaagaaacaacctggagttcatctacaacaagaccggctgggccatggtgagcctgtgcatcgtgttcgccatgaccagcggccagatgtggaaccacatcagaggccccccctacgcccacaagaacccccacaacggccaggtgagctacatccacggcagcagccaggcccagttcgtggccgagagccacatcatcctggtgctgaacgccgccatcaccatgggcatggtgctgctgaacgaggccgccaccagcaagggcgacgtgggcaagagaagaatcatctgcctggtgggcctgggcctggtggtgttcttcttcagcttcctgctgagcatcttcagaagcaagtaccacggctacccctacagcgacctggacttcgagtag

SEQ ID NO: 104136 - DNA, 1044 bp, synthetic construct
  misc_feature 1..1044: note = Description of Artificial Sequence: Synthetic coding sequence
  source 1..1044: mol_type = other DNA
atgggcgccagaggcgcccccagcagaagaagacaggccggcagaagactgagatacctgcccaccggcagcttccccttcctgctgctgctgctgctgctgtgcatccagctgggcggcggccagaagaagaaggagaacctgctggccgagaaggtggagcagctgatggagtggagcagcagaagaagcatcttcagaatgaacggcgacaagttcagaaagttcatcaaggccccccccagaaactacagcatgatcgtgatgttcaccgccctgcagccccagagacagtgcagcgtgtgcagacaggccaacgaggagtaccagatcctggccaacagctggagatacagcagcgccttctgcaacaagctgttcttcagcatggtggactacgacgagggcaccgacgtgttccagcagctgaacatgaacagcgcccccaccttcatgcacttcccccccaagggcagacccaagagagccgacaccttcgacctgcagagaatcggcttcgccgccgagcagctggccaagtggatcgccgacagaaccgacgtgcacatcagagtgttcagaccccccaactacagcggcaccatcgccctggccctgctggtgagcctggtgggcggcctgctgtacctgagaagaaacaacctggagttcatctacaacaagaccggctgggccatggtgagcctgtgcatcgtgttcgccatgaccagcggccagatgtggaaccacatcagaggccccccctacgcccacaagaacccccacaacggccaggtgagctacatccacggcagcagccaggcccagttcgtggccgagagccacatcatcctggtgctgaacgccgccatcaccatgggcatggtgctgctgaacgaggccgccaccagcaagggcgacgtgggcaagagaagaatcatctgcctggtgggcctgggcctggtggtgttcttcttcagcttcctgctgagcatcttcagaagcaagtaccacggctacccctacagcttcctgatcaagtag

SEQ ID NO: 104137 - DNA, 1047 bp, synthetic construct; identical to SEQ ID NO: 104135
  misc_feature 1..1047: note = Description of Artificial Sequence: Synthetic coding sequence
  source 1..1047: mol_type = other DNA

SEQ ID NO: 104138 - DNA, 1047 bp, synthetic construct; identical to SEQ ID NO: 104135
  misc_feature 1..1047: note = Description of Artificial Sequence: Synthetic coding sequence
  source 1..1047: mol_type = other DNA

SEQ ID NO: 104139 - DNA, 534 bp, synthetic construct
  misc_feature 1..534: note = Description of Artificial Sequence: Synthetic coding sequence
  source 1..534: mol_type = other DNA
atggcccaccccgtgcagagcgagttccccagcgcccaggagcccggcagcgccgccttcctggacctgcccgagatggagatcctgctgaccaaggccgagaacaaggacgacaagaccctgaacctgagcaagaccctgagcggccccctggacctggagcagaacagccagggcctgcccttcaaggccatcagcgagggccacctggaggcccccctgcccagaagccccagcagagccagcagcagaagagccagcagcatcgccaccaccagctacgcccaggaccaggaggcccccagagactacctgatcctggccgtggtggcctgcttctgccccgtgtggcccctgaacctgatccccctgatcatcagcatcatgagcagaagcagcatgcagcagggcaacgtggacggcgccagaagactgggcagactggccagactgctgagcatcaccctgatcatcatgggcatcgtgatcatcatggtggccgtgaccgtgaacttcaccgtgcagaagaagtag

SEQ ID NO: 104140 - DNA, 1173 bp, synthetic construct
  misc_feature 1..1173: note = Description of Artificial Sequence: Synthetic coding sequence
  source 1..1173: mol_type = other DNA
atggccgtgagcgagagccagctgaagaagatggtgagcaagtacaagtacagagacctgaccgtgagagagaccgtgaacgtgatcaccctgtacaaggacctgaagcccgtgctggacagctacgtgttcaacgacggcagcagcagagagctgatgaacctgaccggcaccatccccgtgccctacagaggcaacacctacaacatccccatctgcctgtggctgctggacacctacccctacaacccccccatctgcttcgtgaagcccaccagcagcatgaccatcaagaccggcaagcacgtggacgccaacggcaagatctacctgccctacctgcacgagtggaagcacccccagagcgacctgctgggcctgatccaggtgatgatcgtggtgttcggcgacgagccccccgtgttcagcagacccatcagcgccagctaccccccctaccaggccaccggcccccccaacaccagctacatgcccggcatgcccggcggcatcagcccctaccccagcggctacccccccaaccccagcggctaccccggctgcccctacccccccggcggcccctaccccgccaccaccagcagccagtaccccagccagccccccgtgaccaccgtgggccccagcagagacggcaccatcagcgaggacaccatcagagccagcctgatcagcgccgtgagcgacaagctgagatggagaatgaaggaggagatggacagagcccaggccgagctgaacgccctgaagagaaccgaggaggacctgaagaagggccaccagaagctggaggagatggtgaccagactggaccaggaggtggccgaggtggacaagaacatcgagctgctgaagaagaaggacgaggagctgagcagcgccctggagaagatggagaaccagagcgagaacaacgacatcgacgaggtgatcatccccaccgcccccctgtacaagcagatcctgaacctgtacgccgaggagaacgccatcgaggacaccatcttctacctgggcgaggccctgagaagaggcgtgatcgacctggacgtgttcctgaagcacgtgagactgctgagcagaaagcagttccagctgagagccctgatgcagaaggccagaaagaccgccggcctgagcgacctgtactag

SEQ ID NO: 104141 - DNA, 858 bp, synthetic construct
  misc_feature 1..858: note = Description of Artificial Sequence: Synthetic coding sequence
  source 1..858: mol_type = other DNA
atggccgtgagcgagagccagctgaagaagatggtgagcaagccccagagcgacctgctgggcctgatccaggtgatgatcgtggtgttcggcgacgagccccccgtgttcagcagacccatcagcgccagctaccccccctaccaggccaccggcccccccaacaccagctacatgcccggcatgcccggcggcatcagcccctaccccagcggctacccccccaaccccagcggctaccccggctgcccctacccccccggcggcccctaccccgccaccaccagcagccagtaccccagccagccccccgtgaccaccgtgggccccagcagagacggcaccatcagcgaggacaccatcagagccagcctgatcagcgccgtgagcgacaagctgagatggagaatgaaggaggagatggacagagcccaggccgagctgaacgccctgaagagaaccgaggaggacctgaagaagggccaccagaagctggaggagatggtgaccagactggaccaggaggtggccgaggtggacaagaacatcgagctgctgaagaagaaggacgaggagctgagcagcgccctggagaagatggagaaccagagcgagaacaacgacatcgacgaggtgatcatccccaccgcccccctgtacaagcagatcctgaacctgtacgccgaggagaacgccatcgaggacaccatcttctacctgggcgaggccctgagaagaggcgtgatcgacctggacgtgttcctgaagcacgtgagactgctgagcagaaagcagttccagctgagagccctgatgcagaaggccagaaagaccgccggcctgagcgacctgtactag

SEQ ID NO: 104142 - DNA, 972 bp, synthetic construct
  misc_feature 1..972: note = Description of Artificial Sequence: Synthetic coding sequence
  source 1..972: mol_type = other DNA
atggccagaggccccggcctggcccccccccccctgagactgcccctgctgctgctggtgctggccgccgtgaccggccacaccgccgcccaggacaactgcacctgccccaccaacaagatgaccgtgtgcagccccgacggccccggcggcagatgccagtgcagagccctgggcagcggcatggccgtggactgcagcaccctgaccagcaagtgcctgctgctgaaggccagaatgagcgcccccaagaacgccagaaccctggtgagacccagcgagcacgccctggtggacaacgacggcctgtacgaccccgactgcgaccccgagggcagattcaaggccagacagtgcaaccagaccagcgtgtgctggtgcgtgaacagcgtgggcgtgagaagaaccgacaagggcgacctgagcctgagatgcgacgagctggtgagaacccaccacatcctgatcgacctgagacacagacccaccgccggcgccttcaaccacagcgacctggacgccgagctgagaagactgttcagagagagatacagactgcaccccaagttcgtggccgccgtgcactacgagcagcccaccatccagatcgagctgagacagaacaccagccagaaggccgccggcgacgtggacatcggcgacgccgcctactacttcgagagagacatcaagggcgagagcctgttccagggcagaggcggcctggacctgagagtgagaggcgagcccctgcaggtggagagaaccctgatctactacctggacgagatcccccccaagttcagcatgaagagactgaccgccggcctgatcgccgtgatcgtggtggtggtggtggccctggtggccggcatggccgtgctggtgatcaccaacagaagaaagagcggcaagtacaagaaggtggagatcaaggagctgggcgagctgagaaaggagcccagcctgtag

SEQ ID NO: 104143 - DNA, 1353 bp, synthetic construct
  misc_feature 1..1353: note = Description of Artificial Sequence: Synthetic coding sequence
  source 1..1353: mol_type = other DNA
atgggcgccccccccggctacagacccagcgcctgggtgcacctgctgcaccagctgcccagagccgacttccagctgagacccgtgcccagcgtgttcgccccccaggagcaggagtaccagcaggccctgctgctggtggccgccctggccggcctgggcctgggcctgagcctgatcttcatcgccgtgtacctgatcagattctgctgctgcagaccccccgagccccccggcagcaagatccccagccccggcggcggctgcgtgacctggagctgcatcgtggccctgctggccggctgcaccggcatcggcatcggcttctacggcaacagcgagaccagcgacggcgtgagccagctgagcagcgccctgctgcacgccaaccacaccctgagcaccatcgaccacctggtgctggagaccgtggagagactgggcgaggccgtgagaaccgagctgaccaccctggaggaggtgctggagcccagaaccgagctggtggccgccgccagaggcgccagaagacaggccgaggccgccgcccagcagctgcagggcctggccttctggcagggcgtgcccctgagccccctgcaggtggccgagaacgtgagcttcgtggaggagtacagatggctggcctacgtgctgctgctgctgctggagctgctggtgtgcctgttcaccctgctgggcctggccaagcagagcaagtggctggtgatcgtgatgaccgtgatgagcctgctggtgctggtgctgagctggggcagcatgggcctggaggccgccaccgccgtgggcctgagcgacttctgcagcaaccccgacccctacgtgctgaacctgacccaggaggagaccggcctgagcagcgacatcctgagctactacctgctgtgcaacagagccgtgagcaaccccttccagcagagactgaccctgagccagagagccctggccaacatccacagccagctgctgggcctggagagagaggccgtgccccagttccccagcgcccagaagcccctgctgagcctggaggagaccctgaacgtgaccgagggcaacttccaccagctggtggccctgctgcactgcagaagcctgcacaaggactacggcgccgccctgagaggcctgtgcgaggacgccctggagggcctgctgttcctgctgctgttcagcctgctgagcgccggcgccctggccaccgccctgtgcagcctgcccagagcctgggccctgttcccccccagcgacgactacgacgacaccgacgacgacgaccccttcaacccccaggagagcaagagattcgtgcagtggcagagcagcatctag

SEQ ID NO: 104144 - DNA, 1383 bp, synthetic construct
  misc_feature 1..1383: note = Description of Artificial Sequence: Synthetic coding sequence
  source 1..1383: mol_type = other DNA
atgggcgccccccccggctacagacccagcgcctgggtgcacctgctgcaccagctgcccagagccgacttccagctgagacccgtgcccagcgtgttcgccccccaggagcaggagtaccagcaggccctgctgctggtggccgccctggccggcctgggcctgggcctgagcctgatcttcatcgccgtgtacctgatcagattctgctgctgcagaccccccgagccccccggcagcaagatccccagccccggcggcggctgcgtgacctggagctgcatcgtggccctgctggccggctgcaccggcatcggcatcggcttctacggcaacagcgagaccagcgacggcgtgagccagctgagcagcgccctgctgcacgccaaccacaccctgagcaccatcgaccacctggtgctggagaccgtggagagactgggcgaggccgtgagaaccgagctgaccaccctggaggaggtgctggagcccagaaccgagctggtggccgccgccagaggcgccagaagacaggccgaggccgccgcccagcagctgcagggcctggccttctggcagggcgtgcccctgagccccctgcaggtggccgagaacgtgagcttcgtggaggagtacagatggctggcctacgtgctgctgctgctgctggagctgctggtgtgcctgttcaccctgctgggcctggccaagcagagcaagtggctggtgatcgtgatgaccgtgatgagcctgctggtgctggtgctgagctggggcagcatgggcctggaggccgccaccgccgtgggcctgagcgacttctgcagcaaccccgacccctacgtgctgaacctgacccaggaggagaccggcctgagcagcgacatcctgagctactacctgctgtgcaacagagccgtgagcaaccccttccagcagagactgaccctgagccagagagccctggccaacatccacagccagctgctgggcctggagagagaggccgtgccccagttccccagcgcccagaagcccctgctgagcctggaggagaccctgaacgtgaccgagggcaacttccaccagctggtggccctgctgcactgcagaagcctgcacaaggactacggcgccgccctgagaggcctgtgcgaggacgccctggagggcctgctgttcctgctgctgttcagcctgctgagcgccggcgccctggccaccgccctgtgcagcctgcccagagcctgggccctgttcccccccagaaaccccagcgccctgtgcagcggcagcagactgagcgagcccctgctgcccgccggcctggagcccggcagccccctgagaagcttccccggctgcagaagaagaccccactag

SEQ ID NO: 104145 - DNA, 1362 bp, synthetic construct
  misc_feature 1..1362: note = Description of Artificial Sequence: Synthetic coding sequence
  source 1..1362: mol_type = other DNA
atgggcgccccccccggctacagacccagcgcctgggtgcacctgctgcaccagctgcccagagccgacttccagctgagacccgtgcccagcgtgttcgccccccaggagcaggagtaccagcaggaccagagcagcctggccgtgacccagagacccccccccaccacccccctgcacagactgagacccagacccagactgacccccgccctggccagaagaccccccgaggccgccagaggcgaccccagaccccagagcccccccgaggccctgctgctggtggccgccctggccggcctgggcctgggcctgagcctgatcttcatcgccgtgtacctgatcagattctgctgctgcagaccccccgagccccccggcagcaagatccccagccccggcggcggctgcgtgacctggagctgcatcgtggccctgctggccggctgcaccggcatcggcatcggcttctacggcaacagcgagaccagcgacggcgtgagccagctgagcagcgccctgctgcacgccaaccacaccctgagcaccatcgaccacctggtgctggagaccgtggagagactgggcgaggccgtgagaaccgagctgaccaccctggaggaggtgctggagcccagaaccgagctggtggccgccgccagaggcgccagaagacaggccgaggccgccgcccagcagctgcagggcctggccttctggcagggcgtgcccctgagccccctgcaggtggccgagaacgtgagcttcgtggaggagtacagatggctggcctacgtgctgctgctgctgctggagctgctggtgtgcctgttcaccctgctgggcctggccaagcagagcaagtggctggtgatcgtgatgaccgtgatgagcctgctggtgctggtgctgagctggggcagcatgggcctggaggccgccaccgccgtgggcctgagcgacttctgcagcaaccccgacccctacgtgctgaacctgacccaggaggagaccggcctgagcagcgaggccgacagcgtgcccgccagcagcggccagcaccccctgcccgccgccggccccggcgccagaagctgcgccagcgtgcccttcagcgccgaggccagcgccgtgctgggcggcgacagcgagtgcgacagaagaaagttcccccccgtgggcggcaccgccaccctgccccagcccgcccagggcctgtggtgcagccccgccggccccgtgagaagaagacccggcagacccgccctgcccgccaccctgctgcccgccgtgtgcagaagcgccggccactgccccctgcagcccgcccccagcctgggccccctgcccacccagtag

SEQ ID NO: 104146 - DNA, 1356 bp, synthetic construct
  misc_feature 1..1356: note = Description of Artificial Sequence: Synthetic coding sequence
  source 1..1356: mol_type = other DNA
atgggcgccccccccggctacagacccagcgcctgggtgcacctgctgcaccagctgcccagagccgacttccagctgagacccgtgcccagcgtgttcgccccccaggagcaggagtaccagcaggccctgctgctggtggccgccctggccggcctgggcctgggcctgagcctgatcttcatcgccgtgtacctgatcagattctgctgctgcagaccccccgagccccccggcagcaagatccccagccccggcggcggctgcgtgacctggagctgcatcgtggccctgctggccggctgcaccggcatcggcatcggcttctacggcaacagcgagaccagcgacggcgtgagccagctgagcagcgccctgctgcacgccaaccacaccctgagcaccatcgaccacctggtgctggagaccgtggagagactgggcgaggccgtgagaaccgagctgaccaccctggaggaggtgctggagcccagaaccgagctggtggccgccgccagaggcgccagaagacaggccgaggccgccgcccagcagctgcagggcctggccttctggcagggcgtgcccctgagccccctgcaggtggccgagaacgtgagcttcgtggaggagtacagatggctggcctacgtgctgctgctgctgctggagctgctggtgtgcctgttcaccctgctgggcctggccaagcagagcaagtggctggtgatcgtgatgaccgtgatgagcctgctggtgctggtgctgagctggggcagcatgggcctggaggccgccaccgccgtgggcctgagcgacttctgcagcaaccccgacccctacgtgctgaacctgacccaggaggagaccggcctgagcagcgacatcctgagctactacctgctgtgcaacagagccgtgagcaaccccttccagcagagactgaccctgagccagagagccctggccaacatccacagccagctgctgggcctggagagagaggccgtgccccagttccccagcgcccagaagcccctgctgagcctggaggagaccctgaacgtgaccgagggcaacttccaccagctggtggccctgctgcactgcagaagcctgcacaaggactacggcgccgccctgagaggcctgtgcgaggacgccctggagggcctgctgttcctgctgctgttcagcctgctgagcgccggcgccctggccaccgccctgtgcagcctgcccagagcctgggccctgttcccccccagcgacgactacgacgacaccgacgacgacgaccccttcaacccccagcaggagagcaagagattcgtgcagtggcagagcagcatctag

SEQ ID NO: 104147 - DNA, 1155 bp, synthetic construct
  misc_feature 1..1155: note = Description of Artificial Sequence: Synthetic coding sequence
  source 1..1155: mol_type = other DNA
atgaccagaagaggcagaagaagaagcagccacttcctgggcccccccgccggcgccgccggctgcacccagagaagaagcagagagctggccgccgccgccatgagccaccagaccggcatccaggccagcgaggacgtgaaggagatcttcgccagagccagaaacggcaagtacagactgctgaagatcagcatcgagaacgagcagctggtgatcggcagctacagccagcccagcgacagctgggacaaggactacgacagcttcgtgctgcccctgctggaggacaagcagccctgctacatcctgttcagactggacagccagaacgcccagggctacgagtggatcttcatcgcctggagccccgaccacagccacgtgagacagaagatgctgtacgccgccaccagagccaccctgaagaaggagttcggcggcggccacatcaaggacgaggtgttcggcaccgtgaaggaggacgtgagcctgcacggctacaagaagtacctgctgagccagagcagccccgcccccctgaccgccgccgaggaggagctgagacagatcaagatcaacgaggtgcagaccgacgtgggcgtggacaccaagcaccagaccctgcagggcgtggccttccccatcagcagagaggccttccaggccctggagaagctgaacaacagacagctgaactacgtgcagctggagatcgacatcaagaacgagatcatcatcctggccaacaccaccaacaccgagctgaaggacctgcccaagagaatccccaaggacagcgccagataccacttcttcctgtacaagcacagccacgagggcgactacctggagagcatcgtgttcatctacagcatgcccggctacacctgcagcatcagagagagaatgctgtacagcagctgcaagagcagactgctggagatcgtggagagacagctgcagatggacgtgatcagaaagatcgagatcgacaacggcgacgagctgaccgccgacttcctgtacgaggaggtgcaccccaagcagcacgcccacaagcagagcttcgccaagcccaagggccccgccggcaagagaggcatcagaagactgatcagaggccccgccgagaccgaggccaccaccgactag

SEQ ID NO: 104148 - DNA, 1053 bp, synthetic construct
  misc_feature 1..1053: note = Description of Artificial Sequence: Synthetic coding sequence
  source 1..1053: mol_type = other DNA
atgagccaccagaccggcatccaggccagcgaggacgtgaaggagatcttcgccagagccagaaacggcaagtacagactgctgaagatcagcatcgagaacgagcagctggtgatcggcagctacagccagcccagcgacagctgggacaaggactacgacagcttcgtgctgcccctgctggaggacaagcagccctgctacatcctgttcagactggacagccagaacgcccagggctacgagtggatcttcatcgcctggagccccgaccacagccacgtgagacagaagatgctgtacgccgccaccagagccaccctgaagaaggagttcggcggcggccacatcaaggacgaggtgttcggcaccgtgaaggaggacgtgagcctgcacggctacaagaagtacctgctgagccagagcagccccgcccccctgaccgccgccgaggaggagctgagacagatcaagatcaacgaggtgcagaccgacgtgggcgtggacaccaagcaccagaccctgcagggcgtggccttccccatcagcagagaggccttccaggccctggagaagctgaacaacagacagctgaactacgtgcagctggagatcgacatcaagaacgagatcatcatcctggccaacaccaccaacaccgagctgaaggacctgcccaagagaatccccaaggacagcgccagataccacttcttcctgtacaagcacagccacgagggcgactacctggagagcatcgtgttcatctacagcatgcccggctacacctgcagcatcagagagagaatgctgtacagcagctgcaagagcagactgctggagatcgtggagagacagctgcagatggacgtgatcagaaagatcgagatcgacaacggcgacgagctgaccgccgacttcctgtacgaggaggtgcaccccaagcagcacgcccacaagcagagcttcgccaagcccaagggccccgccggcaagagaggcatcagaagactgatcagaggccccgccgagaccgaggccaccaccgactag

SEQ ID NO: 104149 - DNA, 1074 bp, synthetic construct
  misc_feature 1..1074: note = Description of Artificial Sequence: Synthetic coding sequence
  source 1..1074: mol_type = other DNA
atgagccaccagaccggcatccaggccagcgaggacgtgaaggagatcttcgccagagccagaaacggcaagtacagactgctgaagatcagcatcgagaacgagcagctggtgatcggcagctacagccagcccagcgacagctgggacaaggactacgacagcttcgtgctgcccctgctggaggacaagcagccctgctacatcctgttcagactggacagccagaacgcccagggctacgagtggatcttcatcgcctggagccccgaccacagccacgtgagacagaagatgctgtacgccgccaccagagccaccctgaagaaggagttcggcggcggccacatcaaggacgaggtgttcggcaccgtgaaggaggacgtgagcctgcacggctacaagaagtacctgctgagccagagcagccccgcccccctgaccgccgccgaggaggagctgagacagatcaagatcaacgagagccccgaggaccacatcggcgtgcagaccgacgtgggcgtggacaccaagcaccagaccctgcagggcgtggccttccccatcagcagagaggccttccaggccctggagaagctgaacaacagacagctgaactacgtgcagctggagatcgacatcaagaacgagatcatcatcctggccaacaccaccaacaccgagctgaaggacctgcccaagagaatccccaaggacagcgccagataccacttcttcctgtacaagcacagccacgagggcgactacctggagagcatcgtgttcatctacagcatgcccggctacacctgcagcatcagagagagaatgctgtacagcagctgcaagagcagactgctggagatcgtggagagacagctgcagatggacgtgatcagaaagatcgagatcgacaacggcgacgagctgaccgccgacttcctgtacgaggaggtgcaccccaagcagcacgcccacaagcagagcttcgccaagcccaagggccccgccggcaagagaggcatcagaagactgatcagaggccccgccgagaccgaggccaccaccgactag

SEQ ID NO: 104150 - DNA, 1050 bp, synthetic construct
  misc_feature 1..1050: note = Description of Artificial Sequence: Synthetic coding sequence
  source 1..1050: mol_type = other DNA
atggcccaccagaccggcatccacgccaccgaggagctgaaggagttcttcgccaaggccagagccggcagcgtgagactgatcaaggtggtgatcgaggacgagcagctggtgctgggcgccagccaggagcccgtgggcagatgggaccaggactacgacagagccgtgctgcccctgctggacgcccagcagccctgctacctgctgtacagactggacagccagaacgcccagggcttcgagtggctgttcctggcctggagccccgacaacagccccgtgagactgaagatgctgtacgccgccaccagagccaccgtgaagaaggagttcggcggcggccacatcaaggacgagctgttcggcaccgtgaaggacgacctgagcttcgccggctaccagaagcacctgagcagctgcgccgcccccgcccccctgaccagcgccgagagagagctgcagcagatcagaatcaacgaggtgaagaccgagatcagcgtggagagcaagcaccagaccctgcagggcctggccttccccctgcagcccgaggcccagagagccctgcagcagctgaagcagaagatggtgaactacatccagatgaagctggacctggagagagagaccatcgagctggtgcacaccgagcccaccgacgtggcccagctgcccagcagagtgcccagagacgccgccagataccacttcttcctgtacaagcacacccacgagggcgaccccctggagagcgtggtgttcatctacagcatgcccggctacaagtgcagcatcaaggagagaatgctgtacagcagctgcaagagcagactgctggacagcgtggagcaggacttccacctggagatcgccaagaagatcgagatcggcgacggcgccgagctgaccgccgagttcctgtacgacgaggtgcaccccaagcagcacgccttcaagcaggccttcgccaagcccaagggccccggcggcaagagaggccacaagagactgatcagaggccccggcgagaacggcgacgacagctag

SEQ ID NO: 104151 - DNA, 483 bp, synthetic construct
  misc_feature 1..483: note = Description of Artificial Sequence: Synthetic coding sequence
  source 1..483: mol_type = other DNA
atggaggagggcagcagcagccccgtgagccccgtggacagcctgggcaccagcgaggaggagctggagagacagcccaagagattcggcagaaagagaagatacagcaagaagagcagcgaggacggcagccccacccccggcaagagaggcaagaagggcagccccagcgcccagagcttcgaggagctgcagagccagagaatcctggccaacgtgagagagagacagagaacccagagcctgaacgaggccttcgccgccctgagaaagatcatccccaccctgcccagcgacaagctgagcaagatccagaccctgaagctggccgccagatacatcgacttcctgtaccaggtgctgcagagcgacgagatggacaacaagatgaccagctgcagctacgtggcccacgagagactgagctacgccttcagcgtgtggagaatggagggcgcctggagcatgagcgccagccactag

SEQ ID NO: 104152 - DNA, 1476 bp, synthetic construct
  misc_feature 1..1476: note = Description of Artificial Sequence: Synthetic coding sequence
  source 1..1476: mol_type = other DNA
atgaaccccgccgccgaggccgagttcaacatcctgctggccaccgacagctacaaggtgacccactacaagcagtacccccccaacaccagcaaggtgtacagctacttcgagtgcagagagaagaagaccgagaacagcaagctgagaaaggtgaagtacgaggagaccgtgttctacggcctgcagtacatcctgaacaagtacctgaagggcaaggtggtgaccaaggagaagatccaggaggccaaggacgtgtacaaggagcacttccaggacgacgtgttcaacgagaagggctggaactacatcctggagaagtacgacggccacctgcccatcgagatcaaggccgtgcccgagggcttcgtgatccccagaggcaacgtgctgttcaccgtggagaacaccgaccccgagtgctactggctgaccaactggatcgagaccatcctggtgcagagctggtaccccatcaccgtggccaccaacagcagagagcagaagaagatcctggccaagtacctgctggagaccagcggcaacctggacggcctggagtacaagctgcacgacttcggctacagaggcgtgagcagccaggagaccgccggcatcggcgccagcgcccacctggtgaacttcaagggcaccgacaccgtggccggcctggccctgatcaagaagtactacggcaccaaggaccccgtgcccggctacagcgtgcccgccgccgagcacagcaccatcaccgcctggggcaaggaccacgagaaggacgccttcgagcacatcgtgacccagttcagcagcgtgcccgtgagcgtggtgagcgacagctacgacatctacaacgcctgcgagaagatctggggcgaggacctgagacacctgatcgtgagcagaagcacccaggcccccctgatcatcagacccgacagcggcaaccccctggacaccgtgctgaaggtgctggagatcctgggcaagaagttccccgtgaccgagaacagcaagggctacaagctgctgcccccctacctgagagtgatccagggcgacggcgtggacatcaacaccctgcaggagatcgtggagggcatgaagcagaagatgtggagcatcgagaacatcgccttcggcagcggcggcggcctgctgcagaagctgaccagagacctgctgaactgcagcttcaagtgcagctacgtggtgaccaacggcctgggcatcaacgtgttcaaggaccccgtggccgaccccaacaagagaagcaagaagggcagactgagcctgcacagaacccccgccggcaacttcgtgaccctggaggagggcaagggcgacctggaggagtacggccaggacctgctgcacaccgtgttcaagaacggcaaggtgaccaagagctacagcttcgacgagatcagaaagaacgcccagctgaacatcgagctggaggccgcccaccactag

SEQ ID NO: 104153 - DNA, 672 bp, synthetic construct
  misc_feature 1..672: note = Description of Artificial Sequence: Synthetic coding sequence
  source 1..672: mol_type = other DNA
atgaagctgcactacgtggccgtgctgaccctggccatcctgatgttcctgacctggctgcccgagagcctgagctgcaacaaggccctgtgcgccagcgacgtgagcaagtgcctgatccaggagctgtgccagtgcagacccggcgagggcaactgcagctgctgcaaggagtgcatgctgtgcctgggcgccctgtgggacgagtgctgcgactgcgtgggcatgtgcaaccccagaaactacagcgacaccccccccaccagcaagagcaccgtggaggagctgcacgagcccatccccagcctgttcagagccctgaccgagggcgacacccagctgaactggaacatcgtgagcttccccgtggccgaggagctgagccaccacgagaacctggtgagcttcctggagaccgtgaaccagccccaccaccagaacgtgagcgtgcccagcaacaacgtgcacgccccctacagcagcgacaaggagcacatgtgcaccgtggtgtacttcgacgactgcatgagcatccaccagtgcaagatcagctgcgagagcatgggcgccagcaagtacagatggttccacaacgcctgctgcgagtgcatcggccccgagtgcatcgactacggcagcaagaccgtgaagtgcatgaactgcatgttctag

SEQ ID NO: 104154 - DNA, 2451 bp, synthetic construct
  misc_feature 1..2451: note = Description of Artificial Sequence: Synthetic coding sequence
  source 1..2451: mol_type = other DNA
atggccgtgagcctggacgacgacgtgcccctgatcctgaccctggacgagggcggcagcgcccccctggcccccagcaacggcctgggccaggaggagctgcccagcaagaacggcggcagctacgccatccacgacagccaggcccccagcctgagcagcggcggcgagagcagccccagcagccccgcccacaactgggagatgaactaccaggaggccgccatctacctgcaggagggcgagaacaacgacaagttcttcacccaccccaaggacgccaaggccctggccgcctacctgttcgcccacaaccacctgttctacctgatggagctggccaccgccctgctgctgctgctgctgagcctgtgcgaggcccccgccgtgcccgccctgagactgggcatctacgtgcacgccaccctggagctgttcgccctgatggtggtggtgttcgagctgtgcatgaagctgagatggctgggcctgcacaccttcatcagacacaagagaaccatggtgaagaccagcgtgctggtggtgcagttcgtggaggccatcgtggtgctggtgagacagatgagccacgtgagagtgaccagagccctgagatgcatcttcctggtggactgcagatactgcggcggcgtgagaagaaacctgagacagatcttccagagcctgccccccttcatggacatcctgctgctgctgctgttcttcatgatcatcttcgccatcctgggcttctacctgttcagccccaaccccagcgacccctacttcagcaccctggagaacagcatcgtgagcctgttcgtgctgctgaccaccgccaacttccccgacgtgatgatgcccagctacagcagaaacccctggagctgcgtgttcttcatcgtgtacctgagcatcgagctgtacttcatcatgaacctgctgctggccgtggtgttcgacaccttcaacgacatcgagaagagaaagttcaagagcctgctgctgcacaagagaaccgccatccagcacgcctacagactgctgatcagccagagaagacccgccggcatcagctacagacagttcgagggcctgatgagattctacaagcccagaatgagcgccagagagagatacctgaccttcaaggccctgaaccagaacaacacccccctgctgagcctgaaggacttctacgacatctacgaggtggccgccctgaagtggaaggccaagaagaacagagagcactggttcgacgagctgcccagaaccgccctgctgatcttcaagggcatcaacatcctggtgaagagcaaggccttccagtacttcatgtacctggtggtggccgtgaacggcgtgtggatcctggtggagaccttcatgctgaagggcggcaacttcttcagcaagcacgtgccctggagctacctggtgttcctgaccatctacggcgtggagctgttcctgaaggtggccggcctgggccccgtggagtacctgagcagcggctggaacctgttcgacttcagcgtgaccgtgttcgccttcctgggcctgctggccctggccctgaacatggagcccttctacttcatcgtggtgctgagacccctgcagctgctgagactgttcaagctgaaggagagatacagaaacgtgctggacaccatgttcgagctgctgcccagaatggccagcctgggcctgaccctgctgatcttctactacagcttcgccatcgtgggcatggagttcttctgcggcatcgtgttccccaactgctgcaacaccagcaccgtggccgacgcctacagatggagaaaccacaccgtgggcaacagaaccgtggtggaggagggctactactacctgaacaacttcgacaacatcctgaacagcttcgtgaccctgttcgagctgaccgtggtgaacaactggtacatcatcatggagggcgtgaccagccagaccagccactggagcagactgtacttcatgaccttctacatcgtgaccatggtggtgatgaccatcatcgtggccttcatcctggaggccttcgtgttcagaatgaactacagcagaaagaaccaggacagcgaggtggacggcggcatcaccctggagaaggagatcagcaaggaggagctggtggccgtgctggagctgtacagagaggccagaggcgccagcagcgacgtgaccagactgctggagaccctgagccagatggagagataccagcagcacagcatggtgttcctgggcagaagaagcagaaccaagagcgacctgagcctgaagatgtaccaggaggagatccaggagtggtacgaggagcacgccagagagcaggagcagcagagacagctgagcagcagcgccgcccccgccgcccagcagccccccggcagcagacagagaagccagaccgtgacctag

SEQ ID NO: 104155 - DNA, 2247 bp, synthetic construct
  misc_feature 1..2247: note = Description of Artificial Sequence: Synthetic coding sequence
  source 1..2247: mol_type = other DNA
atgaactaccaggaggccgccatctacctgcaggagggcgagaacaacgacaagttcttcacccaccccaaggacgccaaggccctggccgcctacctgttcgcccacaaccacctgttctacctgatggagctggccaccgccctgctgctgctgctgctgagcctgtgcgaggcccccgccgtgcccgccctgagactgggcatctacgtgcacgccaccctggagctgttcgccctgatggtggtggtgttcgagctgtgcatgaagctgagatggctgggcctgcacaccttcatcagacacaagagaaccatggtgaagaccagcgtgctggtggtgcagttcgtggaggccatcgtggtgctggtgagacagatgagccacgtgagagtgaccagagccctgagatgcatcttcctggtggactgcagatactgcggcggcgtgagaagaaacctgagacagatcttccagagcctgccccccttcatggacatcctgctgctgctgctgttcttcatgatcatcttcgccatcctgggcttctacctgttcagccccaaccccagcgacccctacttcagcaccctggagaacagcatcgtgagcctgttcgtgctgctgaccaccgccaacttccccgacgtgatgatgcccagctacagcagaaacccctggagctgcgtgttcttcatcgtgtacctgagcatcgagctgtacttcatcatgaacctgctgctggccgtggtgttcgacaccttcaacgacatcgagaagagaaagttcaagagcctgctgctgcacaagagaaccgccatccagcacgcctacagactgctgatcagccagagaagacccgccggcatcagctacagacagttcgagggcctgatgagattctacaagcccagaatgagcgccagagagagatacctgaccttcaaggccctgaaccagaacaacacccccctgctgagcctgaaggacttctacgacatctacgaggtggccgccctgaagtggaaggccaagaagaacagagagcactggttcgacgagctgcccagaaccgccctgctgatcttcaagggcatcaacatcctggtgaagagcaaggccttccagtacttcatgtacctggtggtggccgtgaacggcgtgtggatcctggtggagaccttcatgctgaagggcggcaacttcttcagcaagcacgtgccctggagctacctggtgttcctgaccatctacggcgtggagctgttcctgaaggtggccggcctgggccccgtggagtacctgagcagcggctggaacctgttcgacttcagcgtgaccgtgttcgccttcctgggcctgctggccctggccctgaacatggagcccttctacttcatcgtggtgctgagacccctgcagctgctgagactgttcaagctgaaggagagatacagaaacgtgctggacaccatgttcgagctgctgcccagaatggccagcctgggcctgaccctgctgatcttctactacagcttcgccatcgtgggcatggagttcttctgcggcatcgtgttccccaactgctgcaacaccagcaccgtggccgacgcctacagatggagaaaccacaccgtgggcaacagaaccgtggtggaggagggctactactacctgaacaacttcgacaacatcctgaacagcttcgtgaccctgttcgagctgaccgtggtgaacaactggtacatcatcatggagggcgtgaccagccagaccagccactggagcagactgtacttcatgaccttctacatcgtgaccatggtggtgatgaccatcatcgtggccttcatcctggaggccttcgtgttcagaatgaactacagcagaaagaaccaggacagcgaggtggacggcggcatcaccctggagaaggagatcagcaaggaggagctggtggccgtgctggagctgtacagagaggccagaggcgccagcagcgacgtgaccagactgctggagaccctgagccagatggagagataccagcagcacagcatggtgttcctgggcagaagaagcagaaccaagagcgacctgagcctgaagatgtaccaggaggagatccaggagtggtacgaggagcacgccagagagcaggagcagcagagacagctgagcagcagcgccgcccccgccgcccagcagccccccggcagcagacagagaagccagaccgtgacctag

SEQ ID NO: 104156 - DNA, 2667 bp, synthetic construct
  misc_feature 1..2667: note = Description of Artificial Sequence: Synthetic coding sequence
  source 1..2667: mol_type = other DNA
atggagagctgctacatcgcccaggccggcctggagctgctgggcagcagcagcagccccaccctgaccagccagagcgccgagatcaccgaggacgccagcaacggcggcgtgagcgagcagcacccctggcccagcggcttcgagagagagctgaagcccgagaccatcagcagccccggctaccacatcctgagagccaccggcgaggagaacatggccgtgagcctggacgacgacgtgcccctgatcctgaccctggacgagggcggcagcgcccccctggcccccagcaacggcctgggccaggaggagctgcccagcaagaacggcggcagctacgccatccacgacagccaggcccccagcctgagcagcggcggcgagagcagccccagcagccccgcccacaactgggagatgaactaccaggaggccgccatctacctgcaggagggcgagaacaacgacaagttcttcacccaccccaaggacgccaaggccctggccgcctacctgttcgcccacaaccacctgttctacctgatggagctggccaccgccctgctgctgctgctgctgagcctgtgcgaggcccccgccgtgcccgccctgagactgggcatctacgtgcacgccaccctggagctgttcgccctgatggtggtggtgttcgagctgtgcatgaagctgagatggctgggcctgcacaccttcatcagacacaagagaaccatggtgaagaccagcgtgctggtggtgcagttcgtggaggccatcgtggtgctggtgagacagatgagccacgtgagagtgaccagagccctgagatgcatcttcctggtggactgcagatactgcggcggcgtgagaagaaacctgagacagatcttccagagcctgccccccttcatggacatcctgctgctgctgctgttcttcatgatcatcttcgccatcctgggcttctacctgttcagccccaaccccagcgacccctacttcagcaccctggagaacagcatcgtgagcctgttcgtgctgctgaccaccgccaacttccccgacgtgatgatgcccagctacagcagaaacccctggagctgcgtgttcttcatcgtgtacctgagcatcgagctgtacttcatcatgaacctgctgctggccgtggtgttcgacaccttcaacgacatcgagaagagaaagttcaagagcctgctgctgcacaagagaaccgccatccagcacgcctacagactgctgatcagccagagaagacccgccggcatcagctacagacagttcgagggcctgatgagattctacaagcccagaatgagcgccagagagagatacctgaccttcaaggccctgaaccagaacaacacccccctgctgagcctgaaggacttctacgacatctacgaggtggccgccctgaagtggaaggccaagaagaacagagagcactggttcgacgagctgcccagaaccgccctgctgatcttcaagggcatcaacatcctggtgaagagcaaggccttccagtacttcatgtacctggtggtggccgtgaacggcgtgtggatcctggtggagaccttcatgctgaagggcggcaacttcttcagcaagcacgtgccctggagctacctggtgttcctgaccatctacggcgtggagctgttcctgaaggtggccggcctgggccccgtggagtacctgagcagcggctggaacctgttcgacttcagcgtgaccgtgttcgccttcctgggcctgctggccctggccctgaacatggagcccttctacttcatcgtggtgctgagacccctgcagctgctgagactgttcaagctgaaggagagatacagaaacgtgctggacaccatgttcgagctgctgcccagaatggccagcctgggcctgaccctgctgatcttctactacagcttcgccatcgtgggcatggagttcttctgcggcatcgtgttccccaactgctgcaacaccagcaccgtggccgacgcctacagatggagaaaccacaccgtgggcaacagaaccgtggtggaggagggctactactacctgaacaacttcgacaacatcctgaacagcttcgtgaccctgttcgagctgaccgtggtgaacaactggtacatcatcatggagggcgtgaccagccagaccagccactggagcagactgtacttcatgaccttctacatcgtgaccatggtggtgatgaccatcatcgtggccttcatcctggaggccttcgtgttcagaatgaactacagcagaaagaaccaggacagcgaggtggacggcggcatcaccctggagaaggagatcagcaaggaggagctggtggccgtgctggagctgtacagagaggccagaggcgccagcagcgacgtgaccagactgctggagaccctgagccagatggagagataccagcagcacagcatggtgttcctgggcagaagaagcagaaccaagagcgacctgagcctgaagatgtaccaggaggagatccaggagtggtacgaggagcacgccagagagcaggagcagcagagacagctgagcagcagcgccgcccccgccgcccagcagccccccggcagcagacagagaagccagaccgtgacctag

SEQ ID NO: 104157 - DNA, 2667 bp, synthetic construct; identical to SEQ ID NO: 104156
  misc_feature 1..2667: note = Description of Artificial Sequence: Synthetic coding sequence
  source 1..2667: mol_type = other DNA

SEQ ID NO: 104158 - DNA, 258 bp, synthetic construct
  misc_feature 1..258: note = Description of Artificial Sequence: Synthetic coding sequence
  source 1..258: mol_type = other DNA
atggccgtgagcctggacgacgacgtgcccctgatcctgaccctggacgagggcggcagcgcccccctggcccccagcaacggcctgggccaggaggagctgcccagcaagaacggcggcagctacgccatccacgacagccaggcccccagcctgagcagcggcggcgagagcagccccagcagccccgcccacaactgggagatgaactaccaggaggccgccatctacctgcaggagggcgagaacaacgactag

SEQ ID NO: 104159 - DNA, 303 bp, synthetic construct
  misc_feature 1..303: note = Description of Artificial Sequence: Synthetic coding sequence
  source 1..303: mol_type = other DNA
atggccgtgagcctggacgacgacgtgcccctgatcctgaccctggacgagggcggcagcgcccccctggcccccagcaacggcctgggccaggaggagctgcccagcaagagaagatgctgcatgctgtgcagcagcaagcagaagccctggatcccctgcagagtgatcagcgacgtggcctgcaaggccgccagctgcttcgagggcgccagcggcccctgcgacatcagcatgtgggagtgctacagagtgtgcaagcagatggccgccgccatgcccagcaccacccccagaccctag

SEQ ID NO: 104160 - DNA, 2259 bp, synthetic construct
  misc_feature 1..2259: note = Description of Artificial Sequence: Synthetic coding sequence
  source 1..2259: mol_type = other DNA
atggccgagccccaggccgagagcgagcccctgctgggcggcgccagaggcggcggcggcgactggcccgccggcctgaccacctacagaagcatccaggtgggccccggcgccgccgccagatgggacctgtgcatcgaccaggccgtggtgttcatcgaggacgccatccagtacagaagcatcaaccacagagtggacgccagcagcatgtggctgtacagaagatactacagcaacgtgtgccagagaaccctgagcttcaccatcttcctgatcctgttcctggccttcatcgagacccccagcagcctgaccagcaccgccgacgtgagatacagagccgccccctgggagcccccctgcggcctgaccgagagcgtggaggtgctgtgcctgctggtgttcgccgccgacctgagcgtgaagggctacctgttcggctgggcccacttccagaagaacctgtggctgctgggctacctggtggtgctggtggtgagcctggtggactggaccgtgagcctgagcctggtgtgccacgagcccctgagaatcagaagactgctgagacccttcttcctgctgcagaacagcagcatgatgaagaagaccctgaagtgcatcagatggagcctgcccgagatggccagcgtgggcctgctgctggccatccacctgtgcctgttcaccatgttcggcatgctgctgttcgccggcggcaagcaggacgacggccaggacagagagagactgacctacttccagaacctgcccgagagcctgaccagcctgctggtgctgctgaccaccgccaacaaccccgacgtgatgatccccgcctacagcaagaacagagcctacgccatcttcttcatcgtgttcaccgtgatcggcagcctgttcctgatgaacctgctgaccgccatcatctacagccagttcagaggctacctgatgaagagcctgcagaccagcctgttcagaagaagactgggcaccagagccgccttcgaggtgctgagcagcatggtgggcgagggcggcgccttcccccaggccgtgggcgtgaagccccagaacctgctgcaggtgctgcagaaggtgcagctggacagcagccacaagcaggccatgatggagaaggtgagaagctacggcagcgtgctgctgagcgccgaggagttccagaagctgttcaacgagctggacagaagcgtggtgaaggagcacccccccagacccgagtaccagagccccttcctgcagagcgcccagttcctgttcggccactactacttcgactacctgggcaacctgatcgccctggccaacctggtgagcatctgcgtgttcctggtgctggacgccgacgtgctgcccgccgagagagacgacttcatcctgggcatcctgaactgcgtgttcatcgtgtactacctgctggagatgctgctgaaggtgttcgccctgggcctgagaggctacctgagctaccccagcaacgtgttcgacggcctgctgaccgtggtgctgctggtgctggagatcagcaccctggccgtgtacagactgccccaccccggctggagacccgagatggtgggcctgctgagcctgtgggacatgaccagaatgctgaacatgctgatcgtgttcagattcctgagaatcatccccagcatgaagctgatggccgtggtggccagcaccgtgctgggcctggtgcagaacatgagagccttcggcggcatcctggtggtggtgtactacgtgttcgccatcatcggcatcaacctgttcagaggcgtgatcgtggccctgcccggcaacagcagcctggcccccgccaacggcagcgccccctgcggcagcttcgagcagctggagtactgggccaacaacttcgacgacttcgccgccgccctggtgaccctgtggaacctgatggtggtgaacaactggcaggtgttcctggacgcctacagaagatacagcggcccctggagcaagatctacttcgtgctgtggtggctggtgagcagcgtgatctgggtgaacctgttcctggccctgatcctggagaacttcctgcacaagtgggaccccagaagccacctgcagcccctggccggcacccccgaggccacctaccagatgaccgtggagctgctgttcagagacatcctggaggagcccggcgaggacgagctgaccgagagactgagccagcacccccacctgtggctgtgcagatag

SEQ ID NO: 104161 - DNA, 1407 bp, synthetic construct
  misc_feature 1..1407: note = Description of Artificial Sequence: Synthetic coding sequence
  source 1..1407: mol_type = other DNA
atgtggctgtacagaagatactacagcaacgtgtgccagagaaccctgagcttcaccatcttcctgatcctgttcctggccttcatcgagacccccagcagcctgaccagcaccgccgacgtgagatacagagccgccccctgggagcccccctgcggcctgaccgagagcgtggaggtgctgtgcctgctggtgttcgccgccgacctgagcgtgaagggctacctgttcggctgggcccacttccagaagaacctgtggctgctgggctacctggtggtgctggtggtgagcctggtggactggaccgtgagcctgagcctggtgtgccacgagcccctgagaatcagaagactgctgagacccttcttcctgctgcagaacagcagcatgatgaagaagaccctgaagtgcatcagatggagcctgcccgagatggccagcgtgggcctgctgctggccatccacctgtgcctgttcaccatgttcggcatgctgctgttcgccggcggcaagcaggacgacggccaggacagagagagactgacctacttccagaacctgcccgagagcctgaccagcctgctggtgctgctgaccaccgccaacaaccccgacgtgatgatccccgcctacagcaagaacagagcctacgccatcttcttcatcgtgttcaccgtgatcggcagcctgttcctgatgaacctgctgaccgccatcatctacagccagttcagaggctacctgatgaagagcctgcagaccagcctgttcagaagaagactgggcaccagagccgccttcgaggtgctgagcagcatggtgggcgagggcggcgccttcccccaggccaccagaagaggccccagcaccagcctgagattctgcagagcccccagcagcagcagcgccaccaccaccctgaccacctggggcaccagcagcccctggcagacctggtgccccttcgcctgcagctggtgctggatgcagatgtgctgcctgctgagcgtgatgaccagcagctggggcttcagcaccgccagcagcctgtgcaccacctgctggagatgctgcagcagaagcctgccctgggcctgcgagggcacctgccccacccccgccacctgcctgaccggcagcagccccctgagctgctggagacccgagatggtgggcctgctgagcctgtgggacatgaccagaatgctgaacatgctgatcgtgttcagattcctgagaatcatccccagcatgaagctgatggccgtggtggccagcaccgtgctgggcctggtgcagaacatgagagccttcggcggcatcctggtgcccggcccctgccagtggctgggcgccctgtgggagctgagagccgccggcgtgctgggccagcagctgagatag

SEQ ID NO: 104162 - DNA, 1584 bp, synthetic construct
  misc_feature 1..1584: note = Description of Artificial Sequence: Synthetic coding sequence
  source 1..1584: mol_type = other DNA
atgatcctgagcagctacaacaccatccagagcgtgttctgctgctgctgctgctgcagcgtgcagaagagacagatgagaacccagatcagcctgagcaccgacgaggagctgcccgagaagtacacccagagaagaagaccctggctgagccagctgagcaacaagaagcagagcaacaccggcagagtgcagcccagcaagagaaagcccctgccccccctgccccccagcgaggtggccgaggagaagatccaggtgaaggccctgtacgacttcctgcccagagagccctgcaacctggccctgagaagagccgaggagtacctgatcctggagaagtacaacccccactggtggaaggccagagacagactgggcaacgagggcctgatccccagcaactacgtgaccgagaacaagatcaccaacctggagatctacgagtggtaccacagaaacatcaccagaaaccaggccgagcacctgctgagacaggagagcaaggagggcgccttcatcgtgagagacagcagacacctgggcagctacaccatcagcgtgttcatgggcgccagaagaagcaccgaggccgccatcaagcactaccagatcaagaagaacgacagcggccagtggtacgtggccgagagacacgccttccagagcatccccgagctgatctggtaccaccagcacaacgccgccggcctgatgaccagactgagataccccgtgggcctgatgggcagctgcctgcccgccaccgccggcttcagctacgagaagtgggagatcgaccccagcgagctggccttcatcaaggagatcggcagcggccagttcggcgtggtgcacctgggcgagtggagaagccacatccaggtggccatcaaggccatcaacgagggcagcatgagcgaggaggacttcatcgaggaggccaaggtgatgatgaagctgagccacagcaagctggtgcagctgtacggcgtgtgcatccagagaaagcccctgtacatcgtgaccgagttcatggagaacggctgcctgctgaactacctgagagagaacaagggcaagctgagaaaggagatgctgctgagcgtgtgccaggacatctgcgagggcatggagtacctggagagaaacggctacatccacagagacctggccgccagaaactgcctggtgagcagcacctgcatcgtgaagatcagcgacttcggcatgaccagatacgtgctggacgacgagtacgtgagcagcttcggcgccaagttccccatcaagtggagcccccccgaggtgttcctgttcaacaagtacagcagcaagagcgacgtgtggagcttcggcgtgctgatgtgggaggtgttcaccgagggcaagatgcccttcgagaacaagagcaacctgcaggtggtggaggccatcagcgagggcttcagactgtacagaccccacctggcccccatgagcatctacgaggtgatgtacagctgctggcacgagaagcccgagggcagacccaccttcgccgagctgctgagagccgtgaccgagatcgccgagacctggtag

SEQ ID NO: 104163 - DNA, 342 bp, synthetic construct
  misc_feature 1..342: note = Description of Artificial Sequence: Synthetic coding sequence
  source 1..342: mol_type = other DNA
atgggcggcctggagccctgcagcagactgctgctgctgcccctgctgctggccgtgagcggcctgagacccgtgcaggcccaggcccagagcgactgcagctgcagcaccgtgagccccggcgtgctggccggcatcgtgatgggcgacctggtgctgaccgtgctgatcgccctggccgtgtacttcctgggcagactggtgcccagaggcagaggcgccgccgaggccgccaccagaaagcagagaatcaccgagaccgagagcccctaccaggagctgcagggccagagaagcgacgtgtacagcgacctgaacacccagagaccctactacaagtag

SEQ ID NO: 104164 - DNA, 339 bp, synthetic construct
  misc_feature 1..339: note = Description of Artificial Sequence: Synthetic coding sequence
  source 1..339: mol_type = other DNA
atgggcggcctggagccctgcagcagactgctgctgctgcccctgctgctggccgtgagcggcctgagacccgtgcaggcccaggcccagagcgactgcagctgcagcaccgtgagccccggcgtgctggccggcatcgtgatgggcgacctggtgctgaccgtgctgatcgccctggccgtgtacttcctgggcagactggtgcccagaggcagaggcgccgccgaggccaccagaaagcagagaatcaccgagaccgagagcccctaccaggagctgcagggccagagaagcgacgtgtacagcgacctgaacacccagagaccctactacaagtag

SEQ ID NO: 104165 - DNA, 309 bp, synthetic construct
  misc_feature 1..309: note = Description of Artificial Sequence: Synthetic coding sequence
  source 1..309: mol_type = other DNA
atgggcggcctggagccctgcagcagactgctgctgctgcccctgctgctggccgtgagcgactgcagctgcagcaccgtgagccccggcgtgctggccggcatcgtgatgggcgacctggtgctgaccgtgctgatcgccctggccgtgtacttcctgggcagactggtgcccagaggcagaggcgccgccgaggccgccaccagaaagcagagaatcaccgagaccgagagcccctaccaggagctgcagggccagagaagcgacgtgtacagcgacctgaacacccagagaccctactacaagtag

SEQ ID NO: 104166 - DNA, 339 bp, synthetic construct; identical to SEQ ID NO: 104164
  misc_feature 1..339: note = Description of Artificial Sequence: Synthetic coding sequence
  source 1..339: mol_type = other DNA

SEQ ID NO: 104167 - DNA, 2673 bp, synthetic construct
  misc_feature 1..2673: note = Description of Artificial Sequence: Synthetic coding sequence
  source 1..2673: mol_type = other DNA
atggccctgagaagaagcatgggcagacccggcctgccccccctgcccctgccccccccccccagactgggcctgctgctggccgccctggccagcctgctgctgcccgagagcgccgccgccggcctgaagctgatgggcgcccccgtgaagctgaccgtgagccagggccagcccgtgaagctgaactgcagcgtggagggcatggaggagcccgacatccagtgggtgaaggacggcgccgtggtgcagaacctggaccagctgtacatccccgtgagcgagcagcactggatcggcttcctgagcctgaagagcgtggagagaagcgacgccggcagatactggtgccaggtggaggacggcggcgagaccgagatcagccagcccgtgtggctgaccgtggagggcgtgcccttcttcaccgtggagcccaaggacctggccgtgccccccaacgcccccttccagctgagctgcgaggccgtgggcccccccgagcccgtgaccatcgtgtggtggagaggcaccaccaagatcggcggccccgcccccagccccagcgtgctgaacgtgaccggcgtgacccagagcaccatgttcagctgcgaggcccacaacctgaagggcctggccagcagcagaaccgccaccgtgcacctgcaggccctgcccgccgcccccttcaacatcaccgtgaccaagctgagcagcagcaacgccagcgtggcctggatgcccggcgccgacggcagagccctgctgcagagctgcaccgtgcaggtgacccaggcccccggcggctgggaggtgctggccgtggtggtgcccgtgccccccttcacctgcctgctgagagacctggtgcccgccaccaactacagcctgagagtgagatgcgccaacgccctgggccccagcccctacgccgactgggtgcccttccagaccaagggcctggcccccgccagcgccccccagaacctgcacgccatcagaaccgacagcggcctgatcctggagtgggaggaggtgatccccgaggcccccctggagggccccctgggcccctacaagctgagctgggtgcaggacaacggcacccaggacgagctgaccgtggagggcaccagagccaacctgaccggctgggacccccagaaggacctgatcgtgagagtgtgcgtgagcaacgccgtgggctgcggcccctggagccagcccctggtggtgagcagccacgacagagccggccagcagggccccccccacagcagaaccagctgggtgcccgtggtgctgggcgtgctgaccgccctggtgaccgccgccgccctggccctgatcctgctgagaaagagaagaaaggagaccagattcggccaggccttcgacagcgtgatggccagaggcgagcccgccgtgcacttcagagccgccagaagcttcaacagagagagacccgagagaatcgaggccaccctggacagcctgggcatcagcgacgagctgaaggagaagctggaggacgtgctgatccccgagcagcagttcaccctgggcagaatgctgggcaagggcgagttcggcagcgtgagagaggcccagctgaagcaggaggacggcagcttcgtgaaggtggccgtgaagatgctgaaggccgacatcatcgccagcagcgacatcgaggagttcctgagagaggccgcctgcatgaaggagttcgaccacccccacgtggccaagctggtgggcgtgagcctgagaagcagagccaagggcagactgcccatccccatggtgatcctgcccttcatgaagcacggcgacctgcacgccttcctgctggccagcagaatcggcgagaaccccttcaacctgcccctgcagaccctgatcagattcatggtggacatcgcctgcggcatggagtacctgagcagcagaaacttcatccacagagacctggccgccagaaactgcatgctggccgaggacatgaccgtgtgcgtggccgacttcggcctgagcagaaagatctacagcggcgactactacagacagggctgcgccagcaagctgcccgtgaagtggctggccctggagagcctggccgacaacctgtacaccgtgcagagcgacgtgtgggccttcggcgtgaccatgtgggagatcatgaccagaggccagaccccctacgccggcatcgagaacgccgagatctacaactacctgatcggcggcaacagactgaagcagccccccgagtgcatggaggacgtgtacgacctgatgtaccagtgctggagcgccgaccccaagcagagacccagcttcacctgcctgagaatggagctggagaacatcctgggccagctgagcgtgctgagcgccagccaggaccccctgtacatcaacatcgagagagccgaggagcccaccgccggcggcagcctggagctgcccggcagagaccagccctacagcggcgccggcgacggcagcggcatgggcgccgtgggcggcacccccagcgactgcagatacatcctgacccccggcggcctggccgagcagcccggccaggccgagcaccagcccgagagccccctgaacgagacccagagactgctgctgctgcagcagggcctgctgccccacagcagctgctag

SEQ ID NO: 104168 - DNA, 2529 bp, synthetic construct
  misc_feature 1..2529: note = Description of Artificial Sequence: Synthetic coding sequence
  source 1..2529: mol_type = other DNA
atggaggagcccgacatccagtgggtgaaggacggcgccgtggtgcagaacctggaccagctgtacatccccgtgagcgagcagcactggatcggcttcctgagcctgaagagcgtggagagaagcgacgccggcagatactggtgccaggtggaggacggcggcgagaccgagatcagccagcccgtgtggctgaccgtggagggcgtgcccttcttcaccgtggagcccaaggacctggccgtgccccccaacgcccccttccagctgagctgcgaggccgtgggcccccccgagcccgtgaccatcgtgtggtggagaggcaccaccaagatcggcggccccgcccccagccccagcgtgctgaacgtgaccggcgtgacccagagcaccatgttcagctgcgaggcccacaacctgaagggcctggccagcagcagaaccgccaccgtgcacctgcaggccctgcccgccgcccccttcaacatcaccgtgaccaagctgagcagcagcaacgccagcgtggcctggatgcccggcgccgacggcagagccctgctgcagagctgcaccgtgcaggtgacccaggcccccggcggctgggaggtgctggccgtggtggtgcccgtgccccccttcacctgcctgctgagagacctggtgcccgccaccaactacagcctgagagtgagatgcgccaacgccctgggccccagcccctacgccgactgggtgcccttccagaccaagggcctggcccccgccagcgccccccagaacctgcacgccatcagaaccgacagcggcctgatcctggagtgggaggaggtgatccccgaggcccccctggagggccccctgggcccctacaagctgagctgggtgcaggacaacggcacccaggacgagctgaccgtggagggcaccagagccaacctgaccggctgggacccccagaaggacctgatcgtgagagtgtgcgtgagcaacgccgtgggctgcggcccctggagccagcccctggtggtgagcagccacgacagagccggccagcagggccccccccacagcagaaccagctgggtgcccgtggtgctgggcgtgctgaccgccctggtgaccgccgccgccctggccctgatcctgctgagaaagagaagaaaggagaccagattcggccaggccttcgacagcgtgatggccagaggcgagcccgccgtgcacttcagagccgccagaagcttcaacagagagagacccgagagaatcgaggccaccctggacagcctgggcatcagcgacgagctgaaggagaagctggaggacgtgctgatccccgagcagcagttcaccctgggcagaatgctgggcaagggcgagttcggcagcgtgagagaggcccagctgaagcaggaggacggcagcttcgtgaaggtggccgtgaagatgctgaaggccgacatcatcgccagcagcgacatcgaggagttcctgagagaggccgcctgcatgaaggagttcgaccacccccacgtggccaagctggtgggcgtgagcctgagaagcagagccaagggcagactgcccatccccatggtgatcctgcccttcatgaagcacggcgacctgcacgccttcctgctggccagcagaatcggcgagaaccccttcaacctgcccctgcagaccctgatcagattcatggtggacatcgcctgcggcatggagtacctgagcagcagaaacttcatccacagagacctggccgccagaaactgcatgctggccgaggacatgaccgtgtgcgtggccgacttcggcctgagcagaaagatctacagcggcgactactacagacagggctgcgccagcaagctgcccgtgaagtggctggccctggagagcctggccgacaacctgtacaccgtgcagagcgacgtgtgggccttcggcgtgaccatgtgggagatcatgaccagaggccagaccccctacgccggcatcgagaacgccgagatctacaactacctgatcggcggcaacagactgaagcagccccccgagtgcatggaggacgtgtacgacctgatgtaccagtgctggagcgccgaccccaagcagagacccagcttcacctgcctgagaatggagctggagaacatcctgggccagctgagcgtgctgagcgccagccaggaccccctgtacatcaacatcgagagagccgaggagcccaccgccggcggcagcctggagctgcccggcagagaccagccctacagcggcgccggcgacggcagcggcatgggcgccgtgggcggcacccccagcgactgcagatacatcctgacccccggcggcctggccgagcagcccggccaggccgagcaccagcccgagagccccctgaacgagacccagagactgctgctgctgcagcagggcctgcacaccgtggccgtgagcccccaggccgagggcatcggcgccatctggcccgccctggtggccaccgagctggccgactag

SEQ ID NO: 104169 - DNA, 741 bp, synthetic construct
  misc_feature 1..741: note = Description of Artificial Sequence: Synthetic coding sequence
  source 1..741: mol_type = other DNA
atgaccatggacaagagcgagctggtgcagaaggccaagctggccgagcaggccgagagatacgacgacatggccgccgccatgaaggccgtgaccgagcagggccacgagctgagcaacgaggagagaaacctgctgagcgtggcctacaagaacgtggtgggcgccagaagaagcagctggagagtgatcagcagcatcgagcagaagaccgagagaaacgagaagaagcagcagatgggcaaggagtacagagagaagatcgaggccgagctgcaggacatctgcaacgacgtgctggagctgctggacaagtacctgatccccaacgccacccagcccgagagcaaggtgttctacctgaagatgaagggcgactacttcagatacctgagcgaggtggccagcggcgacaacaagcagaccaccgtgagcaacagccagcaggcctaccaggaggccttcgagatcagcaagaaggagatgcagcccacccaccccatcagactgggcctggccctgaacttcagcgtgttctactacgagatcctgaacagccccgagaaggcctgcagcctggccaagaccgccttcgacgaggccatcgccgagctggacaccctgaacgaggagagctacaaggacagcaccctgatcatgcagctgctgagagacaacctgaccctgtggaccagcgagaaccagggcgacgagggcgacgccggcgagggcgagaactag

SEQ ID NO: 104170 - DNA, 741 bp, synthetic construct; identical to SEQ ID NO: 104169
  misc_feature 1..741: note = Description of Artificial Sequence: Synthetic coding sequence
  source 1..741: mol_type = other DNA

SEQ ID NO: 104171 - DNA, 303 bp, synthetic construct
  misc_feature 1..303: note = Description of Artificial Sequence: Synthetic coding sequence
  source 1..303: mol_type = other DNA
atgaccatggacaagagcgagctggtgcagaaggccaagctggccgagcaggccgagagatacgacgacatggccgccgccatgaaggccgtgaccgagcagggccacgagctgagcaacgaggagagaaacctgctgagcgtggcctacaagaacgtggtgggcgccagaagaagcagctggagagtgatcagcagcatcgagcagaagaccgagagaaacgagaagaagcagcagatgggcaaggagtacagagagaagatcgaggccgagctgcaggacatctgcaacgacgtgctgtag

SEQ ID NO: 104172 - DNA, 225 bp, synthetic construct
  misc_feature 1..225: note = Description of Artificial Sequence: Synthetic coding sequence
  source 1..225: mol_type = other DNA
atgaccatggacaagagcgagctggtgcagaaggccaagctggccgagcaggccgagagatacgacgacatggccgccgccatgaaggccgtgaccgagcagggccacgagctgagcaacgaggagagaaacctgctgagcgtggcctacaagaacgtggtgggcgccagaagaagcagctggagagtgatcagcagcatcgagcagaagaccgagagaaactag

SEQ ID NO: 104173 - DNA, 768 bp, synthetic construct
  misc_feature 1..768: note = Description of Artificial Sequence: Synthetic coding sequence
  source 1..768: mol_type = other DNA
atggacgacagagaggacctggtgtaccaggccaagctggccgagcaggccgagagatacgacgagatggtggagagcatgaagaaggtggccggcatggacgtggagctgaccgtggaggagagaaacctgctgagcgtggcctacaagaacgtgatcggcgccagaagagccagctggagaatcatcagcagcatcgagcagaaggaggagaacaagggcggcgaggacaagctgaagatgatcagagagtacagacagatggtggagaccgagctgaagctgatctgctgcgacatcctggacgtgctggacaagcacctgatccccgccgccaacaccggcgagagcaaggtgttctactacaagatgaagggcgactaccacagatacctggccgagttcgccaccggcaacgacagaaaggaggccgccgagaacagcctggtggcctacaaggccgccagcgacatcgccatgaccgagctgccccccacccaccccatcagactgggcctggccctgaacttcagcgtgttctactacgagatcctgaacagccccgacagagcctgcagactggccaaggccgccttcgacgacgccatcgccgagctggacaccctgagcgaggagagctacaaggacagcaccctgatcatgcagctgctgagagacaacctgaccctgtggaccagcgacatgcagggcgacggcgaggagcagaacaaggaggccctgcaggacgtggaggacgagaaccagtag

SEQ ID NO: 104174 - DNA, 702 bp, synthetic construct
  misc_feature 1..702: note = Description of Artificial Sequence: Synthetic coding sequence
  source 1..702: mol_type = other DNA
atggtggagagcatgaagaaggtggccggcatggacgtggagctgaccgtggaggagagaaacctgctgagcgtggcctacaagaacgtgatcggcgccagaagagccagctggagaatcatcagcagcatcgagcagaaggaggagaacaagggcggcgaggacaagctgaagatgatcagagagtacagacagatggtggagaccgagctgaagctgatctgctgcgacatcctggacgtgctggacaagcacctgatccccgccgccaacaccggcgagagcaaggtgttctactacaagatgaagggcgactaccacagatacctggccgagttcgccaccggcaacgacagaaaggaggccgccgagaacagcctggtggcctacaaggccgccagcgacatcgccatgaccgagctgccccccacccaccccatcagactgggcctggccctgaacttcagcgtgttctactacgagatcctgaacagccccgacagagcctgcagactggccaaggccgccttcgacgacgccatcgccgagctggacaccctgagcgaggagagctacaaggacagcaccctgatcatgcagctgctgagagacaacctgaccctgtggaccagcgacatgcagggcgacggcgaggagcagaacaaggaggccctgcaggacgtggaggacgagaaccagtag

SEQ ID NO: 104175 - DNA, 744 bp, synthetic construct
  misc_feature 1..744: note = Description of Artificial Sequence: Synthetic coding sequence
  source 1..744: mol_type = other DNA
atggtggacagagagcagctggtgcagaaggccagactggccgagcaggccgagagatacgacgacatggccgccgccatgaagaacgtgaccgagctgaacgagcccctgagcaacgaggagagaaacctgctgagcgtggcctacaagaacgtggtgggcgccagaagaagcagctggagagtgatcagcagcatcgagcagaagaccagcgccgacggcaacgagaagaagatcgagatggtgagagcctacagagagaagatcgagaaggagctggaggccgtgtgccaggacgtgctgagcctgctggacaactacctgatcaagaactgcagcgagacccagtacgagagcaaggtgttctacctgaagatgaagggcgactactacagatacctggccgaggtggccaccggcgagaagagagccaccgtggtggagagcagcgagaaggcctacagcgaggcccacgagatcagcaaggagcacatgcagcccacccaccccatcagactgggcctggccctgaactacagcgtgttctactacgagatccagaacgcccccgagcaggcctgccacctggccaagaccgccttcgacgacgccatcgccgagctggacaccctgaacgaggacagctacaaggacagcaccctgatcatgcagctgctgagagacaacctgaccctgtggaccagcgaccagcaggacgacgacggcggcgagggcaacaactag

SEQ ID NO: 104176 - DNA, 624 bp, synthetic construct
  misc_feature 1..624: note = Description of Artificial Sequence: Synthetic coding sequence
  source 1..624: mol_type = other DNA
atggtggacagagagcagctggtgcagaaggccagactggccgagcaggccgagagatacgacgacatggccgccgccatgaagaacgtgaccgagctgaacgagcccctgagcaacgaggagagaaacctgctgagcgtggcctacaagaacgtggtgggcgccagaagaagcagctggagagtgatcagcagcatcgagcagaagaccagcgccgacggcaacgagaagaagatcgagatggtgagagcctacagagagaagatcgagaaggagctggaggccgaggtggccaccggcgagaagagagccaccgtggtggagagcagcgagaaggcctacagcgaggcccacgagatcagcaaggagcacatgcagcccacccaccccatcagactgggcctggccctgaactacagcgtgttctactacgagatccagaacgcccccgagcaggcctgccacctggccaagaccgccttcgacgacgccatcgccgagctggacaccctgaacgaggacagctacaaggacagcaccctgatcatgcagctgctgagagacaacctgaccctgtggaccagcgaccagcaggacgacgacggcggcgagggcaacaactag

SEQ ID NO: 104177 - DNA, 678 bp, synthetic construct
  misc_feature 1..678: note = Description of Artificial Sequence: Synthetic coding sequence
  source 1..678: mol_type = other DNA
atggccgccgccatgaagaacgtgaccgagctgaacgagcccctgagcaacgaggagagaaacctgctgagcgtggcctacaagaacgtggtgggcgccagaagaagcagctggagagtgatcagcagcatcgagcagaagaccagcgccgacggcaacgagaagaagatcgagatggtgagagcctacagagagaagatcgagaaggagctggaggccgtgtgccaggacgtgctgagcctgctggacaactacctgatcaagaactgcagcgagacccagtacgagagcaaggtgttctacctgaagatgaagggcgactactacagatacctggccgaggtggccaccggcgagaagagagccaccgtggtggagagcagcgagaaggcctacagcgaggcccacgagatcagcaaggagcacatgcagcccacccaccccatcagactgggcctggccctgaactacagcgtgttctactacgagatccagaacgcccccgagcaggcctgccacctggccaagaccgccttcgacgacgccatcgccgagctggacaccctgaacgaggacagctacaaggacagcaccctgatcatgcagctgctgagagacaacctgaccctgtggaccagcgaccagcaggacgacgacggcggcgagggcaacaactag

SEQ ID NO: 104178 - DNA, 738 bp, synthetic construct
  misc_feature 1..738: note = Description of Artificial Sequence: Synthetic coding sequence
  source 1..738: mol_type = other DNA
atggacaagaacgagctggtgcagaaggccaagctggccgagcaggccgagagatacgacgacatggccgcctgcatgaagagcgtgaccgagcagggcgccgagctgagcaacgaggagagaaacctgctgagcgtggcctacaagaacgtggtgggcgccagaagaagcagctggagagtggtgagcagcatcgagcagaagaccgagggcgccgagaagaagcagcagatggccagagagtacagagagaagatcgagaccgagctgagagacatctgcaacgacgtgctgagcctgctggagaagttcctgatccccaacgccagccaggccgagagcaaggtgttctacctgaagatgaagggcgactactacagatacctggccgaggtggccgccggcgacgacaagaagggcatcgtggaccagagccagcaggcctaccaggaggccttcgagatcagcaagaaggagatgcagcccacccaccccatcagactgggcctggccctgaacttcagcgtgttctactacgagatcctgaacagccccgagaaggcctgcagcctggccaagaccgccttcgacgaggccatcgccgagctggacaccctgagcgaggagagctacaaggacagcaccctgatcatgcagctgctgagagacaacctgaccctgtggaccagcgacacccagggcgacgaggccgaggccggcgagggcggcgagaactag

SEQ ID NO: 104179 - DNA, 507 bp, synthetic construct
  misc_feature 1..507: note = Description of Artificial Sequence: Synthetic coding sequence
  source 1..507: mol_type = other DNA
atggccagagagtacagagagaagatcgagaccgagctgagagacatctgcaacgacgtgctgagcctgctggagaagttcctgatccccaacgccagccaggccgagagcaaggtgttctacctgaagatgaagggcgactactacagatacctggccgaggtggccgccggcgacgacaagaagggcatcgtggaccagagccagcaggcctaccaggaggccttcgagatcagcaagaaggagatgcagcccacccaccccatcagactgggcctggccctgaacttcagcgtgttctactacgagatcctgaacagccccgagaaggcctgcagcctggccaagaccgccttcgacgaggccatcgccgagctggacaccctgagcgaggagagctacaaggacagcaccctgatcatgcagctgctgagagacaacctgaccctgtggaccagcgacacccagggcgacgaggccgaggccggcgagggcggcgagaactag

SEQ ID NO: 104180 - DNA, 738 bp, synthetic construct; identical to SEQ ID NO: 104178
  misc_feature 1..738: note = Description of Artificial Sequence: Synthetic coding sequence
  source 1..738: mol_type = other DNA

SEQ ID NO: 104181 - DNA, 738 bp, synthetic construct; identical to SEQ ID NO: 104178
  misc_feature 1..738: note = Description of Artificial Sequence: Synthetic coding sequence
  source 1..738: mol_type = other DNA

SEQ ID NO: 104182 - DNA, 738 bp, synthetic construct; identical to SEQ ID NO: 104178
  misc_feature 1..738: note = Description of Artificial Sequence: Synthetic coding sequence
  source 1..738: mol_type = other DNA

SEQ ID NO: 104183 - DNA, 738 bp, synthetic construct; identical to SEQ ID NO: 104178
  misc_feature 1..738: note = Description of Artificial Sequence: Synthetic coding sequence
  source 1..738: mol_type = other DNA

SEQ ID NO: 104184 - DNA, 738 bp, synthetic construct; identical to SEQ ID NO: 104178
  misc_feature 1..738: note = Description of Artificial Sequence: Synthetic coding sequence
  source 1..738: mol_type = other DNA

SEQ ID NO: 104185 - DNA, 297 bp, synthetic construct
  misc_feature 1..297: note = Description of Artificial Sequence: Synthetic coding sequence
  source 1..297: mol_type = other DNA
atggacaagaacgagctggtgcagaaggccaagctggccgagcaggccgagagatacgacgacatggccgcctgcatgaagagcgtgaccgagcagggcgccgagctgagcaacgaggagagaaacctgctgagcgtggcctacaagaacgtggtgggcgccagaagaagcagctggagagtggtgagcagcatcgagcagaagaccgagggcgccgagaagaagcagcagatggccagagagtacagagagaagatcgagaccgagctgagagacatctgcaacgacgtgctgtag

SEQ ID NO: 104186 - DNA, 738 bp, synthetic construct; identical to SEQ ID NO: 104178
  misc_feature 1..738: note = Description of Artificial Sequence: Synthetic coding sequence
  source 1..738: mol_type = other DNA

SEQ ID NO: 104187 - DNA, 279 bp, synthetic construct
  misc_feature 1..279: note = Description of Artificial Sequence: Synthetic coding sequence
  source 1..279: mol_type = other DNA
atggacaagaacgagctggtgcagaaggccaagctggccgagcaggccgagagatacgacgacatggccgcctgcatgaagagcgtgaccgagcagggcgccgagctgagcaacgaggagagaaacctgctgagcgtggcctacaagaacgtggtgggcgccagaagaagcagctggagagtggtgagcagcatcgagcagaagaccgagggcgccgagaagaagcagcagatggccagagagtacagagagaagatcgagaccgagctgagagactag

SEQ ID NO: 104188 - DNA, 738 bp, synthetic construct; identical to SEQ ID NO: 104178
  misc_feature 1..738: note = Description of Artificial Sequence: Synthetic coding sequence
  source 1..738: mol_type = other DNA

SEQ ID NO: 104189 - DNA, 507 bp, synthetic construct; identical to SEQ ID NO: 104179
  misc_feature 1..507: note = Description of Artificial Sequence: Synthetic coding sequence
  source 1..507: mol_type = other DNA

SEQ ID NO: 104190 - DNA, 378 bp, synthetic construct
  misc_feature 1..378: note = Description of Artificial Sequence: Synthetic coding sequence
  source 1..378: mol_type = other DNA
atgaagggcgactactacagatacctggccgaggtggccgccggcgacgacaagaagggcatcgtggaccagagccagcaggcctaccaggaggccttcgagatcagcaagaaggagatgcagcccacccaccccatcagactgggcctggccctgaacttcagcgtgttctactacgagatcctgaacagccccgagaaggcctgcagcctggccaagaccgccttcgacgaggccatcgccgagctggacaccctgagcgaggagagctacaaggacagcaccctgatcatgcagctgctgagagacaacctgaccctgtggaccagcgacacccagggcgacgaggccgaggccggcgagggcggcgagaactag

SEQ ID NO: 104191 - DNA, 414 bp, synthetic construct
  misc_feature 1..414: note = Description of Artificial Sequence: Synthetic coding sequence
  source 1..414: mol_type = other DNA
atggacaagaacgagctggtgcagaaggccaagctggccgagcaggccgagagatacgacgacatggccgcctgcatgaagagcgtgaccgagcagggcgccgagctgagcaacgaggagagaaacctgctgagcgtggcctacaagaacgtggtgggcgccagaagaagcagctggagagtggtgagcagcatcgagcagaagaccgagggcgccgagaagaagcagcagatggccagagagtacagagagaagatcgagaccgagctgagagacatctgcaacgacgtgctgagcctgctggagaagttcctgatccccaacgccagccaggccgagagcaaggtgttctacctgaagatgaagggcgactactacagatacctggccgaggtggccgccggcgacgactag

SEQ ID NO: 104192 - DNA, 741 bp, synthetic construct
  misc_feature 1..741: note = Description of Artificial Sequence: Synthetic coding sequence
  source 1..741: mol_type = other DNA
atggacaagaacgagctggtgcagaaggccaagctggccgagcaggccgagagatacgacgacatggccgcctgcatgaagagcgtgaccgagcagggcgccgagctgagcaacgaggagagaaacctgctgagcgtggcctacaagaacgtggtgggcgccagaagaagcagctggagagtggtgagcagcatcgagcagaagaccgagggcgccgagaagaagcagcagatggccagagagtacagagagaagatcgagaccgagctgagagacatctgcaacgacgtgctgagcctgctggagaagttcctgatccccaacgccagccaggccgagagcaaggtgttctacctgaagatgaagggcgactactacagatacctggccgaggtggccgccggcgacgacaagaaggtgagattcggcgtgagctaccccggcatcgtggaccagagccagcaggcctaccaggaggccttcgagatcagcaagaaggagatgcagcccacccaccccatcagactgggcctggccctgaacttcagcgtgttctactacgagatcctgaacagccccgagaaggcctgcagcctggccaagaccgccttcgacgaggccatcgccgagctggacaccctgagcgaggagagctacaaggacagcaccctgatcatgcagctgctgagagacaacctgaccctgtggaccagcgacacccagggcgacgaggccgagtag

SEQ ID NO: 104193 - DNA, 513 bp, synthetic construct
  misc_feature 1..513: note = Description of Artificial Sequence: Synthetic coding sequence
  source 1..513: mol_type = other DNA
atgagccagccctgcagaaagctgtggagacacaactacgagaccagcagctgcatcgagttcctgaagagcctgctggagaagttcctgatccccaacgccagccaggccgagagcaaggtgttctacctgaagatgaagggcgactactacagatacctggccgaggtggccgccggcgacgacaagaagggcatcgtggaccagagccagcaggcctaccaggaggccttcgagatcagcaagaaggagatgcagcccacccaccccatcagactgggcctggccctgaacttcagcgtgttctactacgagatcctgaacagccccgagaaggcctgcagcctggccaagaccgccttcgacgaggccatcgccgagctggacaccctgagcgaggagagctacaaggacagcaccctgatcatgcagctgctgagagacaacctgaccctgtggaccagcgacacccagggcgacgaggccgaggccggcgagggcggcgagaactag

SEQ ID NO: 104194 - DNA, 378 bp, synthetic construct; identical to SEQ ID NO: 104190
  misc_feature 1..378: note = Description of Artificial Sequence: Synthetic coding sequence
  source 1..378: mol_type = other DNA

SEQ ID NO: 104195 - DNA, 228 bp, synthetic construct
  misc_feature 1..228: note = Description of Artificial Sequence: Synthetic coding sequence
  source 1..228: mol_type = other DNA
atggacaagaacgagctggtgcagaaggccaagctggccgagcaggccgagagatacgacgacatggccgcctgcatgaagagcgtgaccgagcagggcgccgagctgagcaacgaggagagaaacctgctgagcgtggcctacaagaacgtggtgggcgccagaagaagcagctggagagtggtgagcagcatcgagcagaagaccgagggcgccgagaagaagtag

SEQ ID NO: 104196 - DNA, 393 bp, synthetic construct
  misc_feature 1..393: note = Description of Artificial Sequence: Synthetic coding sequence
  source 1..393: mol_type = other DNA
gtgttctacctgaagatgaagggcgactactacagatacctggccgaggtggccgccggcgacgacaagaagggcatcgtggaccagagccagcaggcctaccaggaggccttcgagatcagcaagaaggagatgcagcccacccaccccatcagactgggcctggccctgaacttcagcgtgttctactacgagatcctgaacagccccgagaaggcctgcagcctggccaagaccgccttcgacgaggccatcgccgagctggacaccctgagcgaggagagctacaaggacagcaccctgatcatgcagctgctgagagacaacctgaccctgtggaccagcgacacccagggcgacgaggccgaggccggcgagggcggcgagaactag

SEQ ID NO: 104197 - DNA, 159 bp, synthetic construct
  misc_feature 1..159: note = Description of Artificial Sequence: Synthetic coding sequence
  source 1..159: mol_type = other DNA
atggacaagaacgagctggtgcagaaggccaagctggccgagcaggccgagagatacgacgacatggccgcctgcatgaagagcgtgaccgagcagggcgccgagctgagcaacgaggagagaaacctgctgagcgtggcctacaagaacgtggtgtag

SEQ ID NO: 104198 - DNA, 1224 bp, synthetic construct
  misc_feature 1..1224: note = Description of Artificial Sequence: Synthetic coding sequence
  source 1..1224: mol_type = other DNA
atgcccacccccgacgccaccaccccccaggccaagggcttcagaagagccgtgagcgagctggacgccaagcaggccgaggccatcatggtgagaggccagagccccagattcatcggcagaagacagagcctgatcgaggacgccagaaaggagagagaggccgccgtggccgccgccgccgccgccgtgcccagcgagcccggcgaccccctggaggccgtggccttcgaggagaaggagggcaaggccgtgctgaacctgctgttcagccccagagccaccaagcccagcgccctgagcagagccgtgaaggtgttcgagaccttcgaggccaagatccaccacctggagaccagacccgcccagagacccagagccggcggcccccacctggagtacttcgtgagactggaggtgagaagaggcgacctggccgccctgctgagcggcgtgagacaggtgagcgaggacgtgagaagccccgccggccccaaggtgccctggttccccagaaaggtgagcgagctggacaagtgccaccacctggtgaccaagttcgaccccgacctggacctggaccaccccggcttcagcgaccaggtgtacagacagagaagaaagctgatcgccgagatcgccttccagtacagacacggcgaccccatccccagagtggagtacaccgccgaggagatcgccacctgggactgctgccacgagctgctgggccacgtgcccatgctggccgacagaaccttcgcccagttcagccaggacatcggcctggccagcctgggcgccagcgacgaggagatcgagaagctgagcaccctgtactggttcaccgtggagttcggcctgtgcaagcagaacggcgaggtgaaggcctacggcgccggcctgctgagcagctacggcgagctgctgcactgcctgagcgaggagcccgagatcagagccttcgaccccgaggccgccgccgtgcagccctaccaggaccagacctaccagagcgtgtacttcgtgagcgagagcttcagcgacgccaaggacaagctgagaagctacgccagcagaatccagagacccttcagcgtgaagttcgacccctacaccctggccatcgacgtgctggacagcccccaggccgtgagaagaagcctggagggcgtgcaggacgagctggacaccctggcccacgccctgagcgccatcggctag

SEQ ID NO: 104199 - DNA, 1494 bp, synthetic construct
  misc_feature 1..1494: note = Description of Artificial Sequence: Synthetic coding sequence
  source 1..1494: mol_type = other DNA
atgcccacccccgacgccaccaccccccaggccaagggcttcagaagagccgtgagcgagctggacgccaagcaggccgaggccatcatgagccccagattcatcggcagaagacagagcctgatcgaggacgccagaaaggagagagaggccgccgtggccgccgccgccgccgccgtgcccagcgagcccggcgaccccctggaggccgtggccttcgaggagaaggagggcaaggccgtgctgaacctgctgttcagccccagagccaccaagcccagcgccctgagcagagccgtgaaggtgttcgagaccttcgaggccaagatccaccacctggagaccagacccgcccagagacccagagccggcggcccccacctggagtacttcgtgagactggaggtgagaagaggcgacctggccgccctgctgagcggcgtgagacaggtgagcgaggacgtgagaagccccgccggccccaaggtgccctggttccccagaaaggtgagcgagctggacaagtgccaccacctggtgaccaagttcgaccccgacctggacctggaccaccccggcttcagcgaccaggtgtacagacagagaagaaagctgatcgccgagatcgccttccagtacagacacggcgaccccatccccagagtggagtacaccgccgaggagatcgccacctggaaggaggtgtacaccaccctgaagggcctgtacgccacccacgcctgcggcgagcacctggaggccttcgccctgctggagagattcagcggctacagagaggacaacatcccccagctggaggacgtgagcagattcctgaaggagagaaccggcttccagctgagacccgtggccggcctgctgagcgccagagacttcctggccagcctggccttcagagtgttccagtgcacccagtacatcagacacgccagcagccccatgcacagccccgagcccgactgctgccacgagctgctgggccacgtgcccatgctggccgacagaaccttcgcccagttcagccaggacatcggcctggccagcctgggcgccagcgacgaggagatcgagaagctgagcaccctgtactggttcaccgtggagttcggcctgtgcaagcagaacggcgaggtgaaggcctacggcgccggcctgctgagcagctacggcgagctgctgcactgcctgagcgaggagcccgagatcagagccttcgaccccgaggccgccgccgtgcagccctaccaggaccagacctaccagagcgtgtacttcgtgagcgagagcttcagcgacgccaaggacaagctgagaagctacgccagcagaatccagagacccttcagcgtgaagttcgacccctacaccctggccatcgacgtgctggacagcccccaggccgtgagaagaagcctggagggcgtgcaggacgagctggacaccctggcccacgccctgagcgccatcggctag

SEQ ID NO: 104200 - DNA, 1575 bp, synthetic construct
  misc_feature 1..1575: note = Description of Artificial Sequence: Synthetic coding sequence
  source 1..1575: mol_type = other DNA
atgcccacccccgacgccaccaccccccaggccaagggcttcagaagagccgtgagcgagctggacgccaagcaggccgaggccatcatgggcgcccccggccccagcctgaccggcagcccctggcccggcaccgccgcccccgccgccagctacacccccacccccagaagccccagattcatcggcagaagacagagcctgatcgaggacgccagaaaggagagagaggccgccgtggccgccgccgccgccgccgtgcccagcgagcccggcgaccccctggaggccgtggccttcgaggagaaggagggcaaggccgtgctgaacctgctgttcagccccagagccaccaagcccagcgccctgagcagagccgtgaaggtgttcgagaccttcgaggccaagatccaccacctggagaccagacccgcccagagacccagagccggcggcccccacctggagtacttcgtgagactggaggtgagaagaggcgacctggccgccctgctgagcggcgtgagacaggtgagcgaggacgtgagaagccccgccggccccaaggtgccctggttccccagaaaggtgagcgagctggacaagtgccaccacctggtgaccaagttcgaccccgacctggacctggaccaccccggcttcagcgaccaggtgtacagacagagaagaaagctgatcgccgagatcgccttccagtacagacacggcgaccccatccccagagtggagtacaccgccgaggagatcgccacctggaaggaggtgtacaccaccctgaagggcctgtacgccacccacgcctgcggcgagcacctggaggccttcgccctgctggagagattcagcggctacagagaggacaacatcccccagctggaggacgtgagcagattcctgaaggagagaaccggcttccagctgagacccgtggccggcctgctgagcgccagagacttcctggccagcctggccttcagagtgttccagtgcacccagtacatcagacacgccagcagccccatgcacagccccgagcccgactgctgccacgagctgctgggccacgtgcccatgctggccgacagaaccttcgcccagttcagccaggacatcggcctggccagcctgggcgccagcgacgaggagatcgagaagctgagcaccctgtactggttcaccgtggagttcggcctgtgcaagcagaacggcgaggtgaaggcctacggcgccggcctgctgagcagctacggcgagctgctgcactgcctgagcgaggagcccgagatcagagccttcgaccccgaggccgccgccgtgcagccctaccaggaccagacctaccagagcgtgtacttcgtgagcgagagcttcagcgacgccaaggacaagctgagaagctacgccagcagaatccagagacccttcagcgtgaagttcgacccctacaccctggccatcgacgtgctggacagcccccaggccgtgagaagaagcctggagggcgtgcaggacgagctggacaccctggcccacgccctgagcgccatcggctag

SEQ ID NO: 104201 - DNA, 1587 bp, synthetic construct
  misc_feature 1..1587: note = Description of Artificial Sequence: Synthetic coding sequence
  source 1..1587: mol_type = other DNA
atgcccacccccgacgccaccaccccccaggccaagggcttcagaagagccgtgagcgagctggacgccaagcaggccgaggccatcatggtgagaggccagggcgcccccggccccagcctgaccggcagcccctggcccggcaccgccgcccccgccgccagctacacccccacccccagaagccccagattcatcggcagaagacagagcctgatcgaggacgccagaaaggagagagaggccgccgtggccgccgccgccgccgccgtgcccagcgagcccggcgaccccctggaggccgtggccttcgaggagaaggagggcaaggccgtgctgaacctgctgttcagccccagagccaccaagcccagcgccctgagcagagccgtgaaggtgttcgagaccttcgaggccaagatccaccacctggagaccagacccgcccagagacccagagccggcggcccccacctggagtacttcgtgagactggaggtgagaagaggcgacctggccgccctgctgagcggcgtgagacaggtgagcgaggacgtgagaagccccgccggccccaaggtgccctggttccccagaaaggtgagcgagctggacaagtgccaccacctggtgaccaagttcgaccccgacctggacctggaccaccccggcttcagcgaccaggtgtacagacagagaagaaagctgatcgccgagatcgccttccagtacagacacggcgaccccatccccagagtggagtacaccgccgaggagatcgccacctggaaggaggtgtacaccaccctgaagggcctgtacgccacccacgcctgcggcgagcacctggaggccttcgccctgctggagagattcagcggctacagagaggacaacatcccccagctggaggacgtgagcagattcctgaaggagagaaccggcttccagctgagacccgtggccggcctgctgagcgccagagacttcctggccagcctggccttcagagtgttccagtgcacccagtacatcagacacgccagcagccccatgcacagccccgagcccgactgctgccacgagctgctgggccacgtgcccatgctggccgacagaaccttcgcccagttcagccaggacatcggcctggccagcctgggcgccagcgacgaggagatcgagaagctgagcaccctgtactggttcaccgtggagttcggcctgtgcaagcagaacggcgaggtgaaggcctacggcgccggcctgctgagcagctacggcgagctgctgcactgcctgagcgaggagcccgagatcagagccttcgaccccgaggccgccgccgtgcagccctaccaggaccagacctaccagagcgtgtacttcgtgagcgagagcttcagcgacgccaaggacaagctgagaagctacgccagcagaatccagagacccttcagcgtgaagttcgacccctacaccctggccatcgacgtgctggacagcccccaggccgtgagaagaagcctggagggcgtgcaggacgagctggacaccctggcccacgccctgagcgccatcggctag

SEQ ID NO: 104202 - DNA, 3564 bp, synthetic construct
  misc_feature 1..3564: note = Description of Artificial Sequence: Synthetic coding sequence
  source 1..3564: mol_type = other DNA
atgcccctgagacactggggcatggccagaggcagcaagcccgtgggcgacggcgcccagcccatggccgccatgggcggcctgaaggtgctgctgcactgggccggccccggcggcggcgagccctgggtgaccttcagcgagagcagcctgaccgccgaggaggtgtgcatccacatcgcccacaaggtgggcatcacccccccctgcttcaacctgttcgccctgttcgacgcccaggcccaggtgtggctgccccccaaccacatcctggagatccccagagacgccagcctgatgctgtacttcagaatcagattctacttcagaaactggcacggcatgaaccccagagagcccgccgtgtacagatgcggcccccccggcaccgaggccagcagcgaccagaccgcccagggcatgcagctgctggaccccgccagcttcgagtacctgttcgagcagggcaagcacgagttcgtgaacgacgtggccagcctgtgggagctgagcaccgaggaggagatccaccacttcaagaacgagagcctgggcatggccttcctgcacctgtgccacctggccctgagacacggcatccccctggaggaggtggccaagaagaccagcttcaaggactgcatccccagaagcttcagaagacacatcagacagcacagcgccctgaccagactgagactgagaaacgtgttcagaagattcctgagagacttccagcccggcagactgagccagcagatggtgatggtgaagtacctggccaccctggagagactggcccccagattcggcaccgagagagtgcccgtgtgccacctgagactgctggcccaggccgagggcgagccctgctacatcagagacagcggcgtggcccccaccgaccccggccccgagagcgccgccggcccccccacccacgaggtgctggtgaccggcaccggcggcatccagtggtggcccgtggaggaggaggtgaacaaggaggagggcagcagcggcagcagcggcagaaacccccaggccagcctgttcggcaagaaggccaaggcccacaaggccgtgggccagcccgccgacagacccagagagcccctgtgggcctacttctgcgacttcagagacatcacccacgtggtgctgaaggagcactgcgtgagcatccacagacaggacaacaagtgcctggagctgagcctgcccagcagagccgccgccctgagcttcgtgagcctggtggacggctacttcagactgaccgccgacagcagccactacctgtgccacgaggtggccccccccagactggtgatgagcatcagagacggcatccacggccccctgctggagcccttcgtgcaggccaagctgagacccgaggacggcctgtacctgatccactggagcaccagccacccctacagactgatcctgaccgtggcccagagaagccaggcccccgacggcatgcagagcctgagactgagaaagttccccatcgagcagcaggacggcgccttcgtgctggagggctggggcagaagcttccccagcgtgagagagctgggcgccgccctgcagggctgcctgctgagagccggcgacgactgcttcagcctgagaagatgctgcctgccccagcccggcgagaccagcaacctgatcatcatgagaggcgccagagccagccccagaaccctgaacctgagccagctgagcttccacagagtggaccagaaggagatcacccagctgagccacctgggccagggcaccagaaccaacgtgtacgagggcagactgagagtggagggcagcggcgaccccgaggagggcaagatggacgacgaggaccccctggtgcccggcagagacagaggccaggagctgagagtggtgctgaaggtgctggaccccagccaccacgacatcgccctggccttctacgagaccgccagcctgatgagccaggtgagccacacccacctggccttcgtgcacggcgtgtgcgtgagaggccccgagaacatcatggtgaccgagtacgtggagcacggccccctggacgtgtggctgagaagagagagaggccacgtgcccatggcctggaagatggtggtggcccagcagctggccagcgccctgagctacctggagaacaagaacctggtgcacggcaacgtgtgcggcagaaacatcctgctggccagactgggcctggccgagggcaccagccccttcatcaagctgagcgaccccggcgtgggcctgggcgccctgagcagagaggagagagtggagagaatcccctggctggcccccgagtgcctgcccggcggcgccaacagcctgagcaccgccatggacaagtggggcttcggcgccaccctgctggagatctgcttcgacggcgaggcccccctgcagagcagaagccccagcgagaaggagcacttctaccagagacagcacagactgcccgagcccagctgcccccagctggccaccctgaccagccagtgcctgacctacgagcccacccagagacccagcttcagaaccatcctgagagacctgaccagactgcagccccacaacctggccgacgtgctgaccgtgaaccccgacagccccgccagcgaccccaccgtgttccacaagagatacctgaagaagatcagagacctgggcgagggccacttcggcaaggtgagcctgtactgctacgaccccaccaacgacggcaccggcgagatggtggccgtgaaggccctgaaggccgactgcggcccccagcacagaagcggctggaagcaggagatcgacatcctgagaaccctgtaccacgagcacatcatcaagtacaagggctgctgcgaggaccagggcgagaagagcctgcagctggtgatggagtacgtgcccctgggcagcctgagagactacctgcccagacacagcatcggcctggcccagctgctgctgttcgcccagcagatctgcgagggcatggcctacctgcacgcccagcactacatccacagagacctggccgccagaaacgtgctgctggacaacgacagactggtgaagatcggcgacttcggcctggccaaggccgtgcccgagggccacgagtactacagagtgagagaggacggcgacagccccgtgttctggtacgcccccgagtgcctgaaggagtacaagttctactacgccagcgacgtgtggagcttcggcgtgaccctgtacgagctgctgacccactgcgacagcagccagagcccccccaccaagttcctggagctgatcggcatcgcccagggccagatgaccgtgctgagactgaccgagctgctggagagaggcgagagactgcccagacccgacaagtgcccctgcgaggtgtaccacctgatgaagaactgctgggagaccgaggccagcttcagacccaccttcgagaacctgatccccatcctgaagaccgtgcacgagaagtaccagggccaggcccccagcgtgttcagcgtgtgctag

SEQ ID NO: 104203 - DNA, 3564 bp, synthetic construct; identical to SEQ ID NO: 104202
  misc_feature 1..3564: note = Description of Artificial Sequence: Synthetic coding sequence
  source 1..3564: mol_type = other DNA

SEQ ID NO: 104204 - DNA, 357 bp, synthetic construct
  misc_feature 1..357: note = Description of Artificial Sequence: Synthetic coding sequence
  source 1..357: mol_type = other DNA
atgcccctgagacactggggcatggccagaggcagcaagcccgtgggcgacggcgcccagcccatggccgccatgggcggcctgaaggtgctgctgcactgggccggccccggcggcggcgagccctgggtgaccttcagcgagagcagcctgaccgccgaggaggtgtgcatccacatcgcccacaaggtgggcatcacccccccctgcttcaacctgttcgccctgttcgacgcccaggcccaggtgtggctgccccccaaccacatcctggagatccccagagacgccagcctgatgctgtacttcagaatcagattctacttcagaaactggcacggcatgaaccccagatag

SEQ ID NO: 104205 - DNA, 2805 bp, synthetic construct
  misc_feature 1..2805: note = Description of Artificial Sequence: Synthetic coding sequence
  source 1..2805: mol_type = other DNA
atggtgatggtgaagtacctggccaccctggagagactggcccccagattcggcaccgagagagtgcccgtgtgccacctgagactgctggcccaggccgagggcgagccctgctacatcagagacagcggcgtggcccccaccgaccccggccccgagagcgccgccggcccccccacccacgaggtgctggtgaccggcaccggcggcatccagtggtggcccgtggaggaggaggtgaacaaggaggagggcagcagcggcagcagcggcagaaacccccaggccagcctgttcggcaagaaggccaaggcccacaaggccgtgggccagcccgccgacagacccagagagcccctgtgggcctacttctgcgacttcagagacatcacccacgtggtgctgaaggagcactgcgtgagcatccacagacaggacaacaagtgcctggagctgagcctgcccagcagagccgccgccctgagcttcgtgagcctggtggacggctacttcagactgaccgccgacagcagccactacctgtgccacgaggtggccccccccagactggtgatgagcatcagagacggcatccacggccccctgctggagcccttcgtgcaggccaagctgagacccgaggacggcctgtacctgatccactggagcaccagccacccctacagactgatcctgaccgtggcccagagaagccaggcccccgacggcatgcagagcctgagactgagaaagttccccatcgagcagcaggacggcgccttcgtgctggagggctggggcagaagcttccccagcgtgagagagctgggcgccgccctgcagggctgcctgctgagagccggcgacgactgcttcagcctgagaagatgctgcctgccccagcccggcgagaccagcaacctgatcatcatgagaggcgccagagccagccccagaaccctgaacctgagccagctgagcttccacagagtggaccagaaggagatcacccagctgagccacctgggccagggcaccagaaccaacgtgtacgagggcagactgagagtggagggcagcggcgaccccgaggagggcaagatggacgacgaggaccccctggtgcccggcagagacagaggccaggagctgagagtggtgctgaaggtgctggaccccagccaccacgacatcgccctggccttctacgagaccgccagcctgatgagccaggtgagccacacccacctggccttcgtgcacggcgtgtgcgtgagaggccccgagaacatcatggtgaccgagtacgtggagcacggccccctggacgtgtggctgagaagagagagaggccacgtgcccatggcctggaagatggtggtggcccagcagctggccagcgccctgagctacctggagaacaagaacctggtgcacggcaacgtgtgcggcagaaacatcctgctggccagactgggcctggccgagggcaccagccccttcatcaagctgagcgaccccggcgtgggcctgggcgccctgagcagagaggagagagtggagagaatcccctggctggcccccgagtgcctgcccggcggcgccaacagcctgagcaccgccatggacaagtggggcttcggcgccaccctgctggagatctgcttcgacggcgaggcccccctgcagagcagaagccccagcgagaaggagcacttctaccagagacagcacagactgcccgagcccagctgcccccagctggccaccctgaccagccagtgcctgacctacgagcccacccagagacccagcttcagaaccatcctgagagacctgaccagactgcagccccacaacctggccgacgtgctgaccgtgaaccccgacagccccgccagcgaccccaccgtgttccacaagagatacctgaagaagatcagagacctgggcgagggccacttcggcaaggtgagcctgtactgctacgaccccaccaacgacggcaccggcgagatggtggccgtgaaggccctgaaggccgactgcggcccccagcacagaagcggctggaagcaggagatcgacatcctgagaaccctgtaccacgagcacatcatcaagtacaagggctgctgcgaggaccagggcgagaagagcctgcagctggtgatggagtacgtgcccctgggcagcctgagagactacctgcccagacacagcatcggcctggcccagctgctgctgttcgcccagcagatctgcgagggcatggcctacctgcacgcccagcactacatccacagagacctggccgccagaaacgtgctgctggacaacgacagactggtgaagatcggcgacttcggcctggccaaggccgtgcccgagggccacgagtactacagagtgagagaggacggcgacagccccgtgttctggtacgcccccgagtgcctgaaggagtacaagttctactacgccagcgacgtgtggagcttcggcgtgaccctgtacgagctgctgacccactgcgacagcagccagagcccccccaccaagttcctggagctgatcggcatcgcccagggccagatgaccgtgctgagactgaccgagctgctggagagaggcgagagactgcccagacccgacaagtgcccctgcgaggtgtaccacctgatgaagaactgctgggagaccgaggccagcttcagacccaccttcgagaacctgatccccatcctgaagaccgtgcacgagaagtaccagggccaggcccccagcgtgttcagcgtgtgctag

SEQ ID NO: 104206 - DNA, 1986 bp, synthetic construct
  misc_feature 1..1986: note = Description of Artificial Sequence: Synthetic coding sequence
  source 1..1986: mol_type = other DNA
atgctgcccgaggccggcagcctgtggctgctgaagctgctgagagacatccagctggcccagttctactggcccatcctggaggagctgaacgtgaccagacccgagcacttcgacttcgtgaagcccgaggacctggacggcatcggcatgggcagacccgcccagagaagactgagcgaggccctgaagagactgagaagcggccccaagagcaagaactgggtgtacaagatcctgggcggcttcgcccccgagcacaaggagcccaccctgcccagcgacagccccagacacctgcccgagcccgagggcggcctgaagtgcctgatccccgagggcgccgtgtgcagaggcgagctgctgggcagcggctgcttcggcgtggtgcacagaggcctgtggaccctgcccagcggcaagagcgtgcccgtggccgtgaagagcctgagagtgggccccgagggccccatgggcaccgagctgggcgacttcctgagagaggtgagcgtgatgatgaacctggagcacccccacgtgctgagactgcacggcctggtgctgggccagcccctgcagatggtgatggagctggcccccctgggcagcctgcacgccagactgaccgcccccgcccccaccccccccctgctggtggccctgctgtgcctgttcctgagacagctggccggcgccatggcctacctgggcgccagaggcctggtgcacagagacctggccaccagaaacctgctgctggccagccccagaaccatcaaggtggccgacttcggcctggtgagacccctgggcggcgccagaggcagatacgtgatgggcggccccagacccatcccctacgcctggtgcgcccccgagagcctgagacacggcgccttcagcagcgccagcgacgtgtggatgttcggcgtgaccctgtgggagatgttcagcggcggcgaggagccctgggccggcgtgcccccctacctgatcctgcagagactggaggacagagccagactgcccagaccccccctgtgcagcagagccctgtacagcctggccctgagatgctgggccccccaccccgccgacagacccagcttcagccacctggagggcctgctgcaggaggccggccccagcgaggcctgctgcgtgagagacgtgaccgagcccggcgccctgagaatggagaccggcgaccccatcaccgtgatcgagggcagccccgacagcaccatctggaagggccagaacggcagaaccttcaaggtgggcagcttccccgccagcgccgtgaccctggccgacgccggcggcctgcccgccaccagacccgtgcacagaggcacccccgccagaggcgaccagcaccccggcagcatcgacggcgacagaaagaaggccaacctgtgggacgccccccccgccagaggccagagaagaaacatgcccctggagagaatgaagggcatcagcagaagcctggagagcgtgctgagcctgggccccagacccaccggcggcggcagcagcccccccgagatcagacaggccagagccgtgccccagggcccccccggcctgccccccagaccccccctgagcagcagcagcccccagcccagccagcccagcagagagagactgccctggcccaagagaaagcccccccacaaccaccccatgggcatgcccggcgccagaaaggccgccgccctgagcggcggcctgctgagcgaccccgagctgcagagaaagatcatggaggtggagctgagcgtgcacggcgtgacccaccaggagtgccagaccgccctgggcgccaccggcggcgacgtggtgagcgccatcagaaacctgaaggtggaccagctgttccacctgagcagcagaagcagagccgactgctggagaatcctggagcactaccagtgggacctgagcgccgccagcagatacgtgctggccagaccctag

SEQ ID NO: 104207 - DNA, 1986 bp, synthetic construct; identical to SEQ ID NO: 104206
  misc_feature 1..1986: note = Description of Artificial Sequence: Synthetic coding sequence
  source 1..1986: mol_type = other DNA

SEQ ID NO: 104208 - DNA, 1587 bp, synthetic construct
  misc_feature 1..1587: note = Description of Artificial Sequence: Synthetic coding sequence
  source 1..1587: mol_type = other DNA
atgcagcccgaggagggcaccggctggctgctggagctgctgagcgaggtgcagctgcagcagtacttcctgagactgagagacgacctgaacgtgaccagactgagccacttcgagtacgtgaagaacgaggacctggagaagatcggcatgggcagacccggccagagaagactgtgggaggccgtgaagagaagaaaggccctgtgcaagagaaagagctggatgagcaaggtgttcagcggcaagagactggaggccgagttccccccccaccacagccagagcaccttcagaaagaccagccccgcccccggcggccccgccggcgagggccccctgcagagcctgacctgcctgatcggcgagaaggacctgagactgctggagaagctgggcgacggcagcttcggcgtggtgagaagaggcgagtgggacgcccccagcggcaagaccgtgagcgtggccgtgaagtgcctgaagcccgacgtgctgagccagcccgaggccatggacgacttcatcagagaggtgaacgccatgcacagcctggaccacagaaacctgatcagactgtacggcgtggtgctgaccccccccatgaagatggtgaccgagctggcccccctgggcagcctgctggacagactgagaaagcaccagggccacttcctgctgggcaccctgagcagatacgccgtgcaggtggccgagggcatgggctacctggagagcaagagattcatccacagagacctggccgccagaaacctgctgctggccaccagagacctggtgaagatcggcgacttcggcctgatgagagccctgccccagaacgacgaccactacgtgatgcaggagcacagaaaggtgcccttcgcctggtgcgcccccgagagcctgaagaccagaaccttcagccacgccagcgacacctggatgttcggcgtgaccctgtgggagatgttcacctacggccaggagccctggatcggcctgaacggcagccagatcctgcacaagatcgacaaggagggcgagagactgcccagacccgaggactgcccccaggacatctacaacgtgatggtgcagtgctgggcccacaagcccgaggacagacccaccttcgtggccctgagagacttcctgctggaggcccagcccaccgacatgagagccctgcaggacttcgaggagcccgacaagctgcacatccagatgaacgacgtgatcaccgtgatcgagggcagagccgagaactactggtggagaggccagaacaccagaaccctgtgcgtgggccccttccccagaaacgtggtgaccagcgtggccggcctgagcgcccaggacatcagccagcccctgcagaacagcttcatccacaccggccacggcgacagcgaccccagacactgctggggcttccccgacagaatcgacgagtgccccttcagcgccttcagccccggccacccccccgccgagacctgcggccaggtgctgtggaccggcagaagagaggcctgcgccagcgaccccagactgcaccccgtgagcagcagaaccaagggcctgtag

SEQ ID NO: 104209 - DNA, 3117 bp, synthetic construct
  misc_feature 1..3117: note = Description of Artificial Sequence: Synthetic coding sequence
  source 1..3117: mol_type = other DNA
atgcagcccgaggagggcaccggctggctgctggagctgctgagcgaggtgcagctgcagcagtacttcctgagactgagagacgacctgaacgtgaccagactgagccacttcgagtacgtgaagaacgaggacctggagaagatcggcatgggcagacccggccagagaagactgtgggaggccgtgaagagaagaaaggccctgtgcaagagaaagagctggatgagcaaggtgttcagcggcaagagactggaggccgagttccccccccaccacagccagagcaccttcagaaagaccagccccgcccccggcggccccgccggcgagggccccctgcagagcctgacctgcctgatcggcgagaaggacctgagactgctggagaagctgggcgacggcagcttcggcgtggtgagaagaggcgagtgggacgcccccagcggcaagaccgtgagcgtggccgtgaagtgcctgaagcccgacgtgctgagccagcccgaggccatggacgacttcatcagagaggtgaacgccatgcacagcctggaccacagaaacctgatcagactgtacggcgtggtgctgaccccccccatgaagatggtgaccgagctggcccccctgggcagcctgctggacagactgagaaagcaccagggccacttcctgctgggcaccctgagcagatacgccgtgcaggtggccgagggcatgggctacctggagagcaagagattcatccacagagacctggccgccagaaacctgctgctggccaccagagacctggtgaagatcggcgacttcggcctgatgagagccctgccccagaacgacgaccactacgtgatgcaggagcacagaaaggtgcccttcgcctggtgcgcccccgagagcctgaagaccagaaccttcagccacgccagcgacacctggatgttcggcgtgaccctgtgggagatgttcacctacggccaggagccctggatcggcctgaacggcagccagatcctgcacaagatcgacaaggagggcgagagactgcccagacccgaggactgcccccaggacatctacaacgtgatggtgcagtgctgggcccacaagcccgaggacagacccaccttcgtggccctgagagacttcctgctggaggcccagcccaccgacatgagagccctgcaggacttcgaggagcccgacaagctgcacatccagatgaacgacgtgatcaccgtgatcgagggcagagccgagaactactggtggagaggccagaacaccagaaccctgtgcgtgggccccttccccagaaacgtggtgaccagcgtggccggcctgagcgcccaggacatcagccagcccctgcagaacagcttcatccacaccggccacggcgacagcgaccccagacactgctggggcttccccgacagaatcgacgagctgtacctgggcaaccccatggacccccccgacctgctgagcgtggagctgagcaccagcagacccccccagcacctgggcggcgtgaagaagcccacctacgaccccgtgagcgaggaccaggaccccctgagcagcgacttcaagagactgggcctgagaaagcccggcctgcccagaggcctgtggctggccaagcccagcgccagagtgcccggcaccaaggccagcagaggcagcggcgccgaggtgaccctgatcgacttcggcgaggagcccgtggtgcccgccctgagaccctgcgcccccagcctggcccagctggccatggacgcctgcagcctgctggacgagacccccccccagagccccaccagagccctgcccagacccctgcaccccacccccgtggtggactgggacgccagacccctgccccccccccccgcctacgacgacgtggcccaggacgaggacgacttcgagatctgcagcatcaacagcaccctggtgggcgccggcgtgcccgccggccccagccagggccagaccaactacgccttcgtgcccgagcaggccagaccccccccccccctggaggacaacctgttcctgcccccccagggcggcggcaagccccccagcagcgcccagaccgccgagatcttccaggccctgcagcaggagtgcatgagacagctgcaggcccccgccggcagccccgcccccagccccagccccggcggcgacgacaagccccaggtgccccccagagtgcccatcccccccagacccaccagaccccacgtgcagctgagccccgccccccccggcgaggaggagaccagccagtggcccggccccgccagcccccccagagtgccccccagagagcccctgagcccccagggcagcagaacccccagccccctggtgccccccggcagcagccccctgccccccagactgagcagcagccccggcaagaccatgcccaccacccagagcttcgccagcgaccccaagtacgccaccccccaggtgatccaggcccccggccccagagccggcccctgcatcctgcccatcgtgagagacggcaagaaggtgagcagcacccactactacctgctgcccgagagacccagctacctggagagataccagagattcctgagagaggcccagagccccgaggagcccacccccctgcccgtgcccctgctgctgcccccccccagcacccccgcccccgccgcccccaccgccaccgtgagacccatgccccaggccgccctggaccccaaggccaacttcagcaccaacaacagcaaccccggcgccagaccccccccccccagagccaccgccagactgccccagagaggctgccccggcgacggccccgaggccggcagacccgccgacaagatccagatggccatggtgcacggcgtgaccaccgaggagtgccaggccgccctgcagtgccacggctggagcgtgcagagagccgcccagtacctgaaggtggagcagctgttcggcctgggcctgagacccagaggcgagtgccacaaggtgctggagatgttcgactggaacctggagcaggccggctgccacctgctgggcagctggggccccgcccaccacaagagatag

SEQ ID NO: 104210 - DNA, 3261 bp, synthetic construct
  misc_feature 1..3261: note = Description of Artificial Sequence: Synthetic coding sequence
  source 1..3261: mol_type = other DNA
atgctggaggccagaccccccagaacccagggcagcgacgccgccggcgccgccgccggcagaggcctgagagccctgctgctgagcctgaccgccgccgccggcatctggggcagcatgggcgagagaagcgcctaccagagactggccggcggcgaggagggcccccagagactgggcggcggcagaatgcagcccgaggagggcaccggctggctgctggagctgctgagcgaggtgcagctgcagcagtacttcctgagactgagagacgacctgaacgtgaccagactgagccacttcgagtacgtgaagaacgaggacctggagaagatcggcatgggcagacccggccagagaagactgtgggaggccgtgaagagaagaaaggccctgtgcaagagaaagagctggatgagcaaggtgttcagcggcaagagactggaggccgagttccccccccaccacagccagagcaccttcagaaagaccagccccgcccccggcggccccgccggcgagggccccctgcagagcctgacctgcctgatcggcgagaaggacctgagactgctggagaagctgggcgacggcagcttcggcgtggtgagaagaggcgagtgggacgcccccagcggcaagaccgtgagcgtggccgtgaagtgcctgaagcccgacgtgctgagccagcccgaggccatggacgacttcatcagagaggtgaacgccatgcacagcctggaccacagaaacctgatcagactgtacggcgtggtgctgaccccccccatgaagatggtgaccgagctggcccccctgggcagcctgctggacagactgagaaagcaccagggccacttcctgctgggcaccctgagcagatacgccgtgcaggtggccgagggcatgggctacctggagagcaagagattcatccacagagacctggccgccagaaacctgctgctggccaccagagacctggtgaagatcggcgacttcggcctgatgagagccctgccccagaacgacgaccactacgtgatgcaggagcacagaaaggtgcccttcgcctggtgcgcccccgagagcctgaagaccagaaccttcagccacgccagcgacacctggatgttcggcgtgaccctgtgggagatgttcacctacggccaggagccctggatcggcctgaacggcagccagatcctgcacaagatcgacaaggagggcgagagactgcccagacccgaggactgcccccaggacatctacaacgtgatggtgcagtgctgggcccacaagcccgaggacagacccaccttcgtggccctgagagacttcctgctggaggcccagcccaccgacatgagagccctgcaggacttcgaggagcccgacaagctgcacatccagatgaacgacgtgatcaccgtgatcgagggcagagccgagaactactggtggagaggccagaacaccagaaccctgtgcgtgggccccttccccagaaacgtggtgaccagcgtggccggcctgagcgcccaggacatcagccagcccctgcagaacagcttcatccacaccggccacggcgacagcgaccccagacactgctggggcttccccgacagaatcgacgagctgtacctgggcaaccccatggacccccccgacctgctgagcgtggagctgagcaccagcagacccccccagcacctgggcggcgtgaagagagagcccccccccagacccccccagcccgccttcttcacccagaagcccacctacgaccccgtgagcgaggaccaggaccccctgagcagcgacttcaagagactgggcctgagaaagcccggcctgcccagaggcctgtggctggccaagcccagcgccagagtgcccggcaccaaggccagcagaggcagcggcgccgaggtgaccctgatcgacttcggcgaggagcccgtggtgcccgccctgagaccctgcgcccccagcctggcccagctggccatggacgcctgcagcctgctggacgagacccccccccagagccccaccagagccctgcccagacccctgcaccccacccccgtggtggactgggacgccagacccctgccccccccccccgcctacgacgacgtggcccaggacgaggacgacttcgagatctgcagcatcaacagcaccctggtgggcgccggcgtgcccgccggccccagccagggccagaccaactacgccttcgtgcccgagcaggccagaccccccccccccctggaggacaacctgttcctgcccccccagggcggcggcaagccccccagcagcgcccagaccgccgagatcttccaggccctgcagcaggagtgcatgagacagctgcaggcccccgccggcagccccgcccccagccccagccccggcggcgacgacaagccccaggtgccccccagagtgcccatcccccccagacccaccagaccccacgtgcagctgagccccgccccccccggcgaggaggagaccagccagtggcccggccccgccagcccccccagagtgccccccagagagcccctgagcccccagggcagcagaacccccagccccctggtgccccccggcagcagccccctgccccccagactgagcagcagccccggcaagaccatgcccaccacccagagcttcgccagcgaccccaagtacgccaccccccaggtgatccaggcccccggccccagagccggcccctgcatcctgcccatcgtgagagacggcaagaaggtgagcagcacccactactacctgctgcccgagagacccagctacctggagagataccagagattcctgagagaggcccagagccccgaggagcccacccccctgcccgtgcccctgctgctgcccccccccagcacccccgcccccgccgcccccaccgccaccgtgagacccatgccccaggccgccctggaccccaaggccaacttcagcaccaacaacagcaaccccggcgccagaccccccccccccagagccaccgccagactgccccagagaggctgccccggcgacggccccgaggccggcagacccgccgacaagatccagatggtggagcagctgttcggcctgggcctgagacccagaggcgagtgccacaaggtgctggagatgttcgactggaacctggagcaggccggctgccacctgctgggcagctggggccccgcccaccacaagagatag

SEQ ID NO: 104211 - DNA, 3117 bp, synthetic construct; identical to SEQ ID NO: 104209
  misc_feature 1..3117: note = Description of Artificial Sequence: Synthetic coding sequence
  source 1..3117: mol_type = other DNA

SEQ ID NO: 104212 - DNA, 294 bp, synthetic construct
  misc_feature 1..294: note = Description of Artificial Sequence: Synthetic coding sequence
  source 1..294: mol_type = other DNA
atgcagcccgaggagggcaccggctggctgctggagctgctgagcgaggtgcagctgcagcagtacttcctgagactgagagacgacctgaacgtgaccagactgagccacttcgagtacgtgaagaacgaggacctggagaagatcggcatgggcagacccggccagagaagactgtgggaggccgtgaagagaagaaaggccctgtgcaagagaaagagctggatgagcaaggtgttcagcggcaagagactggaggccgagttccccccccaccacagccagagcacctag

SEQ ID NO: 104213 - DNA, 1827 bp, synthetic construct
  misc_feature 1..1827: note = Description of Artificial Sequence: Synthetic coding sequence
  source 1..1827: mol_type = other DNA
atgagccaggagggcgactacggcagatggaccatcagcagcagcgacgagagcgaggaggagaagcccaagcccgacaagcccagcaccagcagcctgctgtgcgccagacagggcgccgccaacgagcccagatacacctgcagcgaggcccagaaggccgcccacaagagaaagatcagccccgtgaagttcagcaacaccgacagcgtgctgccccccaagagacagaagagcggcagccaggaggacctgggctggtgcctgagcagcagcgacgacgagctgcagcccgagatgccccagaagcaggccgagaaggtggtgatcaagaaggagaaggacatcagcgcccccaacgacggcaccgcccagagaaccgagaaccacggcgcccccgcctgccacagactgaaggaggaggaggacgagtacgagaccagcggcgagggccaggacatctgggacatgctggacaagggcaaccccttccagttctacctgaccagagtgagcggcgtgaagcccaagtacaacagcggcgccctgcacatcaaggacatcctgagccccctgttcggcaccctggtgagcagcgcccagttcaactactgcttcgacgtggactggctggtgaagcagtacccccccgagttcagaaagaagcccatcctgctggtgcacggcgacaagagagaggccaaggcccacctgcacgcccaggccaagccctacgagaacatcagcctgtgccaggccaagctggacatcgccttcggcacccaccacaccaagatgatgctgctgctgtacgaggagggcctgagagtggtgatccacaccagcaacctgatccacgccgactggcaccagaagacccagggcatctggctgagccccctgtaccccagaatcgccgacggcacccacaagagcggcgagagccccacccacttcaaggccgacctgatcagctacctgatggcctacaacgcccccagcctgaaggagtggatcgacgtgatccacaagcacgacctgagcgagaccaacgtgtacctgatcggcagcacccccggcagattccagggcagccagaaggacaactggggccacttcagactgaagaagctgctgaaggaccacgccagcagcatgcccaacgccgagagctggcccgtggtgggccagttcagcagcgtgggcagcctgggcgccgacgagagcaagtggctgtgcagcgagttcaaggagagcatgctgaccctgggcaaggagagcaagacccccggcaagagcagcgtgcccctgtacctgatctaccccagcgtggagaacgtgagaaccagcctggagggctaccccgccggcggcagcctgccctacagcatccagaccgccgagaagcagaactggctgcacagctacttccacaagtggagcgccgagaccagcggcagaagcaacgccatgccccacatcaagacctacatgagacccagccccgacttcagcaagatcgcctggttcctggtgaccagcgccaacctgagcaaggccgcctggggcgccctggagaagaacggcacccagctgatgatcagaagctacgagctgggcgtgctgttcctgcccagcgccttcggcctggacagcttcaaggtgaagcagaagttcttcgccggcagccaggagcccatggccaccttccccgtgccctacgacctgccccccgagctgtacggcagcaaggacagaccctggatctggaacatcccctacgtgaaggcccccgacacccacggcaacatgtgggtgcccagctag

SEQ ID NO: 104214 - DNA, 1110 bp, synthetic construct
  misc_feature 1..1110: note = Description of Artificial Sequence: Synthetic coding sequence
  source 1..1110: mol_type = other DNA
atggtgatcagcgagagactgagactgaccagcatgcccagacccagcctgaccagaaccagcctgagcgccagaaagatgatgctgctgctgtacgaggagggcctgagagtggtgatccacaccagcaacctgatccacgccgactggcaccagaagacccagggcatctggctgagccccctgtaccccagaatcgccgacggcacccacaagagcggcgagagccccacccacttcaaggccgacctgatcagctacctgatggcctacaacgcccccagcctgaaggagtggatcgacgtgatccacaagcacgacctgagcgagaccaacgtgtacctgatcggcagcacccccggcagattccagggcagccagaaggacaactggggccacttcagactgaagaagctgctgaaggaccacgccagcagcatgcccaacgccgagagctggcccgtggtgggccagttcagcagcgtgggcagcctgggcgccgacgagagcaagtggctgtgcagcgagttcaaggagagcatgctgaccctgggcaaggagagcaagacccccggcaagagcagcgtgcccctgtacctgatctaccccagcgtggagaacgtgagaaccagcctggagggctaccccgccggcggcagcctgccctacagcatccagaccgccgagaagcagaactggctgcacagctacttccacaagtggagcgccgagaccagcggcagaagcaacgccatgccccacatcaagacctacatgagacccagccccgacttcagcaagatcgcctggttcctggtgaccagcgccaacctgagcaaggccgcctggggcgccctggagaagaacggcacccagctgatgatcagaagctacgagctgggcgtgctgttcctgcccagcgccttcggcctggacagcttcaaggtgaagcagaagttcttcgccggcagccaggagcccatggccaccttccccgtgccctacgacctgccccccgagctgtacggcagcaaggacagaccctggatctggaacatcccctacgtgaaggcccccgacacccacggcaacatgtgggtgcccagctag

SEQ ID NO: 104215 - DNA, 1827 bp, synthetic construct; identical to SEQ ID NO: 104213
  misc_feature 1..1827: note = Description of Artificial Sequence: Synthetic coding sequence
  source 1..1827: mol_type = other DNA

SEQ ID NO: 104216 - DNA, 897 bp, synthetic construct
  misc_feature 1..897: note = Description of Artificial Sequence: Synthetic coding sequence
  source 1..897: mol_type = other DNA
atgagccaggagggcgactacggcagatggaccatcagcagcagcgacgagagcgaggaggagaagcccaagcccgacaagcccagcaccagcagcctgctgtgcgccagacagggcgccgccaacgagcccagatacacctgcagcgaggcccagaaggccgcccacaagagaaagatcagccccgtgaagttcagcaacaccgacagcgtgctgccccccaagagacagaagagcggcagccaggaggacctgggctggtgcctgagcagcagcgacgacgagctgcagcccgagatgccccagaagcaggccgagaaggtggtgatcaagaaggagaaggacatcagcgcccccaacgacggcaccgcccagagaaccgagaaccacggcgcccccgcctgccacagactgaaggaggaggaggacgagtacgagaccagcggcgagggccaggacatctgggacatgctggacaagggcaaccccttccagttctacctgaccagagtgagcggcgtgaagcccaagtacaacagcggcgccctgcacatcaaggacatcctgagccccctgttcggcaccctggtgagcagcgcccagttcaactactgcttcgacgtggactggctggtgaagcagtacccccccgagttcagaaagaagcccatcctgctggtgcacggcgacaagagagaggccaaggcccacctgcacgcccaggccaagccctacgagaacatcagcctgtgccaggccaagctggacatcgccttcggcacccaccacaccaagatgatgctgctgctgtacgaggagggcctgagagtggtgatccacaccagcaacctgatccacgccgactggcaccagaagacccagggcacccacctgtag

SEQ ID NO: 104217 - DNA, 441 bp, synthetic construct
  misc_feature 1..441: note = Description of Artificial Sequence: Synthetic coding sequence
  source 1..441: mol_type = other DNA
atgagccaggagggcgactacggcagatggaccatcagcagcagcgacgagagcgaggaggagaagcccaagcccgacaagcccagcaccagcagcctgctgtgcgccagacagggcgccgccaacgagcccagatacacctgcagcgaggcccagaaggccgcccacaagagaaagatcagccccgtgaagttcagcaacaccgacagcgtgctgccccccaagagacagaagagcggcagccaggaggacctgggctggtgcctgagcagcagcgacgacgagctgcagcccgagatgccccagaagcaggccgagaaggtggtgatcaagaaggagaaggacatcagcgcccccaacgacggcaccgcccagagaaccgagaaccacggcgcccccgcctgccacagactgaaggaggaggaggacgagtacgagtag

SEQ ID NO: 104218 - DNA, 447 bp, synthetic construct
  misc_feature 1..447: note = Description of Artificial Sequence: Synthetic coding sequence
  source 1..447: mol_type = other DNA
atgagccaggagggcgactacggcagatggaccatcagcagcagcgacgagagcgaggaggagaagcccaagcccgacaagcccagcaccagcagcctgctgtgcgccagacagggcgccgccaacgagcccagatacacctgcagcgaggcccagaaggccgcccacaagagaaagatcagccccgtgaagttcagcaacaccgacagcgtgctgccccccaagagacagaagagcggcagccaggaggacctgggctggtgcctgagcagcagcgacgacgagctgcagcccgagatgccccagaagcaggccgagaaggtggtgatcaagaaggagaaggacatcagcgcccccaacgacggcaccgcccagagaaccgagaaccacggcgcccccgcctgccacagactgaaggaggaggaggacgagtacgagaccagctag

SEQ ID NO: 104219 - DNA, 840 bp, synthetic construct
  misc_feature 1..840: note = Description of Artificial Sequence: Synthetic coding sequence
  source 1..840: mol_type = other DNA
atgagccaggagggcgactacggcagatggaccatcagcagcagcgacgagagcgaggaggagaagcccaagcccgacaagcccagcaccagcagcctgctgtgcgccagacagggcgccgccaacgagcccagatacacctgcagcgaggcccagaaggccgcccacaagagaaagatcagccccgtgaagttcagcaacaccgacagcgtgctgccccccaagagacagaagagcggcagccaggaggacctgggctggtgcctgagcagcagcgacgacgagctgcagcccgagatgccccagaagcaggccgagaaggtggtgatcaagaaggagaaggacatcagcgcccccaacgacggcaccgcccagagaaccgagaaccacggcgcccccgcctgccacagactgaaggaggaggaggacgagtacgagaccagcggcgagggccaggacatctgggacatgctggacaagggcaaccccttccagttctacctgaccagagtgagcggcgtgaagcccaagtacaacagcggcgccctgcacatcaaggacatcctgagccccctgttcggcaccctggtgagcagcgcccagttcaactactgcttcgacgtggactggctggtgaagcagtacccccccgagttcagaaagaagcccatcctgctggtgcacggcgacaagagagaggccaaggcccacctgcacgcccaggccaagccctacgagaacatcagcctgtgccaggccaagctggacatcgccttcggcacccaccacaccaagatgatgctgctgctgtacgaggagggcctgagagtggtgatctag

SEQ ID NO: 104220 - DNA, 486 bp, synthetic construct
  misc_feature 1..486: note = Description of Artificial Sequence: Synthetic coding sequence
  source 1..486: mol_type = other DNA
atgagccaggagggcgactacggcagatggaccatcagcagcagcgacgagagcgaggaggagaagcccaagcccgacaagcccagcaccagcagcctgctgtgcgccagacagggcgccgccaacgagcccagatacacctgcagcgaggcccagaaggccgcccacaagagaaagatcagccccgtgaagttcagcaacaccgacagcgtgctgccccccaagagacagaagagcggcagccaggaggacctgggctggtgcctgagcagcagcgacgacgagctgcagcccgagatgccccagaagcaggccgagaaggtggtgatcaagaaggagaaggacatcagcgcccccaacgacggcaccgcccagagaaccgagaaccacggcgcccccgcctgccacagactgaaggaggaggaggacgagtacgagaccagcggcgagggccaggacatctgggacatgctggacaagggctag

SEQ ID NO: 104221 - DNA, 456 bp, synthetic construct
  misc_feature 1..456: note = Description of Artificial Sequence: Synthetic coding sequence
  source 1..456: mol_type = other DNA
atgagccaggagggcgactacggcagatggaccatcagcagcagcgacgagagcgaggaggagaagcccaagcccgacaagcccagcaccagcagcctgctgtgcgccagacagggcgccgccaacgagcccagatacacctgcagcgaggcccagaaggccgcccacaagagaaagatcagccccgtgaagttcagcaacaccgacagcgtgctgccccccaagagacagaagagcggcagccaggaggacctgggctggtgcctgagcagcagcgacgacgagctgcagcccgagatgccccagaagcaggccgagaaggtggtgatcaagaaggagaaggacatcagcgcccccaacgacggcaccgcccagagaaccgagaaccacggcgcccccgcctgccacagactgaaggaggaggaggacgagtacgagaccagcggcgagggctag

SEQ ID NO: 104222 - DNA, 1113 bp, synthetic construct
  misc_feature 1..1113: note = Description of Artificial Sequence: Synthetic coding sequence
  source 1..1113: mol_type = other DNA
atggtgggcaagctgaagcagaacctgctgctggcctgcctggtgatcagcagcgtgaccgtgttctacctgggccagcacgccatggagtgccaccacagaatcgaggagagaagccagcccgtgaagctggagagcaccagaaccaccgtgagaaccggcctggacctgaaggccaacaagaccttcgcctaccacaaggacatgcccctgatcttcatcggcggcgtgcccagaagcggcaccaccctgatgagagccatgctggacgcccaccccgacatcagatgcggcgaggagaccagagtgatccccagaatcctggccctgaagcagatgtggagcagaagcagcaaggagaagatcagactggacgaggccggcgtgaccgacgaggtgctggacagcgccatgcaggccttcctgctggagatcatcgtgaagcacggcgagcccgccccctacctgtgcaacaaggaccccttcgccctgaagagcctgacctacctgagcagactgttccccaacgccaagttcctgctgatggtgagagacggcagagccagcgtgcacagcatgatcagcagaaaggtgaccatcgccggcttcgacctgaacagctacagagactgcctgaccaagtggaacagagccatcgagaccatgtacaaccagtgcatggaggtgggctacaagaagtgcatgctggtgcactacgagcagctggtgctgcaccccgagagatggatgagaaccctgctgaagttcctgcagatcccctggaaccacagcgtgctgcaccacgaggagatgatcggcaaggccggcggcgtgagcctgagcaaggtggagagaagcaccgaccaggtgatcaagcccgtgaacgtgggcgccctgagcaagtgggtgggcaagatcccccccgacgtgctgcaggacatggccgtgatcgcccccatgctggccaagctgggctacgacccctacgccaacccccccaactacggcaagcccgaccccaagatcatcgagaacaccagaagagtgtacaagggcgagttccagctgcccgacttcctgaaggagaagccccagaccgagcaggtggagtag

SEQ ID NO: 104223 - DNA, 129 bp, synthetic construct
  misc_feature 1..129: note = Description of Artificial Sequence: Synthetic coding sequence
  source 1..129: mol_type = other DNA
atggtgggcaagctgaagcagaacctgctgctggcctgcctggtgatcagcagcgtgaccgtgttctacctgggccagcacgccatggagtgccaccacagaatcgaggagagaagccagcccgtgtag

SEQ ID NO: 104224 - DNA, 423 bp, synthetic construct
  misc_feature 1..423: note = Description of Artificial Sequence: Synthetic coding sequence
  source 1..423: mol_type = other DNA
atggtgggcaagctgaagcagaacctgctgctggcctgcctggtgatcagcagcgtgaccgtgttctacctgggccagcacgccatggagtgccaccacagaatcgaggagagaagccagcccgtgaagctggagagcaccagaaccaccgtgagaaccggcctggacctgaaggccaacaagaccttcgcctaccacaaggacatgcccctgatcttcatcggcggcgtgcccagaagcggcaccaccctgatgagagccatgctggacgcccaccccgacatcagatgcggcgaggagaccagagtgatccccagaatcctggccctgaagcagatgtggagcagaagcagcaaggagaagatcagactggacgaggccggcgtgaccgacgaggtgctggacagcgccatgcaggcctag

SEQ ID NO: 104225 - DNA, 1083 bp, synthetic construct
  misc_feature 1..1083: note = Description of Artificial Sequence: Synthetic coding sequence
  source 1..1083: mol_type = other DNA
atggtgggcaagctgaagcagaacctgctgctggcctgcctggtgatcagcagcgtgaccgtgttctacctgggccagcacgccatggagtgccaccacagaatcgaggagagaagccagcccgtgaagctggagagcaccagaaccaccgtgagaaccggcctggacctgaaggccaacaagaccttcgcctaccacaaggacatgcccctgatcttcatcggcggcgtgcccagaagcggcaccaccctgatgagagccatgctggacgcccaccccgacatcagatgcggcgaggagaccagagtgatccccagaatcctggccctgaagcagatgtggagcagaagcagcaaggagaagatcagactggacgaggccggcgtgaccgacgaggtgctggacagcgccatgcaggccttcctgctggagatcatcgtgaagcacggcgagcccgccccctacctgtgcaacaaggaccccttcgccctgaagagcctgacctacctgagcagactgttccccaacgccaagttcctgctgatggtgagagacggcagagccagcgtgcacagcatgatcagcagaaaggtgaccatcgccggcttcgacctgaacagctacagagactgcctgaccaagtggaacagagccatcgagaccatgtacaaccagtgcatggaggtgggctacaagaagtgcatgctggtgcactacgagcagctggtgctgcaccccgagagatggatgagaaccctgctgaagttcctgcagatcccctggaaccacagcgtgctgcaccacgaggagatgatcggcaaggccggcggcgtgagcctgagcaaggtggagagaagcaccgaccaggtgatcaagcccgtgaacgtgggcgccctgagcaagtgggtgggcaagatcccccccgacgtgctgcaggacatggccgtgatcgcccccatgctggccaagctgggctacgacccctacgccaacccccccaactacggcaagcccgaccccaagatcatcgagaacaccagaagagagagactgctgcccttccagcagaagggcaacagctag

SEQ ID NO: 104226 - DNA, 1134 bp, synthetic construct
  misc_feature 1..1134: note = Description of Artificial Sequence: Synthetic coding sequence
  source 1..1134: mol_type = other DNA
atgagactgagcgtgagaagagtgctgctggccgccggctgcgccctggtgctggtgctggccgtgcagctgggccagcaggtgctggagtgcagagccgtgctggccggcctgagaagccccagaggcgccatgagacccgagcaggaggagctggtgatggtgggcaccaaccacgtggagtacagatacggcaaggccatgcccctgatcttcgtgggcggcgtgcccagaagcggcaccaccctgatgagagccatgctggacgcccaccccgaggtgagatgcggcgaggagaccagaatcatccccagagtgctggccatgagacaggcctggagcaagagcggcagagagaagctgagactggacgaggccggcgtgaccgacgaggtgctggacgccgccatgcaggccttcatcctggaggtgatcgccaagcacggcgagcccgccagagtgctgtgcaacaaggaccccttcaccctgaagagcagcgtgtacctgagcagactgttccccaacagcaagttcctgctgatggtgagagacggcagagccagcgtgcacagcatgatcaccagaaaggtgaccatcgccggcttcgacctgagcagctacagagactgcctgaccaagtggaacaaggccatcgaggtgatgtacgcccagtgcatggaggtgggcaaggagaagtgcctgcccgtgtactacgagcagctggtgctgcaccccagaagaagcctgaagctgatcctggacttcctgggcatcgcctggagcgacgccgtgctgcaccacgaggacctgatcggcaagcccggcggcgtgagcctgagcaagatcgagagaagcaccgaccaggtgatcaagcccgtgaacctggaggccctgagcaagtggaccggccacatccccggcgacgtggtgagagacatggcccagatcgcccccatgctggcccagctgggctacgacccctacgccaacccccccaactacggcaaccccgaccccttcgtgatcaacaacacccagagagtgctgaagggcgactacaagacccccgccaacctgaagggctacttccaggtgaaccagaacagcaccagcagccacctgggcagcagctag

SEQ ID NO: 104227 - DNA, 1134 bp, synthetic construct; identical to SEQ ID NO: 104226
  misc_feature 1..1134: note = Description of Artificial Sequence: Synthetic coding sequence
  source 1..1134: mol_type = other DNA

SEQ ID NO: 104228 - DNA, 1134 bp, synthetic construct; identical to SEQ ID NO: 104226
  misc_feature 1..1134: note = Description of Artificial Sequence: Synthetic coding sequence
  source 1..1134: mol_type = other DNA

SEQ ID NO: 104229 - DNA, 195 bp, synthetic construct
  misc_feature 1..195: note = Description of Artificial Sequence: Synthetic coding sequence
  source 1..195: mol_type = other DNA
atgagactgagcgtgagaagagtgctgctggccgccggctgcgccctggtgctggtgctggccgtgcagctgggccagcaggtgctggagtgcagagccgtgctggccggcctgagaagccccagaggcgccatgagacccgagcaggaggagctggtgatggtgggcaccaaccacgtggagtacagatactag

SEQ ID NO: 104230 - DNA, 429 bp, synthetic construct
  misc_feature 1..429: note = Description of Artificial Sequence: Synthetic coding sequence
  source 1..429: mol_type = other DNA
atgagactgagcgtgagaagagtgctgctggccgccggctgcgccctggtgctggtgctggccgtgcagctgggccagcaggtgctggagtgcagagccgtgctggccggcctgagaagccccagaggcgccatgagacccgagcaggaggagctggtgatggtgggcaccaaccacgtggagtacagatacggcaaggccatgcccctgatcttcgtgggcggcgtgcccagaagcggcaccaccctgatgagagccatgctggacgcccaccccgaggtgagatgcggcgaggagaccagaatcatccccagagtgctggccatgagacaggcctggagcaagagcggcagagagaagctgagactggacgaggccggcgtgaccgacgaggtgctggacgccgccatgcaggccttcatcctgtag

SEQ ID NO: 104231 - DNA, 144 bp, synthetic construct
  misc_feature 1..144: note = Description of Artificial Sequence: Synthetic coding sequence
  source 1..144: mol_type = other DNA
atgagactgagcgtgagaagagtgctgctggccgccggctgcgccctggtgctggtgctggccgtgcagctgggccagcaggtgctggagtgcagagccgtgctggccggcctgagaagccccagaggcgccatgagaccctag

SEQ ID NO: 104232 - DNA, 147 bp, synthetic construct
  misc_feature 1..147: note = Description of Artificial Sequence: Synthetic coding sequence
  source 1..147: mol_type = other DNA
atgagactgagcgtgagaagagtgctgctggccgccggctgcgccctggtgctggtgctggccgtgcagctgggccagcaggtgctggagtgcagagccgtgctggccggcctgagaagccccagaggcgccatgagacccgagtag

SEQ ID NO: 104233 - DNA, 363 bp, synthetic construct
  misc_feature 1..363: note = Description of Artificial Sequence: Synthetic coding sequence
  source 1..363: mol_type = other DNA
atgagactgagcgtgagaagagtgctgctggccgccggctgcgccctggtgctggtgctggccgtgcagctgggccagcaggtgctggagtgcagagccgtgctggccggcctgagaagccccagaggcgccatgagacccgagcaggaggagctggtgatggtgggcaccaaccacgtggagtacagatacggcaaggccatgcccctgatcttcgtgggcggcgtgcccagaagcggcaccaccctgatgagagccatgctggacgcccaccccgaggtgagatgcggcgaggagaccagaatcatccccagagtgctggccatgagacaggcctggagcaagagcggcagagagaagtag

SEQ ID NO: 104234 - DNA, 933 bp, synthetic construct
  misc_feature 1..933: note = Description of Artificial Sequence: Synthetic coding sequence
  source 1..933: mol_type = other DNA
atgcccctgatcttcgtgggcggcgtgcccagaagcggcaccaccctgatgagagccatgctggacgcccaccccgaggtgagatgcggcgaggagaccagaatcatccccagagtgctggccatgagacaggcctggagcaagagcggcagagagaagctgagactggacgaggccggcgtgaccgacgaggtgctggacgccgccatgcaggccttcatcctggaggtgatcgccaagcacggcgagcccgccagagtgctgtgcaacaaggaccccttcaccctgaagagcagcgtgtacctgagcagactgttccccaacagcaagttcctgctgatggtgagagacggcagagccagcgtgcacagcatgatcaccagaaaggtgaccatcgccggcttcgacctgagcagctacagagactgcctgaccaagtggaacaaggccatcgaggtgatgtacgcccagtgcatggaggtgggcaaggagaagtgcctgcccgtgtactacgagcagctggtgctgcaccccagaagaagcctgaagctgatcctggacttcctgggcatcgcctggagcgacgccgtgctgcaccacgaggacctgatcggcaagcccggcggcgtgagcctgagcaagatcgagagaagcaccgaccaggtgatcaagcccgtgaacctggaggccctgagcaagtggaccggccacatccccggcgacgtggtgagagacatggcccagatcgcccccatgctggcccagctgggctacgacccctacgccaacccccccaactacggcaaccccgaccccttcgtgatcaacaacacccagagagtgctgaagggcgactacaagacccccgccaacctgaagggctacttccaggtgaaccagaacagcaccagcagccacctgggcagcagctag

SEQ ID NO: 104235 - DNA, 1587 bp, synthetic construct
  misc_feature 1..1587: note = Description of Artificial Sequence: Synthetic coding sequence
  source 1..1587: mol_type = other DNA
atgggcgacgcccccagccccgaggagaagctgcacctgatcaccagaaacctgcaggaggtgctgggcgaggagaagctgaaggagatcctgaaggagagagagctgaagatctactggggcaccgccaccaccggcaagccccacgtggcctacttcgtgcccatgagcaagatcgccgacttcctgaaggccggctgcgaggtgaccatcctgttcgccgacctgcacgcctacctggacaacatgaaggccccctgggagctgctggagctgagagtgagctactacgagaacgtgatcaaggccatgctggagagcatcggcgtgcccctggagaagctgaagttcatcaagggcaccgactaccagctgagcaaggagtacaccctggacgtgtacagactgagcagcgtggtgacccagcacgacagcaagaaggccggcgccgaggtggtgaagcaggtggagcaccccctgctgagcggcctgctgtaccccggcctgcaggccctggacgaggagtacctgaaggtggacgcccagttcggcggcatcgaccagagaaagatcttcaccttcgccgagaagtacctgcccgccctgggctacagcaagagagtgcacctgatgaaccccatggtgcccggcctgaccggcagcaagatgagcagcagcgaggaggagagcaagatcgacctgctggacagaaaggaggacgtgaagaagaagctgaagaaggccttctgcgagcccggcaacgtggagaacaacggcgtgctgagcttcatcaagcacgtgctgttccccctgaagagcgagttcgtgatcctgagagacgagaagtggggcggcaacaagacctacaccgcctacgtggacctggagaaggacttcgccgccgaggtggtgcaccccggcgacctgaagaacagcgtggaggtggccctgaacaagctgctggaccccatcagagagaagttcaacacccccgccctgaagaagctggccagcgccgcctaccccgaccccagcaagcagaagcccatggccaagggccccgccaagaacagcgagcccgaggaggtgatccccagcagactggacatcagagtgggcaagatcatcaccgtggagaagcaccccgacgccgacagcctgtacgtggagaagatcgacgtgggcgaggccgagcccagaaccgtggtgagcggcctggtgcagttcgtgcccaaggaggagctgcaggacagactggtggtggtgctgtgcaacctgaagccccagaagatgagaggcgtggagagccagggcatgctgctgtgcgccagcatcgagggcatcaacagacaggtggagcccctggacccccccgccggcagcgcccccggcgagcacgtgttcgtgaagggctacgagaagggccagcccgacgaggagctgaagcccaagaagaaggtgttcgagaagctgcaggccgacttcaagatcagcgaggagtgcatcgcccagtggaagcagaccaacttcatgaccaagctgggcagcatcagctgcaagagcctgaagggcggcaacatcagctag

SEQ ID NO: 104236 - DNA, 1434 bp, synthetic construct
  misc_feature 1..1434: note = Description of Artificial Sequence: Synthetic coding sequence
  source 1..1434: mol_type = other DNA
atggccgcccccatcctgagaagcttcagctggggcagatggagcggcaccctgaacctgagcgtgctgctgcccctgggcctgagaaaggcccacagcggcgcccagggcctgctggccgcccagaaggccagaggcctgttcaaggacttcttccccgagaccggcaccaagatcgagctgcccgagctgttcgacagaggcaccgccagcttcccccagaccatctactgcggcttcgaccccaccgccgacagcctgcacgtgggccacctgctggccctgctgggcctgttccacctgcagagagccggccacaacgtgatcgccctggtgggcggcgccaccgccagactgggcgaccccagcggcagaaccaaggagagagaggccctggagaccgagagagtgagagccaacgccagagccctgagactgggcctggaggccctggccgccaaccaccagcagctgttcaccgacggcagaagctggggcagcttcaccgtgctggacaacagcgcctggtaccagaagcagcacctggtggacttcctggccgccgtgggcggccacttcagaatgggcaccctgctgagcagacagagcgtgcagctgagactgaagagccccgagggcatgagcctggccgagttcttctaccaggtgctgcaggcctacgacttctactacctgttccagagatacggctgcagagtgcagctgggcggcagcgaccagctgggcaacatcatgagcggctacgagttcatcaacaagctgaccggcgaggacgtgttcggcatcaccgtgcccctgatcaccagcaccaccggcgccaagctgggcaagagcgccggcaacgccgtgtggctgaacagagacaagaccagccccttcgagctgtaccagttcttcgtgagacagcccgacgacagcgtggagagatacctgaagctgttcaccttcctgcccctgcccgagatcgaccacatcatgcagctgcacgtgaaggagcccgagagaagaggcccccagaagagactggccgccgaggtgaccaagctggtgcacggcagagagggcctggacagcgccaagagatgcacccaggccctgtaccacagcagcatcgacgccctggaggtgatgagcgaccaggagctgaaggagctgttcaaggaggcccccttcagcgagttcttcctggaccccggcaccagcgtgctggacacctgcagaaaggccaacgccatccccgacggccccagaggctacagaatgatcaccgagggcggcgtgagcatcaaccaccagcaggtgaccaaccccgagagcgtgctgatcgtgggccagcacatcctgaagaacggcctgagcctgctgaagatcggcaagagaaacttctacatcatcaagtggctgcagctgtag

SEQ ID NO: 104237 - DNA, 723 bp, synthetic construct
  misc_feature 1..723: note = Description of Artificial Sequence: Synthetic coding sequence
  source 1..723: mol_type = other DNA
atggccgagtacctggccagcatcttcggcaccgagaaggacaaggtgaactgcagcttctacttcaagatcggcgcctgcagacacggcgacagatgcagcagactgcacaacaagcccaccttcagccagaccatcgccctgctgaacatctacagaaacccccagaacagcagccagagcgccgacggcctgagatgcgccgtgagcgacgtggagatgcaggagcactacgacgagttcttcgaggaggtgttcaccgagatggaggagaagtacggcgaggtggaggagatgaacgtgtgcgacaacctgggcgaccacctggtgggcaacgtgtacgtgaagttcagaagagaggaggacgccgagaaggccgtgatcgacctgaacaacagatggttcaacggccagcccatccacgccgagctgagccccgtgaccgacttcagagaggcctgctgcagacagtacgagatgggcgagtgcaccagaggcggcttctgcaacttcatgcacctgaagcccatcagcagagagctgagaagagagctgtacggcagaagaagaaagaagcacagaagcagaagcagaagcagagagagaagaagcagaagcagagacagaggcagaggcggcggcggcggcggcggcggcggcggcggcggcagagagagagacagaagaagaagcagagacagagagagaagcggcagattctag

SEQ ID NO: 104238 - DNA, 723 bp, synthetic construct
  misc_feature 1..723: note = Description of Artificial Sequence: Synthetic coding sequence
  source 1..723: mol_type = other DNA
atggccgagtacctggccagcatcttcggcaccgagaaggacaaggtgaactgcagcttctacttcaagatcggcgcctgcagacacggcgacagatgcagcagactgcacaacaagcccaccttcagccagaccatcctgatccagaacatctacagaaacccccagaacagcgcccagaccgccgacggcagccactgcgccgtgagcgacgtggagatgcaggagcactacgacgagttcttcgaggaggtgttcaccgagatggaggagaagtacggcgaggtggaggagatgaacgtgtgcgacaacctgggcgaccacctggtgggcaacgtgtacgtgaagttcagaagagaggaggacgccgagaaggccgtgatcgacctgaacaacagatggttcaacggccagcccatccacgccgagctgagccccgtgaccgacttcagagaggcctgctgcagacagtacgagatgggcgagtgcaccagaggcggcttctgcaacttcatgcacctgaagcccatcagcagagagctgagaagagagctgtacggcagaagaagaaagaagcacagaagcagaagcagaagcagagagagaagaagcagaagcagagacagaggcagaggcggcggcggcggcggcggcggcggcggcggcggcagagagagagacagaagaagaagcagagacagagagagaagcggcagattctag

SEQ ID NO: 104239 - DNA, 504 bp, synthetic construct
  misc_feature 1..504: note = Description of Artificial Sequence: Synthetic coding sequence
  source 1..504: mol_type = other DNA
atgcaggagcactacgacgagttcttcgaggaggtgttcaccgagatggaggagaagtacggcgaggtggaggagatgaacgtgtgcgacaacctgggcgaccacctggtgggcaacgtgtacgtgaagttcagaagagaggaggacgccgagaaggccgtgatcgacctgaacaacagatggttcaacggccagcccatccacgccgagctgagccccgtgaccgacttcagagaggcctgctgcagacagtacgagatgggcgagtgcaccagaggcggcttctgcaacttcatgcacctgaagcccatcagcagagagctgagaagagagctgtacggcagaagaagaaagaagcacagaagcagaagcagaagcagagagagaagaagcagaagcagagacagaggcagaggcggcggcggcggcggcggcggcggcggcggcggcagagagagagacagaagaagaagcagagacagagagagaagcggcagattctag

SEQ ID NO: 104240 - DNA, 504 bp, synthetic construct; identical to SEQ ID NO: 104239
  misc_feature 1..504: note = Description of Artificial Sequence: Synthetic coding sequence
  source 1..504: mol_type = other DNA

SEQ ID NO: 104241 - DNA, 1218 bp, synthetic construct
  misc_feature 1..1218: note = Description of Artificial Sequence: Synthetic coding sequence
  source 1..1218: mol_type = other DNA
atgttcgtgcaggaggagaagatcttcgccggcaaggtgctgagactgcacatctgcgccagcgacggcgccgagtggctggaggaggccaccgaggacaccagcgtggagaagctgaaggagagatgcctgaagcactgcgcccacggcagcctggaggaccccaagagcatcacccaccacaagctgatccacgccgccagcgagagagtgctgagcgacgccagaaccatcctggaggagaacatccaggaccaggacgtgctgctgctgatcaagaagagagcccccagccccctgcccaagatggccgacgtgagcgccgaggagaagaagaagcaggaccagaaggcccccgacaaggaggccatcctgagagccaccgccaacctgcccagctacaacatggacagagccgccgtgcagaccaacatgagagacttccagaccgagctgagaaagatcctggtgagcctgatcgaggtggcccagaagctgctggccctgaaccccgacgccgtggagctgttcaagaaggccaacgccatgctggacgaggacgaggacgagagagtggacgaggccgccctgagacagctgaccgagatgggcttccccgagaacagagccaccaaggccctgcagctgaaccacatgagcgtgccccaggccatggagtggctgatcgagcacgccgaggaccccaccatcgacacccccctgcccggccaggccccccccgaggccgagggcgccaccgccgccgccagcgaggccgccgccggcgccagcgccaccgacgaggaggccagagacgagctgaccgagatcttcaagaagatcagaagaaagagagagttcagagccgacgccagagccgtgatcagcctgatggagatgggcttcgacgagaaggaggtgatcgacgccctgagagtgaacaacaaccagcagaacgccgcctgcgagtggctgctgggcgacagaaagcccagccccgaggagctggacaagggcatcgaccccgacagccccctgttccaggccatcctggacaaccccgtggtgcagctgggcctgaccaaccccaagaccctgctggccttcgaggacatgctggagaaccccctgaacagcacccagtggatgaacgaccccgagaccggccccgtgatgctgcagatcagcagaatcttccagaccctgaacagaacctag

SEQ ID NO: 104242 - DNA, 540 bp, synthetic construct
  misc_feature 1..540: note = Description of Artificial Sequence: Synthetic coding sequence
  source 1..540: mol_type = other DNA
atggccgccagccaggtgctgggcgagaagatcaacatcctgagcggcgagaccgtgaaggccggcgacagagaccccctgggcaacgactgccccgagcaggacagactgccccagagaagctggagacagaagtgcgccagctacgtgctggccctgagaccctggagcttcagcgccagcctgacccccgtggccctgggcagcgccctggcctacagaagccacggcgtgctggaccccagactgctggtgggctgcgccgtggccgtgctggccgtgcacggcgccggcaacctggtgaacacctactacgacttcagcaagggcatcgaccacaagaagagcgacgacagaaccctggtggacagaatcctggagccccaggacgtggtgagattcggcgtgttcctgtacaccctgggctgcgtgtgcgccgcctgcctgtactacctgagccccctgaagctggagcacctggccctgatctacttcggcggcctgagcggcagcttcctgtacaccggcgtgctgatctag

SEQ ID NO: 104243 - DNA, 1017 bp, synthetic construct
  misc_feature 1..1017: note = Description of Artificial Sequence: Synthetic coding sequence
  source 1..1017: mol_type = other DNA
atggccgccagccaggtgctgggcgagaagatcaacatcctgagcggcgagaccgtgaaggccggcgacagagaccccctgggcaacgactgccccgagcaggacagactgccccagagaagctggagacagaagtgcgccagctacgtgctggccctgagaccctggagcttcagcgccagcctgacccccgtggccctgggcagcgccctggcctacagaagccacggcgtgctggaccccagactgctggtgggctgcgccgtggccgtgctggccgtgcacggcgccggcaacctggtgaacacctactacgacttcagcaagggcatcgaccacaagaagagcgacgacagaaccctggtggacagaatcctggagccccaggacgtggtgagattcggcgtgttcctgtacaccctgggctgcgtgtgcgccgcctgcctgtactacctgagccccctgaagctggagcacctggccctgatctacttcggcggcctgagcggcagcttcctgtacaccggcggcatcggcttcaagtacgtggccctgggcgacctgatcatcctgatcaccttcggccccctggccgtgatgttcgcctacgccatccaggtgggcagcctggccatcttccccctggtgtacgccatccccctggccctgagcaccgaggccatcctgcacagcaacaacaccagagacatggagagcgacagagaggccggcatcgtgaccctggccatcctgatcggccccaccttcagctacatcctgtacaacaccctgctgttcctgccctacctggtgttcagcatcctggccacccactgcaccatcagcctggccctgcccctgctgaccatccccatggccttcagcctggagagacagttcagaagccaggccttcaacaagctgccccagagaaccgccaagctgaacctgctgctgggcctgttctacgtgttcggcatcatcctggcccccgccggcagcctgcccaagatctag

SEQ ID NO: 104244 - DNA, 3405 bp, synthetic construct
  misc_feature 1..3405: note = Description of Artificial Sequence: Synthetic coding sequence
  source 1..3405: mol_type = other DNA
atgagcgagccccacagagtgcagttcaccagcctgcccggcagcctgaaccccgccttcctgaagaagagcagaaaggaggaggccggcgccggcgagcagcaccaggactgcgagcccgccgccgccgccgtgagaatcaccctgaccctgttcgagcccgaccacaagagatgccccgagttcttctaccccgagctggtgaagaacatcagaggcaaggtgaagggcctgcagcccggcgacaagaagaaggacctgagcgaccccttcaacgacgaggagaaggagagacacaaggtggaggccctggccagaaagttcgaggagaagtacggcggcaagaagagaagaaaggacagaatccaggacctgatcgacatgggctacggctacgacgagagcgacagcttcatcgacaacagcgaggcctacgacgagctggtgcccgccagcctgaccaccaagtacggcggcttctacatcaacagcggcaccctgcagttcagacaggccagcgagagcgaggacgacttcatcaaggagaagaagaagaagagccccaagaagagaaagctgaaggagggcggcgagaagatcaagaagaagaagaaggacgacacctacgacaaggagaagaagagcaagaagagcaagttcagcaaggccggcttcaccgccctgaacgccagcaaggagaagaagaagaagaagtacagcggcgccctgagcgtgaaggagatgctgaagaagttccagaaggagaaggaggcccagaagaagagagaggaggagcacaagcccgtggccgtgcccagcgccgaggcccagggcctgagagagctggagggcgccagcgaccccctgctgagcctgttcggcagcaccagcgacaacgacctgctgcaggccgccaccgccatggacagcctgaccgacctggacctggagcacctgctgagcgagagccccgagggcagccccttcagagacatggacgacggcagcgacagcctgggcgtgggcctggaccaggagttcagacagcccagcagcctgcccgagggcctgcccgcccccctggagaagagagtgaaggagctggcccaggccgccagagccgccgagggcgagagcagacagaagttcttcacccaggacatcaacggcatcctgctggacatcgaggcccagaccagagagctgagcagccaggtgagaagcggcgtgtacgcctacctggccagcttcctgccctgcagcaaggacgccctgctgaagagagccagaaagctgcacctgtacgagcagggcggcagactgaaggagcccctgcagaagctgaaggaggccatcggcagagccatgcccgagcagatggccaagtaccaggacgagtgccaggcccacacccaggccaaggtggccaagatgctggaggaggagaaggacaaggagcagagagacagaatctgcagcgacgaggaggaggacgaggagaagggcggcagaagaatcatgggccccagaaagaagttccagtggaacgacgagatcagagagctgctgtgccaggtggtgaagatcaagctggagagccaggacctggagagaaacaacaaggcccaggcctgggaggactgcgtgaagggcttcctggacgccgaggtgaagcccctgtggcccaagggctggatgcaggccagaaccctgttcaaggagagcagaagaggccacggccacctgaccagcatcctggccaagaagaaggtgatggcccccagcaagatcaaggtgaaggagagcagcaccaagcccgacaagaaggtgagcgtgcccagcggccagatcggcggccccatcgccctgcccagcgaccaccagaccggcggcctgagcatcggcgccagcagcagagagctgcccagccaggccagcggcggcctggccaaccccccccccgtgaacctggaggacagcctggacgaggacctgatcagaaaccccgccagcagcgtggaggccgtgagcaaggagctggccgccctgaacagcagagccgccggcaacagcgagttcaccctgcccgcccccagcaaggcccccgccgagaaggtgggcggcgtgctgtgcaccgaggagaagagaaacttcgccaagcccagccccagcgcccccccccccgccagcagcctgcagagccccctgaacttcctggccgagcaggccctggccctgggccagagcagccaggagaagaagcccgagagcagcggctacaaggagctgagctgccaggcccccctgaacaagggcctgcccgaggtgcaccagagcaaggccaagcaccacagcctgcccagaaccagccacggcccccaggtggccgtgcccgtgcccggcccccaggtgaaggtgttccacgccggcacccagcagcagaagaacttcaccccccccagccccttcgccaacaagctgcagggccccaaggccagccccacccagtgccacagaagcctgctgcagctggtgaagaccgccgccaagggccagggcttccaccccagcgcccccgccaccagcggcggcctgagcgccagcagcagcagcagccacaagacccccgccagcagcagcagcgccctgagccaccccgccaagccccacagcgtgagcagcgccggcagcagctacaagaacaaccccttcgccagcagcatcagcaagcacggcgtgagcagcggcagcagcagcagcggcggcacccccgtgcagagcagcgtgagcggcagcctggtgcccggcatccagccccccagcgtgggccaggccaccagcagacccgtgcccagcagcgccggcaagaagatgcccgtgagccagaagctgaccctggtggccccccccggcggccccaacggcgacagcagcggcggcacccagggcgtggccaagctgctgaccagccccagcctgaagcccagcgccgtgagcagcgtgaccagcagcaccagcctgagcaagggcgccagcggcaccgtgctgctggccggcagcagcctgatggccagcccctacaagagcagcagccccaagctgagcggcgccatgagcagcaacagcctgggcatcatcacccccgtgcccatccccgtgcacgtgctgagcttcagcgccgacagcagcgccaaggccggcgtgagcaaggacgccatcgtgaccggccccgcccccggcagcttccaccacggcctgggccacagcctgctggccggcctgcacagcagccccccccacgccgcccccctgccccacgccgccgtgcccacccacatcccccagagcctgcccggcgccagccagctgcacggcaagggccccgccgtgcccagaaagctgtag

SEQ ID NO: 104245 - DNA, 3405 bp, synthetic construct; identical to SEQ ID NO: 104244
  misc_feature 1..3405: note = Description of Artificial Sequence: Synthetic coding sequence
  source 1..3405: mol_type = other DNA

SEQ ID NO: 104246 - DNA, 3315 bp, synthetic construct
  misc_feature 1..3315: note = Description of Artificial Sequence: Synthetic coding sequence
  source 1..3315: mol_type = other DNA
atgagcgagccccacagagtgcagttcaccagcctgcccggcagcctgaaccccgccttcctgaagaagagcagaaaggaggaggccggcgccggcgagcagcaccaggactgcgagcccgccgccgccgccgtgagaatcaccctgaccctgttcgagcccgaccacaagagatgccccgagttcttctaccccgagctggtgaagaacatcagaggcaaggtgaagggcctgcagcccggcgacaagaagaaggacctgagcgaccccttcaacgacgaggagaaggagagacacaaggtggaggccctggccagaaagttcgaggagaagtacggcggcaagaagagaagaaaggacagaatccaggacctgatcgacatgggctacggctacgacgagagcgacagcttcatcgacaacagcgaggcctacgacgagctggtgcccgccagcctgaccaccaagtacggcggcttctacatcaacagcggcaccctgcagttcagacaggccagcgagagcgaggacgacttcatcaaggagaagaagaagaagagccccaagaagagaaagctgaaggagggcggcgagaagatcaagaagaagaagaaggacgacacctacgacaaggagaagaagagcaagaagagcaagttcagcaaggccggcttcaccgccctgaacgccagcaaggagaagaagaagaagaagtacagcggcgccctgagcgtgaaggagatgctgaagaagttccagaaggagaaggaggcccagaagaagagagaggaggagcacaagcccgtggccgtgcccagcgccgaggcccagggcctgagagagctggagggcgccagcgaccccctgctgagcctgttcggcagcaccagcgacaacgacctgctgcaggccgccaccgccatggacagcctgaccgacctggacctggagcacctgctgagcgagagccccgagggcagccccttcagagacatggacgacggcagcgacagcctgggcgtgggcctggaccaggagttcagacagcccagcagcctgcccgagggcctgcccgcccccctggagaagagagtgaaggagctggcccaggccgccagagccgccgagggcgagagcagacagaagttcttcacccaggacatcaacggcatcctgctggacatcgaggcccagaccagagagctgagcagccaggtgagaagcggcgtgtacgcctacctggccagcttcctgccctgcagcaaggacgccctgctgaagagagccagaaagctgcacctgtacgagcagggcggcagactgaaggagcccctgcagaagctgaaggaggccatcggcagagccatgcccgagcagatggccaagtaccaggacgagtgccaggcccacacccaggccaaggtggccaagatgctggaggaggagaaggacaaggagcagagagacagaatctgcagcgacgaggaggaggacgaggagaagggcggcagaagaatcatgggccccagaaagaagttccagtggaacgacgagatcagagagctgctgtgccaggtggtgaagatcaagctggagagccaggacctggagagaaacaacaaggcccaggcctgggaggactgcgtgaagggcttcctggacgccgaggtgaagcccctgtggcccaagggctggatgcaggccagaaccctgttcaaggagagcagaagaggccacggccacctgaccagcatcctggccaagaagaaggtgatggcccccagcaagatcaaggtgaaggagagcagcaccaagcccgacaagaaggtgagcgtgcccagcggccagatcggcggccccatcgccctgcccagcgaccaccagaccggcggcctgagcatcggcgccagcagcagagagctgcccagccaggccagcggcggcctggccaaccccccccccgtgaacctggaggacagcctggacgaggacctgatcagaaaccccgccagcagcgtggaggccgtgagcaaggagctggccgccctgaacagcagagccgccggcaacagcgagttcaccctgcccgcccccagcaaggcccccgccgagaaggtgggcggcgtgctgtgcaccgaggagaagagaaacttcgccaagcccagccccagcgcccccccccccgccagcagcctgcagagccccctgaacttcctggccgagcaggccctggccctgggccagagcagccaggagaagaagcccgagagcagcggctacaaggagctgagctgccaggcccccctgaacaagggcctgcccgaggtgcaccagagcaaggccaagcaccacagcctgcccagaaccagccacggcccccaggtggccgtgcccgtgcccggcccccaggtgaaggtgttccacgccggcacccagcagcagaagaacttcaccccccccagccccttcgccaacaagctgcagggccccaaggccagccccacccagtgccacagaagcctgctgcagctggtgaagaccgccgccaagggccagggcttccaccccagcgcccccgccaccagcggcggcctgagcgccagcagcagcagcagccacaagacccccgccagcagcagcagcgccctgagccaccccgccaagccccacagcgtgagcagcgccggcagcagctacaagaacaaccccttcgccagcagcatcagcaagcacggcgtgagcagcggcagcagcagcagcggcggcacccccgtgcagagcagcgtgagcggcagcctggtgcccggcatccagccccccagcgtgggccaggccaccagcagacccgtgcccagcagcgccggcaagaagatgcccgtgagccagaagctgaccctggtggccccccccggcggccccaacggcgacagcagcggcggcacccagggcgtggccaagctgctgaccagccccagcctgaagcccagcgccgtgagcagcgtgaccagcagcaccagcctgagcaagggcgccagcggcaccgtgctgctggccggcagcagcctgatggccagcccctacaagagcagcagccccaagctgagcggcgccatgagcagcaacagcctgggcatcatcacccccgtgcccatccccgtgcacgtgctgagcttcagcgccgacagcagcgccaaggccggcgtgagcaaggacgccatcgtgaccggccccgcccccggcagcttccaccacggcctgggccacagcgccagccagctgcacggcaagggccccgccgtgcccagaaagctgtag

SEQ ID NO: 104247 - DNA, 3795 bp, synthetic construct
  misc_feature 1..3795: note = Description of Artificial Sequence: Synthetic coding sequence
  source 1..3795: mol_type = other DNA
atgagcctgcagagagagccccccagacccgagccccccccccccttcccccccctgcccctgcagccccccccccccagagagagcgccagcagagccgagcagccccccagaccccccagagagaccgtgagactggagctggtgctgaaggaccccaccgacgagagctgcgtggagttcagctaccccgagctgctgctgtgcggcgagcagagaaagaagctgatccacaccgaggaccccttcaacgacgagcaccaggagagacaggaggtggagatgctggccaagaagttcgagatgaagtacggcggcaagcccagaaagcacagaaaggacagactgcaggacctgatcgacatcggcttcggctacgacgagaccgaccccttcatcgacaacagcgaggcctacgacgagctggtgcccgccagcctgaccaccaagtacggcggcttctacatcaacaccggcaccctgcagttcagacaggccagcgacaccgaggaggacgacatcaccgacaaccagaagcacaagccccccaaggtgcccaagatcaaggaggacgacatcgagatgaagaagagaaagagaaaggaggagggcgagaaggagaagaagcccagaaagaaggtgcccaagcagctgggcgtggtggccctgaacagccacaagagcgagaagaagaagaagagatacaaggacagcctgagcctggccgccatgatcagaaagttccagaaggagaaggacgccctgaagaaggagagcaaccccaaggtgcccgtgaccctgagcacccccagcctgaacaagcccccctgcgccgccgccgccctgggcaacgacgtgcccgacctgaacctgagcagcggcgaccccgacctgcccatcttcgtgagcaccaacgagcacgagctgttccaggaggccgagaacgccctggagatgctggacgacttcgacttcgacagactgctggacgccgccagcgacggcagccccctgagcgagagcggcggcgagaacggcaccaccacccagcccacctacaccagccaggtgatgcccaaggtggtgcccaccctgcccgagggcctgcccgtgctgctggagaagagaatcgaggacctgagagtggccgccaagctgttcgacgaggagggcagaaagaagttcttcacccaggacatgaacaacatcctgctggacatcgagctgcagctgcaggagctgggccccgtgatcagaagcggcgtgtacagccacctggaggccttcgtgccctgcaacaaggagaccctggtgaagagactgaagaagctgcacctgaacgtgcaggacgacagactgagagagcccctgcagaagctgaagctggccgtgagcaacgtgatgcccgagcagctgttcaagtaccaggaggactgccaggccagaagccaggccaagtgcgccaagctgcagaccgacgaggagagagagaagaacggcagcgaggaggacgacgacgagaagcccggcaagagagtgatcggccccagaaagaagttccactgggacgacaccatcagaaccctgctgtgcaacctggtggagatcaagctgggctgctacgagctggagcccaacaagagccagagcgccgaggactacctgaagagcttcatggagaccgaggtgaagcccctgtggcccaagggctggatgcaggccagaatgctgttcaaggagagcagaagcgtgcacaaccacctgaccagcgcccccgccaagaagaaggtgatccccgcccccaagcccaaggtgaaggaggtgatggtgaagaccctgcccctgcacagcttccccaccatgctgaaggagtgcagccccaagaaggaccagaagacccccaccagcctggtggccagcgtgagcggcccccccaccagcagcagcaccgccgccatcgccgccgccagcagcagcagcgcccccgcccaggagaccatctgcctggacgacagcctggacgaggacctgagcttccacagccccagcctggacctggtgagcgaggccctggccgtgatcaacaacggcaacaagggcccccccgtgggcagcagaatcagcatgcccaccaccaagcccagacccggcctgagagaggagaagctggccagcatcatgagcaagctgcccctggccacccccaagaagctggacagcacccagaccacccacagcagcagcctgatcgccggccacaccggccccgtgcccaagaagccccaggacctggcccacaccggcatcagcagcggcctgatcgccggcagcagcatccagaaccccaaggtgagcctggagcccctgcccgccagactgctgcagcagggcctgcagagaagcagccagatccacaccagcagcagcagccagacccacgtgagcagcagcagccaggcccagatcgccgccagcagccacgccctgggcaccagcgaggcccaggacgccagcagcctgacccaggtgaccaaggtgcaccagcacagcgccgtgcagcagaactacgtgagccccctgcaggccaccatcagcaagagccagaccaaccccgtggtgaagctgagcaacaacccccagctgagctgcagcagcagcctgatcaagaccagcgacaagcccctgatgtacagactgcccctgagcacccccagccccggcaacggcagccagggcagccaccccctggtgagcagaaccgtgcccagcaccaccaccagcagcaactacctggccaaggccatggtgagccagatcagcacccagggcttcaagagccccttcagcatggccgccagccccaagctggccgccagccccaagcccgccaccagccccaagcccctgcccagccccaagcccagcgccagccccaagcccagcctgagcgccaagcccagcgtgagcaccaagctgatcagcaagagcaaccccacccccaagcccaccgtgagccccagcagcagcagccccaacgccctggtggcccagggcagccacagcagcaccaacagccccgtgcacaagcagcccagcggcatgaacatcagcagacagagccccaccctgaacctgctgcccagcagcagaaccagcggcctgccccccaccaagaacctgcaggcccccagcaagctgaccaacagcagcagcaccggcaccgtgggcaagaacagcctgagcggcatcgccatgaacgtgcccgccagcagaggcagcaacctgaacagcagcggcgccaacagaaccagcctgagcggcggcaccggcagcggcacccagggcgccaccaagcccctgagcaccccccacagacccagcaccgccagcggcagcagcgtggtgaccgccagcgtgcagagcaccgccggcgccagcctgctggccaacgccagccccctgaccctgatgaccagccccctgagcgtgaccaaccagaacgtgacccccttcggcatgctgggcggcctggtgcccgtgaccatgcccttccagttccccctggagatcttcggcttcggcaccgacaccgccggcgtgaccaccaccagcggcagcaccagcgccgccttccaccacagcctgacccagaacctgctgaagggcctgcagcccggcggcgcccagcacgccgccaccctgagccacagccccctgcccgcccacctgcagcaggccttccacgacggcggccagagcaagggcgacaccaagctgcccagaaagagccagtag

SEQ ID NO: 104248 - DNA, 4044 bp, synthetic construct
  misc_feature 1..4044: note = Description of Artificial Sequence: Synthetic coding sequence
  source 1..4044: mol_type = other DNA
atggccgagcccagaagagtggccttcatcagcctgagccccgtgagaagaagagaggccgagtaccccggccccgagagagagcccgagtaccccagagagccccccagactggagccccagccctacagagagcccgccagagccgagccccccgcccccagagagcccgcccccagaagcgacgcccagccccccagcagagagaagcccctgccccagagagaggtgagcagagccgagccccccatgagcctgcagagagagccccccagacccgagccccccccccccttcccccccctgcccctgcagccccccccccccagagagagcgccagcagagccgagcagccccccagaccccccagagagaccgtgagactggagctggtgctgaaggaccccaccgacgagagctgcgtggagttcagctaccccgagctgctgctgtgcggcgagcagagaaagaagctgatccacaccgaggaccccttcaacgacgagcaccaggagagacaggaggtggagatgctggccaagaagttcgagatgaagtacggcggcaagcccagaaagcacagaaaggacagactgcaggacctgatcgacatcggcttcggctacgacgagaccgaccccttcatcgacaacagcgaggcctacgacgagctggtgcccgccagcctgaccaccaagtacggcggcttctacatcaacaccggcaccctgcagttcagacaggccagcgacaccgaggaggacgacatcaccgacaaccagaagcacaagccccccaaggtgcccaagatcaaggaggacgacatcgagatgaagaagagaaagagaaaggaggagggcgagaaggagaagaagcccagaaagaaggtgcccaagcagctgggcgtggtggccctgaacagccacaagagcgagaagaagaagaagagatacaaggacagcctgagcctggccgccatgatcagaaagttccagaaggagaaggacgccctgaagaaggagagcaaccccaaggtgcccgtgaccctgagcacccccagcctgaacaagcccccctgcgccgccgccgccctgggcaacgacgtgcccgacctgaacctgagcagcggcgaccccgacctgcccatcttcgtgagcaccaacgagcacgagctgttccaggaggccgagaacgccctggagatgctggacgacttcgacttcgacagactgctggacgccgccagcgacggcagccccctgagcgagagcggcggcgagaacggcaccaccacccagcccacctacaccagccaggtgatgcccaaggtggtgcccaccctgcccgagggcctgcccgtgctgctggagaagagaatcgaggacctgagagtggccgccaagctgttcgacgaggagggcagaaagaagttcttcacccaggacatgaacaacatcctgctggacatcgagctgcagctgcaggagctgggccccgtgatcagaagcggcgtgtacagccacctggaggccttcgtgccctgcaacaaggagaccctggtgaagagactgaagaagctgcacctgaacgtgcaggacgacagactgagagagcccctgcagaagctgaagctggccgtgagcaacgtgatgcccgagcagctgttcaagtaccaggaggactgccaggccagaagccaggccaagtgcgccaagctgcagaccgacgaggagagagagaagaacggcagcgaggaggacgacgacgagaagcccggcaagagagtgatcggccccagaaagaagttccactgggacgacaccatcagaaccctgctgtgcaacctggtggagatcaagctgggctgctacgagctggagcccaacaagagccagagcgccgaggactacctgaagagcttcatggagaccgaggtgaagcccctgtggcccaagggctggatgcaggccagaatgctgttcaaggagagcagaagcgtgcacaaccacctgaccagcgcccccgccaagaagaaggtgatccccgcccccaagcccaaggtgaaggaggtgatggtgaagaccctgcccctgcacagcttccccaccatgctgaaggagtgcagccccaagaaggaccagaagacccccaccagcctggtggccagcgtgagcggcccccccaccagcagcagcaccgccgccatcgccgccgccagcagcagcagcgcccccgcccaggagaccatctgcctggacgacagcctggacgaggacctgagcttccacagccccagcctggacctggtgagcgaggccctggccgtgatcaacaacggcaacaagggcccccccgtgggcagcagaatcagcatgcccaccaccaagcccagacccggcctgagagaggagaagctggccagcatcatgagcaagctgcccctggccacccccaagaagctggacagcacccagaccacccacagcagcagcctgatcgccggccacaccggccccgtgcccaagaagccccaggacctggcccacaccggcatcagcagcggcctgatcgccggcagcagcatccagaaccccaaggtgagcctggagcccctgcccgccagactgctgcagcagggcctgcagagaagcagccagatccacaccagcagcagcagccagacccacgtgagcagcagcagccaggcccagatcgccgccagcagccacgccctgggcaccagcgaggcccaggacgccagcagcctgacccaggtgaccaaggtgcaccagcacagcgccgtgcagcagaactacgtgagccccctgcaggccaccatcagcaagagccagaccaaccccgtggtgaagctgagcaacaacccccagctgagctgcagcagcagcctgatcaagaccagcgacaagcccctgatgtacagactgcccctgagcacccccagccccggcaacggcagccagggcagccaccccctggtgagcagaaccgtgcccagcaccaccaccagcagcaactacctggccaaggccatggtgagccagatcagcacccagggcttcaagagccccttcagcatggccgccagccccaagctggccgccagccccaagcccgccaccagccccaagcccctgcccagccccaagcccagcgccagccccaagcccagcctgagcgccaagcccagcgtgagcaccaagctgatcagcaagagcaaccccacccccaagcccaccgtgagccccagcagcagcagccccaacgccctggtggcccagggcagccacagcagcaccaacagccccgtgcacaagcagcccagcggcatgaacatcagcagacagagccccaccctgaacctgctgcccagcagcagaaccagcggcctgccccccaccaagaacctgcaggcccccagcaagctgaccaacagcagcagcaccggcaccgtgggcaagaacagcctgagcggcatcgccatgaacgtgcccgccagcagaggcagcaacctgaacagcagcggcgccaacagaaccagcctgagcggcggcaccggcagcggcacccagggcgccaccaagcccctgagcaccccccacagacccagcaccgccagcggcagcagcgtggtgaccgccagcgtgcagagcaccgccggcgccagcctgctggccaacgccagccccctgaccctgatgaccagccccctgagcgtgaccaaccagaacgtgacccccttcggcatgctgggcggcctggtgcccgtgaccatgcccttccagttccccctggagatcttcggcttcggcaccgacaccgccggcgtgaccaccaccagcggcagcaccagcgccgccttccaccacagcctgacccagaacctgctgaagggcctgcagcccggcggcgcccagcacgccgccaccctgagccacagccccctgcccgcccacctgcagcaggccttccacgacggcggccagagcaagggcgacaccaagctgcccagaaagagccagtag

SEQ ID NO: 104249 - DNA, 1686 bp, synthetic construct
  misc_feature 1..1686: note = Description of Artificial Sequence: Synthetic coding sequence
  source 1..1686: mol_type = other DNA
atggccgagagcggcgagagcggcggcccccccggcagccaggacagcgccgccggcgccgagggcgccggcgcccccgccgccgccgccagcgccgagcccaagatcatgaaggtgaccgtgaagacccccaaggagaaggaggagttcgccgtgcccgagaacagcagcgtgcagcagttcaaggaggagatcagcaagagattcaagagccacaccgaccagctggtgctgatcttcgccggcaagatcctgaaggaccaggacaccctgagccagcacggcatccacgacggcctgaccgtgcacctggtgatcaagacccagaacagaccccaggaccacagcgcccagcagaccaacaccgccggcagcaacgtgaccaccagcagcacccccaacagcaacagcaccagcggcagcgccaccagcaaccccttcggcctgggcggcctgggcggcctggccggcctgagcagcctgggcctgaacaccaccaacttcagcgagctgcagagccagatgcagagacagctgctgagcaaccccgagatgatggtgcagatcatggagaaccccttcgtgcagagcatgctgagcaaccccgacctgatgagacagctgatcatggccaacccccagatgcagcagctgatccagagaaaccccgagatcagccacatgctgaacaaccccgacatcatgagacagaccctggagctggccagaaaccccgccatgatgcaggagatgatgagaaaccaggacagagccctgagcaacctggagagcatccccggcggctacaacgccctgagaagaatgtacaccgacatccaggagcccatgctgagcgccgcccaggagcagttcggcggcaaccccttcgccagcctggtgagcaacaccagcagcggcgagggcagccagcccagcagaaccgagaacagagaccccctgcccaacccctgggccccccagaccagccagagcagcagcgccagcagcggcaccgccagcaccgtgggcggcaccaccggcagcaccgccagcggcaccagcggccagagcaccaccgcccccaacctggtgcccggcgtgggcgccagcatgttcaacacccccggcatgcagagcctgctgcagcagatcaccgagaacccccagctgatgcagaacatgctgagcgccccctacatgagaagcatgatgcagagcctgagccagaaccccgacctggccgcccagatgcagaaccccgacaccctgagcgccatgagcaaccccagagccatgcaggccctgctgcagatccagcagggcctgcagaccctggccaccgaggcccccggcctgatccccggcttcacccccggcctgggcgccctgggcagcaccggcggcagcagcggcaccaacggcagcaacgccacccccagcgagaacaccagccccaccgccggcaccaccgagcccggccaccagcagttcatccagcagatgctgcaggccctggccggcgtgaacccccagctgcagaaccccgaggtgagattccagcagcagctggagcagctgagcgccatgggcttcctgaacagagaggccaacctgcaggccctgatcgccaccggcggcgacatcaacgccgccatcgagagactgctgggcagccagcccagctag

SEQ ID NO: 104250 - DNA, 1770 bp, synthetic construct
  misc_feature 1..1770: note = Description of Artificial Sequence: Synthetic coding sequence
  source 1..1770: mol_type = other DNA
atggccgagagcggcgagagcggcggcccccccggcagccaggacagcgccgccggcgccgagggcgccggcgcccccgccgccgccgccagcgccgagcccaagatcatgaaggtgaccgtgaagacccccaaggagaaggaggagttcgccgtgcccgagaacagcagcgtgcagcagttcaaggaggagatcagcaagagattcaagagccacaccgaccagctggtgctgatcttcgccggcaagatcctgaaggaccaggacaccctgagccagcacggcatccacgacggcctgaccgtgcacctggtgatcaagacccagaacagaccccaggaccacagcgcccagcagaccaacaccgccggcagcaacgtgaccaccagcagcacccccaacagcaacagcaccagcggcagcgccaccagcaaccccttcggcctgggcggcctgggcggcctggccggcctgagcagcctgggcctgaacaccaccaacttcagcgagctgcagagccagatgcagagacagctgctgagcaaccccgagatgatggtgcagatcatggagaaccccttcgtgcagagcatgctgagcaaccccgacctgatgagacagctgatcatggccaacccccagatgcagcagctgatccagagaaaccccgagatcagccacatgctgaacaaccccgacatcatgagacagaccctggagctggccagaaaccccgccatgatgcaggagatgatgagaaaccaggacagagccctgagcaacctggagagcatccccggcggctacaacgccctgagaagaatgtacaccgacatccaggagcccatgctgagcgccgcccaggagcagttcggcggcaaccccttcgccagcctggtgagcaacaccagcagcggcgagggcagccagcccagcagaaccgagaacagagaccccctgcccaacccctgggccccccagaccagccagagcagcagcgccagcagcggcaccgccagcaccgtgggcggcaccaccggcagcaccgccagcggcaccagcggccagagcaccaccgcccccaacctggtgcccggcgtgggcgccagcatgttcaacacccccggcatgcagagcctgctgcagcagatcaccgagaacccccagctgatgcagaacatgctgagcgccccctacatgagaagcatgatgcagagcctgagccagaaccccgacctggccgcccagatgatgctgaacaaccccctgttcgccggcaacccccagctgcaggagcagatgagacagcagctgcccaccttcctgcagcagatgcagaaccccgacaccctgagcgccatgagcaaccccagagccatgcaggccctgctgcagatccagcagggcctgcagaccctggccaccgaggcccccggcctgatccccggcttcacccccggcctgggcgccctgggcagcaccggcggcagcagcggcaccaacggcagcaacgccacccccagcgagaacaccagccccaccgccggcaccaccgagcccggccaccagcagttcatccagcagatgctgcaggccctggccggcgtgaacccccagctgcagaaccccgaggtgagattccagcagcagctggagcagctgagcgccatgggcttcctgaacagagaggccaacctgcaggccctgatcgccaccggcggcgacatcaacgccgccatcgagagactgctgggcagccagcccagctag

SEQ ID NO: 104251 - DNA, 1875 bp, synthetic construct
  misc_feature 1..1875: note = Description of Artificial Sequence: Synthetic coding sequence
  source 1..1875: mol_type = other DNA
atggccgagaacggcgagagcagcggcccccccagacccagcagaggccccgccgccgcccagggcagcgccgccgcccccgccgagcccaagatcatcaaggtgaccgtgaagacccccaaggagaaggaggagttcgccgtgcccgagaacagcagcgtgcagcagttcaaggaggccatcagcaagagattcaagagccagaccgaccagctggtgctgatcttcgccggcaagatcctgaaggaccaggacaccctgatccagcacggcatccacgacggcctgaccgtgcacctggtgatcaagagccagaacagaccccagggccagagcacccagcccagcaacgccgccggcaccaacaccaccagcgccagcacccccagaagcaacagcacccccatcagcaccaacagcaaccccttcggcctgggcagcctgggcggcctggccggcctgagcagcctgggcctgagcagcaccaacttcagcgagctgcagagccagatgcagcagcagctgatggccagccccgagatgatgatccagatcatggagaaccccttcgtgcagagcatgctgagcaaccccgacctgatgagacagctgatcatggccaacccccagatgcagcagctgatccagagaaaccccgagatcagccacctgctgaacaaccccgacatcatgagacagaccctggagatcgccagaaaccccgccatgatgcaggagatgatgagaaaccaggacctggccctgagcaacctggagagcatccccggcggctacaacgccctgagaagaatgtacaccgacatccaggagcccatgctgaacgccgcccaggagcagttcggcggcaaccccttcgccagcgtgggcagcagcagcagcagcggcgagggcacccagcccagcagaaccgagaacagagaccccctgcccaacccctgggcccccccccccgccacccagagcagcgccaccaccagcaccaccaccagcaccggcagcggcagcggcaacagcagcagcaacgccaccggcaacaccgtggccgccgccaactacgtggccagcatcttcagcacccccggcatgcagagcctgctgcagcagatcaccgagaacccccagctgatccagaacatgctgagcgccccctacatgagaagcatgatgcagagcctgagccagaaccccgacctggccgcccagatgatgctgaacagccccctgttcaccgccaacccccagctgcaggagcagatgagaccccagctgcccgccttcctgcagcagatgcagaaccccgacaccctgagcgccatgagcaaccccagagccatgcaggccctgatgcagatccagcagggcctgcagaccctggccaccgaggcccccggcctgatccccagcttcacccccggcgtgggcgtgggcgtgctgggcaccgccatcggccccgtgggccccgtgacccccatcggccccatcggccccatcgtgcccttcacccccatcggccccatcggccccatcggccccaccggccccgccgccccccccggcagcaccggcagcggcggccccaccggccccaccgtgagcagcgccgcccccagcgagaccaccagccccaccagcgagagcggccccaaccagcagttcatccagcagatggtgcaggccctggccggcgccaacgccccccagctgcccaaccccgaggtgagattccagcagcagctggagcagctgaacgccatgggcttcctgaacagagaggccaacctgcaggccctgatcgccaccggcggcgacatcaacgccgccatcgagagactgctgggcagccagcccagctag

SEQ ID NO: 104252 - DNA, 1467 bp, synthetic construct
  misc_feature 1..1467: note = Description of Artificial Sequence: Synthetic coding sequence
  source 1..1467: mol_type = other DNA
atggccgagaacggcgagagcagcggcccccccagacccagcagaggccccgccgccgcccagggcagcgccgccgcccccgccgagcccaagatcatcaaggtgaccgtgaagacccccaaggagaaggaggagttcgccgtgcccgagaacagcagcgtgcagcagttcaaggaggccatcagcaagagattcaagagccagaccgaccagctggtgctgatcttcgccggcaagatcctgaaggaccaggacaccctgatccagcacggcatccacgacggcctgaccgtgcacctggtgatcaagagccagaacagaccccagggccagagcacccagcccagcaacgccgccggcaccaacaccaccagcgccagcacccccagaagcaacagcacccccatcagcaccaacagcaaccccttcggcctgggcagcctgggcggcctggccggcctgagcagcctgggcctgagcagcaccaacttcagcgagctgcagagccagatgcagcagcagctgatggccagccccgagatgatgatccagatcatggagaaccccttcgtgcagagcatgctgagcaaccccgacctgatgagacagctgatcatggccaacccccagatgcagcagctgatccagagaaaccccgagatcagccacctgctgaacaaccccgacatcatgagacagaccctggagatcgccagaaaccccgccatgatgcaggagatgatgagaaaccaggacctggccctgagcaacctggagagcatccccggcggctacaacgccctgagaagaatgtacaccgacatccaggagcccatgctgaacgccgcccaggagcagttcggcggcaaccccttcgccagcgtgggcagcagcagcagcagcggcgagggcacccagcccagcagaaccgagaacagagaccccctgcccaacccctgggcccccccccccgccacccagagcagcgccaccaccagcaccaccaccagcaccggcagcggcagcggcaacagcagcagcaacgccaccggcaacaccgtggccgccgccaactacgtggccagcatcttcagcacccccggcatgcagagcctgctgcagcagatcaccgagaacccccagctgatccagaacatgctgagcgccccctacatgagaagcatgatgcagagcctgagccagaaccccgacctggccgcccagatgatgctgaacagccccctgttcaccgccaacccccagctgcaggagcagatgagaccccagctgcccgccttcctgcagcagatgcagaaccccgacaccctgagcgccatgagcaaccccaccagcagcagcttcagcaagtggtgcagaccctggctggagcagatgctgcacagctgcagaatccagaagagcgacttcagcaacaactggaacagcagcacccagtggggcagctag

SEQ ID NO: 104253 - DNA, 1968 bp, synthetic construct
  misc_feature 1..1968: note = Description of Artificial Sequence: Synthetic coding sequence
  source 1..1968: mol_type = other DNA
atggccaagggcggcgaggccctgccccagggcagccccgcccccgtgcaggacccccacctgatcaaggtgaccgtgaagacccccaaggacaaggaggacttcagcgtgaccgacacctgcaccatccagcagctgaaggaggagatcagccagagattcaaggcccaccccgaccagctggtgctgatcttcgccggcaagatcctgaaggaccccgacagcctggcccagtgcggcgtgagagacggcctgaccgtgcacctggtgatcaagagacagcacagagccatgggcaacgagtgccccgccgccagcgtgcccacccagggccccagccccggcagcctgccccagcccagcagcatctaccccgccgacggcccccccgccttcagcctgggcctgctgaccggcctgagcagactgggcctggcctacagaggcttccccgaccagcccagcagcctgatgagacagcacgtgagcgtgcccgagttcgtgacccagctgatcgacgaccccttcatccccggcctgctgagcaacaccggcctggtgagacagctggtgctggacaacccccacatgcagcagctgatccagcacaaccccgagatcggccacatcctgaacaaccccgagatcatgagacagaccctggagttcctgagaaaccccgccatgatgcaggagatgatcagaagccaggacagagtgctgagcaacctggagagcatccccggcggctacaacgtgctgtgcaccatgtacaccgacatcatggaccccatgctgaacgccgtgcaggagcagttcggcggcaaccccttcgccaccgccaccaccgacaacgccaccaccaccaccagccagcccagcagaatggagaactgcgaccccctgcccaacccctggaccagcacccacggcggcagcggcagcagacagggcagacaggacggcgaccaggacgcccccgacatcagaaacagattccccaacttcctgggcatcatcagactgtacgactacctgcagcagctgcacgagaacccccagagcctgggcacctacctgcagggcaccgccagcgccctgagccagagccaggagcccccccccagcgtgaacagagtgccccccagcagccccagcagccaggagcccggcagcggccagcccctgcccgaggagagcgtggccatcaagggcagaagcagctgccccgccttcctgagataccccaccgagaacagcaccggccagggcggcgaccaggacggcgccggcaagagcagcaccggccacagcaccaacctgcccgacctggtgagcggcctgggcgacagcgccaacagagtgcccttcgcccccctgagcttcagccccaccgccgccatccccggcatccccgagcccccctggctgcccagccccgcctaccccagaagcctgagacccgacggcatgaaccccgccccccagctgcaggacgagatccagccccagctgcccctgctgatgcacctgcaggccgccatggccaaccccagagccctgcaggccctgagacagatcgagcagggcctgcaggtgctggccaccgaggcccccagactgctgctgtggttcatgccctgcctggccggcaccggcagcgtggccggcggcatcgagagcagagaggaccccctgatgagcgaggaccccctgcccaaccccccccccgaggtgttccccgccctggacagcgccgagctgggcttcctgagcccccccttcctgcacatgctgcaggacctggtgagcaccaacccccagcagctgcagcccgaggcccacttccaggtgcagctggagcagctgagaagcatgggcttcctgaacagagaggccaacctgcaggccctgatcgccaccggcggcgacgtggacgccgccgtggagaagctgagacagagctag

SEQ ID NO: 104254 - DNA, 666 bp, synthetic construct
  misc_feature 1..666: note = Description of Artificial Sequence: Synthetic coding sequence
  source 1..666: mol_type = other DNA
atggccaagggcggcgaggccctgccccagggcagccccgcccccgtgcaggacccccacctgatcaaggtgaccgtgaagacccccaaggacaaggaggacttcagcgtgaccgacacctgcaccatccagcagctgaaggaggagatcagccagagattcaaggcccaccccgaccagctggtgctgatcttcgccggcaagatcctgaaggaccccgacagcctggcccagtgcggcgtgagagacggcctgaccgtgcacctggtgatcaagagacagcacagagccatgggcaacgagtgccccgccgccagcgtgcccacccagggccccagccccggcagcctgccccagcccagcagcatctaccccgccgacggcccccccgccttcagcctgggcctgctgaccggcctgagcagactgggcctggcctacagaggcttccccgaccagcccagcagcctgatgagacagcacgtgagcgtgcccgagttcgtgacccagctgatcgacgaccccttcatccccggcctgctgagcaacaccggcctggtgagacagctggtgctggacaacccccacatgcagcagctgatccagcacaaccccgagatcggccacatcctgaacaaccccgagatcatgagacagaccctgtag

SEQ ID NO: 104255 - DNA, 681 bp, synthetic construct
  misc_feature 1..681: note = Description of Artificial Sequence: Synthetic coding sequence
  source 1..681: mol_type = other DNA
atggccgagcccagcggcgccgagaccagaccccccatcagagtgaccgtgaagacccccaaggacaaggaggagatcgtgatctgcgacagagccagcgtgaaggagttcaaggaggagatcagcagaagattcaaggcccagcaggaccagctggtgctgatcttcgccggcaagatcctgaaggacggcgacaccctgaaccagcacggcatcaaggacggcctgaccgtgcacctggtgatcaagaccccccagaaggcccaggaccccgccccccccgccgcccccagcctgcccgccgccgacgccgagcccagagtgaccctgcacccctaccagagccccagccacgccggcatcgccgccgaccccgccggcaccaccgacctggccgacagaggcccctgggccggcacccagccctggctgctgtgggacatccccgaccccagcaccctgagcagacagcagagaagagtgtacgccagaggcccccacttcctgaccagccacgccagccacatcttcagcaacagaggcttccagagacccgccgccacccacgccgccgacgaccccgccttcggctggaagtggaagctgaccggcgccgacgccagaagcgagatcagcgccgccgccggcgccgcccagctgcacggcctgcaccagagctag

SEQ ID NO: 104256 - DNA, 1806 bp, synthetic construct
  misc_feature 1..1806: note = Description of Artificial Sequence: Synthetic coding sequence
  source 1..1806: mol_type = other DNA
atggccgagcccagcggcgccgagaccagaccccccatcagagtgaccgtgaagacccccaaggacaaggaggagatcgtgatctgcgacagagccagcgtgaaggagttcaaggaggagatcagcagaagattcaaggcccagcaggaccagctggtgctgatcttcgccggcaagatcctgaaggacggcgacaccctgaaccagcacggcatcaaggacggcctgaccgtgcacctggtgatcaagaccccccagaaggcccaggaccccgccgccgccaccgccagcagccccagcacccccgaccccgccagcgcccccagcaccacccccgccagccccgccacccccgcccagcccagcaccagcggcagcgccagcagcgacgccggcagcggcagcagaagaagcagcggcggcggccccagccccggcgccggcgagggcagccccagcgccaccgccagcatcctgagcggcttcggcggcatcctgggcctgggcagcctgggcctgggcagcgccaacttcatggagctgcagcagcagatgcagagacagctgatgagcaaccccgagatgctgagccagatcatggagaaccccctggtgcaggacatgatgagcaaccccgacctgatgagacacatgatcatggccaacccccagatgcagcagctgatggagagaaaccccgagatcagccacatgctgaacaaccccgagctgatgagacagaccatggagctggccagaaaccccgccatgatgcaggagatgatgagaaaccaggacagagccctgagcaacctggagagcatccccggcggctacaacgccctgagaagaatgtacaccgacatccaggagcccatgttcagcgccgccagagagcagttcggcaacaaccccttcagcagcctggccggcaacagcgacagcagcagcagccagcccctgagaaccgagaacagagagcccctgcccaacccctggagccccagcccccccaccagccaggcccccggcagcggcggcgagggcaccggcggcagcggcaccagccaggtgcaccccaccgtgagcaaccccttcggcatcaacgccgccagcctgggcagcggcatgttcaacagccccgagatgcaggccctgctgcagcagatcagcgagaacccccagctgatgcagaacgtgatcagcgccccctacatgagaagcatgatgcagaccctggcccagaaccccgacttcgccgcccagatgatggtgaacgtgcccctgttcgccggcaacccccagctgcaggagcagctgagactgcagctgcccgtgttcctgcagcagatgcagaaccccgagagcctgagcatcctgaccaaccccagagccatgcaggccctgctgcagatccagcagggcctgcagaccctgcagaccgaggcccccggcctggtgcccagcctgggcagcttcggcatcagcagaacccccgcccccagcgccggcagcaacgccggcagcacccccgaggcccccaccagcagccccgccacccccgccaccagcagccccaccggcgccagcagcgcccagcagcagctgatgcagcagatgatccagctgctggccggcagcggcaacagccaggtgcagacccccgaggtgagattccagcagcagctggagcagctgaacagcatgggcttcatcaacagagaggccaacctgcaggccctgatcgccaccggcggcgacatcaacgccgccatcgagagactgctgggcagccagctgagctag

SEQ ID NO: 104257 - DNA, 336 bp, synthetic construct
  misc_feature 1..336: note = Description of Artificial Sequence: Synthetic coding sequence
  source 1..336: mol_type = other DNA
atggccggcaagcaggccgtgagcgccagcggcaagtggctggacggcatcagaaagtggtactacaacgccgccggcttcaacaagctgggcctgatgagagacgacaccatctacgaggacgaggacgtgaaggaggccatcagaagactgcccgagaacctgtacaacgacagaatgttcagaatcaagagagccctggacctgaacctgaagcaccagatcctgcccaaggagcagtggaccaagtacgaggaggagaacttctacctggagccctacctgaaggaggtgatcagagagagaaaggagagagaggagtgggccaagaagtag

SEQ ID NO: 104258 - DNA, 1443 bp, synthetic construct
  misc_feature 1..1443: note = Description of Artificial Sequence: Synthetic coding sequence
  source 1..1443: mol_type = other DNA
atggccgccagcgtggtgtgcagagccgccaccgccggcgcccaggtgctgctgagagccagaagaagccccgccctgctgagaacccccgccctgagaagcaccgccaccttcgcccaggccctgcagttcgtgcccgagacccaggtgagcctgctggacaacggcctgagagtggccagcgagcagagcagccagcccacctgcaccgtgggcgtgtggatcgacgtgggcagcagattcgagaccgagaagaacaacggcgccggctacttcctggagcacctggccttcaagggcaccaagaacagacccggcagcgccctggagaaggaggtggagagcatgggcgcccacctgaacgcctacagcaccagagagcacaccgcctactacatcaaggccctgagcaaggacctgcccaaggccgtggagctgctgggcgacatcgtgcagaactgcagcctggaggacagccagatcgagaaggagagagacgtgatcctgagagagatgcaggagaacgacgccagcatgagagacgtggtgttcaactacctgcacgccaccgccttccagggcacccccctggcccaggccgtggagggccccagcgagaacgtgagaaagctgagcagagccgacctgaccgagtacctgagcacccactacaaggcccccagaatggtgctggccgccgccggcggcgtggagcaccagcagctgctggacctggcccagaagcacctgggcggcatcccctggacctacgccgaggacgccgtgcccaccctgaccccctgcagattcaccggcagcgagatcagacacagagacgacgccctgcccttcgcccacgtggccatcgccgtggagggccccggctgggccagccccgacaacgtggccctgcaggtggccaacgccatcatcggccactacgactgcacctacggcggcggcgtgcacctgagcagccccctggccagcggcgccgtggccaacaagctgtgccagagcttccagaccttcagcatctgctacgccgagaccggcctgctgggcgcccacttcgtgtgcgacagaatgaagatcgacgacatgatgttcgtgctgcagggccagtggatgagactgtgcaccagcgccaccgagagcgaggtggccagaggcaagaacatcctgagaaacgccctggtgagccacctggacggcaccacccccgtgtgcgaggacatcggcagaagcctgctgacctacggcagaagaatccccctggccgagtgggagagcagaatcgccgaggtggacgccagcgtggtgagagagatctgcagcaagtacatctacgaccagtgccccgccgtggccggctacggccccatcgagcagctgcccgactacaacagaatcagaagcggcatgttctggctgagattctag

SEQ ID NO: 104259 - DNA, 1362 bp, synthetic construct
  misc_feature 1..1362: note = Description of Artificial Sequence: Synthetic coding sequence
  source 1..1362: mol_type = other DNA
atgaagctgctgaccagagccggcagcttcagcagattctacagcctgaaggtggcccccaaggtgaaggccaccgccgcccccgccggcgcccccccccagccccaggacctggagttcaccaagctgcccaacggcctggtgatcgccagcctggagaactacagccccgtgagcagaatcggcctgttcatcaaggccggcagcagatacgaggacttcagcaacctgggcaccacccacctgctgagactgaccagcagcctgaccaccaagggcgccagcagcttcaagatcaccagaggcatcgaggccgtgggcggcaagctgagcgtgaccgccaccagagagaacatggcctacaccgtggagtgcctgagaggcgacgtggacatcctgatggagttcctgctgaacgtgaccaccgcccccgagttcagaagatgggaggtggccgacctgcagccccagctgaagatcgacaaggccgtggccttccagaacccccagacccacgtgatcgagaacctgcacgccgccgcctacagaaacgccctggccaaccccctgtactgccccgactacagaatcggcaaggtgaccagcgaggagctgcactacttcgtgcagaaccacttcaccagcgccagaatggccctgatcggcctgggcgtgagccaccccgtgctgaagcaggtggccgagcagttcctgaacatgagaggcggcctgggcctgagcggcgccaaggccaactacagaggcggcgagatcagagagcagaacggcgacagcctggtgcacgccgccttcgtggccgagagcgccgtggccggcagcgccgaggccaacgccttcagcgtgctgcagcacgtgctgggcgccggcccccacgtgaagagaggcagcaacaccaccagccacctgcaccaggccgtggccaaggccacccagcagcccttcgacgtgagcgccttcaacgccagctacagcgacagcggcctgttcggcatctacaccatcagccaggccaccgccgccggcgacgtgatcaaggccgcctacaaccaggtgaagaccatcgcccagggcaacctgagcaacaccgacgtgcaggccgccaagaacaagctgaaggccggctacctgatgagcgtggagagcagcgagtgcttcctggaggaggtgggcagccaggccctggtggccggcagctacatgccccccagcaccgtgctgcagcagatcgacagcgtggccaacgccgacatcatcaacgccgccaagaagttcgtgagcggccagaagagcatggccgccagcggcaacctgggccacacccccttcgtggacgagctgtag

SEQ ID NO: 104260 - DNA, 276 bp, synthetic construct
  misc_feature 1..276: note = Description of Artificial Sequence: Synthetic coding sequence
  source 1..276: mol_type = other DNA
atgggcctggaggacgagcagaagatgctgaccgagagcggcgaccccgaggaggaggaggaggaggaggaggagctggtggaccccctgaccaccgtgagagagcagtgcgagcagctggagaagtgcgtgaaggccagagagagactggagctgtgcgacgagagagtgagcagcagaagccacaccgaggaggactgcaccgaggagctgttcgacttcctgcacgccagagaccactgcgtggcccacaagctgttcaacaacctgaagtag

SEQ ID NO: 104261 - DNA, 249 bp, synthetic construct
  misc_feature 1..249: note = Description of Artificial Sequence: Synthetic coding sequence
  source 1..249: mol_type = other DNA
atgggcagagagttcggcaacctgaccagaatgagacacgtgatcagctacagcctgagccccttcgagcagagagcctacccccacgtgttcaccaagggcatccccaacgtgctgagaagaatcagagagagcttcttcagagtggtgccccagttcgtggtgttctacctgatctacacctggggcaccgaggagttcgagagaagcaagagaaagaaccccgccgcctacgagaacgacaagtag

SEQ ID NO: 104262 - DNA, 249 bp, synthetic construct; identical to SEQ ID NO: 104261
  misc_feature 1..249: note = Description of Artificial Sequence: Synthetic coding sequence
  source 1..249: mol_type = other DNA

SEQ ID NO: 104263 - DNA, 249 bp, synthetic construct; identical to SEQ ID NO: 104261
  misc_feature 1..249: note = Description of Artificial Sequence: Synthetic coding sequence
  source 1..249: mol_type = other DNA

SEQ ID NO: 104264 - DNA, 387 bp, synthetic construct
  misc_feature 1..387: note = Description of Artificial Sequence: Synthetic coding sequence
  source 1..387: mol_type = other DNA
atgcagatcttcgtgaagaccctgaccggcaagaccatcaccctggaggtggagcccagcgacaccatcgagaacgtgaaggccaagatccaggacaaggagggcatcccccccgaccagcagagactgatcttcgccggcaagcagctggaggacggcagaaccctgagcgactacaacatccagaaggagagcaccctgcacctggtgctgagactgagaggcggcatcatcgagcccagcctgagacagctggcccagaagtacaactgcgacaagatgatctgcagaaagtgctacgccagactgcaccccagagccgtgaactgcagaaagaagaagtgcggccacaccaacaacctgagacccaagaagaaggtgaagtag

SEQ ID NO: 104265 - DNA, 387 bp, synthetic construct; identical to SEQ ID NO: 104264
  misc_feature 1..387: note = Description of Artificial Sequence: Synthetic coding sequence
  source 1..387: mol_type = other DNA

SEQ ID NO: 104266 - DNA, 1872 bp, synthetic construct
  misc_feature 1..1872: note = Description of Artificial Sequence: Synthetic coding sequence
  source 1..1872: mol_type = other DNA
atggccgccggcgagacccagctgtacgccaaggtgagcaacaagctgaagagcagaagcagccccagcctgctggagcccctgctggccatgggcttccccgtgcacaccgccctgaaggccctggccgccaccggcagaaagaccgccgaggaggccctggcctggctgcacgaccactgcaacgaccccagcctggacgaccccatcccccaggagtacgccctgttcctgtgccccaccggccccctgctggagaagctgcaggagttctggagagagagcaagagacagtgcgccaagaacagagcccacgaggtgttcccccacgtgaccctgtgcgacttcttcacctgcgaggaccagaaggtggagtgcctgtacgaggccctgaagagagccggcgacagactgctgggcagcttccccaccgccgtgcccctggccctgcacagcagcatcagctacctgggcttcttcgtgagcggcagccccgccgacgtgatcagagagttcgccatgaccttcgccaccgaggccagcctgctggccgactgcagcgtgaagccctgcaccaagcagctgcacctgaccctggcccacaagttctacccccaccaccagagaaccctggagcagctggccagagccatccccctgggccacagctgccagtggaccgccgccctgtacagcagagacatgagattcgtgcactaccagaccctgagagccctgttccagtacaagccccagaacgtggacgagctgaccctgagccccggcgactacatcttcgtggaccccacccagcaggacgaggccagcgagggctgggtgatcggcatcagccagagaaccggctgcagaggcttcctgcccgagaactacaccgacagagccagcgagagcgacacctgggtgaagcacagaatgtacaccttcagcctggccaccgacctgaacagcagaaaggacggcgaggccagcagcagatgcagcggcgagttcctgccccagaccgccagaagcctgagcagcctgcaggccctgcaggccaccgtggccagaaagagcgtgctggtggtgagacacggcgagagagtggaccagatcttcggcaaggcctggctgcagcagtgcagcacccccgacggcaagtactacagacccgacctgaacttcccctgcagcctgcccagaagaagcagaggcatcaaggacttcgagaacgacccccccctgagcagctgcggcatcttccagagcagaatcgccggcgacgccctgctggacagcggcatcagaatcagcagcgtgttcgccagccccgccctgagatgcgtgcagaccgccaagctgatcctggaggagctgaagctggagaagaagatcaagatcagagtggagcccggcatcttcgagtggaccaagtgggaggccggcaagaccacccccaccctgatgagcctggaggagctgaaggaggccaacttcaacatcgacaccgactacagacccgccttccccctgagcgccctgatgcccgccgagagctaccaggagtacatggacagatgcaccgccagcatggtgcagatcgtgaacacctgcccccaggacaccggcgtgatcctgatcgtgagccacggcagcaccctggacagctgcaccagacccctgctgggcctgccccccagagagtgcggcgacttcgcccagctggtgagaaagatccccagcctgggcatgtgcttctgcgaggagaacaaggaggagggcaagtgggagctggtgaacccccccgtgaagaccctgacccacggcgccaacgccgccttcaactggagaaactggatcagcggcaactag

SEQ ID NO: 104267 - DNA, 1986 bp, synthetic construct
  misc_feature 1..1986: note = Description of Artificial Sequence: Synthetic coding sequence
  source 1..1986: mol_type = other DNA
atggccgccggcgagacccagctgtacgccaaggtgagcaacaagctgaagagcagaagcagccccagcctgctggagcccctgctggccatgggcttccccgtgcacaccgccctgaaggccctggccgccaccggcagaaagaccgccgaggaggccctggcctggctgcacgaccactgcaacgaccccagcctggacgaccccatcccccaggagtacgccctgttcctgtgccccaccggccccctgctggagaagctgcaggagttctggagagagagcaagagacagtgcgccaagaacagagcccacgaggtgttcccccacgtgaccctgtgcgacttcttcacctgcgaggaccagaaggtggagtgcctgtacgaggccctgaagagagccggcgacagactgctgggcagcttccccaccgccgtgcccctggccctgcacagcagcatcagctacctgggcttcttcgtgagcggcagccccgccgacgtgatcagagagttcgccatgaccttcgccaccgaggccagcctgctggccggcaccagcgtgagcagattctggatcttcagccaggtgcccggccacggccccaacctgagactgagcaacctgaccagagccagcttcgtgagccactacatcctgcagaagtactgcagcgtgaagccctgcaccaagcagctgcacctgaccctggcccacaagttctacccccaccaccagagaaccctggagcagctggccagagccatccccctgggccacagctgccagtggaccgccgccctgtacagcagagacatgagattcgtgcactaccagaccctgagagccctgttccagtacaagccccagaacgtggacgagctgaccctgagccccggcgactacatcttcgtggaccccacccagcaggacgaggccagcgagggctgggtgatcggcatcagccagagaaccggctgcagaggcttcctgcccgagaactacaccgacagagccagcgagagcgacacctgggtgaagcacagaatgtacaccttcagcctggccaccgacctgaacagcagaaaggacggcgaggccagcagcagatgcagcggcgagttcctgccccagaccgccagaagcctgagcagcctgcaggccctgcaggccaccgtggccagaaagagcgtgctggtggtgagacacggcgagagagtggaccagatcttcggcaaggcctggctgcagcagtgcagcacccccgacggcaagtactacagacccgacctgaacttcccctgcagcctgcccagaagaagcagaggcatcaaggacttcgagaacgacccccccctgagcagctgcggcatcttccagagcagaatcgccggcgacgccctgctggacagcggcatcagaatcagcagcgtgttcgccagccccgccctgagatgcgtgcagaccgccaagctgatcctggaggagctgaagctggagaagaagatcaagatcagagtggagcccggcatcttcgagtggaccaagtgggaggccggcaagaccacccccaccctgatgagcctggaggagctgaaggaggccaacttcaacatcgacaccgactacagacccgccttccccctgagcgccctgatgcccgccgagagctaccaggagtacatggacagatgcaccgccagcatggtgcagatcgtgaacacctgcccccaggacaccggcgtgatcctgatcgtgagccacggcagcaccctggacagctgcaccagacccctgctgggcctgccccccagagagtgcggcgacttcgcccagctggtgagaaagatccccagcctgggcatgtgcttctgcgaggagaacaaggaggagggcaagtgggagctggtgaacccccccgtgaagaccctgacccacggcgccaacgccgccttcaactggagaaactggatcagcggcaactag

SEQ ID NO: 104268 - DNA, 369 bp, synthetic construct
  misc_feature 1..369: note = Description of Artificial Sequence: Synthetic coding sequence
  source 1..369: mol_type = other DNA
atggccgccggcgagacccagctgtacgccaaggtgagcaacaagctgaagagcagaagcagccccagcctgctggagcccctgctggccatgggcttccccgtgcacaccgccctgaaggccctggccgccaccggcagaaagaccgccgaggaggccctggcctggctgcacgaccactgcaacgaccccagcctggacgaccccatcccccaggagtacgccctgttcctgtgccccaccggccccctgctggagaagctgcaggagttctggagagagagcaagagacagtgcgccaagaacagagcccacgaggtgttcccccacgtgaccctgtgcgacttcttcaccggccccgccgtgtag

SEQ ID NO: 104269 - DNA, 1581 bp, synthetic construct
  misc_feature 1..1581: note = Description of Artificial Sequence: Synthetic coding sequence
  source 1..1581: mol_type = other DNA
atggccgccggcgagacccagctgtacgccaaggtgagcaacaagctgaagagcagaagcagccccagcctgctggagcccctgctggccatgggcttccccgtgcacaccgccctgaaggccctggccgccaccggcagaaagaccgccgaggaggccctggcctggctgcacgaccactgcaacgaccccagcctggacgaccccatcccccaggagtacgccctgttcctgtgccccaccggccccctgctggagaagctgcaggagttctggagagagagcaagagacagtgcgccaagaacagagcccacgaggtgttcccccacgtgaccctgtgcgacttcttcacctgcgaggaccagaaggtggagtgcctgtacgaggccctgaagagagccggcgacagactgctgggcagcttccccaccgccgtgcccctggccctgcacagcagcatcagctacctgggcttcttcgtgagcggcagccccgccgacgtgatcagagagttcgccatgaccttcgccaccgaggccagcctgctggccgactgcagcgtgaagccctgcaccaagcagctgcacctgaccctggcccacaagttctacccccaccaccagagaaccctggagcagctggccagagccatccccctgggccacagctgccagtggaccgccgccctgtacagcagagacatgagattcgtgcactaccagaccctgagagccctgttccagtacaagccccagaacgtggacgagctgaccctgagccccggcgactacatcttcgtggaccccacccagcaggacgaggccagcgagggctgggtgatcggcatcagccagagaaccggctgcagaggcttcctgcccgagaactacaccgacagagccagcgagagcgacacctgggtgaagcacagaatgtacaccttcagcctggccaccgacctgaacagcagaaaggacggcgaggccagcagcagatgcagcggcgagttcctgccccagaccgccagaagcctgagcagcctgcaggccctgcaggccaccgtggccagaaagagcgtgctggtggtgagacacggcgagagagtggaccagatcttcggcaaggcctggctgcagcagtgcagcacccccgacggcaagtactacagacccgacctgaacttcccctgcagcctgcccagaagaagcagaggcatcaaggacttcgagaacgacccccccctgagcagctgcggcatcttccagagcagaatcgccggcgacgccctgctggacagcggcatcagaatcagcagcgtgttcgccagccccgccctgagatgcgtgcagaccgccaagctgatcctggaggagctgaagctggagaagaagatcaagatcagagtggagcccggcatcttcgagtggaccaagtgggaggccggcaagaccacccccaccctgatgagcctggaggagctgaaggaggccaacttcaacatcgacaccgactacagaagcctgccctgggcctgcgccagcgtgaagaagatcaagagaaaggagaacggcagctggtag

SEQ ID NO: 104270 - DNA, 1950 bp, synthetic construct
  misc_feature 1..1950: note = Description of Artificial Sequence: Synthetic coding sequence
  source 1..1950: mol_type = other DNA
atggcccagtacggccaccccagccccctgggcatggccgccagagaggagctgtacagcaaggtgacccccagaagaaacagacagcagagacccggcaccatcaagcacggcagcgccctggacgtgctgctgagcatgggcttccccagagccagagcccagaaggccctggccagcaccggcggcagaagcgtgcaggccgcctgcgactggctgttcagccacgtgggcgaccccttcctggacgaccccctgcccagagagtacgtgctgtacctgagacccaccggccccctggcccagaagctgagcgacttctggcagcagagcaagcagatctgcggcaagaacaaggcccacaacatcttcccccacatcaccctgtgccagttcttcatgtgcgaggacagcaaggtggacgccctgggcgaggccctgcagaccaccgtgagcagatggaagtgcaagttcagcgcccccctgcccctggagctgtacaccagcagcaacttcatcggcctgttcgtgaaggaggacagcgccgaggtgctgaagaagttcgccgccgacttcgccgccgaggccgccagcaagaccgaggtgcacgtggagccccacaagaagcagctgcacgtgaccctggcctaccacttccaggccagccacctgcccaccctggagaagctggcccagaacatcgacgtgaagctgggctgcgactgggtggccaccatcttcagcagagacatcagattcgccaaccacgagaccctgcaggtgatctacccctacaccccccagaacgacgacgagctggagctggtgcccggcgacttcatcttcatgagccccatggagcagaccagcaccagcgagggctggatctacggcaccagcctgaccaccggctgcagcggcctgctgcccgagaactacatcaccaaggccgacgagtgcagcacctggatcttccacggcagctacagcatcctgaacaccagcagcagcaacagcctgaccttcggcgacggcgtgctggagagaagaccctacgaggaccagggcctgggcgagaccacccccctgaccatcatctgccagcccatgcagcccctgagagtgaacagccagcccggcccccagaagagatgcctgttcgtgtgcagacacggcgagagaatggacgtggtgttcggcaagtactggctgagccagtgcttcgacgccaagggcagatacatcagaaccaacctgaacatgccccacagcctgccccagagaagcggcggcttcagagactacgagaaggacgcccccatcaccgtgttcggctgcatgcaggccagactggtgggcgaggccctgctggagagcaacaccatcatcgaccacgtgtactgcagccccagcctgagatgcgtgcagaccgcccacaacatcctgaagggcctgcagcaggagaaccacctgaagatcagagtggagcccggcctgttcgagtggaccaagtgggtggccggcagcaccctgcccgcctggatcccccccagcgagctggccgccgccaacctgagcgtggacaccacctacagaccccacatccccatcagcaagctggtggtgagcgagagctacgacacctacatcagcagaagcttccaggtgaccaaggagatcatcagcgagtgcaagagcaagggcaacaacatcctgatcgtggcccacgccagcagcctggaggcctgcacctgccagctgcagggcctgagcccccagaacagcaaggacttcgtgcagatggtgagaaagatcccctacctgggcttctgcagctgcgaggagctgggcgagaccggcatctggcagctgaccgacccccccatcctgcccctgacccacggccccaccggcggcttcaactggagagagaccctgctgcaggagtag

SEQ ID NO: 104271 - DNA, 1509 bp, synthetic construct
  misc_feature 1..1509: note = Description of Artificial Sequence: Synthetic coding sequence
  source 1..1509: mol_type = other DNA
atggccagcaagaagctgggcgccgacttccacggcaccttcagctacctggacgacgtgcccttcaagaccggcgacaagttcaagacccccgccaaggtgggcctgcccatcggcttcagcctgcccgactgcctgcaggtggtgagagaggtgcagtacgacttcagcctggagaagaagaccatcgagtgggccgaggagatcaagaagatcgaggaggccgagagagaggccgagtgcaagatcgccgaggccgaggccaaggtgaacagcaagagcggccccgagggcgacagcaagatgagcttcagcaagacccacagcaccgccaccatgcccccccccatcaaccccatcctggccagcctgcagcacaacagcatcctgacccccaccagagtgagcagcagcgccaccaagcagaaggtgctgagccccccccacatcaaggccgacttcaacctggccgacttcgagtgcgaggaggaccccttcgacaacctggagctgaagaccatcgacgagaaggaggagctgagaaacatcctggtgggcaccaccggccccatcatggcccagctgctggacaacaacctgcccagaggcggcagcggcagcgtgctgcaggacgaggaggtgctggccagcctggagagagccaccctggacttcaagcccctgcacaagcccaacggcttcatcaccctgccccagctgggcaactgcgagaagatgagcctgagcagcaaggtgagcctgccccccatccccgccgtgagcaacatcaagagcctgagcttccccaagctggacagcgacgacagcaaccagaagaccgccaagctggccagcaccttccacagcaccagctgcctgagaaacggcaccttccagaacagcctgaagcccagcacccagagcagcgccagcgagctgaacggccaccacaccctgggcctgagcgccctgaacctggacagcggcaccgagatgcccgccctgaccagcagccagatgcccagcctgagcgtgctgagcgtgtgcaccgaggagagcagcccccccaacaccggccccaccgtgaccccccccaacttcagcgtgagccaggtgcccaacatgcccagctgcccccaggcctacagcgagctgcagatgctgagccccagcgagagacagtgcgtggagaccgtggtgaacatgggctacagctacgagtgcgtgctgagagccatgaagaagaagggcgagaacatcgagcagatcctggactacctgttcgcccacggccagctgtgcgagaagggcttcgaccccctgctggtggaggaggccctggagatgcaccagtgcagcgaggagaagatgatggagttcctgcagctgatgagcaagttcaaggagatgggcttcgagctgaaggacatcaaggaggtgctgctgctgcacaacaacgaccaggacaacgccctggaggacctgatggccagagccggcgccagctag

SEQ ID NO: 104272 - DNA, 1509 bp, synthetic construct; identical to SEQ ID NO: 104271
  misc_feature 1..1509: note = Description of Artificial Sequence: Synthetic coding sequence
  source 1..1509: mol_type = other DNA

SEQ ID NO: 104273 - DNA, 1326 bp, synthetic construct
  misc_feature 1..1326: note = Description of Artificial Sequence: Synthetic coding sequence
  source 1..1326: mol_type = other DNA
atggccagcaagaagctgggcgccgacttccacggcaccttcagctacctggacgacgtgcccttcaagaccggcgacaagttcaagacccccgccaaggtgggcctgcccatcggcttcagcctgcccgactgcctgcaggtggtgagagaggtgcagtacgacttcagcctggagaagaagaccatcgagtgggccgaggagatcaagaagatcgaggaggccgagagagaggccgagtgcaagatcgccgaggccgaggccaaggtgaacagcaagagcggccccgagggcgacagcaagatgagcttcagcaagacccacagcaccgccaccatgcccccccccatcaaccccatcctggccagcctgcagcacaacagcatcctgacccccaccagagtgagcagcagcgccaccaagcagaaggtgctgagccccccccacatcaaggccgacttcaacctggccgacttcgagtgcgaggaggaccccttcgacaacctggagctgaagaccatcgacgagaaggaggagctgagaaacatcctggtgggcaccaccggccccatcatggcccagctgctggacaacaacctgcccagaggcggcagcggcagcgtgctgcaggacgaggaggtgctggccagcctggagagagccaccctggacttcaagcccctgcacaagcccaacggcttcatcaccctgccccagctgggcaactgcgagaagatgagcctgagcagcaaggtgagcctgccccccatccccgccgtgagcaacatcaagagcctgagcttccccaagctggacagcgacgacagcaaccagaagaccgccaagctggccagcaccttccacagcaccagctgcctgagaaacggcaccttccagaacagcctgaagcccagcacccagagcagcgccagcgagctgaacggccaccacaccctgggcctgagcgccctgaacctggacagcggcaccgagatgcccgccctgaccagcagccagatgcccagcctgagcgtgctgagcgtgtgcaccgaggagagcagcccccccaacaccggccccaccatcctggactacctgttcgcccacggccagctgtgcgagaagggcttcgaccccctgctggtggaggaggccctggagatgcaccagtgcagcgaggagaagatgatggagttcctgcagctgatgagcaagttcaaggagatgggcttcgagctgaaggacatcaaggaggtgctgctgctgcacaacaacgaccaggacaacgccctggaggacctgatggccagagccggcgccagctag

SEQ ID NO: 104274 - DNA, 1509 bp, synthetic construct; identical to SEQ ID NO: 104271
  misc_feature 1..1509: note = Description of Artificial Sequence: Synthetic coding sequence
  source 1..1509: mol_type = other DNA

SEQ ID NO: 104275 - DNA, 1509 bp, synthetic construct; identical to SEQ ID NO: 104271
  misc_feature 1..1509: note = Description of Artificial Sequence: Synthetic coding sequence
  source 1..1509: mol_type = other DNA

SEQ ID NO: 104276 - DNA, 1617 bp, synthetic construct
  misc_feature 1..1617: note = Description of Artificial Sequence: Synthetic coding sequence
  source 1..1617: mol_type = other DNA
atgagcggcgccgtgagaggcagaagaagagaggtgggcctgcagcacggcggctgcggcaccggcggcggctacggcgacggcctggccagaagcggccagagctggagatggtggagaagcctgagcctgggcgccgtgggcagcagcgccggcaccgagcccggcagacccgccggcgccagcaccttcagactgctgagaagaagacagcagagacacagcggcagcaagtggctgctgagaagctgggtgcagatcttcatgtacgacttcagcctggagaagaagaccatcgagtgggccgaggagatcaagaagatcgaggaggccgagagagaggccgagtgcaagatcgccgaggccgaggccaaggtgaacagcaagagcggccccgagggcgacagcaagatgagcttcagcaagacccacagcaccgccaccatgcccccccccatcaaccccatcctggccagcctgcagcacaacagcatcctgacccccaccagagtgagcagcagcgccaccaagcagaaggtgctgagccccccccacatcaaggccgacttcaacctggccgacttcgagtgcgaggaggaccccttcgacaacctggagctgaagaccatcgacgagaaggaggagctgagaaacatcctggtgggcaccaccggccccatcatggcccagctgctggacaacaacctgcccagaggcggcagcggcagcgtgctgcaggacgaggaggtgctggccagcctggagagagccaccctggacttcaagcccctgcacaagcccaacggcttcatcaccctgccccagctgggcaactgcgagaagatgagcctgagcagcaaggtgagcctgccccccatccccgccgtgagcaacatcaagagcctgagcttccccaagctggacagcgacgacagcaaccagaagaccgccaagctggccagcaccttccacagcaccagctgcctgagaaacggcaccttccagaacagcctgaagcccagcacccagagcagcgccagcgagctgaacggccaccacaccctgggcctgagcgccctgaacctggacagcggcaccgagatgcccgccctgaccagcagccagatgcccagcctgagcgtgctgagcgtgtgcaccgaggagagcagcccccccaacaccggccccaccgtgaccccccccaacttcagcgtgagccaggtgcccaacatgcccagctgcccccaggcctacagcgagctgcagatgctgagccccagcgagagacagtgcgtggagaccgtggtgaacatgggctacagctacgagtgcgtgctgagagccatgaagaagaagggcgagaacatcgagcagatcctggactacctgttcgcccacggccagctgtgcgagaagggcttcgaccccctgctggtggaggaggccctggagatgcaccagtgcagcgaggagaagatgatggagttcctgcagctgatgagcaagttcaaggagatgggcttcgagctgaaggacatcaaggaggtgctgctgctgcacaacaacgaccaggacaacgccctggaggacctgatggccagagccggcgccagctag

SEQ ID NO: 104277 - DNA, 1701 bp, synthetic construct
  misc_feature 1..1701: note = Description of Artificial Sequence: Synthetic coding sequence
  source 1..1701: mol_type = other DNA
atgagcggcgccgtgagaggcagaagaagagaggtgggcctgcagcacggcggctgcggcaccggcggcggctacggcgacggcctggccagaagcggccagagctggagatggtggagaagcctgagcctgggcgccgtgggcagcagcgccggcaccgagcccggcagacccgccggcgccagcaccttcagactgctgagaagaagacagcagagacacagcggcaccttcagctacctggacgacgtgcccttcaagaccggcgacaagttcaagacccccgccaaggtgggcctgcccatcggcttcagcctgcccgactgcctgcaggtggtgagagaggtgcagtacgacttcagcctggagaagaagaccatcgagtgggccgaggagatcaagaagatcgaggaggccgagagagaggccgagtgcaagatcgccgaggccgaggccaaggtgaacagcaagagcggccccgagggcgacagcaagatgagcttcagcaagacccacagcaccgccaccatgcccccccccatcaaccccatcctggccagcctgcagcacaacagcatcctgacccccaccagagtgagcagcagcgccaccaagcagaaggtgctgagccccccccacatcaaggccgacttcaacctggccgacttcgagtgcgaggaggaccccttcgacaacctggagctgaagaccatcgacgagaaggaggagctgagaaacatcctggtgggcaccaccggccccatcatggcccagctgctggacaacaacctgcccagaggcggcagcggcagcgtgctgcaggacgaggaggtgctggccagcctggagagagccaccctggacttcaagcccctgcacaagcccaacggcttcatcaccctgccccagctgggcaactgcgagaagatgagcctgagcagcaaggtgagcctgccccccatccccgccgtgagcaacatcaagagcctgagcttccccaagctggacagcgacgacagcaaccagaagaccgccaagctggccagcaccttccacagcaccagctgcctgagaaacggcaccttccagaacagcctgaagcccagcacccagagcagcgccagcgagctgaacggccaccacaccctgggcctgagcgccctgaacctggacagcggcaccgagatgcccgccctgaccagcagccagatgcccagcctgagcgtgctgagcgtgtgcaccgaggagagcagcccccccaacaccggccccaccgtgaccccccccaacttcagcgtgagccaggtgcccaacatgcccagctgcccccaggcctacagcgagctgcagatgctgagccccagcgagagacagtgcgtggagaccgtggtgaacatgggctacagctacgagtgcgtgctgagagccatgaagaagaagggcgagaacatcgagcagatcctggactacctgttcgcccacggccagctgtgcgagaagggcttcgaccccctgctggtggaggaggccctggagatgcaccagtgcagcgaggagaagatgatggagttcctgcagctgatgagcaagttcaaggagatgggcttcgagctgaaggacatcaaggaggtgctgctgctgcacaacaacgaccaggacaacgccctggaggacctgatggccagagccggcgccagctag

SEQ ID NO: 104278 - DNA, 690 bp, synthetic construct
  misc_feature 1..690: note = Description of Artificial Sequence: Synthetic coding sequence
  source 1..690: mol_type = other DNA
atgcagatcttcgtgaagaccctgaccggcaagaccatcaccctggaggtggagcccagcgacaccatcgagaacgtgaaggccaagatccaggacaaggagggcatcccccccgaccagcagagactgatcttcgccggcaagcagctggaggacggcagaaccctgagcgactacaacatccagaaggagagcaccctgcacctggtgctgagactgagaggcggcatgcagatcttcgtgaagaccctgaccggcaagaccatcaccctggaggtggagcccagcgacaccatcgagaacgtgaaggccaagatccaggacaaggagggcatcccccccgaccagcagagactgatcttcgccggcaagcagctggaggacggcagaaccctgagcgactacaacatccagaaggagagcaccctgcacctggtgctgagactgagaggcggcatgcagatcttcgtgaagaccctgaccggcaagaccatcaccctggaggtggagcccagcgacaccatcgagaacgtgaaggccaagatccaggacaaggagggcatcccccccgaccagcagagactgatcttcgccggcaagcagctggaggacggcagaaccctgagcgactacaacatccagaaggagagcaccctgcacctggtgctgagactgagaggcggctgctag

SEQ ID NO: 104279 - DNA, 690 bp, synthetic construct; identical to SEQ ID NO: 104278
  misc_feature 1..690: note = Description of Artificial Sequence: Synthetic coding sequence
  source 1..690: mol_type = other DNA

SEQ ID NO: 104280 - DNA, 690 bp, synthetic construct; identical to SEQ ID NO: 104278
  misc_feature 1..690: note = Description of Artificial Sequence: Synthetic coding sequence
  source 1..690: mol_type = other DNA

SEQ ID NO: 104281 - DNA, 462 bp, synthetic construct
  misc_feature 1..462: note = Description of Artificial Sequence: Synthetic coding sequence
  source 1..462: mol_type = other DNA
atgcagatcttcgtgaagaccctgaccggcaagaccatcaccctggaggtggagcccagcgacaccatcgagaacgtgaaggccaagatccaggacaaggagggcatcccccccgaccagcagagactgatcttcgccggcaagcagctggaggacggcagaaccctgagcgactacaacatccagaaggagagcaccctgcacctggtgctgagactgagaggcggcatgcagatcttcgtgaagaccctgaccggcaagaccatcaccctggaggtggagcccagcgacaccatcgagaacgtgaaggccaagatccaggacaaggagggcatcccccccgaccagcagagactgatcttcgccggcaagcagctggaggacggcagaaccctgagcgactacaacatccagaaggagagcaccctgcacctggtgctgagactgagaggcggctgctag

SEQ ID NO: 104282 - DNA, 2058 bp, synthetic construct
  misc_feature 1..2058: note = Description of Artificial Sequence: Synthetic coding sequence
  source 1..2058: mol_type = other DNA
atgcagatcttcgtgaagaccctgaccggcaagaccatcaccctggaggtggagcccagcgacaccatcgagaacgtgaaggccaagatccaggacaaggagggcatcccccccgaccagcagagactgatcttcgccggcaagcagctggaggacggcagaaccctgagcgactacaacatccagaaggagagcaccctgcacctggtgctgagactgagaggcggcatgcagatcttcgtgaagaccctgaccggcaagaccatcaccctggaggtggagcccagcgacaccatcgagaacgtgaaggccaagatccaggacaaggagggcatcccccccgaccagcagagactgatcttcgccggcaagcagctggaggacggcagaaccctgagcgactacaacatccagaaggagagcaccctgcacctggtgctgagactgagaggcggcatgcagatcttcgtgaagaccctgaccggcaagaccatcaccctggaggtggagcccagcgacaccatcgagaacgtgaaggccaagatccaggacaaggagggcatccccagcgaccagcagagactgatcttcgccggcaagcagctggaggacggcagaaccctgagcgactacaacatccagaaggagagcaccctgcacctggtgctgagactgagaggcggcatgcagatcttcgtgaagaccctgaccggcaagaccatcaccctggaggtggagcccagcgacaccatcgagaacgtgaaggccaagatccaggacaaggagggcatcccccccgaccagcagagactgatcttcgccggcaagcagctggaggacggcagaaccctgagcgactacaacatccagaaggagagcaccctgcacctggtgctgagactgagaggcggcatgcagatcttcgtgaagaccctgaccggcaagaccatcaccctggaggtggagcccagcgacaccatcgagaacgtgaaggccaagatccaggacaaggagggcatcccccccgaccagcagagactgatcttcgccggcaagcagctggaggacggcagaaccctgagcgactacaacatccagaaggagagcaccctgcacctggtgctgagactgagaggcggcatgcagatcttcgtgaagaccctgaccggcaagaccatcaccctggaggtggagcccagcgacaccatcgagaacgtgaaggccaagatccaggacaaggagggcatcccccccgaccagcagagactgatcttcgccggcaagcagctggaggacggcagaaccctgagcgactacaacatccagaaggagagcaccctgcacctggtgctgagactgagaggcggcatgcagatcttcgtgaagaccctgaccggcaagaccatcaccctggaggtggagcccagcgacaccatcgagaacgtgaaggccaagatccaggacaaggagggcatcccccccgaccagcagagactgatcttcgccggcaagcagctggaggacggcagaaccctgagcgactacaacatccagaaggagagcaccctgcacctggtgctgagactgagaggcggcatgcagatcttcgtgaagaccctgaccggcaagaccatcaccctggaggtggagcccagcgacaccatcgagaacgtgaaggccaagatccaggacaaggagggcatcccccccgaccagcagagactgatcttcgccggcaagcagctggaggacggcagaaccctgagcgactacaacatccagaaggagagcaccctgcacctggtgctgagactgagaggcggcatgcagatcttcgtgaagaccctgaccggcaagaccatcaccctggaggtggagcccagcgacaccatcgagaacgtgaaggccaagatccaggacaaggagggcatcccccccgaccagcagagactgatcttcgccggcaagcagctggaggacggcagaaccctgagcgactacaacatccagaaggagagcaccctgcacctggtgctgagactgagaggcggcgtgtag

SEQ ID NO: 104283 - DNA, 450 bp, synthetic construct
  misc_feature 1..450: note = Description of Artificial Sequence: Synthetic coding sequence
  source 1..450: mol_type = other DNA
atgcagatcttcgtgaagaccctgaccggcaagaccatcaccctggaggtggagcccagcgacaccatcgagaacgtgaaggccaagatccaggacaaggagggcatcccccccgaccagcagagactgatcttcgccggcaagcagctggaggacggcagaaccctgagcgactacaacatccagaaggagagcaccctgcacctggtgctgagactgagaggcggcatgcagatcttcgtgaagaccctgaccggcaagaccatcaccctggaggtggagcccagcgacaccatcgagaacgtgaaggccaagatccaggacaaggagggcatcccccccgaccagcagagactgatcttcgccggcaagcagctggaggacggcagaaccctgagcgactacaacatccagaaggagagcaccctgcacctggtgctgagactgtag

SEQ ID NO: 104284 - DNA, 372 bp, synthetic construct
  misc_feature 1..372: note = Description of Artificial Sequence: Synthetic coding sequence
  source 1..372: mol_type = other DNA
atgcagatcttcgtgaagaccctgaccggcaagaccatcaccctggaggtggagcccagcgacaccatcgagaacgtgaaggccaagatccaggacaaggagggcatcccccccgaccagcagagactgatcttcgccggcaagcagctggaggacggcagaaccctgagcgactacaacatccagaaggagagcaccctgcacctggtgctgagactgagaggcggcatgcagatcttcgtgaagaccctgaccggcaagaccatcaccctggaggtggagcccagcgacaccatcgagaacgtgaaggccaagatccaggacaaggagggcatcccccccgaccagcagagactgatcttcgccggctag

SEQ ID NO: 104285 - DNA, 2058 bp, synthetic construct; identical to SEQ ID NO: 104282
  misc_feature 1..2058: note = Description of Artificial Sequence: Synthetic coding sequence
  source 1..2058: mol_type = other DNA

SEQ ID NO: 104286 - DNA, 486 bp, synthetic construct
  misc_feature 1..486: note = Description of Artificial Sequence: Synthetic coding sequence
  source 1..486: mol_type = other DNA
atgcagatcttcgtgaagaccctgaccggcaagaccatcaccctggaggtggagcccagcgacaccatcgagaacgtgaaggccaagatccaggacaaggagggcatcccccccgaccagcagagactgatcttcgccggcaagcagctggaggacggcagaaccctgagcgactacaacatccagaaggagagcaccctgcacctggtgctgagactgagaggcggcatgcagatcttcgtgaagaccctgaccggcaagaccatcaccctggaggtggagcccagcgacaccatcgagaacgtgaaggccaagatccaggacaaggagggcatcccccccgaccagcagagactgatcttcgccggcaagcagctggaggacggcagaaccctgagcgactacaacatccagaaggagagcaccctgcacctggtgctgagactgagaggcggcatgcagatcttcgtgaagaccctgacctag

SEQ ID NO: 104287 - DNA, 405 bp, synthetic construct
  misc_feature 1..405: note = Description of Artificial Sequence: Synthetic coding sequence
  source 1..405: mol_type = other DNA
atgcagatcttcgtgaagaccctgaccggcaagaccatcaccctggaggtggagcccagcgacaccatcgagaacgtgaaggccaagatccaggacaaggagggcatcccccccgaccagcagagactgatcttcgccggcaagcagctggaggacggcagaaccctgagcgactacaacatccagaaggagagcaccctgcacctggtgctgagactgagaggcggcatgcagatcttcgtgaagaccctgaccggcaagaccatcaccctggaggtggagcccagcgacaccatcgagaacgtgaaggccaagatccaggacaaggagggcatcccccccgaccagcagagactgatcttcgccggcaagcagctggaggacggcagaaccctgagcgactag

SEQ ID NO: 104288 - DNA, 510 bp, synthetic construct
  misc_feature 1..510: note = Description of Artificial Sequence: Synthetic coding sequence
  source 1..510: mol_type = other DNA
atgcagatcttcgtgaagaccctgaccggcaagaccatcaccctggaggtggagcccagcgacaccatcgagaacgtgaaggccaagatccaggacaaggagggcatcccccccgaccagcagagactgatcttcgccggcaagcagctggaggacggcagaaccctgagcgactacaacatccagaaggagagcaccctgcacctggtgctgagactgagaggcggcatgcagatcttcgtgaagaccctgaccggcaagaccatcaccctggaggtggagcccagcgacaccatcgagaacgtgaaggccaagatccaggacaaggagggcatccccagcgaccagcagagactgatcttcgccggcaagcagctggaggacggcagaaccctgagcgactacaacatccagaaggagagcaccctgcacctggtgctgagactgagaggcggcatgcagatcttcgtgaagaccctgaccggcaagaccatcaccctggaggtgtag

SEQ ID NO: 104289 - DNA, 468 bp, synthetic construct
  misc_feature 1..468: note = Description of Artificial Sequence: Synthetic coding sequence
  source 1..468: mol_type = other DNA
atgcagatcttcgtgaagaccctgaccggcaagaccatcaccctggaggtggagcccagcgacaccatcgagaacgtgaaggccaagatccaggacaaggagggcatcccccccgaccagcagagactgatcttcgccggcaagcagctggaggacggcagaaccctgagcgactacaacatccagaaggagagcaccctgcacctggtgctgagactgagaggcggcatgcagatcttcgtgaagaccctgaccggcaagaccatcaccctggaggtggagcccagcgacaccatcgagaacgtgaaggccaagatccaggacaaggagggcatcccccccgaccagcagagactgatcttcgccggcaagcagctggaggacggcagaaccctgagcgactacaacatccagaaggagagcaccctgcacctggtgctgagactgagaggcggcatgcagatctag

SEQ ID NO: 104290 - DNA, 186 bp, synthetic construct
  misc_feature 1..186: note = Description of Artificial Sequence: Synthetic coding sequence
  source 1..186: mol_type = other DNA
atgcagatcttcgtgaagaccctgaccggcaagaccatcaccctggaggtggagcccagcgacaccatcgagaacgtgaaggccaagatccaggacaaggagggcatcccccccgaccagcagagactgatcttcgccggcaagcagctggaggacggcagaaccctgagcgactacaacatctag

SEQ ID NO: 104291 - DNA, 1830 bp, synthetic construct
  misc_feature 1..1830: note = Description of Artificial Sequence: Synthetic coding sequence
  source 1..1830: mol_type = other DNA
atgcagatcttcgtgaagaccctgaccggcaagaccatcaccctggaggtggagcccagcgacaccatcgagaacgtgaaggccaagatccaggacaaggagggcatcccccccgaccagcagagactgatcttcgccggcaagcagctggaggacggcagaaccctgagcgactacaacatccagaaggagagcaccctgcacctggtgctgagactgagaggcggcatgcagatcttcgtgaagaccctgaccggcaagaccatcaccctggaggtggagcccagcgacaccatcgagaacgtgaaggccaagatccaggacaaggagggcatccccagcgaccagcagagactgatcttcgccggcaagcagctggaggacggcagaaccctgagcgactacaacatccagaaggagagcaccctgcacctggtgctgagactgagaggcggcatgcagatcttcgtgaagaccctgaccggcaagaccatcaccctggaggtggagcccagcgacaccatcgagaacgtgaaggccaagatccaggacaaggagggcatcccccccgaccagcagagactgatcttcgccggcaagcagctggaggacggcagaaccctgagcgactacaacatccagaaggagagcaccctgcacctggtgctgagactgagaggcggcatgcagatcttcgtgaagaccctgaccggcaagaccatcaccctggaggtggagcccagcgacaccatcgagaacgtgaaggccaagatccaggacaaggagggcatcccccccgaccagcagagactgatcttcgccggcaagcagctggaggacggcagaaccctgagcgactacaacatccagaaggagagcaccctgcacctggtgctgagactgagaggcggcatgcagatcttcgtgaagaccctgaccggcaagaccatcaccctggaggtggagcccagcgacaccatcgagaacgtgaaggccaagatccaggacaaggagggcatcccccccgaccagcagagactgatcttcgccggcaagcagctggaggacggcagaaccctgagcgactacaacatccagaaggagagcaccctgcacctggtgctgagactgagaggcggcatgcagatcttcgtgaagaccctgaccggcaagaccatcaccctggaggtggagcccagcgacaccatcgagaacgtgaaggccaagatccaggacaaggagggcatcccccccgaccagcagagactgatcttcgccggcaagcagctggaggacggcagaaccctgagcgactacaacatccagaaggagagcaccctgcacctggtgctgagactgagaggcggcatgcagatcttcgtgaagaccctgaccggcaagaccatcaccctggaggtggagcccagcgacaccatcgagaacgtgaaggccaagatccaggacaaggagggcatcccccccgaccagcagagactgatcttcgccggcaagcagctggaggacggcagaaccctgagcgactacaacatccagaaggagagcaccctgcacctggtgctgagactgagaggcggcatgcagatcttcgtgaagaccctgaccggcaagaccatcaccctggaggtggagcccagcgacaccatcgagaacgtgaaggccaagatccaggacaaggagggcatcccccccgaccagcagagactgatcttcgccggcaagcagctggaggacggcagaaccctgagcgactacaacatccagaaggagagcaccctgcacctggtgctgagactgagaggcggcgtgtag

SEQ ID NO: 104292 - DNA, 411 bp, synthetic construct
  misc_feature 1..411: note = Description of Artificial Sequence: Synthetic coding sequence
  source 1..411: mol_type = other DNA
atgcagatcttcgtgaagaccctgaccggcaagaccatcaccctggaggtggagcccagcgacaccatcgagaacgtgaaggccaagatccaggacaaggagggcatcccccccgaccagcagagactgatcttcgccggcaagcagctggaggacggcagaaccctgagcgactacaacatccagaaggagagcaccctgcacctggtgctgagactgagaggcggcatgcagatcttcgtgaagaccctgaccggcaagaccatcaccctggaggtggagcccagcgacaccatcgagaacgtgaaggccaagatccaggacaaggagggcatcccccccgaccagcagagactgatcttcgccggcaagcagctggaggacggcagaaccctgagcgactacaactag

SEQ ID NO: 104293 - DNA, 672 bp, synthetic construct
  misc_feature 1..672: note = Description of Artificial Sequence: Synthetic coding sequence
  source 1..672: mol_type = other DNA
atgcagctgaagcccatggagatcaaccccgagatgctgaacaaggtgctgagcagactgggcgtggccggccagtggagattcgtggacgtgctgggcctggaggaggagagcctgggcagcgtgcccgcccccgcctgcgccctgctgctgctgttccccctgaccgcccagcacgagaacttcagaaagaagcagatcgaggagctgaagggccaggaggtgagccccaaggtgtacttcatgaagcagaccatcggcaacagctgcggcaccatcggcctgatccacgccgtggccaacaaccaggacaagctgggcttcgaggacggcagcgtgctgaagcagttcctgagcgagaccgagaagatgagccccgaggacagagccaagtgcttcgagaagaacgaggccatccaggccgcccacgacgccgtggcccaggagggccagtgcagagtggacgacaaggtgaacttccacttcatcctgttcaacaacgtggacggccacctgtacgagctggacggcagaatgcccttccccgtgaaccacggcgccagcagcgaggacaccctgctgaaggacgccgccaaggtgtgcagagagttcaccgagagagagcagggcgaggtgagattcagcgccgtggccctgtgcaaggccgcctag

SEQ ID NO: 104294 - DNA, 642 bp, synthetic construct
  misc_feature 1..642: note = Description of Artificial Sequence: Synthetic coding sequence
  source 1..642: mol_type = other DNA
atgcagctgaagcccatggagatcaaccccgagatgctgaacaaggtgctgagcagactgggcgtggccggccagtggagattcgtggacgtgctgggcctggaggaggagagcctgggcagcgtgcccgcccccgcctgcgccctgctgctgctgttccccctgaccgcccagcacgagaacttcagaaagaagcagatcgaggagctgaagggccaggaggtgagccccaaggtgtacttcatgaagcagaccatcggcaacagctgcggcaccatcggcctgatccacgccgtggccaacaaccaggacaagctgggcttcgaggacggcagcgtgctgaagcagttcctgagcgagaccgagaagatgagccccgaggacagagccaagtgcttcgagaagaacgaggccatccaggccgcccacgacgccgtggcccaggagggccagtgcagagtggacgacaaggtgaacttccacttcatcctgttcaacaacgtggacggccacctgtacgagctggacggcagaatgcccttccccgtgaaccacggcgccagcagcgaggacaccctgctgaaggacgccgccaaggtgtgcagagagttcaccgagagagagcagggcgaggtgagatag

SEQ ID NO: 104295 - DNA, 177 bp, synthetic construct
  misc_feature 1..177: note = Description of Artificial Sequence: Synthetic coding sequence
  source 1..177: mol_type = other DNA
atgcagctgaagcccatggagatcaaccccgagatgctgaacaaggtgctgagcagactgggcgtggccggccagtggagattcgtggacgtgctgggcctggaggaggagagcctgggcagcgtgcccgcccccgcctgcgccctgctgctgctgttccccctgaccgcccagtag

SEQ ID NO: 104296 - DNA, 756 bp, synthetic construct
  misc_feature 1..756: note = Description of Artificial Sequence: Synthetic coding sequence
  source 1..756: mol_type = other DNA
atggtgcccagacccgtgtgcgccgtgctgctgctgttccccatcaccgagaagtacgaggtgttcagaaccgaggaggaggagaagatcaagagccagggccaggacgtgaccagcagcgtgtacttcatgaagcagaccatcagcaacgcctgcggcaccatcggcctgatccacgccatcgccaacaacaaggacaagatgcacttcgagagcggcagcaccctgaagaagttcctggaggagagcgtgagcatgagccccgaggagagagccagatacctggagaactacgacgccatcagagtgacccacgagaccagcgcccacgagggccagaccgagagcagcagccccagcagcagccagccccacagcagccactgcagaaccaaggccagcagcctgtgccaccacgccagcctgccctgggtgaagagaaaccacgtgggccccgccaaggccaccagccccagcctgagactgagaagatggagacccttcctgagactgcccagcctgggcctgcacagcgtggcccccagcatcgacgagaaggtggacctgcacttcatcgccctggtgcacgtggacggccacctgtacgagctggacggcagaaagcccttccccatcaaccacggcgagaccagcgacgagaccctgctggaggacgccatcgaggtgtgcaagaagttcatggagagagaccccgacgagctgagattcaacgccatcgccctgagcgccgcctag

SEQ ID NO: 104297 - DNA, 693 bp, synthetic construct
  misc_feature 1..693: note = Description of Artificial Sequence: Synthetic coding sequence
  source 1..693: mol_type = other DNA
atggagggccagagatggctgcccctggaggccaaccccgaggtgaccaaccagttcctgaagcagctgggcctgcaccccaactggcagttcgtggacgtgtacggcatggaccccgagctgctgagcatggtgcccagacccgtgtgcgccgtgctgctgctgttccccatcaccgagaagtacgaggtgttcagaaccgaggaggaggagaagatcaagagccagggccaggacgtgaccagcagcgtgtacttcatgaagcagaccatcagcaacgcctgcggcaccatcggcctgatccacgccatcgccaacaacaaggacaagatgcacttcgagagcggcagcaccctgaagaagttcctggaggagagcgtgagcatgagccccgaggagagagccagatacctggagaactacgacgccatcagagtgacccacgagaccagcgcccacgagggccagaccgaggcccccagcatcgacgagaaggtggacctgcacttcatcgccctggtgcacgtggacggccacctgtacgagctggacggcagaaagcccttccccatcaaccacggcgagaccagcgacgagaccctgctggaggacgccatcgaggtgtgcaagaagttcatggagagagaccccgacgagctgagattcaacgccatcgccctgagcgccgcctag

SEQ ID NO: 104298 - DNA, 687 bp, synthetic construct
  misc_feature 1..687: note = Description of Artificial Sequence: Synthetic coding sequence
  source 1..687: mol_type = other DNA
accgaggaggaggagaagatcaagagccagggccaggacgtgaccagcagcgtgtacttcatgaagcagaccatcagcaacgcctgcggcaccatcggcctgatccacgccatcgccaacaacaaggacaagatgcacttcgagagcggcagcaccctgaagaagttcctggaggagagcgtgagcatgagccccgaggagagagccagatacctggagaactacgacgccatcagagtgacccacgagaccagcgcccacgagggccagaccgagagcagcagccccagcagcagccagccccacagcagccactgcagaaccaaggccagcagcctgtgccaccacgccagcctgccctgggtgaagagaaaccacgtgggccccgccaaggccaccagccccagcctgagactgagaagatggagacccttcctgagactgcccagcctgggcctgcacagcgtggcccccagcatcgacgagaaggtggacctgcacttcatcgccctggtgcacgtggacggccacctgtacgagctggacggcagaaagcccttccccatcaaccacggcgagaccagcgacgagaccctgctggaggacgccatcgaggtgtgcaagaagttcatggagagagaccccgacgagctgagattcaacgccatcgccctgagcgccgcctag

SEQ ID NO: 104299 - DNA, 981 bp, synthetic construct
  misc_feature 1..981: note = Description of Artificial Sequence: Synthetic coding sequence
  source 1..981: mol_type = other DNA
atgaccggcaacgccggcgagtggtgcctgatggagagcgaccccggcgtgttcaccgagctgatcaagggcttcggctgcagaggcgcccaggtggaggagatctggagcctggagcccgagaacttcgagaagctgaagcccgtgcacggcctgatcttcctgttcaagtggcagcccggcgaggagcccgccggcagcgtggtgcaggacagcagactggacaccatcttcttcgccaagcaggtgatcaacaacgcctgcgccacccaggccatcgtgagcgtgctgctgaactgcacccaccaggacgtgcacctgggcgagaccctgagcgagttcaaggagttcagccagagcttcgacgccgccatgaagggcctggccctgagcaacagcgacgtgatcagacaggtgcacaacagcttcgccagacagcagatgttcgagttcgacaccaagaccagcgccaaggaggaggacgccttccacttcgtgagctacgtgcccgtgaacggcagactgtacgagctggacggcctgagagagggccccatcgacctgggcgcctgcaaccaggacgactggatcagcgccgtgagacccgtgatcgagaagagaatccagaagtacagcgagggcgagatcagattcaacctgatggccatcgtgagcgacagaaagatgatctacgagcagaagatcgccgagctgcagagacagctggccgaggagcccatggacaccgaccagggcaacagcatgctgagcgccatccagagcgaggtggccaagaaccagatgctgatcgaggaggaggtgcagaagctgaagagatacaagatcgagaacatcagaagaaagcacaactacctgcccttcatcatggagctgctgaagaccctggccgagcaccagcagctgatccccctggtggagaagttcgagaagcacttcgagaagaccctgctgggcaagtag

SEQ ID NO: 104300 - DNA, 951 bp, synthetic construct
  misc_feature 1..951: note = Description of Artificial Sequence: Synthetic coding sequence
  source 1..951: mol_type = other DNA
atgaccggcaacgccggcgagtggtgcctgatggagagcgaccccggcgtgttcaccgagctgatcaagggcttcggctgcagaggcgcccaggtggaggagatctggagcctggagcccgagaacttcgagaagctgaagcccgtgcacggcctgatcttcctgttcaagtggcagcccggcgaggagcccgccggcagcgtggtgcaggacagcagactggacaccatcttcttcgccaagcaggtgatcaacaacgcctgcgccacccaggccatcgtgagcgtgctgctgaactgcacccaccaggacgtgcacctgggcgagaccctgagcgagttcaaggagttcagccagagcttcgacgccgccatgaagggcctggccctgagcaacagcgacgtgatcagacaggtgcacaacagcttcgccagacagcagatgttcgagttcgacaccaagaccagcgccaaggaggaggacgccttccacttcgtgagctacgtgcccgtgaacggcagactgtacgagctggacggcctgagagagggccccatcgacctgggcgcctgcaaccaggacgactggatcagcgccgtgagacccgtgatcgagaagagaatccagaagtacagcgagggcgagatcagattcaacctgatggccatcgtgagcgacagaaagatgatctacgagcagaagatcgccgagctgcagagacagctggccgaggagcccatggacaccgaccagggcaacagcatgctgagcgccatccagagcgaggtggccaagaaccagatgctgatcgaggaggaggtgcagaagctgaagagatacaagatcgagaacatcagaagaaagcacaactacctgcccttcatcatggagctgctgaagaccctggccgagcaccagcagctgatccccctggtggagaagggcaagtag

SEQ ID NO: 104301 - DNA, 1107 bp, synthetic construct
  misc_feature 1..1107: note = Description of Artificial Sequence: Synthetic coding sequence
  source 1..1107: mol_type = other DNA
gccagaggcggcagcggcagatgcgtggccagagccatgaccggcaacgccggcgagtggtgcctgatggagagcgaccccggcgtgttcaccgagctgatcaagggcttcggctgcagaggcgcccaggtggaggagatctggagcctggagcccgagaacttcgagaagctgaagcccgtgcacggcctgatcttcctgttcaagtggcagcccggcgaggagcccgccggcagcgtggtgcaggacagcagactggacaccatcttcttcgccaagcaggtgatcaacaacgcctgcgccacccaggccatcgtgagcgtgctgctgaactgcacccaccaggacgtgcacctgggcgagaccctgagcgagttcaaggagttcagccagagcttcgacgccgccatgaagggcctggccctgagcaacagcgacgtgatcagacaggtgcacaacagcttcgccagacagcagatgttcgagttcgacaccaagaccagcgccaaggaggaggacgccttccacttcgtgagctacgtgcccgtgaacggcagactgtacgagctggacggcctgagagagggccccatcgacctgggcgcctgcaaccaggacgactggatcagcgccgtgagacccgtgatcgagaagagaatccagaaggacggcttcagcccctgctgccccggctggagccagacccccgagctgaagcccagcgcctgcctggacctgcccaagtggtacagcgagggcgagatcagattcaacctgatggccatcgtgagcgacagaaagatgatctacgagcagaagatcgccgagctgcagagacagctggccgaggaggagcccatggacaccgaccagggcaacagcatgctgagcgccatccagagcgaggtggccaagaaccagatgctgatcgaggaggaggtgcagaagctgaagagatacaagatcgagaacatcagaagaaagcacaactacctgcccttcatcatggagctgctgaagaccctggccgagcaccagcagctgatccccctggtggagaaggccaaggagaagcagaacgccaagaaggcccaggagaccaagtag

SEQ ID NO: 104302 - DNA, 1068 bp, synthetic construct
  misc_feature 1..1068: note = Description of Artificial Sequence: Synthetic coding sequence
  source 1..1068: mol_type = other DNA
atgaccggcaacgccggcgagtggtgcctgatggagagcgaccccggcgtgttcaccgagctgatcaagggcttcggctgcagaggcgcccaggtggaggagatctggagcctggagcccgagaacttcgagaagctgaagcccgtgcacggcctgatcttcctgttcaagtggcagcccggcgaggagcccgccggcagcgtggtgcaggacagcagactggacaccatcttcttcgccaagcaggtgatcaacaacgcctgcgccacccaggccatcgtgagcgtgctgctgaactgcacccaccaggacgtgcacctgggcgagaccctgagcgagttcaaggagttcagccagagcttcgacgccgccatgaagggcctggccctgagcaacagcgacgtgatcagacaggtgcacaacagcttcgccagacagcagatgttcgagttcgacaccaagaccagcgccaaggaggaggacgccttccacttcgtgagctacgtgcccgtgaacggcagactgtacgagctggacggcctgagagagggccccatcgacctgggcgcctgcaaccaggacgactggatcagcgccgtgagacccgtgatcgagaagagaatccagaaggacggcttcagcccctgctgccccggctggagccagacccccgagctgaagcccagcgcctgcctggacctgcccaagtggtacagcgagggcgagatcagattcaacctgatggccatcgtgagcgacagaaagatgatctacgagcagaagatcgccgagctgcagagacagctggccgaggagcccatggacaccgaccagggcaacagcatgctgagcgccatccagagcgaggtggccaagaaccagatgctgatcgaggaggaggtgcagaagctgaagagatacaagatcgagaacatcagaagaaagcacaactacctgcccttcatcatggagctgctgaagaccctggccgagcaccagcagctgatccccctggtggagaaggccaaggagaagcagaacgccaagaaggcccaggagaccaagtag

SEQ ID NO: 104303 - DNA, 579 bp, synthetic construct
  misc_feature 1..579: note = Description of Artificial Sequence: Synthetic coding sequence
  source 1..579: mol_type = other DNA
atgaagggcctggccctgagcaacagcgacgtgatcagacaggtgcacaacagcttcgccagacagcagatgttcgagttcgacaccaagaccagcgccaaggaggaggacgccttccacttcgtgagctacgtgcccgtgaacggcagactgtacgagctggacggcctgagagagggccccatcgacctgggcgcctgcaaccaggacgactggatcagcgccgtgagacccgtgatcgagaagagaatccagaagtacagcgagggcgagatcagattcaacctgatggccatcgtgagcgacagaaagatgatctacgagcagaagatcgccgagctgcagagacagctggccgaggagcccatggacaccgaccagggcaacagcatgctgagcgccatccagagcgaggtggccaagaaccagatgctgatcgaggaggaggtgcagaagctgaagagatacaagatcgagaacatcagaagaaagcacaactacctgcccttcatcatggagctgctgaagaccctggccgagcaccagcagctgatccccctggtggagaagatcttctag

SEQ ID NO: 104304 - DNA, 987 bp, synthetic construct
  misc_feature 1..987: note = Description of Artificial Sequence: Synthetic coding sequence
  source 1..987: mol_type = other DNA
atgaccggcaacgccggcgagtggtgcctgatggagagcgaccccggcgtgttcaccgagctgatcaagggcttcggctgcagaggcgcccaggtggaggagatctggagcctggagcccgagaacttcgagaagctgaagcccgtgcacggcctgatcttcctgttcaagtggcagcccggcgaggagcccgccggcagcgtggtgcaggacagcagactggacaccatcttcttcgccaagcaggtgatcaacaacgcctgcgccacccaggccatcgtgagcgtgctgctgaactgcacccaccaggacgtgcacctgggcgagaccctgagcgagttcaaggagttcagccagagcttcgacgccgccatgaagggcctggccctgagcaacagcgacgtgatcagacaggtgcacaacagcttcgccagacagcagatgttcgagttcgacaccaagaccagcgccaaggaggaggacgccttccacttcgtgagctacgtgcccgtgaacggcagactgtacgagctggacggcctgagagagggccccatcgacctgggcgcctgcaaccaggacgactggatcagcgccgtgagacccgtgatcgagaagagaatccagaagtacagcgagggcgagatcagattcaacctgatggccatcgtgagcgacagaaagatgatctacgagcagaagatcgccgagctgcagagacagctggccgaggagcccatggacaccgaccagggcaacagcatgctgagcgccatccagagcgaggtggccaagaaccagatgctgatcgaggaggaggtgcagaagctgaagagatacaagatcgagaacatcagaagaaagcacaactacctgcccttcatcatggagctgctgaagaccctggccgagcaccagcagctgatccccctggtggagaaggccaaggagaagcagaacgccaagaaggcccaggagaccaagtag

SEQ ID NO: 104305 - DNA, 990 bp, synthetic construct
  misc_feature 1..990: note = Description of Artificial Sequence: Synthetic coding sequence
  source 1..990: mol_type = other DNA
atgaccggcaacgccggcgagtggtgcctgatggagagcgaccccggcgtgttcaccgagctgatcaagggcttcggctgcagaggcgcccaggtggaggagatctggagcctggagcccgagaacttcgagaagctgaagcccgtgcacggcctgatcttcctgttcaagtggcagcccggcgaggagcccgccggcagcgtggtgcaggacagcagactggacaccatcttcttcgccaagcaggtgatcaacaacgcctgcgccacccaggccatcgtgagcgtgctgctgaactgcacccaccaggacgtgcacctgggcgagaccctgagcgagttcaaggagttcagccagagcttcgacgccgccatgaagggcctggccctgagcaacagcgacgtgatcagacaggtgcacaacagcttcgccagacagcagatgttcgagttcgacaccaagaccagcgccaaggaggaggacgccttccacttcgtgagctacgtgcccgtgaacggcagactgtacgagctggacggcctgagagagggccccatcgacctgggcgcctgcaaccaggacgactggatcagcgccgtgagacccgtgatcgagaagagaatccagaagtacagcgagggcgagatcagattcaacctgatggccatcgtgagcgacagaaagatgatctacgagcagaagatcgccgagctgcagagacagctggccgaggaggagcccatggacaccgaccagggcaacagcatgctgagcgccatccagagcgaggtggccaagaaccagatgctgatcgaggaggaggtgcagaagctgaagagatacaagatcgagaacatcagaagaaagcacaactacctgcccttcatcatggagctgctgaagaccctggccgagcaccagcagctgatccccctggtggagaaggccaaggagaagcagaacgccaagaaggcccaggagaccaagtag

SEQ ID NO: 104306 - DNA, 954 bp, synthetic construct
  misc_feature 1..954: note = Description of Artificial Sequence: Synthetic coding sequence
  source 1..954: mol_type = other DNA
atggagagcgaccccggcgtgttcaccgagctgatcaagggcttcggctgcagaggcgcccaggtggaggagatctggagcctggagcccgagaacttcgagaagctgaagcccgtgcacggcctgatcttcctgttcaagtggcagcccggcgaggagcccgccggcagcgtggtgcaggacagcagactggacaccatcttcttcgccaagcaggtgatcaacaacgcctgcgccacccaggccatcgtgagcgtgctgctgaactgcacccaccaggacgtgcacctgggcgagaccctgagcgagttcaaggagttcagccagagcttcgacgccgccatgaagggcctggccctgagcaacagcgacgtgatcagacaggtgcacaacagcttcgccagacagcagatgttcgagttcgacaccaagaccagcgccaaggaggaggacgccttccacttcgtgagctacgtgcccgtgaacggcagactgtacgagctggacggcctgagagagggccccatcgacctgggcgcctgcaaccaggacgactggatcagcgccgtgagacccgtgatcgagaagagaatccagaagtacagcgagggcgagatcagattcaacctgatggccatcgtgagcgacagaaagatgatctacgagcagaagatcgccgagctgcagagacagctggccgaggaggagcccatggacaccgaccagggcaacagcatgctgagcgccatccagagcgaggtggccaagaaccagatgctgatcgaggaggaggtgcagaagctgaagagatacaagatcgagaacatcagaagaaagcacaactacctgcccttcatcatggagctgctgaagaccctggccgagcaccagcagctgatccccctggtggagaagttcgagaagcacttcgagaagaccctgctgggcaagtag

SEQ ID NO: 104307 - DNA, 300 bp, synthetic construct
  misc_feature 1..300: note = Description of Artificial Sequence: Synthetic coding sequence
  source 1..300: mol_type = other DNA
tgaaacctgatggccatcgtgagcgacagaaagatgatctacgagcagaagatcgccgagctgcagagacagctggccgaggagcccatggacaccgaccagggcaacagcatgctgagcgccatccagagcgaggtggccaagaaccagatgctgatcgaggaggaggtgcagaagctgaagagatacaagatcgagaacatcagaagaaagcacaactacctgcccttcatcatggagctgctgaagaccctggccgagcaccagcagctgatccccctggtggagaagatcttctag

SEQ ID NO: 104308 - DNA, 498 bp, synthetic construct
  misc_feature 1..498: note = Description of Artificial Sequence: Synthetic coding sequence
  source 1..498: mol_type = other DNA
atggtgagacccggcctggccagaatgagcctgcccagatgctggttcagataccccggctggaccggcgccgaggccggcagaggcagagccatcgtgagcagaagactgcccagcctgaacccctgggacgccggcgagagacacggcggcctggtgagaatctgcgccagcctgggcccccacaagagactgcccgccggcctgccccagtgcccccacctgtacctggccgccgaccccctggacccccagagaagacaggagaagagctgcgccgccctgggcaacgacaagagaagacagcccgacggccagagacagccccagcagcagcagcagccccactgcagaagaggcttccaggcccccgccctgcccaaccccctgagagtgctgcagggcctgggcagagtgagcatgagcctgggctggctggagagaccccccgccctgagcagagccgccggctgcagaggcgcccaggtggaggagtag

SEQ ID NO: 104309 - DNA, 657 bp, synthetic construct
  misc_feature 1..657: note = Description of Artificial Sequence: Synthetic coding sequence
  source 1..657: mol_type = other DNA
tgactgagcgagttcaaggagttcagccagagcttcgacgccgccatgaagggcctggccctgagcaacagcgacgtgatcagacaggtgcacaacagcttcgccagacagcagatgttcgagttcgacaccaagaccagcgccaaggaggaggacgccttccacttcgtgagctacgtgcccgtgaacggcagactgtacgagctggacggcctgagagagggccccatcgacctgggcgcctgcaaccaggacgactggatcagcgccgtgagacccgtgatcgagaagagaatccagaagtacagcgagggcgagatcagattcaacctgatggccatcgtgagcgacagaaagatgatctacgagcagaagatcgccgagctgcagagacagctggccgaggaggagcccatggacaccgaccagggcaacagcatgctgagcgccatccagagcgaggtggccaagaaccagatgctgatcgaggaggaggtgcagaagctgaagagatacaagatcgagaacatcagaagaaagcacaactacctgcccttcatcatggagctgctgaagaccctggccgagcaccagcagctgatccccctggtggagaagttcgagaagcacttcgagaagaccctgctgggcaagtag

SEQ ID NO: 104310 - DNA, 777 bp, synthetic construct
  misc_feature 1..777: note = Description of Artificial Sequence: Synthetic coding sequence
  source 1..777: mol_type = other DNA
atgagcctgggctggctggagagaccccccgccctgagcagagccgccggctgcagaggcgcccaggtggaggagatctggagcctggagcccgagaacttcgagaagctgaagcccgtgcacggcctgatcttcctgttcaagtggcagcccggcgaggagcccgccggcagcgtggtgcaggacagcagactggacaccatcttcttcgccaagcaggtgatcaacaacgcctgcgccacccaggccatcgtgagcgtgctgctgaactgcacccaccaggacgtgcacctgggcgagaccctgagcgagttcaaggagttcagccagagcttcgacgccgccatgaagggcctggccctgagcaacagcgacgtgatcagacaggtgcacaacagcttcgccagacagcagatgttcgagttcgacaccaagaccagcgccaaggaggaggacgccttccacttcgtgagctacgtgcccgtgaacggcagactgtacgagctggacggcctgagagagggccccatcgacctgggcgcctgcaaccaggacgactggatcagcgccgtgagacccgtgatcgagaagagaatccagaagtacagcgagggcgagatcagattcaacctgatggccatcgtgagcgacagaaagatgatctacgagcagaagatcgccgagctgcagagacagctggccgaggagcccatggacaccgaccagggcaacagcatgctgagcgccatccagagcgaggtggccaagaaccagtag

SEQ ID NO: 104311 - DNA, 552 bp, synthetic construct
  misc_feature 1..552: note = Description of Artificial Sequence: Synthetic coding sequence
  source 1..552: mol_type = other DNA
tgacagcagatgttcgagttcgacaccaagaccagcgccaaggaggaggacgccttccacttcgtgagctacgtgcccgtgaacggcagactgtacgagctggacggcctgagagagggccccatcgacctgggcgcctgcaaccaggacgactggatcagcgccgtgagacccgtgatcgagaagagaatccagaagtacagcgagggcgagatcagattcaacctgatggccatcgtgagcgacagaaagatgatctacgagcagaagatcgccgagctgcagagacagctggccgaggaggagcccatggacaccgaccagggcaacagcatgctgagcgccatccagagcgaggtggccaagaaccagatgctgatcgaggaggaggtgcagaagctgaagagatacaagatcgagaacatcagaagaaagcacaactacctgcccttcatcatggagctgctgaagaccctggccgagcaccagcagctgatccccctggtggagaagttcgagaagcacttcgagaagaccctgctgggcaagtag

SEQ ID NO: 104312 - DNA, 348 bp, synthetic construct
  misc_feature 1..348: note = Description of Artificial Sequence: Synthetic coding sequence
  source 1..348: mol_type = other DNA
tgagagggcgagatcagattcaacctgatggccatcgtgagcgacagaaagatgatctacgagcagaagatcgccgagctgcagagacagctggccgaggagcccatggacaccgaccagggcaacagcatgctgagcgccatccagagcgaggtggccaagaaccagatgctgatcgaggaggaggtgcagaagctgaagagatacaagatcgagaacatcagaagaaagcacaactacctgcccttcatcatggagctgctgaagaccctggccgagcaccagcagctgatccccctggtggagaagttcgagaagcacttcgagaagaccctgctgggcaagtag

SEQ ID NO: 104313 - DNA, 582 bp, synthetic construct
  misc_feature 1..582: note = Description of Artificial Sequence: Synthetic coding sequence
  source 1..582: mol_type = other DNA
atgaagggcctggccctgagcaacagcgacgtgatcagacaggtgcacaacagcttcgccagacagcagatgttcgagttcgacaccaagaccagcgccaaggaggaggacgccttccacttcgtgagctacgtgcccgtgaacggcagactgtacgagctggacggcctgagagagggccccatcgacctgggcgcctgcaaccaggacgactggatcagcgccgtgagacccgtgatcgagaagagaatccagaagtacagcgagggcgagatcagattcaacctgatggccatcgtgagcgacagaaagatgatctacgagcagaagatcgccgagctgcagagacagctggccgaggaggagcccatggacaccgaccagggcaacagcatgctgagcgccatccagagcgaggtggccaagaaccagatgctgatcgaggaggaggtgcagaagctgaagagatacaagatcgagaacatcagaagaaagcacaactacctgcccttcatcatggagctgctgaagaccctggccgagcaccagcagctgatccccctggtggagaagatcttctag

SEQ ID NO: 104314 - DNA, 498 bp, synthetic construct
  misc_feature 1..498: note = Description of Artificial Sequence: Synthetic coding sequence
  source 1..498: mol_type = other DNA
atggcccccaacgccagctgcctgtgcgtgcacgtgagaagcgaggagtgggacctgatgaccttcgacgccaacccctacgacagcgtgaagaagatcaaggagcacgtgagaagcaagaccaaggtgcccgtgcaggaccaggtgctgctgctgggcagcaagatcctgaagcccagaagaagcctgagcagctacggcatcgacaaggagaagaccatccacctgaccctgaaggtggtgaagcccagcgacgaggagctgcccctgttcctggtggagagcggcgacgaggccaagagacacctgctgcaggtgagaagaagcagcagcgtggcccaggtgaaggccatgatcgagaccaagaccggcatcatccccgagacccagatcgtgacctgcaacggcaagagactggaggacggcaagatgatggccgactacggcatcagaaagggcaacctgctgttcctggcctgctactgcatcggcggctag

SEQ ID NO: 104315 - DNA, 498 bp, synthetic construct
  misc_feature 1..498: note = Description of Artificial Sequence: Synthetic coding sequence
  source 1..498: mol_type = other DNA
atggcccccaacgccagctgcctgtgcgtgcacgtgagaagcgaggagtgggacctgatgaccttcgacgccaacccctacgacagcgtgaagaagatcaaggagcacgtgagaagcaagaccaaggtgcccgtgcaggaccaggtgctgctgctgggcagcaagatcctgaagcccagaagaagcctgagcagctacggcatcgacaaggagaagaccatccacctgaccctgaaggtggtgaagcccagcgacgaggagctgcccctgttcctggtggagagcggcgacgaggccaagagacacctgctgcaggtgagaagaagcagcagcgtggcccaggtgaaggccatgatcgagaccaagaccggcatcatccccgagacccagatcgtgacctgcaacggcaagagactggaggacggcaagatgatggccgactacggcatcagaaagggcaacctgctgttcctggccagctactgcatcggcggctag

SEQ ID NO: 104316 - DNA, 498 bp, synthetic construct
  misc_feature 1..498: note = Description of Artificial Sequence: Synthetic coding sequence
  source 1..498: mol_type = other DNA
atggcccccaacgccagctgcctgtgcgtgcacgtgagaagcgaggagtgggacctgatgaccttcgacgccaacccctacgacagcgtgaagaagatcaaggagcacgtgagaagcaagaccaaggtgcccgtgcaggaccaggtgctgctgctgggcagcaagatcctgaagcccagaagaagcctgagcagctacggcaccgacaaggagaagaccatccacctgaccctgaaggtggtgaagcccagcgacgaggagctgcccctgttcctggtggagagcggcgacgaggccaagagacacctgctgcaggtgagaagaagcagcagcgtggcccaggtgaaggccatgatcgagaccaagaccggcatcatccccgagacccagatcgtgacctgcaacggcaagagactggaggacggcaagatgatggccgactacggcatcagaaagggcaacctgctgttcctggccagctactgcatcggcggctag

SEQ ID NO: 104317 - DNA, 498 bp, synthetic construct; identical to SEQ ID NO: 104316
  misc_feature 1..498: note = Description of Artificial Sequence: Synthetic coding sequence
  source 1..498: mol_type = other DNA

SEQ ID NO: 104318 - DNA, 498 bp, synthetic construct; identical to SEQ ID NO: 104314
  misc_feature 1..498: note = Description of Artificial Sequence: Synthetic coding sequence
  source 1..498: mol_type = other DNA

SEQ ID NO: 104319 - DNA, 498 bp, synthetic construct; identical to SEQ ID NO: 104316
  misc_feature 1..498: note = Description of Artificial Sequence: Synthetic coding sequence
  source 1..498: mol_type = other DNA

SEQ ID NO: 104320 - DNA, 498 bp, synthetic construct; identical to SEQ ID NO: 104315
  misc_feature 1..498: note = Description of Artificial Sequence: Synthetic coding sequence
  source 1..498: mol_type = other DNA

SEQ ID NO: 104321 - DNA, 705 bp, synthetic construct
  misc_feature 1..705: note = Description of Artificial Sequence: Synthetic coding sequence
  source 1..705: mol_type = other DNA
atgggcggctgcgtgggcgcccagcacgacagcagcggcagcctgaacgagaacagcgagggcaccggcgtggccctgggcagaaaccagcccctgaagaaggagaagcccaagtggaagagcgactaccccatgaccgacggccagctgagaagcaagagagacgagttctgggacaccgcccccgccttcgagggcagaaaggagatctgggacgccctgaaggccgccgcccacgccttcgagagcaacgaccacgagctggcccaggccatcatcgacggcgccaacatcaccctgccccacggcgccctgaccgagtgctacgacgagctgggcaacagataccagctgcccgtgtactgcctggccccccccatcaacatgatcgaggagaagagcgacatcgagaccctggacatccccgagcccccccccaacagcggctacgagtgccagctgagactgagactgagcaccggcaaggacctgaagctggtggtgagaagcaccgacaccgtgttccacatgaagagaagactgcacgccgccgagggcgtggagcccggcagccagagatggttcttcagcggcagacccctgaccgacaagatgaagttcgaggagctgaagatccccaaggactacgtggtgcaggtgatcgtgagccagcccgtgcagaaccccacccccgtggagaactag

SEQ ID NO: 104322 - DNA, 924 bp, synthetic construct
  misc_feature 1..924: note = Description of Artificial Sequence: Synthetic coding sequence
  source 1..924: mol_type = other DNA
atgttcagcttcaacatgttcgaccaccccatccccagagtgttccagaacagattcagcacccagtacagatgcttcagcgtgagcatgctggccggccccaacgacagaagcgacgtggagaagggcggcaagatcatcatgccccccagcgccctggaccagctgagcagactgaacatcacctaccccatgctgttcaagctgaccaacaagaacagcgacagaatgacccactgcggcgtgctggagttcgtggccgacgagggcatctgctacctgccccactggatgatgcagaacctgctgctggaggagggcggcctggtgcaggtggagagcgtgaacctgcaggtggccacctacagcaagttccagccccagagccccgacttcctggacatcaccaaccccaaggccgtgctggagaacgccctgagaaacttcgcctgcctgaccaccggcgacgtgatcgccatcaactacaacgagaagatctacgagctgagagtgatggagaccaagcccgacaaggccgtgagcatcatcgagtgcgacatgaacgtggacttcgacgcccccctgggctacaaggagcccgagagacaggtgcagcacgaggagagcaccgagggcgaggccgaccacagcggctacgccggcgagctgggcttcagagccttcagcggcagcggcaacagactggacggcaagaagaagggcgtggagcccagccccagccccatcaagcccggcgacatcaagagaggcatccccaactacgagttcaagctgggcaagatcaccttcatcagaaacagcagacccctggtgaagaaggtggaggaggacgaggccggcggcagattcgtggccttcagcggcgagggccagagcctgagaaagaagggcagaaagccctag

SEQ ID NO: 104323 - DNA, 891 bp, synthetic construct
  misc_feature 1..891: note = Description of Artificial Sequence: Synthetic coding sequence
  source 1..891: mol_type = other DNA
atgttcagcttcaacatgttcgaccaccccatccccagagtgttccagaacagattcagcacccagtacagatgcttcagcgtgagcatgctggccggccccaacgacagaagcgacgtggagaagggcggcaagagcagactgaacatcacctaccccatgctgttcaagctgaccaacaagaacagcgacagaatgacccactgcggcgtgctggagttcgtggccgacgagggcatctgctacctgccccactggatgatgcagaacctgctgctggaggagggcggcctggtgcaggtggagagcgtgaacctgcaggtggccacctacagcaagttccagccccagagccccgacttcctggacatcaccaaccccaaggccgtgctggagaacgccctgagaaacttcgcctgcctgaccaccggcgacgtgatcgccatcaactacaacgagaagatctacgagctgagagtgatggagaccaagcccgacaaggccgtgagcatcatcgagtgcgacatgaacgtggacttcgacgcccccctgggctacaaggagcccgagagacaggtgcagcacgaggagagcaccgagggcgaggccgaccacagcggctacgccggcgagctgggcttcagagccttcagcggcagcggcaacagactggacggcaagaagaagggcgtggagcccagccccagccccatcaagcccggcgacatcaagagaggcatccccaactacgagttcaagctgggcaagatcaccttcatcagaaacagcagacccctggtgaagaaggtggaggaggacgaggccggcggcagattcgtggccttcagcggcgagggccagagcctgagaaagaagggcagaaagccctag

SEQ ID NO: 104324 - DNA, 1032 bp, synthetic construct
  misc_feature 1..1032: note = Description of Artificial Sequence: Synthetic coding sequence
  source 1..1032: mol_type = other DNA
atgttcagcttcaacatgttcgaccaccccatccccagagtgttccagaacagattcagcacccagtacagatgcttcagcgtgagcatgctggccggccccaacgacagaagcgacgtggagaagggcggcaagatcatcatgccccccagcgccctggaccagctgagcagactgaacatcacctaccccatgctgttcaagctgaccaacaagaacagcgacagaatgacccactgcggcgtgctggagttcgtggccgacgagggcatctgctacctgccccactgggtggtgtacagactgagcctggagagagacggcctgaagagcctggaggtggccgaggtgagcggcagcgactacttccccagccccttctgcggcctggaggtgtggatgatgcagaacctgctgctggaggagggcggcctggtgcaggtggagagcgtgaacctgcaggtggccacctacagcaagttccagccccagagccccgacttcctggacatcaccaaccccaaggccgtgctggagaacgccctgagaaacttcgcctgcctgaccaccggcgacgtgatcgccatcaactacaacgagaagatctacgagctgagagtgatggagaccaagcccgacaaggccgtgagcatcatcgagtgcgacatgaacgtggacttcgacgcccccctgggctacaaggagcccgagagacaggtgcagcacgaggagagcaccgagggcgaggccgaccacagcggctacgccggcgagctgggcttcagagccttcagcggcagcggcaacagactggacggcaagaagaagggcgtggagcccagccccagccccatcaagcccggcgacatcaagagaggcatccccaactacgagttcaagctgggcaagatcaccttcatcagaaacagcagacccctggtgaagaaggtggaggaggacgaggccggcggcagattcgtggccttcagcggcgagggccagagcctgagaaagaagggcagaaagccctag

SEQ ID NO: 104325 - DNA, 801 bp, synthetic construct
  misc_feature 1..801: note = Description of Artificial Sequence: Synthetic coding sequence
  source 1..801: mol_type = other DNA
atgttcagcttcaacatgttcgaccaccccatccccagagtgttccagaacagattcagcacccagtacagatgcttcagcgtgagcatgctggccggccccaacgacagaagcgacgtggagaagggcggcaagatcatcatgccccccagcgccctggaccagctgagcagactgaacatcacctaccccatgctgttcaagctgaccaacaagaacagcgacagaatgacccactgcggcgtgctggagttcgtggccgacgagggcatctgctacctgccccactggatgatgcagaacctgctgctggaggagggcggcctggtgcaggtggagagcgtgaacctgcaggtggccacctacagcaagttccagccccagagccccgacttcctggacatcaccaaccccaaggccgtgctggagaacgccctgagaaacttcgcctgcctgaccaccggcgacgtgatcgccatcaactacaacgagaagatctacgagctgagagtgatggagaccaagcccgacaaggccgtgagcatcatcgagtgcgacatgaacgtggacttcgacgcccccctgggctacaaggagcccgagagacaggtgcagcacgaggagagcaccgagggcgaggccgaccacagcggctacgccggcgagctgggcttcagagccttcagcggcagcggcaacagactggacggcaagaagaagggcgtggagcccagccccagccccatcaagcccggcgacatcaagagaggcatccccaactacgagttcaagctgggctag

SEQ ID NO: 104326 - DNA, 1053 bp, synthetic construct
  misc_feature 1..1053: note = Description of Artificial Sequence: Synthetic coding sequence
  source 1..1053: mol_type = other DNA
atgctgcccctgcccgacctggacctgtggcccctggacagactgcccagccccatcaagagaaagccccagaccctgggcagcctgaagagcagccagggcatcgtggaggagaccagcgaggagggcaacagcgtgcccgccagccagagcgtggccgccctgaccagcaagagaagcctggtgctgatgcccgagagcagcgccgaggagatcaccgtgtgccccgagacccagctgagcagcagcgagaccttcgacctggagagagaggtgagccccggcagcagagacatcctggacggcgtgagaatcatcatggccgacaaggaggtgggcaacaaggaggacgccgagaaggaggtggccatcagcaccttcagcagcagcaaccaggtgagctgccccctgtgcgaccagtgcttcccccccaccaagatcgagagacacgccatgtactgcaacggcctgatggaggaggacaccgaggtgctgaccagaagacagaaggaggccaagaccaagagcgacagcggcaccgccgcccagaccagcctggacatcgacaagaacgagaagtgctacctgtgcaagagcctggtgcccttcagagagtaccagtgccacgtggacagctgcctgcagctggccaaggccgaccagggcgacggccccgagggcagcggcagagcctgcagcaccgtggagggcaagtggcagcagagactgaagaaccccaaggagaagggccacagcgagggcagactgctgagcttcctggagcagagcgagcacaagaccagcgacgccgacatcaagagcagcgagaccggcgccttcagagtgcccagccccggcatggaggaggccggctgcagcagagagatgcagagcagcttcaccagaagagacctgaacgagagccccgtgaagagcttcgtgagcatcagcgaggccaccgactgcctggtggacttcaagaagcaggtgaccgtgcagcccggcagcagaaccagaaccaaggccggcagaggcagaagaagaaagttctag

SEQ ID NO: 104327 - DNA, 2163 bp, synthetic construct
  misc_feature 1..2163: note = Description of Artificial Sequence: Synthetic coding sequence
  source 1..2163: mol_type = other DNA
atgcccagaagaaagaagaaggtgaaggaggtgagcgagagcagaaacctggagaagaaggacgtggagaccaccagcagcgtgagcgtgaagagaaagagaagactggaggacgccttcatcgtgatcagcgacagcgacggcgaggagcccaaggaggagaacggcctgcagaagaccaagaccaagcagagcaacagagccaagtgcctggccaagagaaagatcgcccagatgaccgaggaggagcagttcgccctggccctgaagatgagcgagcaggaggccagagaggtgaacagccaggaggaggaggaggaggagctgctgagaaaggccatcgccgagagcctgaacagctgcagacccagcgacgccagcgccaccagaagcagacccctggccaccggccccagcagccagagccaccaggagaagaccaccgacagcggcctgaccgagggcatctggcagctggtgccccccagcctgttcaagggcagccacatcagccagggcaacgaggccgaggagagagaggagccctgggaccacaccgagaagaccgaggaggagcccgtgagcggcagcagcggcagctgggaccagagcagccagcccgtgttcgagaacgtgaacgtgaagagcttcgacagatgcaccggccacagcgccgagcacacccagtgcggcaagccccaggagagcaccggcagaggcagcgccttcctgaaggccgtgcagggcagcggcgacaccagcagacactgcctgcccaccctggccgacgccaagggcctgcaggacaccggcggcaccgtgaactacttctggggcatccccttctgccccgacggcgtggaccccaaccagtacaccaaggtgatcctgtgccagctggaggtgtaccagaagagcctgaagatggcccagagacagctgctgaacaagaagggcttcggcgagcccgtgctgcccagaccccccagcctgatccagaacgagtgcggccagggcgagcaggccagcgagaagaacgagtgcatcagcgaggacatgggcgacgaggacaaggaggagagacaggagagcagagccagcgactggcacagcaagaccaaggacttccaggagagcagcatcaagagcctgaaggagaagctgctgctggaggaggagcccaccaccagccacggccagagcagccagggcatcgtggaggagaccagcgaggagggcaacagcgtgcccgccagccagagcgtggccgccctgaccagcaagagaagcctggtgctgatgcccgagagcagcgccgaggagatcaccgtgtgccccgagacccagctgagcagcagcgagaccttcgacctggagagagaggtgagccccggcagcagagacatcctggacggcgtgagaatcatcatggccgacaaggaggtgggcaacaaggaggacgccgagaaggaggtggccatcagcaccttcagcagcagcaaccaggtgagctgccccctgtgcgaccagtgcttcccccccaccaagatcgagagacacgccatgtactgcaacggcctgatggaggaggacaccgaggtgctgaccagaagacagaaggaggccaagaccaagagcgacagcggcaccgccgcccagaccagcctggacatcgacaagaacgagaagtgctacctgtgcaagagcctggtgcccttcagagagtaccagtgccacgtggacagctgcctgcagctggccaaggccgaccagggcgacggccccgagggcagcggcagagcctgcagcaccgtggagggcaagtggcagcagagactgaagaaccccaaggagaagggccacagcgagggcagactgctgagcttcctggagcagagcgagcacaagaccagcgacgccgacatcaagagcagcgagaccggcgccttcagagtgcccagccccggcatggaggaggccggctgcagcagagagatgcagagcagcttcaccagaagagacctgaacgagagccccgtgaagagcttcgtgagcatcagcgaggccaccgactgcctggtggacttcaagaagcaggtgaccgtgcagcccggcagcagaaccagaaccaaggccggcagaggcagaagaagaaagttctag

SEQ ID NO: 104328 - DNA, 1929 bp, synthetic construct
  misc_feature 1..1929: note = Description of Artificial Sequence: Synthetic coding sequence
  source 1..1929: mol_type = other DNA
atgaccgaggaggagcagttcgccctggccctgaagatgagcgagcaggaggccagagaggtgaacagccaggaggaggaggaggaggagctgctgagaaaggccatcgccgagagcctgaacagctgcagacccagcgacgccagcgccaccagaagcagacccctggccaccggccccagcagccagagccaccaggagaagaccaccgacagcggcctgaccgagggcatctggcagctggtgccccccagcctgttcaagggcagccacatcagccagggcaacgaggccgaggagagagaggagccctgggaccacaccgagaagaccgaggaggagcccgtgagcggcagcagcggcagctgggaccagagcagccagcccgtgttcgagaacgtgaacgtgaagagcttcgacagatgcaccggccacagcgccgagcacacccagtgcggcaagccccaggagagcaccggcagaggcagcgccttcctgaaggccgtgcagggcagcggcgacaccagcagacactgcctgcccaccctggccgacgccaagggcctgcaggacaccggcggcaccgtgaactacttctggggcatccccttctgccccgacggcgtggaccccaaccagtacaccaaggtgatcctgtgccagctggaggtgtaccagaagagcctgaagatggcccagagacagctgctgaacaagaagggcttcggcgagcccgtgctgcccagaccccccagcctgatccagaacgagtgcggccagggcgagcaggccagcgagaagaacgagtgcatcagcgaggacatgggcgacgaggacaaggaggagagacaggagagcagagccagcgactggcacagcaagaccaaggacttccaggagagcagcatcaagagcctgaaggagaagctgctgctggaggaggagcccaccaccagccacggccagagcagccagggcatcgtggaggagaccagcgaggagggcaacagcgtgcccgccagccagagcgtggccgccctgaccagcaagagaagcctggtgctgatgcccgagagcagcgccgaggagatcaccgtgtgccccgagacccagctgagcagcagcgagaccttcgacctggagagagaggtgagccccggcagcagagacatcctggacggcgtgagaatcatcatggccgacaaggaggtgggcaacaaggaggacgccgagaaggaggtggccatcagcaccttcagcagcagcaaccaggtgagctgccccctgtgcgaccagtgcttcccccccaccaagatcgagagacacgccatgtactgcaacggcctgatggaggaggacaccgaggtgctgaccagaagacagaaggaggccaagaccaagagcgacagcggcaccgccgcccagaccagcctggacatcgacaagaacgagaagtgctacctgtgcaagagcctggtgcccttcagagagtaccagtgccacgtggacagctgcctgcagctggccaaggccgaccagggcgacggccccgagggcagcggcagagcctgcagcaccgtggagggcaagtggcagcagagactgaagaaccccaaggagaagggccacagcgagggcagactgctgagcttcctggagcagagcgagcacaagaccagcgacgccgacatcaagagcagcgagaccggcgccttcagagtgcccagccccggcatggaggaggccggctgcagcagagagatgcagagcagcttcaccagaagagacctgaacgagagccccgtgaagagcttcgtgagcatcagcgaggccaccgactgcctggtggacttcaagaagcaggtgaccgtgcagcccggcagcagaaccagaaccaaggccggcagaggcagaagaagaaagttctag

SEQ ID NO: 104329 - DNA, 2160 bp, synthetic construct
  misc_feature 1..2160: note = Description of Artificial Sequence: Synthetic coding sequence
  source 1..2160: mol_type = other DNA
atgcccagaagaaagaagaaggtgaaggaggtgagcgagagcagaaacctggagaagaaggacgtggagaccaccagcagcgtgagcgtgaagagaaagagaagactggaggacgccttcatcgtgatcagcgacagcgacggcgaggagcccaaggaggagaacggcctgcagaagaccaagaccaagcagagcaacagagccaagtgcctggccaagagaaagatcgcccagatgaccgaggaggagcagttcgccctggccctgaagatgagcgagcaggaggccagagaggtgaacagccaggaggaggaggaggaggagctgctgagaaaggccatcgccgagagcctgaacagctgcagacccagcgacgccagcgccaccagaagcagacccctggccaccggccccagcagccagagccaccaggagaagaccaccgacagcggcctgaccgagggcatctggcagctggtgccccccagcctgttcaagggcagccacatcagccagggcaacgaggccgaggagagagaggagccctgggaccacaccgagaagaccgaggaggagcccgtgagcggcagcagcggcagctgggaccagagcagccagcccgtgttcgagaacgtgaacgtgaagagcttcgacagatgcaccggccacagcgccgagcacacccagtgcggcaagccccaggagagcaccggcagaggcagcgccttcctgaaggccgtgcagggcagcggcgacaccagcagacactgcctgcccaccctggccgacgccaagggcctgcaggacaccggcggcaccgtgaactacttctggggcatccccttctgccccgacggcgtggaccccaaccagtacaccaaggtgatcctgtgccagctggaggtgtaccagaagagcctgaagatggcccagagacagctgctgaacaagaagggcttcggcgagcccgtgctgcccagaccccccagcctgatccagaacgagtgcggccagggcgagcaggccagcgagaagaacgagtgcatcagcgaggacatgggcgacgaggacaaggaggagagacaggagagcagagccagcgactggcacagcaagaccaaggacttccaggagagcagcatcaagagcctgaaggagaagctgctgctggaggaggagcccaccaccagccacggccagagcagccagggcatcgtggaggagaccagcgaggagggcaacagcgtgcccgccagccagagcgtggccgccctgaccagcaagagaagcctggtgctgatgcccgagagcagcgccgaggagatcaccgtgtgccccgagacccagctgagcagcagcgagaccttcgacctggagagagaggtgagccccggcagcagagacatcctggacggcgtgagaatcatcatggccgacaaggaggtgggcaacaaggaggacgccgagaaggaggtggccatcagcaccttcagcagcagcaaccaggtgagctgccccctgtgcgaccagtgcttcccccccaccaagatcgagagacacgccatgtactgcaacggcctgatggaggaggacaccgtgctgaccagaagacagaaggaggccaagaccaagagcgacagcggcaccgccgcccagaccagcctggacatcgacaagaacgagaagtgctacctgtgcaagagcctggtgcccttcagagagtaccagtgccacgtggacagctgcctgcagctggccaaggccgaccagggcgacggccccgagggcagcggcagagcctgcagcaccgtggagggcaagtggcagcagagactgaagaaccccaaggagaagggccacagcgagggcagactgctgagcttcctggagcagagcgagcacaagaccagcgacgccgacatcaagagcagcgagaccggcgccttcagagtgcccagccccggcatggaggaggccggctgcagcagagagatgcagagcagcttcaccagaagagacctgaacgagagccccgtgaagagcttcgtgagcatcagcgaggccaccgactgcctggtggacttcaagaagcaggtgaccgtgcagcccggcagcagaaccagaaccaaggccggcagaggcagaagaagaaagttctag

SEQ ID NO: 104330 - DNA, 96 bp, synthetic construct
  misc_feature 1..96: note = Description of Artificial Sequence: Synthetic coding sequence
  source 1..96: mol_type = other DNA
atgcccagaagaaagaagaaggtgaaggaggtgagcgagagcagaaacctggagaagaaggacgtggagaccaccagcagcgtgagcgtgaagtag

SEQ ID NO: 104331 - DNA, 270 bp, synthetic construct
  misc_feature 1..270: note = Description of Artificial Sequence: Synthetic coding sequence
  source 1..270: mol_type = other DNA
atgcccagaagaaagaagaaggtgaaggaggtgagcgagagcagaaacctggagaagaaggacgtggagaccaccagcagcgtgagcgtgaagagaaagagaagactggaggacgccttcatcgtgatcagcgacagcgacggcgaggagcccaaggaggagaacggcctgcagaagaccaagaccaagcagagcaacagagccaagtgcctggccaagagaaagatcgcccagatgaccgaggaggagcagttcgccctggccctgtag

SEQ ID NO: 104332 - DNA, 474 bp, synthetic construct
  misc_feature 1..474: note = Description of Artificial Sequence: Synthetic coding sequence
  source 1..474: mol_type = other DNA
atgcccagaagaaagaagaaggtgaaggaggtgagcgagagcagaaacctggagaagaaggacgtggagaccaccagcagcgtgagcgtgaagagaaagagaagactggaggacgccttcatcgtgatcagcgacagcgacggcgaggagcccaaggaggagaacggcctgcagaagaccaagaccaagcagagcaacagagccaagtgcctggccaagagaaagatcgcccagatgaccgaggaggagcagttcgccctggccctgaagatgagcgagcaggaggccagagaggtgaacagccaggaggaggaggaggaggagctgctgagaaaggccatcgccgagagcctgaacagctgcagacccagcgacgccagcgccaccagaagcagacccctggccaccggccccagcagccagagccaccaggagaagaccaccgacagcggcctgaccgagggcatctggtag

SEQ ID NO: 104333 - DNA, 2160 bp, synthetic construct; identical to SEQ ID NO: 104329
  misc_feature 1..2160: note = Description of Artificial Sequence: Synthetic coding sequence
  source 1..2160: mol_type = other DNA

SEQ ID NO: 104334 - DNA, 5250 bp, synthetic construct
  misc_feature 1..5250: note = Description of Artificial Sequence: Synthetic coding sequence
  source 1..5250: mol_type = other DNA
atggccgacgaggaggccggcggcaccgagagaatggagatcagcgccgagctgccccagaccccccagagactggccagctggtgggaccagcaggtggacttctacaccgccttcctgcaccacctggcccagctggtgcccgagatctacttcgccgagatggaccccgacctggagaagcaggaggagagcgtgcagatgagcatcttcacccccctggagtggtacctgttcggcgaggaccccgacatctgcctggagaagctgaagcacagcggcgccttccagctgtgcggcagagtgttcaagagcggcgagaccacctacagctgcagagactgcgccatcgaccccacctgcgtgctgtgcatggactgcttccaggacagcgtgcacaagaaccacagatacaagatgcacaccagcaccggcggcggcttctgcgactgcggcgacaccgaggcctggaagaccggccccttctgcgtgaaccacgagcccggcagagccggcaccatcaaggagaacagcagatgccccctgaacgaggaggtgatcgtgcaggccagaaagatcttccccagcgtgatcaagtacgtggtggagatgaccatctgggaggaggagaaggagctgccccccgagctgcagatcagagagaagaacgagagatactactgcgtgctgttcaacgacgagcaccacagctacgaccacgtgatctacagcctgcagagagccctggactgcgagctggccgaggcccagctgcacaccaccgccatcgacaaggagggcagaagagccgtgaaggccggcgcctacgccgcctgccaggaggccaaggaggacatcaagagccacagcgagaacgtgagccagcaccccctgcacgtggaggtgctgcacagcgagatcatggcccaccagaagttcgccctgagactgggcagctggatgaacaagatcatgagctacagcagcgacttcagacagatcttctgccaggcctgcctgagagaggagcccgacagcgagaacccctgcctgatcagcagactgatgctgtgggacgccaagctgtacaagggcgccagaaagatcctgcacgagctgatcttcagcagcttcttcatggagatggagtacaagaagctgttcgccatggagttcgtgaagtactacaagcagctgcagaaggagtacatcagcgacgaccacgacagaagcatcagcatcaccgccctgagcgtgcagatgttcaccgtgcccaccctggccagacacctgatcgaggagcagaacgtgatcagcgtgatcaccgagaccctgctggaggtgctgcccgagtacctggacagaaacaacaagttcaacttccagggctacagccaggacaagctgggcagagtgtacgccgtgatctgcgacctgaagtacatcctgatcagcaagcccaccatctggaccgagagactgagaatgcagttcctggagggcttcagaagcttcctgaagatcctgacctgcatgcagggcatggaggagatcagaagacaggtgggccagcacatcgaggtggaccccgactgggaggccgccatcgccatccagatgcagctgaagaacatcctgctgatgttccaggagtggtgcgcctgcgacgaggagctgctgctggtggcctacaaggagtgccacaaggccgtgatgagatgcagcaccagcttcatcagcagcagcaagaccgtggtgcagagctgcggccacagcctggagaccaagagctacagagtgagcgaggacctggtgagcatccacctgcccctgagcagaaccctggccggcctgcacgtgagactgagcagactgggcgccgtgagcagactgcacgagttcgtgagcttcgaggacttccaggtggaggtgctggtggagtaccccctgagatgcctggtgctggtggcccaggtggtggccgagatgtggagaagaaacggcctgagcctgatcagccaggtgttctactaccaggacgtgaagtgcagagaggagatgtacgacaaggacatcatcatgctgcagatcggcgccagcctgatggaccccaacaagttcctgctgctggtgctgcagagatacgagctggccgaggccttcaacaagaccatcagcaccaaggaccaggacctgatcaagcagtacaacaccctgatcgaggagatgctgcaggtgctgatctacatcgtgggcgagagatacgtgcccggcgtgggcaacgtgaccaaggaggaggtgaccatgagagagatcatccacctgctgtgcatcgagcccatgccccacagcgccatcgccaagaacctgcccgagaacgagaacaacgagaccggcctggagaacgtgatcaacaaggtggccaccttcaagaagcccggcgtgagcggccacggcgtgtacgagctgaaggacgagagcctgaaggacttcaacatgtacttctaccactacagcaagacccagcacagcaaggccgagcacatgcagaagaagagaagaaagcaggagaacaaggacgaggccctgccccccccccccccccccgagttctgccccgccttcagcaaggtgatcaacctgctgaactgcgacatcatgatgtacatcctgagaaccgtgttcgagagagccatcgacaccgacagcaacctgtggaccgagggcatgctgcagatggccttccacatcctggccctgggcctgctggaggagaagcagcagctgcagaaggcccccgaggaggaggtgaccttcgacttctaccacaaggccagcagactgggcagcagcgccatgaacatccagatgctgctggagaagctgaagggcatcccccagctggagggccagaaggacatgatcacctggatcctgcagatgttcgacaccgtgaagagactgagagagaagagctgcctgatcgtggccaccaccagcggcagcgagagcatcaagaacgacgagatcacccacgacaaggagaaggccgagagaaagagaaaggccgaggccgccagactgcacagacagaagatcatggcccagatgagcgccctgcagaagaacttcatcgagacccacaagctgatgtacgacaacaccagcgagatgcccggcaaggaggacagcatcatggaggaggagagcacccccgccgtgagcgactacagcagaatcgccctgggccccaagagaggccccagcgtgaccgagaaggaggtgctgacctgcatcctgtgccaggaggagcaggaggtgaagatcgagaacaacgccatggtgctgagcgcctgcgtgcagaagagcaccgccctgacccagcacagaggcaagcccatcgagctgagcggcgaggccctggaccccctgttcatggaccccgacctggcctacggcacctacaccggcagctgcggccacgtgatgcacgccgtgtgctggcagaagtacttcgaggccgtgcagctgagcagccagcagagaatccacgtggacctgttcgacctggagagcggcgagtacctgtgccccctgtgcaagagcctgtgcaacaccgtgatccccatcatccccctgcagccccagaagatcaacagcgagaacgccgacgccctggcccagctgctgaccctggccagatggatccagaccgtgctggccagaatcagcggctacaacatcagacacgccaagggcgagaaccccatccccatcttcttcaaccagggcatgggcgacagcaccctggagttccacagcatcctgagcttcggcgtggagagcagcatcaagtacagcaacagcatcaaggagatggtgatcctgttcgccaccaccatctacagaatcggcctgaaggtgccccccgacgagagagaccccagagtgcccatgctgacctggagcacctgcgccttcaccatccaggccatcgagaacctgctgggcgacgagggcaagcccctgttcggcgccctgcagaacagacagcacaacggcctgaaggccctgatgcagttcgccgtggcccagagaatcacctgcccccaggtgctgatccagaagcacctggtgagactgctgagcgtggtgctgcccaacatcaagagcgaggacaccccctgcctgctgagcatcgacctgttccacgtgctggtgggcgccgtgctggccttccccagcctgtactgggacgaccccgtggacctgcagcccagcagcgtgagcagcagctacaaccacctgtacctgttccacctgatcaccatggcccacatgctgcagatcctgctgaccgtggacaccggcctgcccctggcccaggtgcaggaggacagcgaggaggcccacagcgccagcagcttcttcgccgagatcagccagtacaccagcggcagcatcggctgcgacatccccggctggtacctgtgggtgagcctgaagaacggcatcaccccctacctgagatgcgccgccctgttcttccactacctgctgggcgtgaccccccccgaggagctgcacaccaacagcgccgagggcgagtacagcgccctgtgcagctacctgagcctgcccaccaacctgttcctgctgttccaggagtactgggacaccgtgagacccctgctgcagagatggtgcgccgaccccgccctgctgaactgcctgaagcagaagaacaccgtggtgagataccccagaaagagaaacagcctgatcgagctgcccgacgactacagctgcctgctgaaccaggccagccacttcagatgccccagaagcgccgacgacgagagaaagcaccccgtgctgtgcctgttctgcggcgccatcctgtgcagccagaacatctgctgccaggagatcgtgaacggcgaggaggtgggcgcctgcatcttccacgccctgcactgcggcgccggcgtgtgcatcttcctgaagatcagagagtgcagagtggtgctggtggagggcaaggccagaggctgcgcctaccccgccccctacctggacgagtacggcgagaccgaccccggcctgaagagaggcaaccccctgcacctgagcagagagagatacagaaagctgcacctggtgtggcagcagcactgcatcatcgaggagatcgccagaagccaggagaccaaccagatgctgttcggcttcaactggcagctgctgtag

SEQ ID NO: 104335 - DNA, 2412 bp, synthetic construct
  misc_feature 1..2412: note = Description of Artificial Sequence: Synthetic coding sequence
  source 1..2412: mol_type = other DNA
atggccgacgaggaggccggcggcaccgagagaatggagatcagcgccgagctgccccagaccccccagagactggccagctggtgggaccagcaggtggacttctacaccgccttcctgcaccacctggcccagctggtgcccgagatctacttcgccgagatggaccccgacctggagaagcaggaggagagcgtgcagatgagcatcttcacccccctggagtggtacctgttcggcgaggaccccgacatctgcctggagaagctgaagcacagcggcgccttccagctgtgcggcagagtgttcaagagcggcgagaccacctacagctgcagagactgcgccatcgaccccacctgcgtgctgtgcatggactgcttccaggacagcgtgcacaagaaccacagatacaagatgcacaccagcaccggcggcggcttctgcgactgcggcgacaccgaggcctggaagaccggccccttctgcgtgaaccacgagcccggcagagccggcaccatcaaggagaacagcagatgccccctgaacgaggaggtgatcgtgcaggccagaaagatcttccccagcgtgatcaagtacgtggtggagatgaccatctgggaggaggagaaggagctgccccccgagctgcagatcagagagaagaacgagagatactactgcgtgctgttcaacgacgagcaccacagctacgaccacgtgatctacagcctgcagagagccctggactgcgagctggccgaggcccagctgcacaccaccgccatcgacaaggagggcagaagagccgtgaaggccggcgcctacgccgcctgccaggaggccaaggaggacatcaagagccacagcgagaacgtgagccagcaccccctgcacgtggaggtgctgcacagcgagatcatggcccaccagaagttcgccctgagactgggcagctggatgaacaagatcatgagctacagcagcgacttcagacagatcttctgccaggcctgcctgagagaggagcccgacagcgagaacccctgcctgatcagcagactgatgctgtgggacgccaagctgtacaagggcgccagaaagatcctgcacgagctgatcttcagcagcttcttcatggagatggagtacaagaagctgttcgccatggagttcgtgaagtactacaagcagctgcagaaggagtacatcagcgacgaccacgacagaagcatcagcatcaccgccctgagcgtgcagatgttcaccgtgcccaccctggccagacacctgatcgaggagcagaacgtgatcagcgtgatcaccgagaccctgctggaggtgctgcccgagtacctggacagaaacaacaagttcaacttccagggctacagccaggacaagctgggcagagtgtacgccgtgatctgcgacctgaagtacatcctgatcagcaagcccaccatctggaccgagagactgagaatgcagttcctggagggcttcagaagcttcctgaagatcctgacctgcatgcagggcatggaggagatcagaagacaggtgggccagcacatcgaggtggaccccgactgggaggccgccatcgccatccagatgcagctgaagaacatcctgctgatgttccaggagtggtgcgcctgcgacgaggagctgctgctggtggcctacaaggagtgccacaaggccgtgatgagatgcagcaccagcttcatcagcagcagcaagaccgtggtgcagagctgcggccacagcctggagaccaagagctacagagtgagcgaggacctggtgagcatccacctgcccctgagcagaaccctggccggcctgcacgtgagactgagcagactgggcgccgtgagcagactgcacgagttcgtgagcttcgaggacttccaggtggaggtgctggtggagtaccccctgagatgcctggtgctggtggcccaggtggtggccgagatgtggagaagaaacggcctgagcctgatcagccaggtgttctactaccaggacgtgaagtgcagagaggagatgtacgacaaggacatcatcatgctgcagatcggcgccagcctgatggaccccaacaagttcctgctgctggtgctgcagagatacgagctggccgaggccttcaacaagaccatcagcaccaaggaccaggacctgatcaagcagtacaacaccctgatcgaggagatgctgcaggtgctgatctacatcgtgggcgagagatacgtgcccggcgtgggcaacgtgaccaaggaggaggtgaccatgagagagatcatccacctgctgtgcatcgagcccatgccccacagcgccatcgccaagaacctgcccgagaacgagaccagatgcatcagaccctggagcctgtag

SEQ ID NO: 104336 - DNA, 3042 bp, synthetic construct
  misc_feature 1..3042: note = Description of Artificial Sequence: Synthetic coding sequence
  source 1..3042: mol_type = other DNA
atggccgacgaggaggccggcggcaccgagagaatggagatcagcgccgagctgccccagaccccccagagactggccagctggtgggaccagcaggtggacttctacaccgccttcctgcaccacctggcccagctggtgcccgagatctacttcgccgagatggaccccgacctggagaagcaggaggagagcgtgcagatgagcatcttcacccccctggagtggtacctgttcggcgaggaccccgacatctgcctggagaagctgaagcacagcggcgccttccagctgtgcggcagagtgttcaagagcggcgagaccacctacagctgcagagactgcgccatcgaccccacctgcgtgctgtgcatggactgcttccaggacagcgtgcacaagaaccacagatacaagatgcacaccagcaccggcggcggcttctgcgactgcggcgacaccgaggcctggaagaccggccccttctgcgtgaaccacgagcccggcagagccggcaccatcaaggagaacagcagatgccccctgaacgaggaggtgatcgtgcaggccagaaagatcttccccagcgtgatcaagtacgtggtggagatgaccatctgggaggaggagaaggagctgccccccgagctgcagatcagagagaagaacgagagatactactgcgtgctgttcaacgacgagcaccacagctacgaccacgtgatctacagcctgcagagagccctggactgcgagctggccgaggcccagctgcacaccaccgccatcgacaaggagggcagaagagccgtgaaggccggcgcctacgccgcctgccaggaggccaaggaggacatcaagagccacagcgagaacgtgagccagcaccccctgcacgtggaggtgctgcacagcgagatcatggcccaccagaagttcgccctgagactgggcagctggatgaacaagatcatgagctacagcagcgacttcagacagatcttctgccaggcctgcctgagagaggagcccgacagcgagaacccctgcctgatcagcagactgatgctgtgggacgccaagctgtacaagggcgccagaaagatcctgcacgagctgatcttcagcagcttcttcatggagatggagtacaagaagctgttcgccatggagttcgtgaagtactacaagcagctgcagaaggagtacatcagcgacgaccacgacagaagcatcagcatcaccgccctgagcgtgcagatgttcaccgtgcccaccctggccagacacctgatcgaggagcagaacgtgatcagcgtgatcaccgagaccctgctggaggtgctgcccgagtacctggacagaaacaacaagttcaacttccagggctacagccaggacaagctgggcagagtgtacgccgtgatctgcgacctgaagtacatcctgatcagcaagcccaccatctggaccgagagactgagaatgcagttcctggagggcttcagaagcttcctgaagatcctgacctgcatgcagggcatggaggagatcagaagacaggtgggccagcacatcgaggtggaccccgactgggaggccgccatcgccatccagatgcagctgaagaacatcctgctgatgttccaggagtggtgcgcctgcgacgaggagctgctgctggtggcctacaaggagtgccacaaggccgtgatgagatgcagcaccagcttcatcagcagcagcaagaccgtggtgcagagctgcggccacagcctggagaccaagagctacagagtgagcgaggacctggtgagcatccacctgcccctgagcagaaccctggccggcctgcacgtgagactgagcagactgggcgccgtgagcagactgcacgagttcgtgagcttcgaggacttccaggtggaggtgctggtggagtaccccctgagatgcctggtgctggtggcccaggtggtggccgagatgtggagaagaaacggcctgagcctgatcagccaggtgttctactaccaggacgtgaagtgcagagaggagatgtacgacaaggacatcatcatgctgcagatcggcgccagcctgatggaccccaacaagttcctgctgctggtgctgcagagatacgagctggccgaggccttcaacaagaccatcagcaccaaggaccaggacctgatcaagcagtacaacaccctgatcgaggagatgctgcaggtgctgatctacatcgtgggcgagagatacgtgcccggcgtgggcaacgtgaccaaggaggaggtgaccatgagagagatcatccacctgctgtgcatcgagcccatgccccacagcgccatcgccaagaacctgcccgagaacgagaacaacgagaccggcctggagaacgtgatcaacaaggtggccaccttcaagaagcccggcgtgagcggccacggcgtgtacgagctgaaggacgagagcctgaaggacttcaacatgtacttctaccactacagcaagacccagcacagcaaggccgagcacatgcagaagaagagaagaaagcaggagaacaaggacgaggccctgccccccccccccccccccgagttctgccccgccttcagcaaggtgatcaacctgctgaactgcgacatcatgatgtacatcctgagaaccgtgttcgagagagccatcgacaccgacagcaacctgtggaccgagggcatgctgcagatggccttccacatcctggccctgggcctgctggaggagaagcagcagctgcagaaggcccccgaggaggaggtgaccttcgacttctaccacaaggccagcagactgggcagcagcgccatgaacatccagatgctgctggagaagctgaagggcatcccccagctggagggccagaaggacatgatcacctggatcctgcagatgttcgacaccgtgaagagactgagagagaagagctgcctgatcgtggccaccaccagcggcagcgagagcatcaagaacgacgagatcctgcaccactag

SEQ ID NO: 104337 - DNA, 1728 bp, synthetic construct
  misc_feature 1..1728: note = Description of Artificial Sequence: Synthetic coding sequence
  source 1..1728: mol_type = other DNA
atgtacgccggcaacatccccatctacaagaccgagagcagaagcagaaacgagcagggcatggaccccatcaccagacaggtgggccagcacatcgagatggagcccgagtgggaggccgccttcaccctgcagatgaagctgacccacgtgatcagcatgatgcaggactggtgcgccagcgacgagaaggtgctgatcgaggcctacaagaagtgcctggccgtgctgatgcagtgccacggcggctacaccgacggcgagcagcccatcaccctgagcatctgcggccacagcgtggagaccatcagatactgcgtgagccaggagaaggtgagcatccacctgcccgtgagcagactgctggccggcctgcacgtgctgctgagcaagagcgaggtggcctacaagttccccgagctgctgcccctgagcgagctgagcccccccatgctgatcgagcaccccctgagatgcctggtgctgtgcgcccaggtgcacgccggcatgtggagaagaaacggcttcagcctggtgaaccagatctactactaccacaacgtgaagtgcagaagagagatgttcgacaaggacgtggtgatgctgcagaccggcgtgagcatgatggaccccaaccacttcctgatgatcatgctgagcagattcgagctgtaccagatcttcagcacccccgactacggcaagagattcagcagcgagatcacccacaaggacgtggtgcagcagaacaacaccctgatcgaggagatgctgtacctgatcatcatgctggtgggcgagagattcagccccggcgtgggccaggtgaacgccaccgacgagatcaagagagagatcatccaccagctgagcatcaagcccatggcccacagcgagctggtgaagagcctgcccgaggacgagaacaaggagaccggcatggagagcgtgatcgaggccgtggcccacttcaagaagcccggcctgaccggcagaggcatgtacgagctgaagcccgagtgcgccaaggagttcaacctgtacttctaccacttcagcagagccgagcagagcaaggccgaggaggcccagagaaagctgaagagacagaacagagaggacaccgccctgcccccccccgtgctgccccccttctgccccctgttcgccagcctggtgaacatcctgcagagcgacgtgatgctgtgcatcatgggcaccatcctgcagtgggccgtggagcacaacggctacgcctggagcgagagcatgctgcagagagtgctgcacctgatcggcatggccctgcaggaggagaagcagcacctggagaacgtgaccgaggagcacgtggtgaccttcaccttcacccagaagatcagcaagcccggcgaggcccccaagaacagccccagcatcctggccatgctggagaccctgcagaacgccccctacctggaggtgcacaaggacatgatcagatggatcctgaagaccttcaacgccgtgaagaagatgagagagagcagccccaccagccccgtggccgagaccgagggcaccatcatggaggagcacaacttcagagtgcagggcaccaagaccaagctgagaggcagagagaagcagagactgcccgactgcgccgagaagagaagctggctgagatgcctgaagtgcagcggcatcctgctgatgaagaccaagaacagcttcagcagacactag

SEQ ID NO: 104338 - DNA, 5268 bp, synthetic construct
  misc_feature 1..5268: note = Description of Artificial Sequence: Synthetic coding sequence
  source 1..5268: mol_type = other DNA
atggccagcgagctggagcccgaggtgcaggccatcgacagaagcctgctggagtgcagcgccgaggagatcgccggcaagtggctgcaggccaccgacctgaccagagaggtgtaccagcacctggcccactacgtgcccaagatctactgcagaggccccaaccccttcccccagaaggaggacatgctggcccagcacgtgctgctgggccccatggagtggtacctgtgcggcgaggaccccgccttcggcttccccaagctggagcaggccaacaagcccagccacctgtgcggcagagtgttcaaggtgggcgagcccacctacagctgcagagactgcgccgtggaccccacctgcgtgctgtgcatggagtgcttcctgggcagcatccacagagaccacagatacagaatgaccaccagcggcggcggcggcttctgcgactgcggcgacaccgaggcctggaaggagggcccctactgccagaagcacgagctgaacaccagcgagatcgaggaggaggaggaccccctggtgcacctgagcgaggacgtgatcgccagaacctacaacatcttcgccatcaccttcagatacgccgtggagatcctgacctgggagaaggagagcgagctgcccgccgacctggagatggtggagaagagcgacacctactactgcatgctgttcaacgacgaggtgcacacctacgagcaggtgatctacaccctgcagaaggccgtgaactgcacccagaaggaggccatcggcttcgccaccaccgtggacagagacggcagaagaagcgtgagatacggcgacttccagtactgcgagcaggccaagagcgtgatcgtgagaaacaccagcagacagaccaagcccctgaaggtgcaggtgatgcacagcagcatcgtggcccaccagaacttcggcctgaagctgctgagctggctgggcagcatcatcggctacagcgacggcctgagaagaatcctgtgccaggtgggcctgcaggagggccccgacggcgagaacagcagcctggtggacagactgatgctgagcgacagcaagctgtggaagggcgccagaagcgtgtaccaccagctgttcatgagcagcctgctgatggacctgaagtacaagaagctgttcgccgtgagattcgccaagaactaccagcagctgcagagagacttcatggaggacgaccacgagagagccgtgagcgtgaccgccctgagcgtgcagttcttcaccgcccccaccctggccagaatgctgatcaccgaggagaacctgatgagcatcatcatcaagaccttcatggaccacctgagacacagagacgcccagggcagattccagttcgagagatacaccgccctgcaggccttcaagttcagaagagtgcagagcctgatcctggacctgaagtacgtgctgatcagcaagcccaccgagtggagcgacgagctgagacagaagttcctggagggcttcgacgccttcctggagctgctgaagtgcatgcagggcatggaccccatcaccagacaggtgggccagcacatcgagatggagcccgagtgggaggccgccttcaccctgcagatgaagctgacccacgtgatcagcatgatgcaggactggtgcgccagcgacgagaaggtgctgatcgaggcctacaagaagtgcctggccgtgctgatgcagtgccacggcggctacaccgacggcgagcagcccatcaccctgagcatctgcggccacagcgtggagaccatcagatactgcgtgagccaggagaaggtgagcatccacctgcccgtgagcagactgctggccggcctgcacgtgctgctgagcaagagcgaggtggcctacaagttccccgagctgctgcccctgagcgagctgagcccccccatgctgatcgagcaccccctgagatgcctggtgctgtgcgcccaggtgcacgccggcatgtggagaagaaacggcttcagcctggtgaaccagatctactactaccacaacgtgaagtgcagaagagagatgttcgacaaggacgtggtgatgctgcagaccggcgtgagcatgatggaccccaaccacttcctgatgatcatgctgagcagattcgagctgtaccagatcttcagcacccccgactacggcaagagattcagcagcgagatcacccacaaggacgtggtgcagcagaacaacaccctgatcgaggagatgctgtacctgatcatcatgctggtgggcgagagattcagccccggcgtgggccaggtgaacgccaccgacgagatcaagagagagatcatccaccagctgagcatcaagcccatggcccacagcgagctggtgaagagcctgcccgaggacgagaacaaggagaccggcatggagagcgtgatcgaggccgtggcccacttcaagaagcccggcctgaccggcagaggcatgtacgagctgaagcccgagtgcgccaaggagttcaacctgtacttctaccacttcagcagagccgagcagagcaaggccgaggaggcccagagaaagctgaagagacagaacagagaggacaccgccctgcccccccccgtgctgccccccttctgccccctgttcgccagcctggtgaacatcctgcagagcgacgtgatgctgtgcatcatgggcaccatcctgcagtgggccgtggagcacaacggctacgcctggagcgagagcatgctgcagagagtgctgcacctgatcggcatggccctgcaggaggagaagcagcacctggagaacgtgaccgaggagcacgtggtgaccttcaccttcacccagaagatcagcaagcccggcgaggcccccaagaacagccccagcatcctggccatgctggagaccctgcagaacgccccctacctggaggtgcacaaggacatgatcagatggatcctgaagaccttcaacgccgtgaagaagatgagagagagcagccccaccagccccgtggccgagaccgagggcaccatcatggaggagagcagcagagacaaggacaaggccgagagaaagagaaaggccgagatcgccagactgagaagagagaagatcatggcccagatgagcgagatgcagagacacttcatcgacgagaacaaggagctgttccagcagaccctggagctggacgccagcaccagcgccgtgctggaccacagccccgtggccagcgacatgaccctgaccgccctgggccccgcccagacccaggtgcccgagcagagacagttcgtgacctgcatcctgtgccaggaggagcaggaggtgaaggtggagagcagagccatggtgctggccgccttcgtgcagagaagcaccgtgctgagcaagaacagaagcaagttcatccaggaccccgagaagtacgaccccctgttcatgcaccccgacctgagctgcggcacccacaccagcagctgcggccacatcatgcacgcccactgctggcagagatacttcgacagcgtgcaggccaaggagcagagaagacagcagagactgagactgcacaccagctacgacgtggagaacggcgagttcctgtgccccctgtgcgagtgcctgagcaacaccgtgatccccctgctgctgccccccagaaacatcttcaacaacagactgaacttcagcgaccagcccaacctgacccagtggatcagaaccatcagccagcagatcaaggccctgcagttcctgagaaaggaggagagcacccccaacaacgccagcaccaagaacagcgagaacgtggacgagctgcagctgcccgagggcttcagacccgacttcagacccaagatcccctacagcgagagcatcaaggagatgctgaccaccttcggcaccgccacctacaaggtgggcctgaaggtgcaccccaacgaggaggaccccagagtgcccatcatgtgctggggcagctgcgcctacaccatccagagcatcgagagaatcctgagcgacgaggacaagcccctgttcggccccctgccctgcagactggacgactgcctgagaagcctgaccagattcgccgccgcccactggaccgtggccagcgtgagcgtggtgcagggccacttctgcaagctgttcgccagcctggtgcccaacgacagccacgaggagctgccctgcatcctggacatcgacatgttccacctgctggtgggcctggtgctggccttccccgccctgcagtgccaggacttcagcggcatcagcctgggcaccggcgacctgcacatcttccacctggtgaccatggcccacatcatccagatcctgctgaccagctgcaccgaggagaacggcatggaccaggagaaccccccctgcgaggaggagagcgccgtgctggccctgtacaagaccctgcaccagtacaccggcagcgccctgaaggagatccccagcggctggcacctgtggagaagcgtgagagccggcatcatgcccttcctgaagtgcagcgccctgttcttccactacctgaacggcgtgcccagcccccccgacatccaggtgcccggcaccagccacttcgagcacctgtgcagctacctgagcctgcccaacaacctgatctgcctgttccaggagaacagcgagatcatgaacagcctgatcgagagctggtgcagaaacagcgaggtgaagagatacctggagggcgagagagacgccatcagataccccagagagagcaacaagctgatcaacctgcccgaggactacagcagcctgatcaaccaggccagcaacttcagctgccccaagagcggcggcgacaagagcagagcccccaccctgtgcctggtgtgcggcagcctgctgtgcagccagagctactgctgccagaccgagctggagggcgaggacgtgggcgcctgcaccgcccacacctacagctgcggcagcggcgtgggcatcttcctgagagtgagagagtgccaggtgctgttcctggccggcaagaccaagggctgcttctacagccccccctacctggacgactacggcgagaccgaccagggcctgagaagaggcaaccccctgcacctgtgcaaggagagattcaagaagatccagaagctgtggcaccagcacagcgtgaccgaggagatcggccacgcccaggaggccaaccagaccctggtgggcatcgactggcagcacctgtag

SEQ ID NO: 104339 - DNA, 5268 bp, synthetic construct
  misc_feature 1..5268: note = Description of Artificial Sequence: Synthetic coding sequence
  source 1..5268: mol_type = other DNA
atggccagcgagctggagcccgaggtgcaggccatcgacagaagcctgctggagtgcagcgccgaggagatcgccggcaagtggctgcaggccaccgacctgaccagagaggtgtaccagcacctggcccactacgtgcccaagatctactgcagaggccccaaccccttcccccagaaggaggacatgctggcccagcacgtgctgctgggccccatggagtggtacctgtgcggcgaggaccccgccttcggcttccccaagctggagcaggccaacaagcccagccacctgtgcggcagagtgttcaaggtgggcgagcccacctacagctgcagagactgcgccgtggaccccacctgcgtgctgtgcatggagtgcttcctgggcagcatccacagagaccacagatacagaatgaccaccagcggcggcggcggcttctgcgactgcggcgacaccgaggcctggaaggagggcccctactgccagaagcacgagctgaacaccagcgagatcgaggaggaggaggaccccctggtgcacctgagcgaggacgtgatcgccagaacctacaacatcttcgccatcaccttcagatacgccgtggagatcctgacctgggagaaggagagcgagctgcccgccgacctggagatggtggagaagagcgacacctactactgcatgctgttcaacgacgaggtgcacacctacgagcaggtgatctacaccctgcagaaggccgtgaactgcacccagaaggaggccatcggcttcgccaccaccgtggacagagacggcagaagaagcgtgagatacggcgacttccagtactgcgagcaggccaagagcgtgatcgtgagaaacaccagcagacagaccaagcccctgaaggtgcaggtgatgcacagcagcatcgtggcccaccagaacttcggcctgaagctgctgagctggctgggcagcatcatcggctacagcgacggcctgagaagaatcctgtgccaggtgggcctgcaggagggccccgacggcgagaacagcagcctggtggacagactgatgctgagcgacagcaagctgtggaagggcgccagaagcgtgtaccaccagctgttcatgagcagcctgctgatggacctgaagtacaagaagctgttcgccgtgagattcgccaagaactacgagagactgcagagcgactacgtgaccgacgaccacgacagagagttcagcgtggccgacctgagcgtgcagatcttcaccgtgcccagcctggccagaatgctgatcaccgaggagaacctgatgagcatcatcatcaagaccttcatggaccacctgagacacagagacgcccagggcagattccagttcgagagatacaccgccctgcaggccttcaagttcagaagagtgcagagcctgatcctggacctgaagtacgtgctgatcagcaagcccaccgagtggagcgacgagctgagacagaagttcctggagggcttcgacgccttcctggagctgctgaagtgcatgcagggcatggaccccatcaccagacaggtgggccagcacatcgagatggagcccgagtgggaggccgccttcaccctgcagatgaagctgacccacgtgatcagcatgatgcaggactggtgcgccagcgacgagaaggtgctgatcgaggcctacaagaagtgcctggccgtgctgatgcagtgccacggcggctacaccgacggcgagcagcccatcaccctgagcatctgcggccacagcgtggagaccatcagatactgcgtgagccaggagaaggtgagcatccacctgcccgtgagcagactgctggccggcctgcacgtgctgctgagcaagagcgaggtggcctacaagttccccgagctgctgcccctgagcgagctgagcccccccatgctgatcgagcaccccctgagatgcctggtgctgtgcgcccaggtgcacgccggcatgtggagaagaaacggcttcagcctggtgaaccagatctactactaccacaacgtgaagtgcagaagagagatgttcgacaaggacgtggtgatgctgcagaccggcgtgagcatgatggaccccaaccacttcctgatgatcatgctgagcagattcgagctgtaccagatcttcagcacccccgactacggcaagagattcagcagcgagatcacccacaaggacgtggtgcagcagaacaacaccctgatcgaggagatgctgtacctgatcatcatgctggtgggcgagagattcagccccggcgtgggccaggtgaacgccaccgacgagatcaagagagagatcatccaccagctgagcatcaagcccatggcccacagcgagctggtgaagagcctgcccgaggacgagaacaaggagaccggcatggagagcgtgatcgaggccgtggcccacttcaagaagcccggcctgaccggcagaggcatgtacgagctgaagcccgagtgcgccaaggagttcaacctgtacttctaccacttcagcagagccgagcagagcaaggccgaggaggcccagagaaagctgaagagacagaacagagaggacaccgccctgcccccccccgtgctgccccccttctgccccctgttcgccagcctggtgaacatcctgcagagcgacgtgatgctgtgcatcatgggcaccatcctgcagtgggccgtggagcacaacggctacgcctggagcgagagcatgctgcagagagtgctgcacctgatcggcatggccctgcaggaggagaagcagcacctggagaacgtgaccgaggagcacgtggtgaccttcaccttcacccagaagatcagcaagcccggcgaggcccccaagaacagccccagcatcctggccatgctggagaccctgcagaacgccccctacctggaggtgcacaaggacatgatcagatggatcctgaagaccttcaacgccgtgaagaagatgagagagagcagccccaccagccccgtggccgagaccgagggcaccatcatggaggagagcagcagagacaaggacaaggccgagagaaagagaaaggccgagatcgccagactgagaagagagaagatcatggcccagatgagcgagatgcagagacacttcatcgacgagaacaaggagctgttccagcagaccctggagctggacgccagcaccagcgccgtgctggaccacagccccgtggccagcgacatgaccctgaccgccctgggccccgcccagacccaggtgcccgagcagagacagttcgtgacctgcatcctgtgccaggaggagcaggaggtgaaggtggagagcagagccatggtgctggccgccttcgtgcagagaagcaccgtgctgagcaagaacagaagcaagttcatccaggaccccgagaagtacgaccccctgttcatgcaccccgacctgagctgcggcacccacaccagcagctgcggccacatcatgcacgcccactgctggcagagatacttcgacagcgtgcaggccaaggagcagagaagacagcagagactgagactgcacaccagctacgacgtggagaacggcgagttcctgtgccccctgtgcgagtgcctgagcaacaccgtgatccccctgctgctgccccccagaaacatcttcaacaacagactgaacttcagcgaccagcccaacctgacccagtggatcagaaccatcagccagcagatcaaggccctgcagttcctgagaaaggaggagagcacccccaacaacgccagcaccaagaacagcgagaacgtggacgagctgcagctgcccgagggcttcagacccgacttcagacccaagatcccctacagcgagagcatcaaggagatgctgaccaccttcggcaccgccacctacaaggtgggcctgaaggtgcaccccaacgaggaggaccccagagtgcccatcatgtgctggggcagctgcgcctacaccatccagagcatcgagagaatcctgagcgacgaggacaagcccctgttcggccccctgccctgcagactggacgactgcctgagaagcctgaccagattcgccgccgcccactggaccgtggccagcgtgagcgtggtgcagggccacttctgcaagctgttcgccagcctggtgcccaacgacagccacgaggagctgccctgcatcctggacatcgacatgttccacctgctggtgggcctggtgctggccttccccgccctgcagtgccaggacttcagcggcatcagcctgggcaccggcgacctgcacatcttccacctggtgaccatggcccacatcatccagatcctgctgaccagctgcaccgaggagaacggcatggaccaggagaaccccccctgcgaggaggagagcgccgtgctggccctgtacaagaccctgcaccagtacaccggcagcgccctgaaggagatccccagcggctggcacctgtggagaagcgtgagagccggcatcatgcccttcctgaagtgcagcgccctgttcttccactacctgaacggcgtgcccagcccccccgacatccaggtgcccggcaccagccacttcgagcacctgtgcagctacctgagcctgcccaacaacctgatctgcctgttccaggagaacagcgagatcatgaacagcctgatcgagagctggtgcagaaacagcgaggtgaagagatacctggagggcgagagagacgccatcagataccccagagagagcaacaagctgatcaacctgcccgaggactacagcagcctgatcaaccaggccagcaacttcagctgccccaagagcggcggcgacaagagcagagcccccaccctgtgcctggtgtgcggcagcctgctgtgcagccagagctactgctgccagaccgagctggagggcgaggacgtgggcgcctgcaccgcccacacctacagctgcggcagcggcgtgggcatcttcctgagagtgagagagtgccaggtgctgttcctggccggcaagaccaagggctgcttctacagccccccctacctggacgactacggcgagaccgaccagggcctgagaagaggcaaccccctgcacctgtgcaaggagagattcaagaagatccagaagctgtggcaccagcacagcgtgaccgaggagatcggccacgcccaggaggccaaccagaccctggtgggcatcgactggcagcacctgtag

SEQ ID NO: 104340 - DNA, 1320 bp, synthetic construct
  misc_feature 1..1320: note = Description of Artificial Sequence: Synthetic coding sequence
  source 1..1320: mol_type = other DNA
atggccagcgagctggagcccgaggtgcaggccatcgacagaagcctgctggagtgcagcgccgaggagatcgccggcaagtggctgcaggccaccgacctgaccagagaggtgtaccagcacctggcccactacgtgcccaagatctactgcagaggccccaaccccttcccccagaaggaggacatgctggcccagcacgtgctgctgggccccatggagtggtacctgtgcggcgaggaccccgccttcggcttccccaagctggagcaggccaacaagcccagccacctgtgcggcagagtgttcaaggtgggcgagcccacctacagctgcagagactgcgccgtggaccccacctgcgtgctgtgcatggagtgcttcctgggcagcatccacagagaccacagatacagaatgaccaccagcggcggcggcggcttctgcgactgcggcgacaccgaggcctggaaggagggcccctactgccagaagcacgagctgaacaccagcgagatcgaggaggaggaggaccccctggtgcacctgagcgaggacgtgatcgccagaacctacaacatcttcgccatcaccttcagatacgccgtggagatcctgacctgggagaaggagagcgagctgcccgccgacctggagatggtggagaagagcgacacctactactgcatgctgttcaacgacgaggtgcacacctacgagcaggtgatctacaccctgcagaaggccgtgaactgcacccagaaggaggccatcggcttcgccaccaccgtggacagagacggcagaagaagcgtgagatacggcgacttccagtactgcgagcaggccaagagcgtgatcgtgagaaacaccagcagacagaccaagcccctgaaggtgcaggtgatgcacagcagcatcgtggcccaccagaacttcggcctgaagctgctgagctggctgggcagcatcatcggctacagcgacggcctgagaagaatcctgtgccaggtgggcctgcaggagggccccgacggcgagaacagcagcctggtggacagactgatgctgagcgacagcaagctgtggaagggcgccagaagcgtgtaccaccagctgttcatgagcagcctgctgatggacctgaagtacaagaagctgttcgccgtgagattcgccaagaactacgagagactgcagagcgactacgtgaccgacgaccacgacagagagttcagcgtggccgacctgagcgtgcagatcttcaccgtgcccagcctgttcagcatcagcgccggcagaagcggcagccccctgtag

SEQ ID NO: 104341 - DNA, 5667 bp, synthetic construct
  misc_feature 1..5667: note = Description of Artificial Sequence: Synthetic coding sequence
  source 1..5667: mol_type = other DNA
atggccgccgccgccgccgccgccgtgggcggccagcagcccagccagcccgagctgcccgcccccggcctggccctggacaaggccgccaccgccgcccacctgaaggccgccctgagcagacccgacaacagagccggcgccgaggagctgcaggccctgctggagagagtgctgagcgccgagagacccctggccgccgccgccggcggcgaggacgccgccgccgccggcggcggcggcggccccggcgccgccgaggaggaggccctggagtggtgcaagtgcctgctggccggcggcggcggctacgacgagttctgcgccgccgtgagagcctacgaccccgccgccctgtgcggcctggtgtggaccgccaacttcgtggcctacagatgcagaacctgcggcatcagcccctgcatgagcctgtgcgccgagtgcttccaccagggcgaccacaccggccacgacttcaacatgttcagaagccaggccggcggcgcctgcgactgcggcgacagcaacgtgatgagagagagcggcttctgcaagagacaccagatcaagagcagcagcaacatcccctgcgtgcccaaggacctgctgatgatgagcgagttcgtgctgcccagattcatcttctgcctgatccagtacctgagagagggctacaacgagcccgccgccgacggccccagcgagaaggacctgaacaaggtgctgcagctgctggagccccagatcagcttcctggaggacctgaccaagatgggcggcgccatgagaagcgtgctgacccaggtgctgaccaaccagcagaactacaaggacctgaccagcggcctgggcgagaacgcctgcgtgaagaagagccacgagaagtacctgatcgccctgaagagcagcggcctgacctaccccgaggacaagctggtgtacggcgtgcaggagcccagcgccggcaccagcagcctggccgtgcagggcttcatcggcgccaccggcaccctgggccaggtggacagcagcgacgaggacgaccaggacggcagccagggcctgggcaagagaaagagagtgaagctgagcagcggcaccaaggaccagagcatcatggacgtgctgaagcacaagagcttcctggaggagctgctgttctggaccatcaagtacgagttcccccagaagatggtgaccttcctgctgaacatgctgcccgaccaggagtacaaggtggccttcaccaagaccttcgtgcagcactacgccttcatcatgaagaccctgaagaagagccacgagagcgacaccatgagcaacagaatcgtgcacatcagcgtgcagctgttcagcaacgaggagctggccagacaggtgaccgaggagtgccagctgctggacatcatggtgaccgtgctgctgtacatgatggagagctgcctgatcaagagcgagctgcaggacgaggagaacagcctgcacgtggtggtgaactgcggcgaggccctgctgaagaacaacacctactggcccctggtgagcgacttcatcaacatcctgagccaccagagcgtggccaagagattcctggaggaccacggcctgctggtgacctggatgaacttcgtgagcttcttccagggcatgaacctgaacaagagagagctgaacgagcacgtggagttcgagagccagacctactacgccgccttcgccgccgagctggaggcctgcgcccagcccatgtggggcctgctgagccactgcaaggtgagagagacccaggagtacaccagaaacgtggtgagatactgcctggaggccctgcaggactggttcgacgccatcaacttcgtggacgagcccgcccccaaccaggtgaccttccacctgcccctgcacagatactacgccatgttcctgagcaaggccgtgaagtgccaggagctggacctggacagcgtgctgcccgaccaggagatgctgatgaagctgatgatccaccccctgcagatccaggccagcctggccgagatccacagcaacatgtgggtgagaaacggcctgcagatcaagggccaggccatgacctacgtgcagagccacttctgcaacagcatgatcgaccccgacatctacctgctgcaggtgtgcgccagcagactggaccccgactacttcatcagcagcgtgttcgagagattcaaggtggtggacctgctgaccatggccagccagcaccagaacaccgtgctggacgccgagcacgagagaagcatgctggagggcgccctgaccttcctggtgatcctgctgagcctgagactgcacctgggcatgagcgacgacgagatcctgagagccgagatggtggcccagctgtgcatgaacgacagaacccacagcagcctgctggacctgatccccgagaaccccaaccccaagagcggcatcatccccggcagctacagcttcgagagcgtgctgagcgccgtggccgacttcaaggcccccgtgttcgagcccggcggcagcatgcagcagggcatgtacacccccaaggccgaggtgtgggaccaggagttcgaccccgtgatggtgatcctgagaaccgtgtacagaagagacgtgcagagcgccatggacagatacaccgccttcctgaagcagagcggcaagttccccggcaacccctggcccccctacaagaagagaaccagcctgcaccccagctacaagggcctgatgagactgctgcactgcaagaccctgcacatcgtgctgttcaccctgctgtacaagatcctgatggaccaccagaacctgagcgagcacgtgctgtgcatggtgctgtacctgatcgagctgggcctggagaacagcgccgaggaggagagcgacgaggaggccagcgtgggcggccccgagagatgccacgacagctggttccccggcagcaacctggtgagcaacatgagacacttcatcaactacgtgagagtgagagtgcccgagaccgcccccgaggtgaagagagacagccccgccagcaccagcagcgacaacctgggcagcctgcagaacagcggcaccgcccaggtgttcagcctggtggccgagagaagaaagaagttccaggagatcatcaacagaagcagcagcgaggccaaccaggtggtgagacccaagaccagcagcaagtggagcgcccccggcagcgccccccagctgaccaccgccatcctggagatcaaggagagcatcctgagcctgctgatcaagctgcaccacaagctgagcggcaagcagaacagctactaccccccctggctggacgacatcgagatcctgatccagcccgagatccccaagtacagccacggcgacggcatcaccgccgtggagagaatcctgctgaaggccgccagccagagcagaatgaacaagagaatcatcgaggagatctgcagaaaggtgaccccccccgtgccccccaagaaggtgaccgccgccgagaagaagaccctggacaaggaggagagaagacagaaggccagagagagacagcagaagctgctggccgagttcgccagcagacagaagagcttcatggagaccgccatggacgtggacagccccgagaacgacatccccatggagatcaccaccgccgagccccaggtgagcgaggccgtgtacgactgcgtgatctgcggccagagcggccccagcagcgaggacagacccaccggcctggtggtgctgctgcaggccagcagcgtgctgggccagtgcagagacaacgtggagcccaagaagctgcccatcagcgaggaggagcagatctacccctgggacacctgcgccgccgtgcacgacgtgagactgagcctgctgcagagatacttcaaggacagcagctgcctgctggccgtgagcatcggctgggagggcggcgtgtacgtgcagacctgcggccacaccctgcacatcgactgccacaagagctacatggagagcctgagaaacgaccaggtgctgcagggcttcagcgtggacaagggcgagttcacctgccccctgtgcagacagttcgccaacagcgtgctgccctgctaccccggcagcaacgtggagaacaacccctggcagagacccagcaacaagagcatccaggacctgatcaaggaggtggaggagctgcagggcagacccggcgccttccccagcgagaccaacctgagcaaggagatggagagcgtgatgaaggacatcaagaacaccacccagaagaagtacagagactacagcaagacccccggcagccccgacaacgacttcctgttcatgtacagcgtggccagaaccaacctggagctggagctgatccacagaggcggcaacctgtgcagcggcggcgccagcaccgccggcaagagaagctgcctgaaccagctgttccacgtgctggccctgcacatgagactgtacagcatcgacagcgagtacaacccctggagaaagctgacccagctggaggagatgaacccccagctgggctacgaggagcagcagcccgaggtgcccatcctgtaccacgacgtgaccagcctgctgctgatccagatcctgatgatgccccagcccctgagaaaggaccacttcacctgcatcgtgaaggtgctgttcaccctgctgtacacccaggccctggccgccctgagcgtgaagtgcagcgaggaggacagaagcgcctggaagcacgccggcgccctgaagaagagcacctgcgacgccgagaagagctacgaggtgctgctgagcttcgtgatcagcgagctgttcaagggcaagctgtaccacgaggagggcacccaggagtgcgccatggtgaaccccatcgcctggagccccgagagcatggagaagtgcctgcaggacttctgcctgcccttcctgagaatcaccagcctgctgcagcaccacctgttcggcgaggacctgcccagctgccaggaggaggaggagttcagcgtgctggccagctgcctgggcctgctgcccaccttctaccagaccgagcaccccttcatcagcgccagctgcctggactggcccgtgcccgccttcgacatcatcacccagtggtgcttcgagatcaagagcttcaccgagagacacgccgagcagggcaaggccctgctgatccaggagagcaagtggaagctgccccacctgctgcagctgcccgagaactacaacaccatcttccagtactaccacagaaagacctgcagcgtgtgcaccaaggtgcccaaggaccccgccgtgtgcctggtgtgcggcaccttcgtgtgcctgaagggcctgtgctgcaagcagcagagctactgcgagtgcgtgctgcacagccagaactgcggcgccggcaccggcatcttcctgctgatcaacgccagcgtgatcatcatcatcagaggccacagattctgcctgtggggcagcgtgtacctggacgcccacggcgaggaggacagagacctgagaagaggcaagcccctgtacatctgcaaggagagatacaaggtgctggagcagcagtggatcagccacaccttcgaccacatcaacaagagatggggcccccactacaacggcctgtag

SEQ ID NO: 104342 - DNA, 2130 bp, synthetic construct
  misc_feature 1..2130: note = Description of Artificial Sequence: Synthetic coding sequence
  source 1..2130: mol_type = other DNA
atgatcgccagcaagcagagacagttcaccgaggtgttcagaatcatgagcagcaccttcagccagagcagattcctgtacgccgccgtggtgaccgacagccccgagaacgacatccccatggagatcaccaccgccgagccccaggtgagcgaggccgtgtacgactgcgtgatctgcggccagagcggccccagcagcgaggacagacccaccggcctggtggtgctgctgcaggccagcagcgtgctgggccagtgcagagacaacgtggagcccaagaagctgcccatcagcgaggaggagcagatctacccctgggacacctgcgccgccgtgcacgacgtgagactgagcctgctgcagagatacttcaaggacagcagctgcctgctggccgtgagcatcggctgggagggcggcgtgtacgtgcagacctgcggccacaccctgcacatcgactgccacaagagctacatggagagcctgagaaacgaccaggtgctgcagggcttcagcgtggacaagggcgagttcacctgccccctgtgcagacagttcgccaacagcgtgctgccctgctaccccggcagcaacgtggagaacaacccctggcagagacccagcaacaagagcatccaggacctgatcaaggaggtggaggagctgcagggcagacccggcgccttccccagcgagaccaacctgagcaaggagatggagagcgtgatgaaggacatcaagaacaccacccagaagaagtacagagactacagcaagacccccggcagccccgacaacgacttcctgttcatgtacagcgtggccagaaccaacctggagctggagctgatccacagaggcggcaacctgtgcagcggcggcgccagcaccgccggcaagagaagctgcctgaaccagctgttccacgtgctggccctgcacatgagactgtacagcatcgacagcgagtacaacccctggagaaagctgacccagctggaggagatgaacccccagctgggctacgaggagcagcagcccgaggtgcccatcctgtaccacgacgtgaccagcctgctgctgatccagatcctgatgatgccccagcccctgagaaaggaccacttcacctgcatcgtgaaggtgctgttcaccctgctgtacacccaggccctggccgccctgagcgtgaagtgcagcgaggaggacagaagcgcctggaagcacgccggcgccctgaagaagagcacctgcgacgccgagaagagctacgaggtgctgctgagcttcgtgatcagcgagctgttcaagggcaagctgtaccacgaggagggcacccaggagtgcgccatggtgaaccccatcgcctggagccccgagagcatggagaagtgcctgcaggacttctgcctgcccttcctgagaatcaccagcctgctgcagcaccacctgttcggcgaggacctgcccagctgccaggaggaggaggagttcagcgtgctggccagctgcctgggcctgctgcccaccttctaccagaccgagcaccccttcatcagcgccagctgcctggactggcccgtgcccgccttcgacatcatcacccagtggtgcttcgagatcaagagcttcaccgagagacacgccgagcagggcaaggccctgctgatccaggagagcaagtggaagctgccccacctgctgcagctgcccgagaactacaacaccatcttccagtactaccacagaaagacctgcagcgtgtgcaccaaggtgcccaaggaccccgccgtgtgcctggtgtgcggcaccttcgtgtgcctgaagggcctgtgctgcaagcagcagagctactgcgagtgcgtgctgcacagccagaactgcggcgccggcaccggcatcttcctgctgatcaacgccagcgtgatcatcatcatcagaggccacagattctgcctgtggggcagcgtgtacctggacgcccacggcgaggaggacagagacctgagaagaggcaagcccctgtacatctgcaaggagagatacaaggtgctggagcagcagtggatcagccacaccttcgaccacatcaacaagagatggggcccccactacaacggcctgtag

SEQ ID NO: 104343 - DNA, 5667 bp, synthetic construct; identical to SEQ ID NO: 104341
  misc_feature 1..5667: note = Description of Artificial Sequence: Synthetic coding sequence
  source 1..5667: mol_type = other DNA

SEQ ID NO: 104344 - DNA, 5754 bp, synthetic construct
  misc_feature 1..5754: note = Description of Artificial Sequence: Synthetic coding sequence
  source 1..5754: mol_type = other DNA
atggccgccgccgccgccgccgccgtgggcggccagcagcccagccagcccgagctgcccgcccccggcctggccctggacaaggccgccaccgccgcccacctgaaggccgccctgagcagacccgacaacagagccggcgccgaggagctgcaggccctgctggagagagtgctgagcgccgagagacccctggccgccgccgccggcggcgaggacgccgccgccgccggcggcggcggcggccccggcgccgccgaggaggaggccctggagtggtgcaagtgcctgctggccggcggcggcggctacgacgagttctgcgccgccgtgagagcctacgaccccgccgccctgtgcggcctggtgtggaccgccaacttcgtggcctacagatgcagaacctgcggcatcagcccctgcatgagcctgtgcgccgagtgcttccaccagggcgaccacaccggccacgacttcaacatgttcagaagccaggccggcggcgcctgcgactgcggcgacagcaacgtgatgagagagagcggcttctgcaagagacaccagatcaagagcagcagcaacatcccctgcgtgcccaaggacctgctgatgatgagcgagttcgtgctgcccagattcatcttctgcctgatccagtacctgagagagggctacaacgagcccgccgccgacggccccagcgagaaggacctgaacaaggtgctgcagctgctggagccccagatcagcttcctggaggacctgaccaagatgggcggcgccatgagaagcgtgctgacccaggtgctgaccaaccagcagaactacaaggacctgaccagcggcctgggcgagaacgcctgcgtgaagaagagccacgagaagtacctgatcgccctgaagagcagcggcctgacctaccccgaggacaagctggtgtacggcgtgcaggagcccagcgccggcaccagcagcctggccgtgcagggcttcatcggcgccaccggcaccctgggccaggtggacagcagcgacgaggacgaccaggacggcagccagggcctgggcaagagaaagagagtgaagctgagcagcggcaccaaggaccagagcatcatggacgtgctgaagcacaagagcttcctggaggagctgctgttctggaccatcaagtacgagttcccccagaagatggtgaccttcctgctgaacatgctgcccgaccaggagtacaaggtggccttcaccaagaccttcgtgcagcactacgccttcatcatgaagaccctgaagaagagccacgagagcgacaccatgagcaacagaatcgtgcacatcagcgtgcagctgttcagcaacgaggagctggccagacaggtgaccgaggagtgccagctgctggacatcatggtgaccgtgctgctgtacatgatggagagctgcctgatcaagagcgagctgcaggacgaggagaacagcctgcacgtggtggtgaactgcggcgaggccctgctgaagaacaacacctactggcccctggtgagcgacttcatcaacatcctgagccaccagagcgtggccaagagattcctggaggaccacggcctgctggtgacctggatgaacttcgtgagcttcttccagggcatgaacctgaacaagagagagctgaacgagcacgtggagttcgagagccagacctactacgccgccttcgccgccgagctggaggcctgcgcccagcccatgtggggcctgctgagccactgcaaggtgagagagacccaggagtacaccagaaacgtggtgagatactgcctggaggccctgcaggactggttcgacgccatcaacttcgtggacgagcccgcccccaaccaggtgaccttccacctgcccctgcacagatactacgccatgttcctgagcaaggccgtgaagtgccaggagctggacctggacagcgtgctgcccgaccaggagatgctgatgaagctgatgatccaccccctgcagatccaggccagcctggccgagatccacagcaacatgtgggtgagaaacggcctgcagatcaagggccaggccatgacctacgtgcagagccacttctgcaacagcatgatcgaccccgacatctacctgctgcaggtgtgcgccagcagactggaccccgactacttcatcagcagcgtgttcgagagattcaaggtggtggacctgctgaccatggccagccagcaccagaacaccgtgctggacgccgagcacgagagaagcatgctggagggcgccctgaccttcctggtgatcctgctgagcctgagactgcacctgggcatgagcgacgacgagatcctgagagccgagatggtggcccagctgtgcatgaacgacagaacccacagcagcctgctggacctgatccccgagaaccccaaccccaagagcggcatcatccccggcagctacagcttcgagagcgtgctgagcgccgtggccgacttcaaggcccccgtgttcgagcccggcggcagcatgcagcagggcatgtacacccccaaggccgaggtgtgggaccaggagttcgaccccgtgatggtgatcctgagaaccgtgtacagaagagacgtgcagagcgccatggacagatacaccgccttcctgaagcagagcggcaagttccccggcaacccctggcccccctacaagaagagaaccagcctgcaccccagctacaagggcctgatgagactgctgcactgcaagaccctgcacatcgtgctgttcaccctgctgtacaagatcctgatggaccaccagaacctgagcgagcacgtgctgtgcatggtgctgtacctgatcgagctgggcctggagaacagcgccgaggaggagagcgacgaggaggccagcgtgggcggccccgagagatgccacgacagctggttccccggcagcaacctggtgagcaacatgagacacttcatcaactacgtgagagtgagagtgcccgagaccgcccccgaggtgaagagagacagccccgccagcaccagcagcgacaacctgggcagcctgcagaacagcggcaccgcccaggtgttcagcctggtggccgagagaagaaagaagttccaggagatcatcaacagaagcagcagcgaggccaaccaggtggtgagacccaagaccagcagcaagtggagcgcccccggcagcgccccccagctgaccaccgccatcctggagatcaaggagagcatcctgagcctgctgatcaagctgcaccacaagctgagcggcaagcagaacagctactaccccccctggctggacgacatcgagatcctgatccagcccgagatccccaagtacagccacggcgacggcatcaccgccgtggagagaatcctgctgaaggccgccagccagagcagaatgaacaagagaatcatcgaggagatctgcagaaaggtgaccccccccgtgccccccaagaaggtgaccgccgccgagaagaagaccctggacaaggaggagagaagacagaaggccagagagagacagcagaagctgctggccgagttcgccagcagacagaagagcttcatggagaccgccatggacgtggacagccccgagaacgacatccccatggagatcaccaccgccgagccccaggtgagcgaggccgtgtacgactgcgtgatctgcggccagagcggccccagcagcgaggacagacccaccggcctggtggtgctgctgcaggccagcagcgtgctgggccagtgcagagacaacgtggagcccaagaagctgcccatcagcgaggaggagcagatctacccctgggacacctgcgccgccgtgcacgacgtgagactgagcctgctgcagagatacttcaaggacagcagctgcctgctggccgtgagcatcggctgggagggcggcgtgtacgtgcagacctgcggccacaccctgcacatcgactgccacaagagctacatggagagcctgagaaacgaccaggtgctgcagggcttcagcgtggacaagggcgagttcacctgccccctgtgcagacagttcgccaacagcgtgctgccctgctaccccggcagcaacgtggagaacaacccctggcagagacccagcaacaagagcatccaggacctgatcaaggaggtggaggagctgcagggcagacccggcgccttccccagcgagaccaacctgagcaaggagatggagagcgtgatgaaggacatcaagaacaccacccagaagaagtacagagactacagcaagacccccggcagccccgacaacgacttcctgttcatgtacagcgtggccagaaccaacctggagctggagctgatccacagaggcggcaacctgtgcagcggcggcgccagcaccgccggcaagagaagctgcctgaacttctgcttcatcatcttccccttcaccaagagcgagatcatcctgtgccagtacagaaagagccacgacaaggtgtaccccaagtaccagctgttccacgtgctggccctgcacatgagactgtacagcatcgacagcgagtacaacccctggagaaagctgacccagctggaggagatgaacccccagctgggctacgaggagcagcagcccgaggtgcccatcctgtaccacgacgtgaccagcctgctgctgatccagatcctgatgatgccccagcccctgagaaaggaccacttcacctgcatcgtgaaggtgctgttcaccctgctgtacacccaggccctggccgccctgagcgtgaagtgcagcgaggaggacagaagcgcctggaagcacgccggcgccctgaagaagagcacctgcgacgccgagaagagctacgaggtgctgctgagcttcgtgatcagcgagctgttcaagggcaagctgtaccacgaggagggcacccaggagtgcgccatggtgaaccccatcgcctggagccccgagagcatggagaagtgcctgcaggacttctgcctgcccttcctgagaatcaccagcctgctgcagcaccacctgttcggcgaggacctgcccagctgccaggaggaggaggagttcagcgtgctggccagctgcctgggcctgctgcccaccttctaccagaccgagcaccccttcatcagcgccagctgcctggactggcccgtgcccgccttcgacatcatcacccagtggtgcttcgagatcaagagcttcaccgagagacacgccgagcagggcaaggccctgctgatccaggagagcaagtggaagctgccccacctgctgcagctgcccgagaactacaacaccatcttccagtactaccacagaaagacctgcagcgtgtgcaccaaggtgcccaaggaccccgccgtgtgcctggtgtgcggcaccttcgtgtgcctgaagggcctgtgctgcaagcagcagagctactgcgagtgcgtgctgcacagccagaactgcggcgccggcaccggcatcttcctgctgatcaacgccagcgtgatcatcatcatcagaggccacagattctgcctgtggggcagcgtgtacctggacgcccacggcgaggaggacagagacctgagaagaggcaagcccctgtacatctgcaaggagagatacaaggtgctggagcagcagtggatcagccacaccttcgaccacatcaacaagagatggggcccccactacaacggcctgtag

SEQ ID NO: 104345 - DNA, 1278 bp, synthetic construct
  misc_feature 1..1278: note = Description of Artificial Sequence: Synthetic coding sequence
  source 1..1278: mol_type = other DNA
atggccggcgccgagggcgccgccggcagacagagcgagctggagcccgtggtgagcctggtggacgtgctggaggaggacgaggagctggagaacgaggcctgcgccgtgctgggcggcagcgacagcgagaagtgcagctacagccagggcagcgtgaagagacaggccctgtacgcctgcagcacctgcacccccgagggcgaggagcccgccggcatctgcctggcctgcagctacgagtgccacggcagccacaagctgttcgagctgtacaccaagagaaacttcagatgcgactgcggcaacagcaagttcaagaacctggagtgcaagctgctgcccgacaaggccaaggtgaacagcggcaacaagtacaacgacaacttcttcggcctgtactgcatctgcaagagaccctaccccgaccccgaggacgagatccccgacgagatgatccagtgcgtggtgtgcgaggactggttccacggcagacacctgggcgccatcccccccgagagcggcgacttccaggagatggtgtgccaggcctgcatgaagagatgcagcttcctgtgggcctacgccgcccagctggccgtgaccaagatcagcaccgaggacgacggcctggtgagaaacatcgacggcatcggcgaccaggaggtgatcaagcccgagaacggcgagcaccaggacagcaccctgaaggaggacgtgcccgagcagggcaaggacgacgtgagagaggtgaaggtggagcagaacagcgagccctgcgccggcagcagcagcgagagcgacctgcagaccgtgttcaagaacgagagcctgaacgccgagagcaagagcggctgcaagctgcaggagctgaaggccaagcagctgatcaagaaggacaccgccacctactggcccctgaactggagaagcaagctgtgcacctgccaggactgcatgaagatgtacggcgacctggacgtgctgttcctgaccgacgagtacgacaccgtgctggcctacgagaacaagggcaagatcgcccaggccaccgacagaagcgaccccctgatggacaccctgagcagcatgaacagagtgcagcaggtggagctgatctgcgagtacaacgacctgaagaccgagctgaaggactacctgaagagattcgccgacgagggcaccgtggtgaagagagaggacatccagcagttcttcgaggagttccagagcaagaagagaagaagagtggacggcatgcagtactactgcagctag

SEQ ID NO: 104346 - DNA, 1050 bp, synthetic construct
  misc_feature 1..1050: note = Description of Artificial Sequence: Synthetic coding sequence
  source 1..1050: mol_type = other DNA
atgagaagagccctgagctgggccgccgccacccccagaagcgcccccaccctgagaaacttcagatgcgactgcggcaacagcaagttcaagaacctggagtgcaagctgctgcccgacaaggccaaggtgaacagcggcaacaagtacaacgacaacttcttcggcctgtactgcatctgcaagagaccctaccccgaccccgaggacgagatccccgacgagatgatccagtgcgtggtgtgcgaggactggttccacggcagacacctgggcgccatcccccccgagagcggcgacttccaggagatggtgtgccaggcctgcatgaagagatgcagcttcctgtgggcctacgccgcccagctggccgtgaccaagatcagcaccgaggacgacggcctggtgagaaacatcgacggcatcggcgaccaggaggtgatcaagcccgagaacggcgagcaccaggacagcaccctgaaggaggacgtgcccgagcagggcaaggacgacgtgagagaggtgaaggtggagcagaacagcgagccctgcgccggcagcagcagcgagagcgacctgcagaccgtgttcaagaacgagagcctgaacgccgagagcaagagcggctgcaagctgcaggagctgaaggccaagcagctgatcaagaaggacaccgccacctactggcccctgaactggagaagcaagctgtgcacctgccaggactgcatgaagatgtacggcgacctggacgtgctgttcctgaccgacgagtacgacaccgtgctggcctacgagaacaagggcaagatcgcccaggccaccgacagaagcgaccccctgatggacaccctgagcagcatgaacagagtgcagcaggtggagctgatctgcgagtacaacgacctgaagaccgagctgaaggactacctgaagagattcgccgacgagggcaccgtggtgaagagagaggacatccagcagttcttcgaggagttccagagcaagaagagaagaagagtggacggcatgcagtactactgcagctag

SEQ ID NO: 104347 - DNA, 1083 bp, synthetic construct
  misc_feature 1..1083: note = Description of Artificial Sequence: Synthetic coding sequence
  source 1..1083: mol_type = other DNA
atgagaagagccctgagctgggccgccgccacccccagaagcgcccccaccctgagaaacttcagatgcgactgcggcaacagcaagttcaagaacctggagtgcaagctgctgcccgacaaggccaaggtgaacagcggcaacaagtacaacgacaacttcttcggcctgtactgcatctgcaagagaccctaccccgaccccgaggacgagatccccgacgagatgatccagtgcgtggtgtgcgaggactggttccacggcagacacctgggcgccatcccccccgagagcggcgacttccaggagatggtgtgccaggcctgcatgaagagatgcagcttcctgtgggcctacgccgcccagctggccgtgaccaagatcagcaccgaggacgacggcctggtgagaaacatcgacggcatcggcgaccaggaggtgatcaagcccgagaacggcgagcaccaggacagcaccctgaaggaggacgtgcccgagcagggcaaggacgacgtgagagaggtgaaggtggagcagaacagcgagccctgcgccggcagcagcagcgagagcgacctgcagaccgtgttcaagaacgagagcctgaacgccgagagcaagagcggctgcaagctgcaggagctgaaggccaagcagctgatcaagaaggacaccgccacctactggcccctgaactggagaagcaagctgtgcacctgccaggactgcatgaagatgtacggcgacctggacgtgctgttcctgaccgacgagtacgacaccgtgctggcctacgagaacaagggcaagatcgcccaggccaccgacagaagcgaccccctgatggacaccctgagcagcatgaacagagtgcagcaggtggagctgatctgcgagtacaacgacctgaagaccgagctgaaggactacctgaagagattcgccgacgagggcaccgtggtgaagagagaggacatccagcagttcttcgaggagttccagaagaaggagaagaagagcggctgggacgccgtgctgctgcagctggagtggagcatgaagctgagccacagcagccagtag

SEQ ID NO: 104348 - DNA, 2121 bp, synthetic construct
  misc_feature 1..2121: note = Description of Artificial Sequence: Synthetic coding sequence
  source 1..2121: mol_type = other DNA
atggccagccccgccgacagctgcatccagttcaccagacacgccagcgacgtgctgctgaacctgaacagactgagaagcagagacatcctgaccgacgtggtgatcgtggtgagcagagagcagttcagagcccacaagaccgtgctgatggcctgcagcggcctgttctacagcatcttcaccgaccagctgaagtgcaacctgagcgtgatcaacctggaccccgagatcaaccccgagggcttctgcatcctgctggacttcatgtacaccagcagactgaacctgagagagggcaacatcatggccgtgatggccaccgccatgtacctgcagatggagcacgtggtggacacctgcagaaagttcatcaaggccagcgaggccgagatggtgagcgccatcaagccccccagagaggagttcctgaacagcagaatgctgatgccccaggacatcatggcctacagaggcagagaggtggtggagaacaacctgcccctgagaagcgcccccggctgcgagagcagagccttcgcccccagcctgtacagcggcctgagcaccccccccgccagctacagcatgtacagccacctgcccgtgagcagcctgctgttcagcgacgaggagttcagagacgtgagaatgcccgtggccaaccccttccccaaggagagagccctgccctgcgacagcgccagacccgtgcccggcgagtacagcagacccaccctggaggtgagccccaacgtgtgccacagcaacatctacagccccaaggagaccatccccgaggaggccagaagcgacatgcactacagcgtggccgagggcctgaagcccgccgcccccagcgccagaaacgccccctacttcccctgcgacaaggccagcaaggaggaggagagacccagcagcgaggacgagatcgccctgcacttcgagccccccaacgcccccctgaacagaaagggcctggtgagcccccagagcccccagaagagcgactgccagcccaacagccccaccgagagctgcagcagcaagaacgcctgcatcctgcaggccagcggcagcccccccgccaagagccccaccgaccccaaggcctgcaactggaagaagtacaagttcatcgtgctgaacagcctgaaccagaacgccaagcccgagggccccgagcaggccgagctgggcagactgagccccagagcctacaccgccccccccgcctgccagccccccatggagcccgagaacctggacctgcagagccccaccaagctgagcgccagcggcgaggacagcaccatcccccaggccagcagactgaacaacatcgtgaacagaagcatgaccggcagccccagaagcagcagcgagagccacagccccctgtacatgcacccccccaagtgcaccagctgcggcagccagagcccccagcacgccgagatgtgcctgcacaccgccggccccaccttccccgaggagatgggcgagacccagagcgagtacagcgacagcagctgcgagaacggcgccttcttctgcaacgagtgcgactgcagattcagcgaggaggccagcctgaagagacacaccctgcagacccacagcgacaagccctacaagtgcgacagatgccaggccagcttcagatacaagggcaacctggccagccacaagaccgtgcacaccggcgagaagccctacagatgcaacatctgcggcgcccagttcaacagacccgccaacctgaagacccacaccagaatccacagcggcgagaagccctacaagtgcgagacctgcggcgccagattcgtgcaggtggcccacctgagagcccacgtgctgatccacaccggcgagaagccctacccctgcgagatctgcggcaccagattcagacacctgcagaccctgaagagccacctgagaatccacaccggcgagaagccctaccactgcgagaagtgcaacctgcacttcagacacaagagccagctgagactgcacctgagacagaagcacggcgccatcaccaacaccaaggtgcagtacagagtgagcgccaccgacctgccccccgagctgcccaaggcctgctag

SEQ ID NO: 104349 - DNA, 2619 bp, synthetic construct
  misc_feature 1..2619: note = Description of Artificial Sequence: Synthetic coding sequence
  source 1..2619: mol_type = other DNA
atgagaagcgtgtgccacagaagcggcgagccccagagcgacgacatcgaggccagcagaatgaagagagccgccgccaagcacctgatcgagagatactaccaccagctgaccgagggctgcggcaacgaggcctgcaccaacgagttctgcgccagctgccccaccttcctgagaatggacaacaacgccgccgccatcaaggccctggagctgtacaagatcaacgccaagctgtgcgacccccaccccagcaagaagggcgccagcagcgcctacctggagaacagcaagggcgcccccaacaacagctgcagcgagatcaagatgaacaagaagggcgccagaatcgacttcaaggacgtgacctacctgaccgaggagaaggtgtacgagatcctggagctgtgcagagagagagaggactacagccccctgatcagagtgatcggcagagtgttcagcagcgccgaggccctggtgcagagcttcagaaaggtgaagcagcacaccaaggaggagctgaagagcctgcaggccaaggacgaggacaaggacgaggacgagaaggagaaggccgcctgcagcgccgccgccatggaggaggacagcgaggccagcagcagcagaatcggcgacagcagccagggcgacaacaacctgcagaagctgggccccgacgacgtgagcgtggacatcgacgccatcagaagagtgtacaccagactgctgagcaacgagaagatcgagaccgccttcctgaacgccctggtgtacctgagccccaacgtggagtgcgacctgacctaccacaacgtgtacagcagagaccccaactacctgaacctgttcatcatcgtgatggagaacagaaacctgcacagccccgagtacctggagatggccctgcccctgttctgcaaggccatgagcaagctgcccctggccgcccagggcaagctgatcagactgtggagcaagtacaacgccgaccagatcagaagaatgatggagaccttccagcagctgatcacctacaaggtgatcagcaacgagttcaacagcagaaacctggtgaacgacgacgacgccatcgtggccgccagcaagtgcctgaagatggtgtactacgccaacgtggtgggcggcgaggtggacaccaaccacaacgaggaggacgacgaggagcccatccccgagagcagcgagctgaccctgcaggagctgctgggcgaggagagaagaaacaagaagggccccagagtggaccccctggagaccgagctgggcgtgaagaccctggactgcagaaagcccctgatccccttcgaggagttcatcaacgagcccctgaacgaggtgctggagatggacaaggactacaccttcttcaaggtggagaccgagaacaagttcagcttcatgacctgccccttcatcctgaacgccgtgaccaagaacctgggcctgtactacgacaacagaatcagaatgtacagcgagagaagaatcaccgtgctgtacagcctggtgcagggccagcagctgaacccctacctgagactgaaggtgagaagagaccacatcatcgacgacgccctggtgagactggagatgatcgccatggagaaccccgccgacctgaagaagcagctgtacgtggagttcgagggcgagcagggcgtggacgagggcggcgtgagcaaggagttcttccagctggtggtggaggagatcttcaaccccgacatcggcatgttcacctacgacgagagcaccaagctgttctggttcaaccccagcagcttcgagaccgagggccagttcaccctgatcggcatcgtgctgggcctggccatctacaacaactgcatcctggacgtgcacttccccatggtggtgtacagaaagctgatgggcaagaagggcaccttcagagacctgggcgacagccaccccgtgctgtaccagagcctgaaggacctgctggagtacgagggcaacgtggaggacgacatgatgatcaccttccagatcagccagaccgacctgttcggcaaccccatgatgtacgacctgaaggagaacggcgacaagatccccatcaccaacgagaacagaaaggagttcgtgaacctgtacagcgactacatcctgaacaagagcgtggagaagcagttcaaggccttcagaagaggcttccacatggtgaccaacgagagccccctgaagtacctgttcagacccgaggagatcgagctgctgatctgcggcagcagaaacctggacttccaggccctggaggagaccaccgagtacgacggcggctacaccagagacagcgtgctgatcagagagttctgggagatcgtgcacagcttcaccgacgagcagaagagactgttcctgcagttcaccaccggcaccgacagagcccccgtgggcggcctgggcaagctgaagatgatcatcgccaagaacggccccgacaccgagagactgcccaccagccacacctgcttcaacgtgctgctgctgcccgagtacagcagcaaggagaagctgaaggagagactgctgaaggccatcacctacgccaagggcttcggcatgctgtag

SEQ ID NO: 104350 - DNA, 2628 bp, synthetic construct
  misc_feature 1..2628: note = Description of Artificial Sequence: Synthetic coding sequence
  source 1..2628: mol_type = other DNA
atggagaagctgcaccagtgctactggaagagcggcgagccccagagcgacgacatcgaggccagcagaatgaagagagccgccgccaagcacctgatcgagagatactaccaccagctgaccgagggctgcggcaacgaggcctgcaccaacgagttctgcgccagctgccccaccttcctgagaatggacaacaacgccgccgccatcaaggccctggagctgtacaagatcaacgccaagctgtgcgacccccaccccagcaagaagggcgccagcagcgcctacctggagaacagcaagggcgcccccaacaacagctgcagcgagatcaagatgaacaagaagggcgccagaatcgacttcaaggacgtgacctacctgaccgaggagaaggtgtacgagatcctggagctgtgcagagagagagaggactacagccccctgatcagagtgatcggcagagtgttcagcagcgccgaggccctggtgcagagcttcagaaaggtgaagcagcacaccaaggaggagctgaagagcctgcaggccaaggacgaggacaaggacgaggacgagaaggagaaggccgcctgcagcgccgccgccatggaggaggacagcgaggccagcagcagcagaatcggcgacagcagccagggcgacaacaacctgcagaagctgggccccgacgacgtgagcgtggacatcgacgccatcagaagagtgtacaccagactgctgagcaacgagaagatcgagaccgccttcctgaacgccctggtgtacctgagccccaacgtggagtgcgacctgacctaccacaacgtgtacagcagagaccccaactacctgaacctgttcatcatcgtgatggagaacagaaacctgcacagccccgagtacctggagatggccctgcccctgttctgcaaggccatgagcaagctgcccctggccgcccagggcaagctgatcagactgtggagcaagtacaacgccgaccagatcagaagaatgatggagaccttccagcagctgatcacctacaaggtgatcagcaacgagttcaacagcagaaacctggtgaacgacgacgacgccatcgtggccgccagcaagtgcctgaagatggtgtactacgccaacgtggtgggcggcgaggtggacaccaaccacaacgaggaggacgacgaggagcccatccccgagagcagcgagctgaccctgcaggagctgctgggcgaggagagaagaaacaagaagggccccagagtggaccccctggagaccgagctgggcgtgaagaccctggactgcagaaagcccctgatccccttcgaggagttcatcaacgagcccctgaacgaggtgctggagatggacaaggactacaccttcttcaaggtggagaccgagaacaagttcagcttcatgacctgccccttcatcctgaacgccgtgaccaagaacctgggcctgtactacgacaacagaatcagaatgtacagcgagagaagaatcaccgtgctgtacagcctggtgcagggccagcagctgaacccctacctgagactgaaggtgagaagagaccacatcatcgacgacgccctggtgagactggagatgatcgccatggagaaccccgccgacctgaagaagcagctgtacgtggagttcgagggcgagcagggcgtggacgagggcggcgtgagcaaggagttcttccagctggtggtggaggagatcttcaaccccgacatcggcatgttcacctacgacgagagcaccaagctgttctggttcaaccccagcagcttcgagaccgagggccagttcaccctgatcggcatcgtgctgggcctggccatctacaacaactgcatcctggacgtgcacttccccatggtggtgtacagaaagctgatgggcaagaagggcaccttcagagacctgggcgacagccaccccgtgctgtaccagagcctgaaggacctgctggagtacgagggcaacgtggaggacgacatgatgatcaccttccagatcagccagaccgacctgttcggcaaccccatgatgtacgacctgaaggagaacggcgacaagatccccatcaccaacgagaacagaaaggagttcgtgaacctgtacagcgactacatcctgaacaagagcgtggagaagcagttcaaggccttcagaagaggcttccacatggtgaccaacgagagccccctgaagtacctgttcagacccgaggagatcgagctgctgatctgcggcagcagaaacctggacttccaggccctggaggagaccaccgagtacgacggcggctacaccagagacagcgtgctgatcagagagttctgggagatcgtgcacagcttcaccgacgagcagaagagactgttcctgcagttcaccaccggcaccgacagagcccccgtgggcggcctgggcaagctgaagatgatcatcgccaagaacggccccgacaccgagagactgcccaccagccacacctgcttcaacgtgctgctgctgcccgagtacagcagcaaggagaagctgaaggagagactgctgaaggccatcacctacgccaagggcttcggcatgctgtag

SEQ ID NO: 104351 - DNA, 2559 bp, synthetic construct
  misc_feature 1..2559: note = Description of Artificial Sequence: Synthetic coding sequence
  source 1..2559: mol_type = other DNA
atgaagagagccgccgccaagcacctgatcgagagatactaccaccagctgaccgagggctgcggcaacgaggcctgcaccaacgagttctgcgccagctgccccaccttcctgagaatggacaacaacgccgccgccatcaaggccctggagctgtacaagatcaacgccaagctgtgcgacccccaccccagcaagaagggcgccagcagcgcctacctggagaacagcaagggcgcccccaacaacagctgcagcgagatcaagatgaacaagaagggcgccagaatcgacttcaaggacgtgacctacctgaccgaggagaaggtgtacgagatcctggagctgtgcagagagagagaggactacagccccctgatcagagtgatcggcagagtgttcagcagcgccgaggccctggtgcagagcttcagaaaggtgaagcagcacaccaaggaggagctgaagagcctgcaggccaaggacgaggacaaggacgaggacgagaaggagaaggccgcctgcagcgccgccgccatggaggaggacagcgaggccagcagcagcagaatcggcgacagcagccagggcgacaacaacctgcagaagctgggccccgacgacgtgagcgtggacatcgacgccatcagaagagtgtacaccagactgctgagcaacgagaagatcgagaccgccttcctgaacgccctggtgtacctgagccccaacgtggagtgcgacctgacctaccacaacgtgtacagcagagaccccaactacctgaacctgttcatcatcgtgatggagaacagaaacctgcacagccccgagtacctggagatggccctgcccctgttctgcaaggccatgagcaagctgcccctggccgcccagggcaagctgatcagactgtggagcaagtacaacgccgaccagatcagaagaatgatggagaccttccagcagctgatcacctacaaggtgatcagcaacgagttcaacagcagaaacctggtgaacgacgacgacgccatcgtggccgccagcaagtgcctgaagatggtgtactacgccaacgtggtgggcggcgaggtggacaccaaccacaacgaggaggacgacgaggagcccatccccgagagcagcgagctgaccctgcaggagctgctgggcgaggagagaagaaacaagaagggccccagagtggaccccctggagaccgagctgggcgtgaagaccctggactgcagaaagcccctgatccccttcgaggagttcatcaacgagcccctgaacgaggtgctggagatggacaaggactacaccttcttcaaggtggagaccgagaacaagttcagcttcatgacctgccccttcatcctgaacgccgtgaccaagaacctgggcctgtactacgacaacagaatcagaatgtacagcgagagaagaatcaccgtgctgtacagcctggtgcagggccagcagctgaacccctacctgagactgaaggtgagaagagaccacatcatcgacgacgccctggtgagactggagatgatcgccatggagaaccccgccgacctgaagaagcagctgtacgtggagttcgagggcgagcagggcgtggacgagggcggcgtgagcaaggagttcttccagctggtggtggaggagatcttcaaccccgacatcggcatgttcacctacgacgagagcaccaagctgttctggttcaaccccagcagcttcgagaccgagggccagttcaccctgatcggcatcgtgctgggcctggccatctacaacaactgcatcctggacgtgcacttccccatggtggtgtacagaaagctgatgggcaagaagggcaccttcagagacctgggcgacagccaccccgtgctgtaccagagcctgaaggacctgctggagtacgagggcaacgtggaggacgacatgatgatcaccttccagatcagccagaccgacctgttcggcaaccccatgatgtacgacctgaaggagaacggcgacaagatccccatcaccaacgagaacagaaaggagttcgtgaacctgtacagcgactacatcctgaacaagagcgtggagaagcagttcaaggccttcagaagaggcttccacatggtgaccaacgagagccccctgaagtacctgttcagacccgaggagatcgagctgctgatctgcggcagcagaaacctggacttccaggccctggaggagaccaccgagtacgacggcggctacaccagagacagcgtgctgatcagagagttctgggagatcgtgcacagcttcaccgacgagcagaagagactgttcctgcagttcaccaccggcaccgacagagcccccgtgggcggcctgggcaagctgaagatgatcatcgccaagaacggccccgacaccgagagactgcccaccagccacacctgcttcaacgtgctgctgctgcccgagtacagcagcaaggagaagctgaaggagagactgctgaaggccatcacctacgccaagggcttcggcatgctgtag

SEQ ID NO: 104352 - DNA, 2559 bp, synthetic construct; identical to SEQ ID NO: 104351
  misc_feature 1..2559: note = Description of Artificial Sequence: Synthetic coding sequence
  source 1..2559: mol_type = other DNA

SEQ ID NO: 104353 - DNA, 3252 bp, synthetic construct
  misc_feature 1..3252: note = Description of Artificial Sequence: Synthetic coding sequence
  source 1..3252: mol_type = other DNA
atgttcagcttcgagggcgacttcaagaccagacccaaggtgagcctgggcggcgccagcagaaaggaggagaaggccagcctgctgcacagaacccaggaggagagaagaaagagagaggaggagagaagaagactgaagaacgccatcatcatccagagcttcatcagaggctacagagacagaaagcagcagtacagcatccagagaagcgccttcgacagatgcgccaccctgagccagagcggcggcgccttccccatcgccaacggccccaacctgaccctgctggtgagacagctgctgttcttctacaagcagaacgaggacagcaagagactgatctggctgtaccagaacctgatcaagcacagcagcctgttcgtgaagcagctggacggcagcgagagactgacctgcctgttccagatcaagagactgatgagcctgtgctgcagactgctgcagaactgcaacgacgacagcctgaacgtggccctgcccatgagaatgctggaggtgttcagcagcgagaacacctacctgcccgtgctgcaggacgccagctacgtggtgagcgtgatcgagcagatcctgcactacatgatccacaacggctactacagaagcctgtacctgctgatcaacagcaagctgcccagcagcatcgagtacagcgacctgagcagagtgcccatcgccaagatcctgctggagaacgtgctgaagcccctgcacttcacctacaacagctgccccgagggcgccagacagcaggtgttcaccgccttcaccgaggagttcctggccgcccccttcaccgaccagatcttccacttcatcatccccgccctggccgacgcccagaccgtgttcccctacgagcccttcctgaacgccctgctgctgatcgagagcagatgcagcagaaagagcggcggcgccccctggctgttctacttcgtgctgaccgtgggcgagaactacctgggcgccctgagcgaggagggcctgctggtgtacctgagagtgctgcagaccttcctgagccagctgcccgtgagccccgccagcgccagctgccacgacagcgccagcgacagcgaggaggagagcgaggaggccgacaagcccagcagccccgaggacggcagactgagcgtgagctacatcaccgaggagtgcctgaagaagctggacaccaagcagcagaccaacaccctgctgaacctggtgtggagagacagcgccagcgaggaggtgttcaccaccatggccagcgtgtgccacaccctgatggtgcagcacagaatgatggtgcccaaggtgagactgctgtacagcctggccttcaacgccagattcctgagacacctgtggttcctgatcagcagcatgagcaccagaatgatcaccggcagcatggtgcccctgctgcaggtgatcagcagaggcagccccatgagcttcgaggacagcagcagaatcatccccctgttctacctgttcagcagcctgttcagccacagcctgatcagcatccacgacaacgagttcttcggcgaccccatcgaggtggtgggccagagacagagcagcatgatgcccttcaccctggaggagctgatcatgctgagcagatgcctgagagacgcctgcctgggcatcatcaagctggcctaccccgagaccaagcccgaggtgagagaggagtacatcaccgccttccagagcatcggcgtgaccaccagcagcgagatgcagcagtgcatccagatggagcagaagagatggatccagctgttcaaggtgatcaccaacctggtgaagatgctgaagagcagagacaccagaagaaacttctgcccccccaaccactggctgagcgagcaggaggacatcaaggccgacaaggtgacccagctgtacgtgcccgccagcagacacgtgtggagattcagaagaatgggcagaatcggccccctgcagagcaccctggacgtgggcctggagagcccccccctgagcgtgagcgaggagagacagctggccgtgctgaccgagctgcccttcgtggtgcccttcgaggagagagtgaagatcttccagagactgatctacgccgacaagcaggaggtgcagggcgacggccccttcctggacggcatcaacgtgaccatcagaagaaactacatctacgaggacgcctacgacaagctgagccccgagaacgagcccgacctgaagaagagaatcagagtgcacctgctgaacgcccacggcctggacgaggccggcatcgacggcggcggcatcttcagagagttcctgaacgagctgctgaagagcggcttcaaccccaaccagggcttcttcaagaccaccaacgagggcctgctgtaccccaaccccgccgcccagatgctggtgggcgacagcttcgccagacactactacttcctgggcagaatgctgggcaaggccctgtacgagaacatgctggtggagctgcccttcgccggcttcttcctgagcaagctgctgggcaccagcgccgacgtggacatccaccacctggccagcctggaccccgaggtgtacaagaacctgctgttcctgaagagctacgaggacgacgtggaggagctgggcctgaacttcaccgtggtgaacaacgacctgggcgaggcccaggtggtggagctgaagttcggcggcaaggacatccccgtgaccagcgccaacagaatcgcctacatccacctggtggccgactacagactgaacagacagatcagacagcactgcctggccttcagacagggcctggccaacgtggtgagcctggagtggctgagaatgttcgaccagcaggagatccaggtgctgatcagcggcgcccaggtgcccatcagcctggaggacctgaagagcttcaccaactacagcggcggctacagcgccgaccaccccgtgatcaaggtgttctggagagtggtggagggcttcaccgacgaggagaagagaaagctgctgaagttcgtgaccagctgcagcagaccccccctgctgggcttcaaggagctgtaccccgccttctgcatccacaacggcggcagcgacctggagagactgcccaccgccagcacctgcatgaacctgctgaagctgcccgagttctacgacgagaccctgctgagaagcaagctgctgtacgccatcgagtgcgccgccggcttcgagctgagctag

SEQ ID NO: 104354 - DNA, 1215 bp, synthetic construct
  misc_feature 1..1215: note = Description of Artificial Sequence: Synthetic coding sequence
  source 1..1215: mol_type = other DNA
atgttcagcttcgagggcgacttcaagaccagacccaaggtgagcctgggcggcgccagcagaaagtacagcatccagagaagcgccttcgacagatgcgccaccctgagccagagcggcggcgccttccccatcgccaacggccccaacctgaccctgctggtgagacagctgctgttcttctacaagcagaacgaggacagcaagagactgatctggctgtaccagaacctgatcaagcacagcagcctgttcgtgaagcagctggacggcagcgagagactgacctgcctgttccagatcaagagactgatgagcctgtgctgcagactgctgcagaactgcaacgacgacagcctgaacgtggccctgcccatgagaatgctggaggtgttcagcagcgagaacacctacctgcccgtgctgcaggacgccagctacgtggtgagcgtgatcgagcagatcctgcactacatgatccacaacggctactacagaagcctgtacctgctgatcaacagcaagctgcccagcagcatcgagtacagcgacctgagcagagtgcccatcgccaagatcctgctggagaacgtgctgaagcccctgcacttcacctacaacagctgccccgagggcgccagacagcaggtgttcaccgccttcaccgaggagttcctggccgcccccttcaccgaccagatcttccacttcatcatccccgccctggccgacgcccagaccgtgttcccctacgagcccttcctgaacgccctgctgctgatcgagagcagatgcagcagaaagagcggcggcgccccctggctgttctacttcgtgctgaccgtgggcgagaactacctgggcgccctgagcgaggagggcctgctggtgtacctgagagtgctgcagaccttcctgagccagctgcccgtgagccccgccagcgccagctgccacgacagcgccagcgacagcgaggaggagagcgaggaggccgacaagcccagcagccccgaggacggcagactgagcgtgagctacatcaccgaggagtgcctgaagaagctggacaccaagcagcagaccaacaccctgctgaacctggtgtggagagacagcgccagcgaggaggtgttcaccaccatggccagcgtgtgccacaccctgatggtgcagcacagaatgatggtgcccaaggtgagagtgtacaagtag

SEQ ID NO: 104355 - DNA, 192 bp, synthetic construct
  misc_feature 1..192: note = Description of Artificial Sequence: Synthetic coding sequence
  source 1..192: mol_type = other DNA
atggccgcccccctgagcgtggaggtggagttcggcagcagccccggctgcctgttcctgtggagcagcttcgccgaggtggtgagaagcagctgcctgaccgtgctgagaaacatcgagagcctgtgcctggacagaagaaaccccggcaccagcggcacctgcagcagcggcagcagaagaatctgctag

SEQ ID NO: 104356 - DNA, 192 bp, synthetic construct
  misc_feature 1..192: note = Description of Artificial Sequence: Synthetic coding sequence
  source 1..192: mol_type = other DNA
atggccgcccccctgagcgtggaggtggagttcggcggcggcgccgagctgctgttcgacggcatcaagaagcacagagtgaccctgcccggccaggaggagccctgggacatcagaaacctgctgatctggatcaagaagaacctgctgaaggagagacccgagctgttcatccagggcgacagcgtgtag

SEQ ID NO: 104357 - DNA, 306 bp, synthetic construct
  misc_feature 1..306: note = Description of Artificial Sequence: Synthetic coding sequence
  source 1..306: mol_type = other DNA
atggccgcccccctgagcgtggaggtggagttcggcggcggcgccgagctgctgttcgacggcatcaagaagcacagagtgaccctgcccggccaggaggagccctgggacatcagaaacctgctgatctggatcaagaagaacctgctgaaggagagacccgagctgttcatccagggcgacagcgtgagacccggcatcctggtgctgatcaacgacgccgactgggagctgctgggcgagctggactaccagctgcaggaccaggacagcgtgctgttcatcagcaccctgcacggcggctag

SEQ ID NO: 104358 - DNA, 441 bp, synthetic construct
  misc_feature 1..441: note = Description of Artificial Sequence: Synthetic coding sequence
  source 1..441: mol_type = other DNA
atggccgcccccctgagcgtggaggtggagttcggcggcggcgccgagctgctgttcgacggcatcaagaagcacagagtgaccctgcccggccaggaggagccctgggacatcagaaacctgctgatctggatcaagaagaacctgctgaaggagagacccgagctgttcatccagggcgacagcgtgagacccggcatcctggtgctgatcaacgacgccgactgggagctgctggtgagcaccctgggcgacatccccccccccgcccccgccctggccgccagcgtgggcaagagatgggccagcccccaggcccacatcgagtggctgggcaacccccccccccacagcagccccaccctgagactgctggagagccccacccccggcgaggagggcatgggcagctggggccacggcagcaccccccccagctag

SEQ ID NO: 104359 - DNA, 2358 bp, synthetic construct
  misc_feature 1..2358: note = Description of Artificial Sequence: Synthetic coding sequence
  source 1..2358: mol_type = other DNA
atgcccggcgtgatccccagcgagagcaacggcctgagcagaggcagccccagcaagaagaacagactgagcctgaagttcttccagaagaaggagaccaagagagccctggacttcaccgacagccaggagaacgaggagaaggccagcgagtacagagccagcgagatcgaccaggtggtgcccgccgcccagagcagccccatcaactgcgagaagagagagaacctgctgcccttcgtgggcctgaacaacctgggcaacacctgctacctgaacagcatcctgcaggtgctgtacttctgccccggcttcaagagcggcgtgaagcacctgttcaacatcatcagcagaaagaaggaggccctgaaggacgaggccaaccagaaggacaagggcaactgcaaggaggacagcctggccagctacgagctgatctgcagcctgcagagcctgatcatcagcgtggagcagctgcaggccagcttcctgctgaaccccgagaagtacaccgacgagctggccacccagcccagaagactgctgaacaccctgagagagctgaaccccatgtacgagggctacctgcagcacgacgcccaggaggtgctgcagtgcatcctgggcaacatccaggagacctgccagctgctgaagaaggaggaggtgaagaacgtggccgagctgcccaccaaggtggaggagatcccccaccccaaggaggagatgaacggcatcaacagcatcgagatggacagcatgagacacagcgaggacttcaaggagaagctgcccaagggcaacggcaagagaaagagcgacaccgagttcggcaacatgaagaagaaggtgaagctgagcaaggagcaccagagcctggaggagaaccagagacagaccagaagcaagagaaaggccaccagcgacaccctggagagcccccccaagatcatccccaagtacatcagcgagaacgagagccccagacccagccagaagaagagcagagtgaagatcaactggctgaagagcgccaccaagcagcccagcatcctgagcaagttctgcagcctgggcaagatcaccaccaaccagggcgtgaagggccagagcaaggagaacgagtgcgaccccgaggaggacctgggcaagtgcgagagcgacaacaccaccaacggctgcggcctggagagccccggcaacaccgtgacccccgtgaacgtgaacgaggtgaagcccatcaacaagggcgaggagcagatcggcttcgagctggtggagaagctgttccagggccagctggtgctgagaaccagatgcctggagtgcgagagcctgaccgagagaagagaggacttccaggacatcagcgtgcccgtgcaggaggacgagctgagcaaggtggaggagagcagcgagatcagccccgagcccaagaccgagatgaagaccctgagatgggccatcagccagttcgccagcgtggagagaatcgtgggcgaggacaagtacttctgcgagaactgccaccactacaccgaggccgagagaagcctgctgttcgacaagatgcccgaggtgatcaccatccacctgaagtgcttcgccgccagcggcctggagttcgactgctacggcggcggcctgagcaagatcaacacccccctgctgacccccctgaagctgagcctggaggagtggagcaccaagcccaccaacgacagctacggcctgttcgccgtggtgatgcacagcggcatcaccatcagcagcggccactacaccgccagcgtgaaggtgaccgacctgaacagcctggagctggacaagggcaacttcgtggtggaccagatgtgcgagatcggcaagcccgagcccctgaacgaggaggaggccagaggcgtggtggagaactacaacgacgaggaggtgagcatcagagtgggcggcaacacccagcccagcaaggtgctgaacaagaagaacgtggaggccatcggcctgctgggcggccagaagagcaaggccgactacgagctgtacaacaaggccagcaaccccgacaaggtggccagcaccgccttcgccgagaacagaaacagcgagaccagcgacaccaccggcacccacgagagcgacagaaacaaggagagcagcgaccagaccggcatcaacatcagcggcttcgagaacaagatcagctacgtggtgcagagcctgaaggagtacgagggcaagtggctgctgttcgacgacagcgaggtgaaggtgaccgaggagaaggacttcctgaacagcctgagccccagcaccagccccaccagcaccccctacctgctgttctacaagaagctgtag

SEQ ID NO: 104360 - DNA, 2358 bp, synthetic construct; identical to SEQ ID NO: 104359
  misc_feature 1..2358: note = Description of Artificial Sequence: Synthetic coding sequence
  source 1..2358: mol_type = other DNA

SEQ ID NO: 104361 - DNA, 264 bp, synthetic construct
  misc_feature 1..264: note = Description of Artificial Sequence: Synthetic coding sequence
  source 1..264: mol_type = other DNA
atgcccggcgtgatccccagcgagagcaacggcctgagcagaggcagccccagcaagaagaacagactgagcctgaagttcttccagaagaaggagaccaagagagccctggacttcaccgacagccaggagaacgaggagaaggccagcgagtacagagccagcgagatcgaccaggtggtgcccgccgcccagagcagccccatcaactgcgagaagagagagaacctgctgcccttcgtgggcctgaacaacctgggctag

SEQ ID NO: 104362 - DNA, 561 bp, synthetic construct
  misc_feature 1..561: note = Description of Artificial Sequence: Synthetic coding sequence
  source 1..561: mol_type = other DNA
atgcccggcgtgatccccagcgagagcaacggcctgagcagaggcagccccagcaagaagaacagactgagcctgaagttcttccagaagaaggagaccaagagagccctggacttcaccgacagccaggagaacgaggagaaggccagcgagtacagagccagcgagatcgaccaggtggtgcccgccgcccagagcagccccatcaactgcgagaagagagagaacctgctgcccttcgtgggcctgaacaacctgggcaacacctgctacctgaacagcatcctgcaggtgctgtacttctgccccggcttcaagagcggcgtgaagcacctgttcaacatcatcagcagaaagaaggaggccctgaaggacgaggccaaccagaaggacaagggcaactgcaaggaggacagcctggccagctacgagctgatctgcagcctgcagagcctgatcatcagcgtggagcagctgcaggccagcttcctgctgaaccccgagaagtacaccgacgagctggccacccagcccagaagactgctgaacaccctgagatag

SEQ ID NO: 104363 - DNA, 663 bp, synthetic construct
  misc_feature 1..663: note = Description of Artificial Sequence: Synthetic coding sequence
  source 1..663: mol_type = other DNA
atgcccctgaccggcgtgggccccggcagctgcagaagacagatcatcagagccctgtgcctgctgctgctgctgctgcacgccggcagcgccaagaacatctggaagagagccctgcccgccagactggccgagaagagcagagccgaggaggccggcgcccccggcggccccagacagcccagagccgacagatgcccccccccccccagaaccctgccccccggcgcctgccaggccgccagatgccaggccgacagcgagtgccccagacacagaagatgctgctacaacggctgcgcctacgcctgcctggaggccgtgccccccccccccgtgctggactggctggtgcagcccaagcccagatggctgggcggcaacggctggctgctggacggccccgaggaggtgctgcaggccgaggcctgcagcaccaccgaggacggcgccgagcccctgctgtgccccagcggctacgagtgccacatcctgagccccggcgacgtggccgagggcatccccaacagaggccagtgcgtgaagcagagaagacaggccgacggcagaatcctgagacacaagctgtacaaggagtaccccgagggcgacagcaagaacgtggccgagcccggcagaggccagcagaagcacttccagtag

SEQ ID NO: 104364 - DNA, 687 bp, synthetic construct
  misc_feature 1..687: note = Description of Artificial Sequence: Synthetic coding sequence
  source 1..687: mol_type = other DNA
atgtaccacctgatgaagttcatccccctgtacagcaaggtgcagagaccctgcaccagcacccccatgatcgacagcttcgtgagactgatgaacgagttcaccaacatgcccgtgccccccaagcccagacaggccctgggcgacaagatcgtgagagacatcagacccggcgccgccttcgagcccacctacatctacagactgctgaccgtgaacaagagcagcctgagcgagaagggcagacaggaggacgccgaggagtacctgggcttcatcctgaacggcctgcacgaggagatgctgaacctgaagaagctgctgagccccagcaacgagaagctgaccatcagcaacggccccaagaaccacagcgtgaacgaggaggagcaggaggagcagggcgagggcagcgaggacgagtgggagcaggtgggccccagaaacaagaccagcgtgaccagacaggccgacttcgtgcagacccccatcaccggcttctggtggacccaccaggtgtgcggcctgcccgccgagttcaagagaatctgccacttcgccgccatcttccacgtggccgtgggctaccccgtgagacaggacacccacagccccggctgcaccggcgagctgggcggcaagagaatctgccccagactgtaccacaagaaccagaccagaggctag

SEQ ID NO: 104365 - DNA, 189 bp, synthetic construct
  misc_feature 1..189: note = Description of Artificial Sequence: Synthetic coding sequence
  source 1..189: mol_type = other DNA
atggccctgcacagcccccagtacatcttcggcgacttcagccccgacgagttcaaccagttcttcgtgacccccagaagcagcgtggaggacaagaacatcagagagctgagcctggtgagcatgaagagcctgaaccccgtgaccctgtgcagagagccccccgccaccgtgttccaggcccactag

SEQ ID NO: 104366 - DNA, 2472 bp, synthetic construct
  misc_feature 1..2472: note = Description of Artificial Sequence: Synthetic coding sequence
  source 1..2472: mol_type = other DNA
atgaagagacacagacccgtgagcagcagcgacagcagcgacgagagccccagcaccagcttcaccagcggcagcatgtacagaatcaagagcaagatccccaacgagcacaagaagcccgccgaggtgttcagaaaggacctgatcagcgccatgaagctgcccgacagccaccacatcaaccccgacagctactacctgttcgccgacacctggaaggaggagtgggagaagggcgtgcaggtgcccgccagccccgacaccgtgccccagcccagcctgagaatcatcgccgagaaggtgaaggacgtgctgttcatcagacccagaaagtacatccactgcagcagccccgacaccaccgagcccggctacatcaacatcatggagctggccgccagcgtgtgcagatacgacctggacgacatggacatcttctggctgcaggagctgaacgaggacctggccgagatgggctgcggccccgtggacgagaacctgatggagaagaccgtggaggtgctggagagacactgccacgagaacatgaaccacgccatcgagaccgaggagggcctgggcatcgagtacgacgaggacgtgatctgcgacgtgtgcagaagccccgacagcgaggagggcaacgacatggtgttctgcgacaagtgcaacgtgtgcgtgcaccaggcctgctacggcatcctgaaggtgcccgagggcagctggctgtgcagaagctgcgtgctgggcatctacccccagtgcgtgctgtgccccaagaagggcggcgccctgaagaccaccaagaccggcaccaagtgggcccacgtgagctgcgccctgtggatccccgaggtgagcatcgcctgccccgagagaatggagcccatcaccaagatcagccacatcccccccagcagatgggccctggtgtgcaacctgtgcaagctgaagaccggcgcctgcatccagtgcagcatcaagagctgcatcaccgccttccacgtgacctgcgccttcgagcacggcctggagatgaagaccatcctggacgagggcgacgaggtgaagttcaagagctactgcctgaagcacagccagaacagacagaagctgggcgaggccgagtacccccaccacagagccaaggagcagagccaggccaagagcgagaagaccagcctgagagcccagaagctgagagagctggaggaggagttctacagcctggtgagagtggaggacgtggccgccgagctgggcatgcccaccctggccgtggacttcatctacaactactggaagctgaagagaaagagcaacttcaacaagcccctgttcccccccaaggaggacgaggagaacggcctggtgcagcccaaggaggagagcatccacaccagaatgagaatgttcatgcacctgagacaggacctggagagagtgagaaacctgtgctacatgatcagcagaagagagaagctgaagctgagccacaacaagatccaggagcagatcttcggcctgcaggtgcagctgctgaaccaggagatcgacgccggcctgcccctgaccaacgccctggagaacagcctgttctaccccccccccagaatcaccctgaagctgaagatgcccaagagcacccccgaggaccacagaaacagcagcaccgagaccgaccagcagccccacagccccgacagcagcagcagcgtgcacagcatcagaaacatgcaggtgccccaggagagcctggagatgagaaccaagagctaccccagataccccctggagagcaagaacaacagactgctggccagcctgagccacagcagaagcgaggccaaggagagcagccccgcctggagaacccccagcagcgagtgctaccacggccagagcctgggcaagcccctggtgctgcaggccgccctgcacggccagagcagcatcggcaacggcaagagccagcccaacagcaagttcgccaagagcaacggcctggagggcagctggagcggcaacgtgacccagaaggacagcagcagcgagatgttctgcgaccaggagcccgtgttcagcccccacctggtgagccagggcagcttcagaaagagcaccgtggagcacttcagcagaagcttcaaggagaccaccaacagatgggtgaagaacaccgaggacctgcagtgctacgtgaagcccaccaagaacatgagccccaaggagcagttctggggcagacaggtgctgagaagaagcgccggcagagccccctaccaggagaacgacggctactgccccgacctggagctgagcgacagcgaggccgagagcgacggcaacaaggagaaggtgagagtgagaaaggacagcagcgacagagagaaccccccccacgacagcagaagagactgccacggcaagagcaagacccaccccctgagccacagcagcatgcagagatag

SEQ ID NO: 104367 - DNA, 2763 bp, synthetic construct
  misc_feature 1..2763: note = Description of Artificial Sequence: Synthetic coding sequence
  source 1..2763: mol_type = other DNA
atggccaccgtggccgccaaccccgccgccgccgccgccgccgtggccgccgccgccgccgtgaccgaggacagagagccccagcacgaggagctgcccggcctggacagccagtggagacagatcgagaacggcgagagcggcagagagagacccctgagagccggcgagagctggttcctggtggagaagcactggtacaagcagtgggaggcctacgtgcagggcggcgaccaggacagcagcaccttccccggctgcatcaacaacgccaccctgttccaggacgagatcaactggagactgaaggagggcctggtggagggcgaggactacgtgctgctgcccgccgccgcctggcactacctggtgagctggtacggcctggagcacggccagccccccatcgagagaaaggtgatcgagctgcccaacatccagaaggtggaggtgtaccccgtggagctgctgctggtgagacacaacgacctgggcaagagccacaccgtgcagttcagccacaccgacagcatcggcctggtgctgagaaccgccagagagagattcctggtggagccccaggaggacaccagactgtgggccaagaacagcgagggcagcctggacagactgtacgacacccacatcaccgtgctggacgccgccctggagaccggccagctgatcatcatggagaccagaaagaaggacggcacctggcccagcgcccagctgcacgtgatgaacaacaacatgagcgaggaggacgaggacttcaagggccagcccggcatctgcggcctgaccaacctgggcaacacctgcttcatgaacagcgccctgcagtgcctgagcaacgtgccccagctgaccgagtacttcctgaacaactgctacctggaggagctgaacttcagaaaccccctgggcatgaagggcgagatcgccgaggcctacgccgacctggtgaagcaggcctggagcggccaccacagaagcatcgtgccccacgtgttcaagaacaaggtgggccacttcgccagccagttcctgggctaccagcagcacgacagccaggagctgctgagcttcctgctggacggcctgcacgaggacctgaacagagtgaagaagaaggagtacgtggagctgtgcgacgccgccggcagacccgaccaggaggtggcccaggaggcctggcagaaccacaagagaagaaacgacagcgtgatcgtggacaccttccacggcctgttcaagagcaccctggtgtgccccgactgcggcaacgtgagcgtgaccttcgaccccttctgctacctgagcgtgcccctgcccatcagccacaagagagtgctggaggtgttcttcatccccatggaccccagaagaaagcccgagcagcacagactggtggtgcccaagaagggcaagatcagcgacctgtgcgtggccctgagcaagcacaccggcatcagccccgagagaatgatggtggccgacgtgttcagccacagattctacaagctgtaccagctggaggagcccctgagcagcatcctggacagagacgacatcttcgtgtacgaggtgagcggcagaatcgaggccatcgagggcagcagagaggacatcgtggtgcccgtgtacctgagagagagaacccccgccagagactacaacaacagctactacggcctgatgctgttcggccaccccctgctggtgagcgtgcccagagacagattcacctgggagggcctgtacaacgtgctgatgtacagactgagcagatacgtgaccaagcccaacagcgacgacgaggacgacggcgacgagaaggaggacgacgaggaggacaaggacgacgtgcccggccccagcaccggcggcagcctgagagaccccgagcccgagcaggccggccccagcagcggcgtgaccaacagatgccccttcctgctggacaactgcctgggcaccagccagtggccccccagaagaagaagaaagcagctgttcaccctgcagaccgtgaacagcaacggcaccagcgacagaaccaccagccccgaggaggtgcacgcccagccctacatcgccatcgactgggagcccgagatgaagaagagatactacgacgaggtggaggccgagggctacgtgaagcacgactgcgtgggctacgtgatgaagaaggcccccgtgagactgcaggagtgcatcgagctgttcaccaccgtggagaccctggagaaggagaacccctggtactgccccagctgcaagcagcaccagctggccaccaagaagctggacctgtggatgctgcccgagatcctgatcatccacctgaagagattcagctacaccaagttcagcagagagaagctggacaccctggtggagttccccatcagagacctggacttcagcgagttcgtgatccagccccagaacgagagcaaccccgagctgtacaagtacgacctgatcgccgtgagcaaccactacggcggcatgagagacggccactacaccaccttcgcctgcaacaaggacagcggccagtggcactacttcgacgacaacagcgtgagccccgtgaacgagaaccagatcgagagcaaggccgcctacgtgctgttctaccagagacaggacgtggccagaagactgctgagccccgccggcagcagcggcgcccccgccagccccgcctgcagcagcccccccagcagcgagttcatggacgtgaactag

SEQ ID NO: 104368 - DNA, 1113 bp, synthetic construct
  misc_feature 1..1113: note = Description of Artificial Sequence: Synthetic coding sequence
  source 1..1113: mol_type = other DNA
atggagatcctgatgaccgtgagcaagttcgccagcatctgcaccatgggcgccaacgccagcgccctggagaaggagatcggccccgagcagttccccgtgaacgagcactacttcggcctggtgaacttcggcaacacctgctactgcaacagcgtgctgcaggccctgtacttctgcagacccttcagagagaaggtgctggcctacaagagccagcccagaaagaaggagagcctgctgacctgcctggccgacctgttccacagcatcgccacccagaagaagaaggtgggcgtgatcccccccaagaagttcatcaccagactgagaaaggagaacgagctgttcgacaactacatgcagcaggacgcccacgagttcctgaactacctgctgaacaccatcgccgacatcctgcaggaggagagaaagcaggagaagcagaacggcagactgcccaacggcaacatcgacaacgagaacaacaacagcacccccgaccccacctgggtgcacgagatcttccagggcaccctgaccaacgagaccagatgcctgacctgcgagaccatcagcagcaaggacgaggacttcctggacctgagcgtggacgtggagcagaacaccagcatcacccactgcctgagaggcttcagcaacaccgagaccctgtgcagcgagtacaagtactactgcgaggagtgcagaagcaagcaggaggcccacaagagaatgaaggtgaagaagctgcccatgatcctggccctgcacctgaagagattcaagtacatggaccagctgcacagatacaccaagctgagctacagagtggtgttccccctggagctgagactgttcaacaccagcggcgacgccaccaaccccgacagaatgtacgacctggtggccgtggtggtgcactgcggcagcggccccaacagaggccactacatcgccatcgtgaagagccacgacttctggctgctgttcgacgacgacatcgtggagaagatcgacgcccaggccatcgaggagttctacggcctgaccagcgacatcagcaagaacagcgagagcggctacatcctgttctaccagagcagagactag

SEQ ID NO: 104369 - DNA, 2592 bp, synthetic construct
  misc_feature 1..2592: note = Description of Artificial Sequence: Synthetic coding sequence
  source 1..2592: mol_type = other DNA
atgcagagaagaggcgccctgttcggcatgcccggcggcagcggcggcagaaagatggccgccggcgacatcggcgagctgctggtgccccacatgcccaccatcagagtgcccagaagcggcgacagagtgtacaagaacgagtgcgccttcagctacgacagccccaacagcgagggcggcctgtacgtgtgcatgaacaccttcctggccttcggcagagagcacgtggagagacacttcagaaagaccggccagagcgtgtacatgcacctgaagagacacgtgagagagaaggtgagaggcgccagcggcggcgccctgcccaagagaagaaacagcaagatcttcctggacctggacaccgacgacgacctgaacagcgacgactacgagtacgaggacgaggccaagctggtgatcttccccgaccactacgagatcgccctgcccaacatcgaggagctgcccgccctggtgaccatcgcctgcgacgccgtgctgagcagcaagagcccctacagaaagcaggaccccgacacctgggagaacgagctgcccgtgagcaagtacgccaacaacctgacccagctggacaacggcgtgagaatcccccccagcggctggaagtgcgccagatgcgacctgagagagaacctgtggctgaacctgaccgacggcagcgtgctgtgcggcaagtggttcttcgacagcagcggcggcaacggccacgccctggagcactacagagacatgggctaccccctggccgtgaagctgggcaccatcacccccgacggcgccgacgtgtacagcttccaggaggaggagcccgtgctggacccccacctggccaagcacctggcccacttcggcatcgacatgctgcacatgcacggcaccgagaacggcctgcaggacaacgacatcaagctgagagtgagcgagtgggaggtgatccaggagagcggcaccaagctgaagcccatgtacggccccggctacaccggcctgaagaacctgggcaacagctgctacctgagcagcgtgatgcaggccatcttcagcatccccgagttccagagagcctacgtgggcaacctgcccagaatcttcgactacagccccctggaccccacccaggacttcaacacccagatgaccaagctgggccacggcctgctgagcggccagtacagcaagccccccgtgaagagcgagctgatcgagcaggtgatgaaggaggagcacaagccccagcagaacggcatcagccccagaatgttcaaggccttcgtgagcaagagccaccccgagttcagcagcaacagacagcaggacgcccaggagttcttcctgcacctggtgaacctggtggagagaaacagaatcggcagcgagaaccccagcgacgtgttcagattcctggtggaggagagaatccagtgctgccagaccagaaaggtgagatacaccgagagagtggactacctgatgcagctgcccgtggccatggaggccgccaccaacaaggacgagctgatcgcctacgagctgaccagaagagaggccgaggccaacagaagacccctgcccgagctggtgagagccaagatccccttcagcgcctgcctgcaggccttcagcgagcccgagaacgtggacgacttctggagcagcgccctgcaggccaagagcgccggcgtgaagaccagcagattcgccagcttccccgagtacctggtggtgcagatcaagaagttcaccttcggcctggactgggtgcccaagaagttcgacgtgagcatcgacatgcccgacctgctggacatcaaccacctgagagccagaggcctgcagcccggcgaggaggagctgcccgacatcagcccccccatcgtgatccccgacgacagcaaggacagactgatgaaccagctgatcgaccccagcgacatcgacgagagcagcgtgatgcagctggccgagatgggcttccccctggaggcctgcagaaaggccgtgtacttcaccggcaacatgggcgccgaggtggccttcaactggatcatcgtgcacatggaggagcccgacttcgccgagcccctgaccatgcccggctacggcggcgccgccagcgccggcgccagcgtgttcggcgccagcggcctggacaaccagccccccgaggagatcgtggccatcatcaccagcatgggcttccagagaaaccaggccatccaggccctgagagccaccaacaacaacctggagagagccctggactggatcttcagccaccccgagttcgaggaggacagcgacttcgtgatcgagatggagaacaacgccaacgccaacatcatcagcgaggccaagcccgagggccccagagtgaaggacggcagcggcacctacgagctgttcgccttcatcagccacatgggcaccagcaccatgagcggccactacatctgccacatcaagaaggagggcagatgggtgatctacaacgaccacaaggtgtgcgccagcgagagaccccccaaggacctgggctacatgtacttctacagaagaatccccagctag

SEQ ID NO: 104370 - DNA, 1485 bp, synthetic construct
  misc_feature 1..1485: note = Description of Artificial Sequence: Synthetic coding sequence
  source 1..1485: mol_type = other DNA
atgcccctgtacagcgtgaccgtgaagtggggcaaggagaagttcgagggcgtggagctgaacaccgacgagccccccatggtgttcaaggcccagctgttcgccctgaccggcgtgcagcccgccagacagaaggtgatggtgaagggcggcaccctgaaggacgacgactggggcaacatcaagatcaagaacggcatgaccctgctgatgatgggcagcgccgacgccctgcccgaggagcccagcgccaagaccgtgttcgtggaggacatgaccgaggagcagctggccagcgccatggagctgccctgcggcctgaccaacctgggcaacacctgctacatgaacgccaccgtgcagtgcatcagaagcgtgcccgagctgaaggacgccctgaagagatacgccggcgccctgagagccagcggcgagatggccagcgcccagtacatcaccgccgccctgagagacctgttcgacagcatggacaagaccagcagcagcatcccccccatcatcctgctgcagttcctgcacatggccttcccccagttcgccgagaagggcgagcagggccagtacctgcagcaggacgccaacgagtgctggatccagatgatgagagtgctgcagcagaagctggaggccatcgaggacgacagcgtgaaggagaccgacagcagcagcgccagcgccgccacccccagcaagaagaagagcctgatcgaccagttcttcggcgtggagttcgagaccaccatgaagtgcaccgagagcgaggaggaggaggtgaccaagggcaaggagaaccagctgcagctgagctgcttcatcaaccaggaggtgaagtacctgttcaccggcctgaagctgagactgcaggaggagatcaccaagcagagccccaccctgcagagaaacgccctgtacatcaagagcagcaagatcagcagactgcccgcctacctgaccatccagatggtgagattcttctacaaggagaaggagagcgtgaacgccaaggtgctgaaggacgtgaagttccccctgatgctggacatgtacgagctgtgcacccccgagctgcaggagaagatggtgagcttcagaagcaagttcaaggacctggaggacaagaaggtgaaccagcagcccaacaccagcgacaagaagagcagcccccagaaggaggtgaagtacgagcccttcagcttcgccgacgacatcggcagcaacaactgcggctactacgacctgcaggccgtgctgacccaccagggcagaagcagcagcagcggccactacgtgagctgggtgaagagaaagcaggacgagtggatcaagttcgacgacgacaaggtgagcatcgtgacccccgaggacatcctgagactgagcggcggcggcgactggcacatcgcctacgtgctgctgtacggccccagaagagtggagatcatggaggaggagagcgagcagtag

SEQ ID NO: 104371 - DNA, 1380 bp, synthetic construct
  misc_feature 1..1380: note = Description of Artificial Sequence: Synthetic coding sequence
  source 1..1380: mol_type = other DNA
atgcccctgtacagcgtgaccgtgaagtggggcaaggagaagttcgagggcgtggagctgaacaccgacgagccccccatggtgttcaaggcccagctgttcgccctgaccggcgtgcagcccgccagacagaaggtgatggtgaagggcggcaccctgaaggacgacgactggggcaacatcaagatcaagaacatggagctgccctgcggcctgaccaacctgggcaacacctgctacatgaacgccaccgtgcagtgcatcagaagcgtgcccgagctgaaggacgccctgaagagatacgccggcgccctgagagccagcggcgagatggccagcgcccagtacatcaccgccgccctgagagacctgttcgacagcatggacaagaccagcagcagcatcccccccatcatcctgctgcagttcctgcacatggccttcccccagttcgccgagaagggcgagcagggccagtacctgcagcaggacgccaacgagtgctggatccagatgatgagagtgctgcagcagaagctggaggccatcgaggacgacagcgtgaaggagaccgacagcagcagcgccagcgccgccacccccagcaagaagaagagcctgatcgaccagttcttcggcgtggagttcgagaccaccatgaagtgcaccgagagcgaggaggaggaggtgaccaagggcaaggagaaccagctgcagctgagctgcttcatcaaccaggaggtgaagtacctgttcaccggcctgaagctgagactgcaggaggagatcaccaagcagagccccaccctgcagagaaacgccctgtacatcaagagcagcaagatcagcagactgcccgcctacctgaccatccagatggtgagattcttctacaaggagaaggagagcgtgaacgccaaggtgctgaaggacgtgaagttccccctgatgctggacatgtacgagctgtgcacccccgagctgcaggagaagatggtgagcttcagaagcaagttcaaggacctggaggacaagaaggtgaaccagcagcccaacaccagcgacaagaagagcagcccccagaaggaggtgaagtacgagcccttcagcttcgccgacgacatcggcagcaacaactgcggctactacgacctgcaggccgtgctgacccaccagggcagaagcagcagcagcggccactacgtgagctgggtgaagagaaagcaggacgagtggatcaagttcgacgacgacaaggtgagcatcgtgacccccgaggacatcctgagactgagcggcggcggcgactggcacatcgcctacgtgctgctgtacggccccagaagagtggagatcatggaggaggagagcgagcagtag

SEQ ID NO: 104372 - DNA, 1452 bp, synthetic construct
  misc_feature 1..1452: note = Description of Artificial Sequence: Synthetic coding sequence
  source 1..1452: mol_type = other DNA
atgcccctgtacagcgtgaccgtgaagtggggcaaggagaagttcgagggcgtggagctgaacaccgacgagccccccatggtgttcaaggcccagctgttcgccctgaccggcgtgcagcccgccagacagaaggtgatggtgaagggcggcaccctgaagggcatgaccctgctgatgatgggcagcgccgacgccctgcccgaggagcccagcgccaagaccgtgttcgtggaggacatgaccgaggagcagctggccagcgccatggagctgccctgcggcctgaccaacctgggcaacacctgctacatgaacgccaccgtgcagtgcatcagaagcgtgcccgagctgaaggacgccctgaagagatacgccggcgccctgagagccagcggcgagatggccagcgcccagtacatcaccgccgccctgagagacctgttcgacagcatggacaagaccagcagcagcatcccccccatcatcctgctgcagttcctgcacatggccttcccccagttcgccgagaagggcgagcagggccagtacctgcagcaggacgccaacgagtgctggatccagatgatgagagtgctgcagcagaagctggaggccatcgaggacgacagcgtgaaggagaccgacagcagcagcgccagcgccgccacccccagcaagaagaagagcctgatcgaccagttcttcggcgtggagttcgagaccaccatgaagtgcaccgagagcgaggaggaggaggtgaccaagggcaaggagaaccagctgcagctgagctgcttcatcaaccaggaggtgaagtacctgttcaccggcctgaagctgagactgcaggaggagatcaccaagcagagccccaccctgcagagaaacgccctgtacatcaagagcagcaagatcagcagactgcccgcctacctgaccatccagatggtgagattcttctacaaggagaaggagagcgtgaacgccaaggtgctgaaggacgtgaagttccccctgatgctggacatgtacgagctgtgcacccccgagctgcaggagaagatggtgagcttcagaagcaagttcaaggacctggaggacaagaaggtgaaccagcagcccaacaccagcgacaagaagagcagcccccagaaggaggtgaagtacgagcccttcagcttcgccgacgacatcggcagcaacaactgcggctactacgacctgcaggccgtgctgacccaccagggcagaagcagcagcagcggccactacgtgagctgggtgaagagaaagcaggacgagtggatcaagttcgacgacgacaaggtgagcatcgtgacccccgaggacatcctgagactgagcggcggcggcgactggcacatcgcctacgtgctgctgtacggccccagaagagtggagatcatggaggaggagagcgagcagtag

SEQ ID NO: 104373 - DNA, 1380 bp, synthetic construct; identical to SEQ ID NO: 104371
  misc_feature 1..1380: note = Description of Artificial Sequence: Synthetic coding sequence
  source 1..1380: mol_type = other DNA

SEQ ID NO: 104374 - DNA, 2382 bp, synthetic construct
  misc_feature 1..2382: note = Description of Artificial Sequence: Synthetic coding sequence
  source 1..2382: mol_type = other DNA
atgcccgccggccccgtgcaggccgtgcccccccccccccccgtgcccaccgagcccaagcagcccaccgaggaggaggccagcagcaaggaggacagcgcccccagcaagcccgtggtgggcatcatctaccccccccccgaggtgagaaacatcgtggacaagaccgccagcttcgtggccagaaacggccccgagttcgaggccagaatcagacagaacgagatcaacaaccccaagttcaacttcctgaaccccaacgacccctaccacgcctactacagacacaaggtgagcgagttcaaggagggcaaggcccaggagcccagcgccgccatccccaaggtgatgcagcagcagcagcagaccacccagcagcagctgccccagaaggtgcaggcccaggtgatccaggagaccatcgtgcccaaggagcccccccccgagttcgagttcatcgccgacccccccagcatcagcgccttcgacctggacgtggtgaagctgaccgcccagttcgtggccagaaacggcagacagttcctgacccagctgatgcagaaggagcagagaaactaccagttcgacttcctgagaccccagcacagcctgttcaactacttcaccaagctggtggagcagtacaccaagatcctgatcccccccaagggcctgttcagcaagctgaagaaggaggccgagaaccccagagaggtgctggaccaggtgtgctacagagtggagtgggccaagttccaggagagagagagaaagaaggaggaggaggagaaggagaaggagagagtggcctacgcccagatcgactggcacgacttcgtggtggtggagaccgtggacttccagcccaacgagcagggcaacttccccccccccaccacccccgaggagctgggcgccagaatcctgatccaggagagatacgagaagttcggcgagagcgaggaggtggagatggaggtggagagcgacgaggaggacgacaagcaggagaaggccgaggagccccccagccagctggaccaggacacccaggtgcaggacatggacgagggcagcgacgacgaggaggagggccagaaggtgccccccccccccgagacccccatgcccccccccctgccccccacccccgaccaggtgatcgtgagaaaggactacgaccccaaggccagcaagcccctgccccccgcccccgcccccgacgagtacctggtgagccccatcaccggcgagaagatccccgccagcaagatgcaggagcacatgagaatcggcctgctggaccccagatggctggagcagagagacagaagcatcagagagaagcagagcgacgacgaggtgtacgcccccggcctggacatcgagagcagcctgaagcagctggccgagagaagaaccgacatcttcggcgtggaggagaccgccatcggcaagaagatcggcgaggaggagatccagaagcccgaggagaaggtgacctgggacggccacagcggcagcatggccagaacccagcaggccgcccaggccaacatcaccctgcaggagcagatcgaggccatccacaaggccaagggcctggtgcccgaggacgacaccaaggagaagatcggccccagcaagcccaacgagatcccccagcagccccccccccccagcagcgccaccaacatccccagcagcgccccccccatcaccagcgtgcccagaccccccaccatgcccccccccgtgagaaccaccgtggtgagcgccgtgcccgtgatgcccagaccccccatggccagcgtggtgagactgccccccggcagcgtgatcgcccccatgccccccatcatccacgcccccagaatcaacgtggtgcccatgccccccagcgccccccccatcatggcccccagacccccccccatgatcgtgcccaccgccttcgtgcccgccccccccgtggcccccgtgcccgcccccgcccccatgccccccgtgcacccccccccccccatggaggacgagcccaccagcaagaagctgaagaccgaggacagcctgatgcccgaggaggagttcctgagaagaaacaagggccccgtgagcatcaaggtgcaggtgcccaacatgcaggacaagaccgagtggaagctgaacggccaggtgctggtgttcaccctgcccctgaccgaccaggtgagcgtgatcaaggtgaagatccacgaggccaccggcatgcccgccggcaagcagaagctgcagtacgagggcatcttcatcaaggacagcaacagcctggcctactacaacatggccaacggcgccgtgatccacctggccctgaaggagagaggcggcagaaagaagtag

SEQ ID NO: 104375 - DNA, 732 bp, synthetic construct
  misc_feature 1..732: note = Description of Artificial Sequence: Synthetic coding sequence
  source 1..732: mol_type = other DNA
accatcagagtgaaggacagcctgatctgcgtggactgcgccatggagagcagcagaaacagcagcatgctgaccctgcccctgagcctgttcgacgtggacagcaagcccctgaagaccctggaggacgccctgcactgcttcttccagcccagagagctgagcagcaagagcaagtgcttctgcgagaactgcggcaagaagaccagaggcaagcaggtgctgaagctgacccacctgccccagaccctgaccatccacctgatgagattcagcatcagaaacagccagaccagaaagatctgccacagcctgtacttcccccagagcctggacttcagccagatcctgcccatgaagagagagagctgcgacgccgaggagcagagcggcggccagtacgagctgttcgccgtgatcgcccacgtgggcatggccgacagcggccactactgcgtgtacatcagaaacgccgtggacggcaagtggttctgcttcaacgacagcaacatctgcctggtgagctgggaggacatccagtgcacctacggcaaccccaactaccactggccccccttcctgtgccacgcctgcatcctgatcgaggacggcgagtacctgagactgttcagacccgccaacatcagacagttcaccagcagagaggagacctgggtggagtgctggtgcgtgctgaccctgcagtgcaagcagctgcagcaggtgtggtag

SEQ ID NO: 104376 - DNA, 1698 bp, synthetic construct
  misc_feature 1..1698: note = Description of Artificial Sequence: Synthetic coding sequence
  source 1..1698: mol_type = other DNA
atgccccaggccagcgagcacagactgggcagaaccagagagccccccgtgaacatccagcccagagtgggcagcaagctgcccttcgcccccagagccagaagcaaggagagaagaaaccccgccagcggccccaaccccatgctgagacccctgccccccagacccggcctgcccgacgagagactgaagaagctggagctgggcagaggcagaaccagcggccccagacccagaggccccctgagagccgaccacggcgtgcccctgcccggcagccccccccccaccgtggccctgcccctgcccagcagaaccaacctggccagaagcaagagcgtgagcagcggcgacctgagacccatgggcatcgccctgggcggccacagaggcaccggcgagctgggcgccgccctgagcagactggccctgagacccgagccccccaccctgagaagaagcaccagcctgagaagactgggcggcttccccggcccccccaccctgttcagcatcagaaccgagccccccgccagccacggcagcttccacatgatcagcgccagaagcagcgagcccttctacagcgacgacaagatggcccaccacaccctgctgctgggcagcggccacgtgggcctgagaaacctgggcaacacctgcttcctgaacgccgtgctgcagtgcctgagcagcaccagacccctgagagacttctgcctgagaagagacttcagacaggaggtgcccggcggcggcagagcccaggagctgaccgaggccttcgccgacgtgatcggcgccctgtggcaccccgacagctgcgaggccgtgaaccccaccagattcagagccgtgttccagaagtacgtgcccagcttcagcggctacagccagcaggacgcccaggagttcctgaagctgctgatggagagactgcacctggagatcaacagaagaggcagaagagccccccccatcctggccaacggccccgtgcccagcccccccagaagaggcggcgccctgctggaggagcccgagctgagcgacgacgacagagccaacctgatgtggaagagatacctggagagagaggacagcaagatcgtggacctgttcgtgggccagctgaagagctgcctgaagtgccaggcctgcggctacagaagcaccaccttcgaggtgttctgcgacctgagcctgcccatccccaagaagggcttcgccggcggcaaggtgagcctgagagactgcttcaacctgttcaccaaggaggaggagctggagagcgagaacgcccccgtgtgcgacagatgcagacagaagaccagaagcaccaagaagctgaccgtgcagagattccccagaatcctggtgctgcacctgaacagattcagcgccagcagaggcagcatcaagaagagcagcgtgggcgtggacttccccctgcagagactgagcctgggcgacttcgccagcgacaaggccggcagccccgtgtaccagctgtacgccctgtgcaaccacagcggcagcgtgcactacggccactacaccgccctgtgcagatgccagaccggctggcacgtgtacaacgacagcagagtgagccccgtgagcgagaaccaggtggccagcagcgagggctacgtgctgttctaccagctgatgcaggagccccccagatgcctgtag

SEQ ID NO: 104377 - DNA, 1656 bp, synthetic construct
  misc_feature 1..1656: note = Description of Artificial Sequence: Synthetic coding sequence
  source 1..1656: mol_type = other DNA
atgccccaggccagcgagcacagactgggcagaaccagagagccccccgtgaacatccagcccagagtgggcagcaagctgcccttcgcccccagagccagaagcaaggagagaagaaaccccgccagcggccccaaccccatgctgagacccctgccccccagacccggcctgcccgacgagagactgaagaagctggagctgggcagaggcagaaccagcggccccagacccagaggccccctgagagccgaccacggcgtgcccctgcccggcagccccccccccaccgtggccctgcccctgcccagcagaaccaacctggccagaagcaagagcgtgagcagcggcgacctgagacccatgggcatcgccctgggcggccacagaggcaccggcgagctgggcgccgccctgagcagactggccctgagacccgagccccccaccctgagaagaagcaccagcctgagaagactgggcggcttccccggcccccccaccctgttcagcatcagaaccgagccccccgccagccacggcagcttccacatgatcagcgccagaagcagcgagcccttctacagcgacgacaagatggcccaccacaccctgctgctgggcagcggccacgtgggcctgagaaacctgggcaacacctgcttcctgaacgccgtgctgcagtgcctgagcagcaccagacccctgagagacttctgcctgagaagagacttcagacaggaggtgcccggcggcggcagagcccaggagctgaccgaggccttcgccgacgtgatcggcgccctgtggcaccccgacagctgcgaggccgtgaaccccaccagattcagagccgtgttccagaagtacgtgcccagcttcagcggctacagccagcaggacgcccaggagttcctgaagctgctgatggagagactgcacctggagatcaacagaagaggcagaagagccccccccatcctggccaacggccccgtgcccagcccccccagaagaggcggcgccctgctggaggagcccgagctgagcgacgacgacagagccaacctgatgtggaagagatacctggagagagaggacagcaagatcgtggacctgttcgtgggccagctgaagagctgcctgaagtgccaggcctgcggctacagaagcaccaccttcgaggtgttctgcgacctgagcctgcccatccccaagaagggcttcgccggcggcaaggtgagcctgagagactgcttcaacctgttcaccaaggaggaggagctggagagcgagaacgcccccgtgtgcgacagatgcagacagaagaccagaagcaccaagaagctgaccgtgcagagattccccagaatcctggtgctgcacctgaacagattcagcgccagcagaggcagcatcaagaagagcagcgtgggcgtggacttccccctgcagagactgagcctgggcgacttcgccagcgacaaggccggcagcgtgcactacggccactacaccgccctgtgcagatgccagaccggctggcacgtgtacaacgacagcagagtgagccccgtgagcgagaaccaggtggccagcagcgagggctacgtgctgttctaccagctgatgcaggagccccccagatgcctgtag

SEQ ID NO: 104378 - DNA, 1698 bp, synthetic construct; identical to SEQ ID NO: 104376
  misc_feature 1..1698: note = Description of Artificial Sequence: Synthetic coding sequence
  source 1..1698: mol_type = other DNA

SEQ ID NO: 104379 - DNA, 1578 bp, synthetic construct
  misc_feature 1..1578: note = Description of Artificial Sequence: Synthetic coding sequence
  source 1..1578: mol_type = other DNA
atggtgagcagacccgagcccgagggcgaggccatggacgccgagctggccgtggccccccccggctgcagccacctgggcagcttcaaggtggacaactggaagcagaacctgagagccatctaccagtgcttcgtgtggagcggcaccgccgaggccagaaagagaaaggccaagagctgcatctgccacgtgtgcggcgtgcacctgaacagactgcacagctgcctgtactgcgtgttcttcggctgcttcaccaagaagcacatccacgagcacgccaaggccaagagacacaacctggccatcgacctgatgtacggcggcatctactgcttcctgtgccaggactacatctacgacaaggacatggagatcatcgccaaggaggagcagagaaaggcctggaagatgcagggcgtgggcgagaagttcagcacctgggagcccaccaagagagagctggagctgctgaagcacaaccccaagagaagaaagatcaccagcaactgcaccatcggcctgagaggcctgatcaacctgggcaacacctgcttcatgaactgcatcgtgcaggccctgacccacacccccctgctgagagacttcttcctgagcgacagacacagatgcgagatgcagagccccagcagctgcctggtgtgcgagatgagcagcctgttccaggagttctacagcggccacagaagcccccacatcccctacaagctgctgcacctggtgtggacccacgccagacacctggccggctacgagcagcaggacgcccacgagttcctgatcgccgccctggacgtgctgcacagacactgcaagggcgacgacaacggcaagaaggccaacaaccccaaccactgcaactgcatcatcgaccagatcttcaccggcggcctgcagagcgacgtgacctgccaggtgtgccacggcgtgagcaccaccatcgaccccttctgggacatcagcctggacctgcccggcagcagcacccccttctggcccctgagccccggcagcgagggcaacgtggtgaacggcgagagccacgtgagcggcaccaccaccctgaccgactgcctgagaagattcaccagacccgagcacctgggcagcagcgccaagatcaagtgcagcggctgccacagctaccaggagagcaccaagcagctgaccatgaagaagctgcccatcgtggcctgcttccacctgaagagattcgagcacagcgccaagctgagaagaaagatcaccacctacgtgagcttccccctggagctggacatgacccccttcatggccagcagcaaggagagcagaatgaacggccagtaccagcagcccaccgacagcctgaacaacgacaacaagtacagcctgttcgccgtggtgaaccaccagggcaccctggagagcggccactacaccagcttcatcagacagcacaaggaccagtggttcaagtgcgacgacgccatcatcaccaaggccagcatcaaggacgtgctggacagcgagggctacctgctgttctaccacaagcagttcctggagtacgagtag

SEQ ID NO: 104380 - DNA, 1782 bp, synthetic construct
  misc_feature 1..1782: note = Description of Artificial Sequence: Synthetic coding sequence
  source 1..1782: mol_type = other DNA
gccgccgccgccagaggcagatgcctgccctgcagcctgcccagcgccatcgcccagccccacctgtgccccgccagcgccctgtgcagcagaagacccggcctgggccagcccggccagccccccagcagcccccacgccgccctggccagcagcagcccccccagcccccccccccccgccagaggcagagccctgccccccatggtgagcagacccgagcccgagggcgaggccatggacgccgagctggccgtggccccccccggctgcagccacctgggcagcttcaaggtggacaactggaagcagaacctgagagccatctaccagtgcttcgtgtggagcggcaccgccgaggccagaaagagaaaggccaagagctgcatctgccacgtgtgcggcgtgcacctgaacagactgcacagctgcctgtactgcgtgttcttcggctgcttcaccaagaagcacatccacgagcacgccaaggccaagagacacaacctggccatcgacctgatgtacggcggcatctactgcttcctgtgccaggactacatctacgacaaggacatggagatcatcgccaaggaggagcagagaaaggcctggaagatgcagggcgtgggcgagaagttcagcacctgggagcccaccaagagagagctggagctgctgaagcacaaccccaagagaagaaagatcaccagcaactgcaccatcggcctgagaggcctgatcaacctgggcaacacctgcttcatgaactgcatcgtgcaggccctgacccacacccccctgctgagagacttcttcctgagcgacagacacagatgcgagatgcagagccccagcagctgcctggtgtgcgagatgagcagcctgttccaggagttctacagcggccacagaagcccccacatcccctacaagctgctgcacctggtgtggacccacgccagacacctggccggctacgagcagcaggacgcccacgagttcctgatcgccgccctggacgtgctgcacagacactgcaagggcgacgacaacggcaagaaggccaacaaccccaaccactgcaactgcatcatcgaccagatcttcaccggcggcctgcagagcgacgtgacctgccaggtgtgccacggcgtgagcaccaccatcgaccccttctgggacatcagcctggacctgcccggcagcagcacccccttctggcccctgagccccggcagcgagggcaacgtggtgaacggcgagagccacgtgagcggcaccaccaccctgaccgactgcctgagaagattcaccagacccgagcacctgggcagcagcgccaagatcaagtgcagcggctgccacagctaccaggagagcaccaagcagctgaccatgaagaagctgcccatcgtggcctgcttccacctgaagagattcgagcacagcgccaagctgagaagaaagatcaccacctacgtgagcttccccctggagctggacatgacccccttcatggccagcagcaaggagagcagaatgaacggccagtaccagcagcccaccgacagcctgaacaacgacaacaagtacagcctgttcgccgtggtgaaccaccagggcaccctggagagcggccactacaccagcttcatcagacagcacaaggaccagtggttcaagtgcgacgacgccatcatcaccaaggccagcatcaaggacgtgctggacagcgagggctacctgctgttctaccacaagcagttcctggagtacgagtag

SEQ ID NO: 104381 - DNA, 1542 bp, synthetic construct
  misc_feature 1..1542: note = Description of Artificial Sequence: Synthetic coding sequence
  source 1..1542: mol_type = other DNA
atggcccccggctggcccagcctgagcgccggcagcagacaggaggccccccagctggccgccggcggcagcgcctaccaggccgtgggcagacagttccagcccagagccaccgccctgcagggccccagccaggccaagagctgcatctgccacgtgtgcggcgtgcacctgaacagactgcacagctgcctgtactgcgtgttcttcggctgcttcaccaagaagcacatccacgagcacgccaaggccaagagacacaacctggccatcgacctgatgtacggcggcatctactgcttcctgtgccaggactacatctacgacaaggacatggagatcatcgccaaggaggagcagagaaaggcctggaagatgcagggcgtgggcgagaagttcagcacctgggagcccaccaagagagagctggagctgctgaagcacaaccccaagagaagaaagatcaccagcaactgcaccatcggcctgagaggcctgatcaacctgggcaacacctgcttcatgaactgcatcgtgcaggccctgacccacacccccctgctgagagacttcttcctgagcgacagacacagatgcgagatgcagagccccagcagctgcctggtgtgcgagatgagcagcctgttccaggagttctacagcggccacagaagcccccacatcccctacaagctgctgcacctggtgtggacccacgccagacacctggccggctacgagcagcaggacgcccacgagttcctgatcgccgccctggacgtgctgcacagacactgcaagggcgacgacaacggcaagaaggccaacaaccccaaccactgcaactgcatcatcgaccagatcttcaccggcggcctgcagagcgacgtgacctgccaggtgtgccacggcgtgagcaccaccatcgaccccttctgggacatcagcctggacctgcccggcagcagcacccccttctggcccctgagccccggcagcgagggcaacgtggtgaacggcgagagccacgtgagcggcaccaccaccctgaccgactgcctgagaagattcaccagacccgagcacctgggcagcagcgccaagatcaagtgcagcggctgccacagctaccaggagagcaccaagcagctgaccatgaagaagctgcccatcgtggcctgcttccacctgaagagattcgagcacagcgccaagctgagaagaaagatcaccacctacgtgagcttccccctggagctggacatgacccccttcatggccagcagcaaggagagcagaatgaacggccagtaccagcagcccaccgacagcctgaacaacgacaacaagtacagcctgttcgccgtggtgaaccaccagggcaccctggagagcggccactacaccagcttcatcagacagcacaaggaccagtggttcaagtgcgacgacgccatcatcaccaaggccagcatcaaggacgtgctggacagcgagggctacctgctgttctaccacaagcagttcctggagtacgagtag

SEQ ID NO: 104382 - DNA, 7863 bp, synthetic construct
  misc_feature 1..7863: note = Description of Artificial Sequence: Synthetic coding sequence
  source 1..7863: mol_type = other DNA
atggagagcgaggaggagcagcacatgaccaccctgctgtgcatgggcttcagcgaccccgccaccatcagaaaggccctgagactggccaagaacgacatcaacgaggccgtggccctgctgaccaacgagagacccggcctggactacggcggctacgagcccatggacagcggcggcggccccagccccggccccggcggcggccccagaggcgacggcggcggcgacggcggcggcggcggccccagcagaggcggcagcaccggcggcggcggcggcttcgaccccccccccgcctaccacgaggtggtggacgccgagaagaacgacgagaacggcaactgcagcggcgagggcatcgagttccccaccaccaacctgtacgagctggagagcagagtgctgaccgaccactggagcatcccctacaagagagaggagagcctgggcaagtgcctgctggccagcacctacctggccagactgggcctgagcgagagcgacgagaactgcagaagattcatggacagatgcatgcccgaggccttcaagaagctgctgaccagcagcgccgtgcacaagtggggcaccgagatccacgagggcatctacaacatgctgatgctgctgatcgagctggtggccgagagaatcaagcaggaccccatccccaccggcctgctgggcgtgctgaccatggccttcaaccccgacaacgagtaccacttcaagaacagaatgaaggtgagccagagaaactgggccgaggtgttcggcgagggcaacatgttcgccgtgagccccgtgagcaccttccagaaggagccccacggctgggtggtggacctggtgaacaagttcggcgagctgggcggcttcgccgccatccaggccaagctgcacagcgaggacatcgagctgggcgccgtgagcgccctgatccagcccctgggcgtgtgcgccgagtacctgaacagcagcgtggtgcagcccatgctggaccccgtgatcctgaccaccatccaggacgtgagaagcgtggaggagaaggacctgaaggacaagagactggtgagcatccccgagctgctgagcgccgtgaagctgctgtgcatgagattccagcccgacctggtgaccatcgtggacgacctgagactggacatcctgctgagaatgctgaagagcccccacttcagcgccaagatgaacagcctgaaggaggtgaccaagctgatcgaggacagcaccctgagcaagagcgtgaagaacgccatcgacaccgacagactgctggactggctggtggagaacagcgtgctgagcatcgccctggagggcaacatcgaccaggcccagtactgcgacagaatcaagggcatcatcgagctgctgggcagcaagctgagcctggacgagctgaccaagatctggaagatccagagcggccagagcagcaccgtgatcgagaacatccacaccatcatcgccgccgccgccgtgaagttcaacagcgaccagctgaaccacctgttcgtgctgatccagaagagctgggagaccgagagcgacagagtgagacagaagctgctgagcctgatcggcagaatcggcagagaggccagattcgagaccaccagcggcaaggtgctggacgtgctgtgggagctggcccacctgcccaccctgcccagcagcctgatccagcaggccctggaggagcacctgaccatcctgagcgacgcctacgccgtgaaggaggccatcaagagaagctacatcatcaagtgcatcgaggacatcaagagacccggcgagtggagcggcctggagaagaacaagaaggacggcttcaagagcagccagctgaacaacccccagttcgtgtgggtggtgcccgccctgagacagctgcacgagatcaccagaagcttcatcaagcagacctaccagaagcaggacaagagcatcatccaggacctgaagaagaacttcgagatcgtgaagctggtgaccggcagcctgatcgcctgccacagactggccgccgccgtggccggccccggcggcctgagcggcagcaccctggtggacggcagatacacctacagagagtacctggaggcccacctgaagttcctggccttcttcctgcaggaggccaccctgtacctgggctggaacagagccaaggagatctgggagtgcctggtgaccggccaggacgtgtgcgagctggacagagagatgtgcttcgagtggttcaccaagggccagcacgacctggagagcgacgtgcagcagcagctgttcaaggagaagatcctgaagctggagagctacgagatcaccatgaacggcttcaacctgttcaagaccttcttcgagaacgtgaacctgtgcgaccacagactgaagagacagggcgcccagctgtacgtggagaagctggagctgatcggcatggacttcatctggaagatcgccatggagagccccgacgaggagatcgccaacgaggccatccagctgatcatcaactacagctacatcaacctgaaccccagactgaagaaggacagcgtgagcctgcacaagaagttcatcgccgactgctacaccagactggaggccgccagcagcgccctgggcggccccaccctgacccacgccgtgaccagagccaccaagatgctgaccgccaccgccatgcccaccgtggccaccagcgtgcagagcccctacagaagcaccaagctggtgatcatcgagagactgctgctgctggccgagagatacgtgatcaccatcgaggacttctacagcgtgcccagaaccatcctgccccacggcgccagcttccacggccacctgctgaccctgaacgtgacctacgagagcaccaaggacaccttcaccgtggaggcccacagcaacgagaccatcggcagcgtgagatggaagatcgccaagcagctgtgcagccccgtggacaacatccagatcttcaccaacgacagcctgctgaccgtgaacaaggaccagaagctgctgcaccagctgggcttcagcgacgagcagatcctgaccgtgaagaccagcggcagcggcacccccagcggcagcagcgccgacagcagcaccagcagcagcagcagcagcagcggcgtgttcagcagcagctacgccatggagcaggagaagagcctgcccggcgtggtgatggccctggtgtgcaacgtgttcgacatgctgtaccagctggccaacctggaggagcccagaatcaccctgagagtgagaaagctgctgctgctgatccccaccgaccccgccatccaggaggccctggaccagctggacagcctgggcagaaagaagaccctgctgagcgagagcagcagccagagcagcaagagccccagcctgagcagcaagcagcagcaccagcccagcgccagcagcatcctggagagcctgttcagaagcttcgcccccggcatgagcaccttcagagtgctgtacaacctggaggtgctgagcagcaagctgatgcccaccgccgacgacgacatggccagaagctgcgccaagagcttctgcgagaacttcctgaaggccggcggcctgagcctggtggtgaacgtgatgcagagagacagcatccccagcgaggtggactacgagaccagacagggcgtgtacagcatctgcctgcagctggccagattcctgctggtgggccagaccatgcccaccctgctggacgaggacctgaccaaggacggcatcgaggccctgagcagcagacccttcagaaacgtgagcagacagaccagcagacagatgagcctgtgcggcacccccgagaagagcagctacagacagctgagcgtgagcgacagaagcagcatcagagtggaggagatcatccccgccgccagagtggccatccagaccatggaggtgagcgacttcaccagcaccgtggcctgcttcatgagactgagctgggccgccgccgccggcagactggacctggtgggcagcagccagcccatcaaggagagcaacagcctgtgccccgccggcatcagaaacagactgagcagcagcggcagcaactgcagcagcggcagcgagggcgagcccgtggccctgcacgccggcatctgcgtgagacagcagagcgtgagcaccaaggacagcctgatcgccggcgaggccctgagcctgctggtgacctgcctgcagctgagaagccagcagctggccagcttctacaacctgccctgcgtggccgacttcatcatcgacatcctgctgggcagccccagcgccgagatcagaagagtggcctgcgaccagctgtacaccctgagccagaccgacaccagcgcccaccccgacgtgcagaagcccaaccagttcctgctgggcgtgatcctgaccgcccagctgcccctgtggagccccaccagcatcatgagaggcgtgaaccagagactgctgagccagtgcatggagtacttcgacctgagatgccagctgctggacgacctgaccaccagcgagatggagcagctgagaatcagccccgccaccatgctggaggacgagatcacctggctggacaacttcgagcccaacagaaccgccgagtgcgagaccagcgaggccgacaacatcctgctggccggccacctgagactgatcaagaccctgctgagcctgtgcggcgccgagaaggagatgctgggcagcagcctgatcaagcccctgctggacgacttcctgttcagagccagcagaatcatcctgaacagccacagccccgccggcagcgccgccatcagccagcaggacttccaccccaagtgcagcaccgccaacagcagactggccgcctacgaggtgctggtgatgctggccgacagcagccccagcaacctgcagatcatcatcaaggagctgctgagcatgcaccaccagcccgaccccgccctgaccaaggagttcgactacctgccccccgtggacagcagaagcagcagcggcttcgtgggcctgagaaacggcggcgccacctgctacatgaacgccgtgttccagcagctgtacatgcagcccggcctgcccgagagcctgctgagcgtggacgacgacaccgacaaccccgacgacagcgtgttctaccaggtgcagagcctgttcggccacctgatggagagcaagctgcagtactacgtgcccgagaacttctggaagatcttcaagatgtggaacaaggagctgtacgtgagagagcagcaggacgcctacgagttcttcaccagcctgatcgaccagatggacgagtacctgaagaagatgggcagagaccagatcttcaagaacaccttccagggcatctacagcgaccagaagatctgcaaggactgcccccacagatacgagagagaggaggccttcatggccctgaacctgggcgtgaccagctgccagagcctggagatcagcctggaccagttcgtgagaggcgaggtgctggagggcagcaacgcctactactgcgagaagtgcaaggagaagagaatcaccgtgaagagaacctgcatcaagagcctgcccagcgtgctggtgatccacctgatgagattcggcttcgactgggagagcggcagaagcatcaagtacgacgagcagatcagattcccctggatgctgaacatggagccctacaccgtgagcggcatggccagacaggacagcagcagcgaggtgggcgagaacggcagaagcgtggaccagggcggcggcggcagccccagaaagaaggtggccctgaccgagaactacgagctggtgggcgtgatcgtgcacagcggccaggcccacgccggccactactacagcttcatcaaggacagaagaggctgcggcaagggcaagtggtacaagttcaacgacaccgtgatcgaggagttcgacctgaacgacgagaccctggagtacgagtgcttcggcggcgagtacagacccaaggtgtacgaccagaccaacccctacaccgacgtgagaagaagatactggaacgcctacatgctgttctaccagagagtgagcgaccagaacagccccgtgctgcccaagaagagcagagtgagcgtggtgagacaggaggccgaggacctgagcctgagcgcccccagcagccccgagatcagcccccagagcagccccagaccccacagacccaacaacgacagactgagcatcctgaccaagctggtgaagaagggcgagaagaagggcctgttcgtggagaagatgcccgccagaatctaccagatggtgagagacgagaacctgaagttcatgaagaacagagacgtgtacagcagcgactacttcagcttcgtgctgagcctggccagcctgaacgccaccaagctgaagcacccctactacccctgcatggccaaggtgagcctgcagctggccatccagttcctgttccagacctacctgagaaccaagaagaagctgagagtggacaccgaggagtggatcgccaccatcgaggccctgctgagcaagagcttcgacgcctgccagtggctggtggagtacttcatcagcagcgagggcagagagctgatcaagatcttcctgctggagtgcaacgtgagagaggtgagagtggccgtggccaccatcctggagaagaccctggacagcgccctgttctaccaggacaagctgaagagcctgcaccagctgctggaggtgctgctggccctgctggacaaggacgtgcccgagaactgcaagaactgcgcccagtacttcttcctgttcaacaccttcgtgcagaagcagggcatcagagccggcgacctgctgctgagacacagcgccctgagacacatgatcagcttcctgctgggcgccagcagacagaacaaccagatcagaagatggagcagcgcccaggccagagagttcggcaacctgcacaacaccgtggccctgctggtgctgcacagcgacgtgagcagccagagaaacgtggcccccggcatcttcaagcagagaccccccatcagcatcgcccccagcagccccctgctgcccctgcacgaggaggtggaggccctgctgttcatgagcgagggcaagccctacctgctggaggtgatgttcgccctgagagagctgaccggcagcctgctggccctgatcgagatggtggtgtactgctgcttctgcaacgagcacttcagcttcaccatgctgcacttcatcaagaaccagctggagaccgcccccccccacgagctgaagaacaccttccagctgctgcacgagatcctggtgatcgaggaccccatccaggtggagagagtgaagttcgtgttcgagaccgagaacggcctgctggccctgatgcaccacagcaaccacgtggacagcagcagatgctaccagtgcgtgaagttcctggtgaccctggcccagaagtgccccgccgccaaggagtacttcaaggagaacagccaccactggagctgggccgtgcagtggctgcagaagaagatgagcgagcactactggaccccccagagcaacgtgagcaacgagaccagcaccggcaagaccttccagagaaccatcagcgcccaggacaccctggcctacgccaccgccctgctgaacgagaaggagcagagcggcagcagcaacggcagcgagagcagccccgccaacgagaacggcgacagacacctgcagcagggcagcgagagccccatgatgatcggcgagctgagaagcgacctggacgacgtggacccctag

SEQ ID NO: 104383 - DNA, 7383 bp, synthetic construct
  misc_feature 1..7383: note = Description of Artificial Sequence: Synthetic coding sequence
  source 1..7383: mol_type = other DNA
atgaccaccctgctgtgcatgggcttcagcgaccccgccaccatcagaaaggccctgagactggccaagaacgacatcaacgaggccgtggccctgctgaccaacgagagacccggcctggactacggcggctacgagcccatggacagcggcggcctgagcgagagcgacgagaactgcagaagattcatggacagatgcatgcccgaggccttcaagaagctgctgaccagcagcgccgtgcacaagtggggcaccgagatccacgagggcatctacaacatgctgatgctgctgatcgagctggtggccgagagaatcaagcaggaccccatccccaccggcctgctgggcgtgctgaccatggccttcaaccccgacaacgagtaccacttcaagaacagaatgaaggtgagccagagaaactgggccgaggtgttcggcgagggcaacatgttcgccgtgagccccgtgagcaccttccagaaggagccccacggctgggtggtggacctggtgaacaagttcggcgagctgggcggcttcgccgccatccaggccaagctgcacagcgaggacatcgagctgggcgccgtgagcgccctgatccagcccctgggcgtgtgcgccgagtacctgaacagcagcgtggtgcagcccatgctggaccccgtgatcctgaccaccatccaggacgtgagaagcgtggaggagaaggacctgaaggacaagagactggtgagcatccccgagctgctgagcgccgtgaagctgctgtgcatgagattccagcccgacctggtgaccatcgtggacgacctgagactggacatcctgctgagaatgctgaagagcccccacttcagcgccaagatgaacagcctgaaggaggtgaccaagctgatcgaggacagcaccctgagcaagagcgtgaagaacgccatcgacaccgacagactgctggactggctggtggagaacagcgtgctgagcatcgccctggagggcaacatcgaccaggcccagtactgcgacagaatcaagggcatcatcgagctgctgggcagcaagctgagcctggacgagctgaccaagatctggaagatccagagcggccagagcagcaccgtgatcgagaacatccacaccatcatcgccgccgccgccgtgaagttcaacagcgaccagctgaaccacctgttcgtgctgatccagaaggtgctggacgtgctgtgggagctggcccacctgcccaccctgcccagcagcctgatccagcaggccctggaggagcacctgaccatcctgagcgacgcctacgccgtgaaggaggccatcaagagaagctacatcatcaagtgcatcgaggacatcaagagaagcagccagctgaacaacccccagttcgtgtgggtggtgcccgccctgagacagctgcacgagatcaccagaagcttcatcaagcagacctaccagaagcaggacaagagcatcatccaggacctgaagaagaacttcgagatcgtgaagctggtgaccggcagcctgatcgcctgccacagactggccgccgccgtggccggccccggcggcctgagcggcagcaccctggtggacggcagatacacctacagagagtacctggaggcccacctgaagttcctggccttcttcctgcaggaggccaccctgtacctgggctggaacagagccaaggagatctgggagtgcctggtgaccggccaggacgtgtgcgagctggacagagagatgtgcttcgagtggttcaccaagggccagcacgacctggagagcgacgtgcagcagcagctgttcaaggagaagatcctgaagctggagagctacgagatcaccatgaacggcttcaacctgttcaagaccttcttcgagaacgtgaacctgtgcgaccacagactgaagagacagggcgcccagctgtacgtggagaagctggagctgatcggcatggacttcatctggaagatcgccatggagagccccgacgaggagatcgccaacgaggccatccagctgatcatcaactacagctacatcaacctgaaccccagactgaagaaggacagcgtgagcctgcacaagaagttcatcgccgactgctacaccagactggaggccgccagcagcgccctgggcggccccaccctgacccacgccgtgaccagagccaccaagatgctgaccgccaccgccatgcccaccgtggccaccagcgtgcagagcccctacagaagcaccaagctggtgatcatcgagagactgctgctgctggccgagagatacgtgatcaccatcgaggacttctacagcgtgcccagaaccatcctgccccacggcgccagcttccacggccacctgctgaccctgaacgtgacctacgagagcaccaaggacaccttcaccgtggaggcccacagcaacgagaccatcggcagcgtgagatggaagatcgccaagcagctgtgcagccccgtggacaacatccagatcttcaccaacgacagcctgctgaccgtgaacaaggaccagaagctgctgcaccagctgggcttcagcgacgagcagatcctgaccgtgaagaccagcggcagcggcacccccagcggcagcagcgccgacagcagcaccagcagcagcagcagcagcagcggcgtgttcagcagcagctacgccatggagcaggagaagagcctgcccggcgtggtgatggccctggtgtgcaacgtgttcgacatgctgtaccagctggccaacctggaggagcccagaatcaccctgagagtgagaaagctgctgctgctgatccccaccgaccccgccatccaggaggccctggaccagctggacagcctgggcagaaagaagaccctgctgagcgagagcagcagccagagcagcaagagccccagcctgagcagcaagcagcagcaccagcccagcgccagcagcatcctggagagcctgttcagaagcttcgcccccggcatgagcaccttcagagtgctgtacaacctggaggtgctgagcagcaagctgatgcccaccgccgacgacgacatggccagaagctgcgccaagagcttctgcgagaacttcctgaaggccggcggcctgagcctggtggtgaacgtgatgcagagagacagcatccccagcgaggtggactacgagaccagacagggcgtgtacagcatctgcctgcagctggccagattcctgctggtgggccagaccatgcccaccctgctggacgaggacctgaccaaggacggcatcgaggccctgagcagcagacccttcagaaacgtgagcagacagaccagcagacagatgagcctgtgcggcacccccgagaagagcagctacagacagctgagcgtgagcgacagaagcagcatcagagtggaggagatcatccccgccgccagagtggccatccagaccatggaggtgagcgacttcaccagcaccgtggcctgcttcatgagactgagctgggccgccgccgccggcagactggacctggtgggcagcagccagcccatcaaggagagcaacagcctgtgccccgccggcatcagaaacagactgagcagcagcggcagcaactgcagcagcggcagcgagggcgagcccgtggccctgcacgccggcatctgcgtgagacagcagagcgtgagcaccaaggacagcctgatcgccggcgaggccctgagcctgctggtgacctgcctgcagctgagaagccagcagctggccagcttctacaacctgccctgcgtggccgacttcatcatcgacatcctgctgggcagccccagcgccgagatcagaagagtggcctgcgaccagctgtacaccctgagccagaccgacaccagcgcccaccccgacgtgcagaagcccaaccagttcctgctgggcgtgatcctgaccgcccagctgcccctgtggagccccaccagcatcatgagaggcgtgaaccagagactgctgagccagtgcatggagtacttcgacctgagatgccagctgctggacgacctgaccaccagcgagatggagcagctgagaatcagccccgccaccatgctggaggacgagatcacctggctggacaacttcgagcccaacagaaccgccgagtgcgagaccagcgaggccgacaacatcctgctggccggccacctgagactgatcaagaccctgctgagcctgtgcggcgccgagaaggagatgctgggcagcagcctgatcaagcccctgctggacgacttcctgttcagagccagcagaatcatcctgaacagccacagccccgccggcagcgccgccatcagccagcaggacttccaccccaagtgcagcaccgccaacagcagactggccgcctacgaggtgctggtgatgctggccgacagcagccccagcaacctgcagatcatcatcaaggagctgctgagcatgcaccaccagcccgaccccgccctgaccaaggagttcgactacctgccccccgtggacagcagaagcagcagcggcttcgtgggcctgagaaacggcggcgccacctgctacatgaacgccgtgttccagcagctgtacatgcagcccggcctgcccgagagcctgctgagcgtggacgacgacaccgacaaccccgacgacagcgtgttctaccaggtgcagagcctgttcggccacctgatggagagcaagctgcagtactacgtgcccgagaacttctggaagatcttcaagatgtggaacaaggagctgtacgtgagagagcagcaggacgcctacgagttcttcaccagcctgatcgaccagatggacgagtacctgaagaagatgggcagagaccagatcttcaagaacaccttccagggcatctacagcgaccagaagatctgcaaggactgcccccacagatacgagagagaggaggccttcatggccctgaacctgggcgtgaccagctgccagagcctggagatcagcctggaccagttcgtgagaggcgaggtgctggagggcagcaacgcctactactgcgagaagtgcaaggagaagagaatcaccgtgaagagaacctgcatcaagagcctgcccagcgtgctggtgatccacctgatgagattcggcttcgactgggagagcggcagaagcatcaagtacgacgagcagatcagattcccctggatgctgaacatggagccctacaccgtgagcggcatggccagacaggacagcagcagcgaggtgggcgagaacggcagaagcgtggaccagggcggcggcggcagccccagaaagaaggtggccctgaccgagaactacgagctggtgggcgtgatcgtgcacagcggccaggcccacgccggccactactacagcttcatcaaggacagaagaggctgcggcaagggcaagtggtacaagttcaacgacaccgtgatcgaggagttcgacctgaacgacgagaccctggagtacgagtgcttcggcggcgagtacagacccaaggtgtacgaccagaccaacccctacaccgacgtgagaagaagatactggaacgcctacatgctgttctaccagagagtgagcgaccagaacagccccgtgctgcccaagaagagcagagtgagcgtggtgagacaggaggccgaggacctgagcctgagcgcccccagcagccccgagatcagcccccagagcagccccagaccccacagacccaacaacgacagactgagcatcctgaccaagctggtgaagaagggcgagaagaagggcctgttcgtggagaagatgcccgccagaatctaccagatggtgagagacgagaacctgaagttcatgaagaacagagacgtgtacagcagcgactacttcagcttcgtgctgagcctggccagcctgaacgccaccaagctgaagcacccctactacccctgcatggccaaggtgagcctgcagctggccatccagttcctgttccagacctacctgagaaccaagaagaagctgagagtggacaccgaggagtggatcgccaccatcgaggccctgctgagcaagagcttcgacgcctgccagtggctggtggagtacttcatcagcagcgagggcagagagctgatcaagatcttcctgctggagtgcaacgtgagagaggtgagagtggccgtggccaccatcctggagaagaccctggacagcgccctgttctaccaggacaagctgaagagcctgcaccagctgctggaggtgctgctggccctgctggacaaggacgtgcccgagaactgcaagaactgcgcccagtacttcttcctgttcaacaccttcgtgcagaagcagggcatcagagccggcgacctgctgctgagacacagcgccctgagacacatgatcagcttcctgctgggcgccagcagacagaacaaccagatcagaagatggagcagcgcccaggccagagagttcggcaacctgcacaacaccgtggccctgctggtgctgcacagcgacgtgagcagccagagaaacgtggcccccggcatcttcaagcagagaccccccatcagcatcgcccccagcagccccctgctgcccctgcacgaggaggtggaggccctgctgttcatgagcgagggcaagccctacctgctggaggtgatgttcgccctgagagagctgaccggcagcctgctggccctgatcgagatggtggtgtactgctgcttctgcaacgagcacttcagcttcaccatgctgcacttcatcaagaaccagctggagaccgcccccccccacgagctgaagaacaccttccagctgctgcacgagatcctggtgatcgaggaccccatccaggtggagagagtgaagttcgtgttcgagaccgagaacggcctgctggccctgatgcaccacagcaaccacgtggacagcagcagatgctaccagtgcgtgaagttcctggtgaccctggcccagaagtgccccgccgccaaggagtacttcaaggagaacagccaccactggagctgggccgtgcagtggctgcagaagaagatgagcgagcactactggaccccccagagcaacgtgagcaacgagaccagcaccggcaagaccttccagagaaccatcagcgcccaggacaccctggcctacgccaccgccctgctgaacgagaaggagcagagcggcagcagcaacggcagcgagagcagccccgccaacgagaacggcgacagacacctgcagcagggcagcgagagccccatgatgatcggcgagctgagaagcgacctggacgacgtggacccctag

SEQ ID NO: 104384 - DNA, 2742 bp, synthetic construct
  misc_feature 1..2742: note = Description of Artificial Sequence: Synthetic coding sequence
  source 1..2742: mol_type = other DNA
atggccgccctgttcctgagaggcttcgtgcagatcggcaactgcaagaccggcatcagcaagagcaaggaggccttcatcgaggccgtggagagaaagaagaaggacagactggtgctgtacttcaagagcggcaagtacagcaccttcagactgagcgacaacatccagaacgtggtgctgaagagctacagaggcaaccagaaccacctgcacctgaccctgcagaacaacaacggcctgttcatcgagggcctgagcagcaccgacgccgagcagctgaagatcttcctggacagagtgcaccagaacgaggtgcagccccccgtgagacccggcaagggcggcagcgtgttcagcagcaccacccagaaggagatcaacaagaccagcttccacaaggtggacgagaagagcagcagcaagagcttcgagatcgccaagggcagcggcaccggcgtgctgcagagaatgcccctgctgaccagcaagctgaccctgacctgcggcgagctgagcgagaaccagcacaagaagagaaagagaatgctgagcagcagcagcgagatgaacgaggagttcctgaaggagaacaacagcgtggagtacaagaagagcaaggccgactgcagcagatgcgtgagctacaacagagagaagcagctgaagctgaaggagctggaggagaacaagaagctggagtgcgagagcagctgcatcatgaacgccaccggcaacccctacctggacgacatcggcctgctgcaggccctgaccgagaagatggtgctggtgttcctgctgcagcagggctacagcgacggctacaccaagtgggacaagctgaagctgttcttcgagctgttccccgagaagatctgccacggcctgcccaacctgggcaacacctgctacatgaacgccgtgctgcagagcctgctgagcatccccagcttcgccgacgacctgctgaaccagagcttcccctggggcaagatccccctgaacgccctgaccatgtgcctggccagactgctgttcttcaaggacacctacaacatcgagatcaaggagatgctgctgctgaacctgaagaaggccatcagcgccgccgccgagatcttccacggcaacgcccagaacgacgcccacgagttcctggcccactgcctggaccagctgaaggacaacatggagaagctgaacaccatctggaagcccaagagcgagttcggcgaggacaacttccccaagcaggtgttcgccgacgaccccgacaccagcggcttcagctgccccgtgatcaccaacttcgagctggagctgctgcacagcatcgcctgcaaggcctgcggccaggtgatcctgaagaccgagctgaacaactacctgagcatcaacctgccccagagaatcaaggcccaccccagcagcatccagagcaccttcgacctgttcttcggcgccgaggagctggagtacaagtgcgccaagtgcgagcacaagaccagcgtgggcgtgcacagcttcagcagactgcccagaatcctgatcgtgcacctgaagagatacagcctgaacgagttctgcgccctgaagaagaacgaccaggaggtgatcatcagcaagtacctgaaggtgagcagccactgcaacgagggcaccagaccccccctgcccctgagcgaggacggcgagatcaccgacttccagctgctgaaggtgatcagaaagatgaccagcggcaacatcagcgtgagctggcccgccaccaaggagagcaaggacatcctggccccccacatcggcagcgacaaggagagcgagcagaagaagggccagaccgtgttcaagggcgccagcagaagacagcagcagaagtacctgggcaagaacagcaagcccaacgagctggagagcgtgtacagcggcgacagagccttcatcgagaaggagcccctggcccacctgatgacctacctggaggacaccagcctgtgccagttccacaaggccggcggcaagcccgccagcagccccggcacccccctgagcaaggtggacttccagaccgtgcccgagaaccccaagagaaagaagtacgtgaagaccagcaagttcgtggccttcgacagaatcatcaaccccaccaaggacctgtacgaggacaagaacatcagaatccccgagagattccagaaggtgagcgagcagacccagcagtgcgacggcatgagaatctgcgagcaggccccccagcaggccctgccccagagcttccccaagcccggcacccagggccacaccaagaacctgctgagacccaccaagctgaacctgcagaagagcaacagaaacagcctgctggccctgggcagcaacaagaaccccagaaacaaggacatcctggacaagatcaagagcaaggccaaggagaccaagagaaacgacgacaagggcgaccacacctacagactgatcagcgtggtgagccacctgggcaagaccctgaagagcggccactacatctgcgacgcctacgacttcgagaagcagatctggttcacctacgacgacatgagagtgctgggcatccaggaggcccagatgcaggaggacagaagatgcaccggctacatcttcttctacatgcacaacgagatcttcgaggagatgctgaagagagaggagaacgcccagctgaacagcaaggaggtggaggagaccctgcagaaggagtag

SEQ ID NO: 104385 - DNA, 2742 bp, synthetic construct; identical to SEQ ID NO: 104384
  misc_feature 1..2742: note = Description of Artificial Sequence: Synthetic coding sequence
  source 1..2742: mol_type = other DNA

SEQ ID NO: 104386 - DNA, 3234 bp, synthetic construct
  misc_feature 1..3234: note = Description of Artificial Sequence: Synthetic coding sequence
  source 1..3234: mol_type = other DNA
atgaccgccgagctgcagcaggacgacgccgccggcgccgccgacggccacggcagcagctgccagatgctgctgaaccagctgagagagatcaccggcatccaggaccccagcttcctgcacgaggccctgaaggccagcaacggcgacatcacccaggccgtgagcctgctgaccgacgagagagtgaaggagcccagccaggacaccgtggccaccgagcccagcgaggtggagggcagcgccgccaacaaggaggtgctggccaaggtgatcgacctgacccacgacaacaaggacgacctgcaggccgccatcgccctgagcctgctggagagccccaagatccaggccgacggcagagacctgaacagaatgcacgaggccaccagcgccgagaccaagagaagcaagagaaagagatgcgaggtgtggggcgagaaccccaaccccaacgactggagaagagtggacggctggcccgtgggcctgaagaacgtgggcaacacctgctggttcagcgccgtgatccagagcctgttccagctgcccgagttcagaagactggtgctgagctacagcctgccccagaacgtgctggagaactgcagaagccacaccgagaagagaaacatcatgttcatgcaggagctgcagtacctgttcgccctgatgatgggcagcaacagaaagttcgtggaccccagcgccgccctggacctgctgaagggcgccttcagaagcagcgaggagcagcagcaggacgtgagcgagttcacccacaagctgctggactggctggaggacgccttccagctggccgtgaacgtgaacagccccagaaacaagagcgagaaccccatggtgcagctgttctacggcaccttcctgaccgagggcgtgagagagggcaagcccttctgcaacaacgagaccttcggccagtaccccctgcaggtgaacggctacagaaacctggacgagtgcctggagggcgccatggtggagggcgacgtggagctgctgcccagcgaccacagcgtgaagtacggccaggagagatggttcaccaagctgccccccgtgctgaccttcgagctgagcagattcgagttcaaccagagcctgggccagcccgagaagatccacaacaagctggagttcccccagatcatctacatggacagatacatgtacagaagcaaggagctgatcagaaacaagagagagtgcatcagaaagctgaaggaggagatcaagatcctgcagcagaagctggagagatacgtgaagtacggcagcggccccgccagattccccctgcccgacatgctgaagtacgtgatcgagttcgccagcaccaagcccgccagcgagagctgcccccccgagagcgacacccacatgaccctgcccctgagcagcgtgcactgcagcgtgagcgaccagaccagcaaggagagcaccagcaccgagagcagcagccaggacgtggagagcaccttcagcagccccgaggacagcctgcccaagagcaagcccctgaccagcagcagaagcagcatggagatgcccagccagcccgcccccagaaccgtgaccgacgaggagatcaacttcgtgaagacctgcctgcagagatggagaagcgagatcgagcaggacatccaggacctgaagacctgcatcgccagcaccacccagaccatcgagcagatgtactgcgaccccctgctgagacaggtgccctacagactgcacgccgtgctggtgcacgagggccaggccaacgccggccactactgggcctacatctacaaccagcccagacagagctggctgaagtacaacgacatcagcgtgaccgagagcagctgggaggaggtggagagagacagctacggcggcctgagaaacgtgagcgcctactgcctgatgtacatcaacgacaagctgccctacttcaacgccgaggccgcccccaccgagagcgaccagatgagcgaggtggaggccctgagcgtggagctgaagcactacatccaggaggacaactggagattcgagcaggaggtggaggagtgggaggaggagcagagctgcaagatcccccagatggagagcagcaccaacagcagcagccaggactacagcaccagccaggagcccagcgtggccagcagccacggcgtgagatgcctgagcagcgagcacgccgtgatcgtgaaggagcagaccgcccaggccatcgccaacaccgccagagcctacgagaagagcggcgtggaggccgccctgagcgaggtgatgctgagccccgccatgcagggcgtgatcctggccatcgccaaggccagacagaccttcgacagagacggcagcgaggccggcctgatcaaggccttccacgaggagtacagcagactgtaccagctggccaaggagacccccaccagccacagcgaccccagactgcagcacgtgctggtgtacttcttccagaacgaggcccccaagagagtggtggagagaaccctgctggagcagttcgccgacaagaacctgagctacgacgagagaagcatcagcatcatgaaggtggcccaggccaagctgaaggagatcggccccgacgacatgaacatggaggagtacaagaagtggcacgaggactacagcctgttcagaaaggtgagcgtgtacctgctgaccggcctggagctgtaccagaagggcaagtaccaggaggccctgagctacctggtgtacgcctaccagagcaacgccgccctgctgatgaagggccccagaagaggcgtgaaggagagcgtgatcgccctgtacagaagaaagtgcctgctggagctgaacgccaaggccgccagcctgttcgagaccaacgacgaccacagcgtgaccgagggcatcaacgtgatgaacgagctgatcatcccctgcatccacctgatcatcaacaacgacatcagcaaggacgacctggacgccatcgaggtgatgagaaaccactggtgcagctacctgggccaggacatcgccgagaacctgcagctgtgcctgggcgagttcctgcccagactgctggaccccagcgccgagatcatcgtgctgaaggagccccccaccatcagacccaacagcccctacgacctgtgcagcagattcgccgccgtgatggagagcatccagggcgtgagcaccgtgaccgtgaagtag

SEQ ID NO: 104387 - DNA, 3138 bp, synthetic construct
  misc_feature 1..3138: note = Description of Artificial Sequence: Synthetic coding sequence
  source 1..3138: mol_type = other DNA
atgaccgccgagctgcagcaggacgacgccgccggcgccgccgacggccacggcagcagctgccagatgctgctgaaccagctgagagagatcaccggcatccaggaccccagcttcctgcacgaggccctgaaggccagcaacggcgacatcacccaggccgtgagcctgctgaccgacgagagagtgaaggagcccagccaggacaccgtggccaccgagcccagcgaggtggagggcagcgccgccaacaaggaggtgctggccaaggtgatcgacctgacccacgacaacaaggacgacctgcaggccgccatcgccctgagcctgctggagagccccaagatccaggccgacggcagagacctgaacagaatgcacgaggccaccagcgccgagaccaagagaagcaagagaaagagatgcgaggtgtggggcgagaaccccaaccccaacgactggagaagagtggacggctggcccgtgggcctgaagaacgtgggcaacacctgctggttcagcgccgtgatccagagcctgttccagctgcccgagttcagaagactggtgctgagctacagcctgccccagaacgtgctggagaactgcagaagccacaccgagaagagaaacatcatgttcatgcaggagctgcagtacctgttcgccctgatgatgggcagcaacagaaagttcgtggaccccagcgccgccctggacctgctgaagggcgccttcagaagcagcgaggagcagcagcaggacgtgagcgagttcacccacaagctgctggactggctggaggacgccttccagctggccgtgaacgtgaacagccccagaaacaagagcgagaaccccatggtgcagctgttctacggcaccttcctgaccgagggcgtgagagagggcaagcccttctgcaacaacgagaccttcggccagtaccccctgcaggtgaacggctacagaaacctggacgagtgcctggagggcgccatggtggagggcgacgtggagctgctgcccagcgaccacagcgtgaagtacggccaggagagatggttcaccaagctgccccccgtgctgaccttcgagctgagcagattcgagttcaaccagagcctgggccagcccgagaagatccacaacaagctggagttcccccagatcatctacatggacagatacatgtacagaagcaaggagctgatcagaaacaagagagagtgcatcagaaagctgaaggaggagatcaagatcctgcagcagaagctggagagatacgtgaagtacggcagcggccccgccagattccccctgcccgacatgctgaagtacgtgatcgagttcgccagcaccaagcccgccagcgagagctgcccccccgagagcgacacccacatgaccctgcccctgagcagcgtgcactgcagcgtgagcgaccagaccagcaaggagagcaccagcaccgagagcagcagccaggacgtggagagcaccttcagcagccccgaggacagcctgcccaagagcaagcccctgaccagcagcagaagcagcatggagatgcccagccagcccgcccccagaaccgtgaccgacgaggagatcaacttcgtgaagacctgcctgcagagatggagaagcgagatcgagcaggacatccaggacctgaagacctgcatcgccagcaccacccagaccatcgagcagatgtactgcgaccccctgctgagacaggtgccctacagactgcacgccgtgctggtgcacgagggccaggccaacgccggccactactgggcctacatctacaaccagcccagacagagctggctgaagtacaacgacatcagcgtgaccgagagcagctgggaggaggtggagagagacagctacggcggcctgagaaacgtgagcgcctactgcctgatgtacatcaacgacaagctgccctacttcaacgccgaggccgcccccaccgagagcgaccagatgagcgaggtggaggccctgagcgtggagctgaagcactacatccaggaggacaactggagattcgagcaggaggtggaggagtgggaggaggagcagagctgcaagatcccccagatggagagcagcaccaacagcagcagccaggactacagcaccagccaggagcccagcgtggccagcagccacggcgtgagatgcctgagcagcgagcacgccgtgatcgtgaaggagcagaccgcccaggccatcgccaacaccgccagagcctacgagaagagcggcgtggaggccgccctgagcgaggccttccacgaggagtacagcagactgtaccagctggccaaggagacccccaccagccacagcgaccccagactgcagcacgtgctggtgtacttcttccagaacgaggcccccaagagagtggtggagagaaccctgctggagcagttcgccgacaagaacctgagctacgacgagagaagcatcagcatcatgaaggtggcccaggccaagctgaaggagatcggccccgacgacatgaacatggaggagtacaagaagtggcacgaggactacagcctgttcagaaaggtgagcgtgtacctgctgaccggcctggagctgtaccagaagggcaagtaccaggaggccctgagctacctggtgtacgcctaccagagcaacgccgccctgctgatgaagggccccagaagaggcgtgaaggagagcgtgatcgccctgtacagaagaaagtgcctgctggagctgaacgccaaggccgccagcctgttcgagaccaacgacgaccacagcgtgaccgagggcatcaacgtgatgaacgagctgatcatcccctgcatccacctgatcatcaacaacgacatcagcaaggacgacctggacgccatcgaggtgatgagaaaccactggtgcagctacctgggccaggacatcgccgagaacctgcagctgtgcctgggcgagttcctgcccagactgctggaccccagcgccgagatcatcgtgctgaaggagccccccaccatcagacccaacagcccctacgacctgtgcagcagattcgccgccgtgatggagagcatccagggcgtgagcaccgtgaccgtgaagtag

SEQ ID NO: 104388 - DNA, 1497 bp, synthetic construct
  misc_feature 1..1497: note = Description of Artificial Sequence: Synthetic coding sequence
  source 1..1497: mol_type = other DNA
atgcagagccccccccacctggccgtgtgcagaagcaacaagagcccctgggtgtgcctgacctgcagcagcgtgcactgcggcagatacgtgaacggccacgccaagaagcactacgaggacgcccaggtgcccctgaccaaccacaagaagagcgagaagcaggacaaggtgcagcacaccgtgtgcatggactgcagcagctacagcacctactgctacagatgcgacgacttcgtggtgaacgacaccaagctgggcctggtgcagaaggtgagagagcacctgcagaacctggagaacagcgccttcaccgccgacagacacaagaagagaaagctgctggagaacagcaccctgaacagcaagctgctgaaggtgaacggcagcaccaccgccatctgcgccaccggcctgagaaacctgggcaacacctgcttcatgaacgccatcctgcagagcctgagcaacatcgagcagttctgctgctacttcaaggagctgcccgccgtggagctgagaaacggcaagaccgccggcagaagaacctaccacaccagaagccagggcgacaacaacgtgagcctggtggaggagttcagaaagaccctgtgcgccctgtggcagggcagccagaccgccttcagccccgagagcctgttctacgtggtgtggaagatcatgcccaacttcagaggctaccagcagcaggacgcccacgagttcatgagatacctgctggaccacctgcacctggagctgcagggcggcttcaacggcgtgagcagaagcgccatcctgcaggagaacagcaccctgagcgccagcaacaagtgctgcatcaacggcgccagcaccgtggtgaccgccatcttcggcggcatcctgcagaacgaggtgaactgcctgatctgcggcaccgagagcagaaagttcgaccccttcctggacctgagcctggacatccccagccagttcagaagcaagagaagcaagaaccaggagaacggccccgtgtgcagcctgagagactgcctgagaagcttcaccgacctggaggagctggacgagaccgagctgtacatgtgccacaagtgcaagaagaagcagaagagcaccaagaagttctggatccagaagctgcccaaggtgctgtgcctgcacctgaagagattccactggaccgcctacctgagaaacaaggtggacacctacgtggagttccccctgagaggcctggacatgaagtgctacctgctggagcccgagaacagcggccccgagagctgcctgtacgacctggccgccgtggtggtgcaccacggcagcggcgtgggcagcggccactacaccgcctacgccacccacgagggcagatggttccacttcaacgacagcaccgtgaccctgaccgacgaggagaccgtggtgaaggccaaggcctacatcctgttctacgtggagcaccaggccaaggccggcagcgacaagctgtag

SEQ ID NO: 104389 - DNA, 1563 bp, synthetic construct
  misc_feature 1..1563: note = Description of Artificial Sequence: Synthetic coding sequence
  source 1..1563: mol_type = other DNA
atggagtgcccccacctgagcagcagcgtgtgcatcgcccccgacagcgccaagttccccaacggcagccccagcagctggtgctgcagcgtgtgcagaagcaacaagagcccctgggtgtgcctgacctgcagcagcgtgcactgcggcagatacgtgaacggccacgccaagaagcactacgaggacgcccaggtgcccctgaccaaccacaagaagagcgagaagcaggacaaggtgcagcacaccgtgtgcatggactgcagcagctacagcacctactgctacagatgcgacgacttcgtggtgaacgacaccaagctgggcctggtgcagaaggtgagagagcacctgcagaacctggagaacagcgccttcaccgccgacagacacaagaagagaaagctgctggagaacagcaccctgaacagcaagctgctgaaggtgaacggcagcaccaccgccatctgcgccaccggcctgagaaacctgggcaacacctgcttcatgaacgccatcctgcagagcctgagcaacatcgagcagttctgctgctacttcaaggagctgcccgccgtggagctgagaaacggcaagaccgccggcagaagaacctaccacaccagaagccagggcgacaacaacgtgagcctggtggaggagttcagaaagaccctgtgcgccctgtggcagggcagccagaccgccttcagccccgagagcctgttctacgtggtgtggaagatcatgcccaacttcagaggctaccagcagcaggacgcccacgagttcatgagatacctgctggaccacctgcacctggagctgcagggcggcttcaacggcgtgagcagaagcgccatcctgcaggagaacagcaccctgagcgccagcaacaagtgctgcatcaacggcgccagcaccgtggtgaccgccatcttcggcggcatcctgcagaacgaggtgaactgcctgatctgcggcaccgagagcagaaagttcgaccccttcctggacctgagcctggacatccccagccagttcagaagcaagagaagcaagaaccaggagaacggccccgtgtgcagcctgagagactgcctgagaagcttcaccgacctggaggagctggacgagaccgagctgtacatgtgccacaagtgcaagaagaagcagaagagcaccaagaagttctggatccagaagctgcccaaggtgctgtgcctgcacctgaagagattccactggaccgcctacctgagaaacaaggtggacacctacgtggagttccccctgagaggcctggacatgaagtgctacctgctggagcccgagaacagcggccccgagagctgcctgtacgacctggccgccgtggtggtgcaccacggcagcggcgtgggcagcggccactacaccgcctacgccacccacgagggcagatggttccacttcaacgacagcaccgtgaccctgaccgacgaggagaccgtggtgaaggccaaggcctacatcctgttctacgtggagcaccaggccaaggccggcagcgacaagctgtag

SEQ ID NO: 104390 - DNA, 471 bp, synthetic construct
  misc_feature 1..471: note = Description of Artificial Sequence: Synthetic coding sequence
  source 1..471: mol_type = other DNA
atggagtgcccccacctgagcagcagcgtgtgcatcgcccccgacagcgccaagttccccaacggcagccccagcagctggtgctgcagcgtgtgcagaagcaacaagagcccctgggtgtgcctgacctgcagcagcgtgcactgcggcagatacgtgaacggccacgccaagaagcactacgaggacgcccaggtgcccctgaccaaccacaagaagagcgagaagcaggacaaggtgcagcacaccgtgtgcatggactgcagcagctacagcacctactgctacagatgcgacgacttcgtggtgaacgacaccaagctgggcctggtgcagaaggtgagagagcacctgcagaacctggagaacagcgccttcaccgccgacagacacaagaagagaaagctgctggagaacagcaccctgaacagcaagctgctgaaggtgaacgtgttcggcagaagagtgtag

SEQ ID NO: 104391 - DNA, 1071 bp, synthetic construct
  misc_feature 1..1071: note = Description of Artificial Sequence: Synthetic coding sequence
  source 1..1071: mol_type = other DNA
atggactgcagcagctacagcacctactgctacagatgcgacgacttcgtggtgaacgacaccaagctgggcctggtgcagaaggtgagagagcacctgcagaacctggagaacagcgccttcaccgccgacagacacaagaagagaaagctgctggagaacagcaccctgaacagcaagctgctgaaggtgaacggcagcaccaccgccatctgcgccaccggcctgagaaacctgggcaacacctgcttcatgaacgccatcctgcagagcctgagcaacatcgagcagttctgctgctacttcaaggagctgcccgccgtggagctgagaaacggcaagaccgccggcagaagaacctaccacaccagaagccagggcgacaacaacgtgagcctggtggaggagttcagaaagaccctgtgcgccctgtggcagggcagccagaccgccttcagccccgagagcctgttctacgtggtgtggaagatcatgcccaacttcagaggctaccagcagcaggacgcccacgagttcatgagatacctgctggaccacctgcacctggagctgcagggcggcttcaacggcgtgagcagaagcgccatcctgcaggagaacagcaccctgagcgccagcaacaagtgctgcatcaacggcgccagcaccgtggtgaccgccatcttcggcggcatcctgcagaacgaggtgaactgcctgatctgcggcaccgagagcagaaagttcgaccccttcctggacctgagcctggacatccccagccagttcagaagcaagagaagcaagaaccaggagaacggccccgtgtgcagcctgagagactgcctgagaagcttcaccgacctggaggagctggacgagaccgagctgtacatgtgccacaagtgcaagaagaagcagaagagcaccaagaagttctggatccagaagctgcccaaggtgctgtgcctgcacctgaagagattccactggaccgcctacctgagaaacaaggtggacacctacgtggagttccccctgagaggcctggacatgaagtgctactactag

SEQ ID NO: 104392 - DNA, 816 bp, synthetic construct
  misc_feature 1..816: note = Description of Artificial Sequence: Synthetic coding sequence
  source 1..816: mol_type = other DNA
atgcccaacttcagaggctaccagcagcaggacgcccacgagttcatgagatacctgctggaccacctgcacctggagctgcagggcggcttcaacggcgtgagcagaagcgccatcctgcaggagaacagcaccctgagcgccagcaacaagtgctgcatcaacggcgccagcaccgtggtgaccgccatcttcggcggcatcctgcagaacgaggtgaactgcctgatctgcggcaccgagagcagaaagttcgaccccttcctggacctgagcctggacatccccagccagttcagaagcaagagaagcaagaaccaggagaacggccccgtgtgcagcctgagagactgcctgagaagcttcaccgacctggaggagctggacgagaccgagctgtacatgtgccacaagtgcaagaagaagcagaagagcaccaagaagttctggatccagaagctgcccaaggtgctgtgcctgcacctgaagagattccactggaccgcctacctgagaaacaaggtggacacctacgtggagttccccctgagaggcctggacatgaagtgctacctgctggagcccgagaacagcggccccgagagctgcctgtacgacctggccgccgtggtggtgcaccacggcagcggcgtgggcagcggccactacaccgcctacgccacccacgagggcagatggttccacttcaacgacagcaccgtgaccctgaccgacgaggagaccgtggtgaaggccaaggcctacatcctgttctacgtggagcaccaggccaaggccggcagcgacaagctgtag

SEQ ID NO: 104393 - DNA, 1431 bp, synthetic construct
  misc_feature 1..1431: note = Description of Artificial Sequence: Synthetic coding sequence
  source 1..1431: mol_type = other DNA
atggagtgcccccacctgagcagcagcgtgtgcatcgcccccgacagcgccaagttccccaacggcagccccagcagctggtgctgcagcgtgtgcagaagcaacaagagcccctgggtgtgcctgacctgcagcagcgtgcactgcggcagctacagatgcgacgacttcgtggtgaacgacaccaagctgggcctggtgcagaaggtgagagagcacctgcagaacctggagaacagcgccttcaccgccgacagacacaagaagagaaagctgctggagaacagcaccctgaacagcaagctgctgaaggtgaacggcagcaccaccgccatctgcgccaccggcctgagaaacctgggcaacacctgcttcatgaacgccatcctgcagagcctgagcaacatcgagcagttctgctgctacttcaaggagctgcccgccgtggagctgagaaacggcaagaccgccggcagaagaacctaccacaccagaagccagggcgacaacaacgtgagcctggtggaggagttcagaaagaccctgtgcgccctgtggcagggcagccagaccgccttcagccccgagagcctgttctacgtggtgtggaagatcatgcccaacttcagaggctaccagcagcaggacgcccacgagttcatgagatacctgctggaccacctgcacctggagctgcagggcggcttcaacggcgtgagcagaagcgccatcctgcaggagaacagcaccctgagcgccagcaacaagtgctgcatcaacggcgccagcaccgtggtgaccgccatcttcggcggcatcctgcagaacgaggtgaactgcctgatctgcggcaccgagagcagaaagttcgaccccttcctggacctgagcctggacatccccagccagttcagaagcaagagaagcaagaaccaggagaacggccccgtgtgcagcctgagagactgcctgagaagcttcaccgacctggaggagctggacgagaccgagctgtacatgtgccacaagtgcaagaagaagcagaagagcaccaagaagttctggatccagaagctgcccaaggtgctgtgcctgcacctgaagagattccactggaccgcctacctgagaaacaaggtggacacctacgtggagttccccctgagaggcctggacatgaagtgctacctgctggagcccgagaacagcggccccgagagctgcctgtacgacctggccgccgtggtggtgcaccacggcagcggcgtgggcagcggccactacaccgcctacgccacccacgagggcagatggttccacttcaacgacagcaccgtgaccctgaccgacgaggagaccgtggtgaaggccaaggcctacatcctgttctacgtggagcaccaggccaaggccggcagcgacaagctgtag

SEQ ID NO: 104394 - DNA, 168 bp, synthetic construct
  misc_feature 1..168: note = Description of Artificial Sequence: Synthetic coding sequence
  source 1..168: mol_type = other DNA
atggagtgcccccacctgagcagcagcgtgtgcatcgcccccgacagcgccaagttccccaacggcagccccagcagctggtgctgcagcgtgtgcagaagcaacaagagcccctgggtgtgcctgacctgcagcagcgtgcactgcggcagaatctggggcacctag

SEQ ID NO: 104395 - DNA, 1554 bp, synthetic construct
  misc_feature 1..1554: note = Description of Artificial Sequence: Synthetic coding sequence
  source 1..1554: mol_type = other DNA
atgctgagcagcagagccgaggccgccatgaccgccgccgacagagccatccagagattcctgagaaccggcgccgccgtgagatacaaggtgatgaagaactggggcgtgatcggcggcatcgccgccgccctggccgccggcatctacgtgatctggggccccatcaccgagagaaagaagagaagaaagggcctggtgcccggcctggtgaacctgggcaacacctgcttcatgaacagcctgctgcagggcctgagcgcctgccccgccttcatcagatggctggaggagttcaccagccagtacagcagagaccagaaggagccccccagccaccagtacctgagcctgaccctgctgcacctgctgaaggccctgagctgccaggaggtgaccgacgacgaggtgctggacgccagctgcctgctggacgtgctgagaatgtacagatggcagatcagcagcttcgaggagcaggacgcccacgagctgttccacgtgatcaccagcagcctggaggacgagagagacagacagcccagagtgacccacctgttcgacgtgcacagcctggagcagcagagcgagatcacccccaagcagatcacctgcagaaccagaggcagcccccaccccaccagcaaccactggaagagccagcaccccttccacggcagactgaccagcaacatggtgtgcaagcactgcgagcaccagagccccgtgagattcgacaccttcgacagcctgagcctgagcatccccgccgccacctggggccaccccctgaccctggaccactgcctgcaccacttcatcagcagcgagagcgtgagagacgtggtgtgcgacaactgcaccaagatcgaggccaagggcaccctgaacggcgagaaggtggagcaccagagaaccaccttcgtgaagcagctgaagctgggcaagctgccccagtgcctgtgcatccacctgcagagactgagctggagcagccacggcacccccctgaagagacacgagcacgtgcagttcaacgagttcctgatgatggacatctacaagtaccacctgctgggccacaagcccagccagcacaaccccaagctgaacaagaaccccggccccaccctggagctgcaggacggccccggcgcccccacccccgtgctgaaccagcccggcgcccccaagacccagatcttcatgaacggcgcctgcagccccagcctgctgcccaccctgagcgcccccatgcccttccccctgcccgtggtgcccgactacagcagcagcacctacctgttcagactgatggccgtggtggtgcaccacggcgacatgcacagcggccacttcgtgacctacagaagaagcccccccagcgccagaaaccccctgagcaccagcaaccagtggctgtgggtgagcgacgacaccgtgagaaaggccagcctgcaggaggtgctgagcagcagcgcctacctgctgttctacgagagagtgctgagcagaatgcagcaccagagccaggagtgcaagagcgaggagtag

SEQ ID NO: 104396 - DNA, 4815 bp, synthetic construct
  misc_feature 1..4815: note = Description of Artificial Sequence: Synthetic coding sequence
  source 1..4815: mol_type = other DNA
atgggcgccaaggagagcagaatcggcttcctgagctacgaggaggccctgagaagagtgaccgacgtggagctgaagagactgaaggacgccttcaagagaacctgcggcctgagctactacatgggccagcactgcttcatcagagaggtgctgggcgacggcgtgccccccaaggtggccgaggtgatctactgcagcttcggcggcaccagcaagggcctgcacttcaacaacctgatcgtgggcctggtgctgctgaccagaggcaaggacgaggagaaggccaagtacatcttcagcctgttcagcagcgagagcggcaactacgtgatcagagaggagatggagagaatgctgcacgtggtggacggcaaggtgcccgacaccctgagaaagtgcttcagcgagggcgagaaggtgaactacgagaagttcagaaactggctgttcctgaacaaggacgccttcaccttcagcagatggctgctgagcggcggcgtgtacgtgaccctgaccgacgacagcgacacccccaccttctaccagaccctggccggcgtgacccacctggaggagagcgacatcatcgacctggagaagagatactggctgctgaaggcccagagcagaaccggcagattcgacctggagaccttcggccccctggtgagcccccccatcagacccagcctgagcgagggcctgttcaacgccttcgacgagaacagagacaaccacatcgacttcaaggagatcagctgcggcctgagcgcctgctgcagaggccccctggccgagagacagaagttctgcttcaaggtgttcgacgtggacagagacggcgtgctgagcagagtggagctgagagacatggtggtggccctgctggaggtgtggaaggacaacagaaccgacgacatccccgagctgcacatggacctgagcgacatcgtggagggcatcctgaacgcccacgacaccaccaagatgggccacctgaccctggaggactaccagatctggagcgtgaagaacgtgctggccaacgagttcctgaacctgctgttccaggtgtgccacatcgtgctgggcctgagacccgccacccccgaggaggagggccagatcatcagaggctggctggagagagagagcagatacggcctgcaggccggccacaactggttcatcatcagcatgcagtggtggcagcagtggaaggagtacgtgaagtacgacgccaaccccgtggtgatcgagcccagcagcgtgctgaacggcggcaagtacagcttcggcaccgccgcccaccccatggagcaggtggaggacagaatcggcagcagcctgagctacgtgaacaccaccgaggagaagttcagcgacaacatcagcaccgccagcgaggccagcgagaccgccggcagcggcttcctgtacagcgccacccccggcgccgacgtgtgcttcgccagacagcacaacaccagcgacaacaacaaccagtgcctgctgggcgccaacggcaacatcctgctgcacctgaacccccagaagcccggcgccatcgacaaccagcccctggtgacccaggagcccgtgaaggccaccagcctgaccctggagggcggcagactgaagagaaccccccagctgatccacggcagagactacgagatggtgcccgagcccgtgtggagagccctgtaccactggtacggcgccaacctggccctgcccagacccgtgatcaagaacagcaagaccgacatccccgagctggagctgttccccagatacctgctgttcctgagacagcagcccgccaccagaacccagcagagcaacatctgggtgaacatgggcaacgtgcccagccccaacgcccccctgaagagagtgctggcctacaccggctgcttcagcagaatgcagaccatcaaggagatccacgagtacctgagccagagactgagaatcaaggaggaggacatgagactgtggctgtacaacagcgagaactacctgaccctgctggacgacgaggaccacaagctggagtacctgaagatccaggacgagcagcacctggtgatcgaggtgagaaacaaggacatgagctggcccgaggagatgagcttcatcgccaacagcagcaagatcgacagacacaaggtgcccaccgagaagggcgccaccggcctgagcaacctgggcaacacctgcttcatgaacagcagcatccagtgcgtgagcaacacccagcccctgacccagtacttcatcagcggcagacacctgtacgagctgaacagaaccaaccccatcggcatgaagggccacatggccaagtgctacggcgacctggtgcaggagctgtggagcggcacccagaagaacgtggcccccctgaagctgagatggaccatcgccaagtacgcccccagattcaacggcttccagcagcaggacagccaggagctgctggccttcctgctggacggcctgcacgaggacctgaacagagtgcacgagaagccctacgtggagctgaaggacagcgacggcagacccgactgggaggtggccgccgaggcctgggacaaccacctgagaagaaacagaagcatcgtggtggacctgttccacggccagctgagaagccaggtgaagtgcaagacctgcggccacatcagcgtgagattcgaccccttcaacttcctgagcctgcccctgcccatggacagctacatgcacctggagatcaccgtgatcaagctggacggcaccacccccgtgagatacggcctgagactgaacatggacgagaagtacaccggcctgaagaagcagctgagcgacctgtgcggcctgaacagcgagcagatcctgctggccgaggtgcacggcagcaacatcaagaacttcccccaggacaaccagaaggtgagactgagcgtgagcggcttcctgtgcgccttcgagatccccgtgcccgtgagccccatcagcgccagcagccccacccagaccgacttcagcagcagccccagcaccaacgagatgttcaccctgaccaccaacggcgacctgcccagacccatcttcatccccaacggcatgcccaacaccgtggtgccctgcggcaccgagaagaacttcaccaacggcatggtgaacggccacatgcccagcctgcccgacagccccttcaccggctacatcatcgccgtgcacagaaagatgatgagaaccgagctgtacttcctgagcagccagaagaacagacccagcctgttcggcatgcccctgatcgtgccctgcaccgtgcacaccagaaagaaggacctgtacgacgccgtgtggatccaggtgagcagactggccagccccctgcccccccaggaggccagcaaccacgcccaggactgcgacgacagcatgggctaccagtaccccttcaccctgagagtggtgcagaaggacggcaacagctgcgcctggtgcccctggtacagattctgcagaggctgcaagatcgactgcggcgaggacagagccttcatcggcaacgcctacatcgccgtggactgggaccccaccgccctgcacctgagataccagaccagccaggagagagtggtggacgagcacgagagcgtggagcagagcagaagagcccaggccgagcccatcaacctggacagctgcctgagagccttcaccagcgaggaggagctgggcgagaacgagatgtactactgcagcaagtgcaagacccactgcctggccaccaagaagctggacctgtggagactgccccccatcctgatcatccacctgaagagattccagttcgtgaacggcagatggatcaagagccagaagatcgtgaagttccccagagagagcttcgaccccagcgccttcctggtgcccagagaccccgccctgtgccagcacaagcccctgaccccccagggcgacgagctgagcgagcccagaatcctggccagagaggtgaagaaggtggacgcccagagcagcgccggcgaggaggacgtgctgctgagcaagagccccagcagcctgagcgccaacatcatcagcagccccaagggcagccccagcagcagcagaaagagcggcaccagctgccccagcagcaagaacagcagccccaacagcagccccagaaccctgggcagaagcaagggcagactgagactgccccagatcggcagcaagaacaagctgagcagcagcaaggagaacctggacgccagcaaggagaacggcgccggccagatctgcgagctggccgacgccctgagcagaggccacgtgctgggcggcagccagcccgagctggtgaccccccaggaccacgaggtggccctggccaacggcttcctgtacgagcacgaggcctgcggcaacggctacagcaacggccagctgggcaaccacagcgaggaggacagcaccgacgaccagagagaggacaccagaatcaagcccatctacaacctgtacgccatcagctgccacagcggcatcctgggcggcggccactacgtgacctacgccaagaaccccaactgcaagtggtactgctacaacgacagcagctgcaaggagctgcaccccgacgagatcgacaccgacagcgcctacatcctgttctacgagcagcagggcatcgactacgcccagttcctgcccaagaccgacggcaagaagatggccgacaccagcagcatggacgaggacttcgagagcgactacaagaagtactgcgtgctgcagtag

SEQ ID NO: 104397 - DNA, 1173 bp, synthetic construct
  misc_feature 1..1173: note = Description of Artificial Sequence: Synthetic coding sequence
  source 1..1173: mol_type = other DNA
atgggcgccaaggagagcagaatcggcttcctgagctacgaggaggccctgagaagagtgaccgacgtggagctgaagagactgaaggacgccttcaagagaacctgcggcctgagctactacatgggccagcactgcttcatcagagaggtgctgggcgacggcgtgccccccaaggtggccgaggtgatctactgcagcttcggcggcaccagcaagggcctgcacttcaacaacctgatcgtgggcctggtgctgctgaccagaggcaaggacgaggagaaggccaagtacatcttcagcctgttcagcagcgagagcggcaactacgtgatcagagaggagatggagagaatgctgcacgtggtggacggcaaggtgcccgacaccctgagaaagtgcttcagcgagggcgagaaggtgaactacgagaagttcagaaactggctgttcctgaacaaggacgccttcaccttcagcagatggctgctgagcggcggcgtgtacgtgaccctgaccgacgacagcgacacccccaccttctaccagaccctggccggcgtgacccacctggaggagagcgacatcatcgacctggagaagagatactggctgctgaaggcccagagcagaaccggcagattcgacctggagaccttcggccccctggtgagcccccccatcagacccagcctgagcgagggcctgttcaacgccttcgacgagaacagagacaaccacatcgacttcaaggagatcagctgcggcctgagcgcctgctgcagaggccccctggccgagagacagaagttctgcttcaaggtgttcgacgtggacagagacggcgtgctgagcagagtggagctgagagacatggtggtggccctgctggaggtgtggaaggacaacagaaccgacgacatccccgagctgcacatggacctgagcgacatcgtggagggcatcctgaacgcccacgacaccaccaagatgggccacctgaccctggaggactaccagatctggagcgtgaagaacgtgctggccaacgagttcctgaacctgctgttccaggtgtgccacatcgtgctgggcctgagacccgccacccccgaggaggagggccagatcatcagaaccctggagaccgaccagatctacaccagaaactag

SEQ ID NO: 104398 - DNA, 3372 bp, synthetic construct
  misc_feature 1..3372: note = Description of Artificial Sequence: Synthetic coding sequence
  source 1..3372: mol_type = other DNA
atgcccatcgtggacaagctgaaggaggccctgaagcccggcagaaaggacagcgccgacgacggcgagctgggcaagctgctggccagcagcgccaagaaggtgctgctgcagaagatcgagttcgagcccgccagcaagagcttcagctaccagctggaggccctgaagagcaagtacgtgctgctgaaccccaagaccgagggcgccagcagacacaagagcggcgacgacccccccgccagaagacagggcagcgagcacacctacgagagctgcggcgacggcgtgcccgccccccagaaggtgctgttccccaccgagagactgagcctgagatgggagagagtgttcagagtgggcgccggcctgcacaacctgggcaacacctgcttcctgaacgccaccatccagtgcctgacctacaccccccccctggccaactacctgctgagcaaggagcacgccagaagctgccaccagggcagcttctgcatgctgtgcgtgatgcagaaccacatcgtgcaggccttcgccaacagcggcaacgccatcaagcccgtgagcttcatcagagacctgaagaagatcgccagacacttcagattcggcaaccaggaggacgcccacgagttcctgagatacaccatcgacgccatgcagaaggcctgcctgaacggctgcgccaagctggacagacagacccaggccaccaccctggtgcaccagatcttcggcggctacctgagaagcagagtgaagtgcagcgtgtgcaagagcgtgagcgacacctacgacccctacctggacgtggccctggagatcagacaggccgccaacatcgtgagagccctggagctgttcgtgaaggccgacgtgctgagcggcgagaacgcctacatgtgcgccaagtgcaagaagaaggtgcccgccagcaagagattcaccatccacagaaccagcaacgtgctgaccctgagcctgaagagattcgccaacttcagcggcggcaagatcaccaaggacgtgggctaccccgagttcctgaacatcagaccctacatgagccagaacaacggcgaccccgtgatgtacggcctgtacgccgtgctggtgcacagcggctacagctgccacgccggccactactactgctacgtgaaggccagcaacggccagtggtaccagatgaacgacagcctggtgcacagcagcaacgtgaaggtggtgctgaaccagcaggcctacgtgctgttctacctgagaatccccggcagcaagaagagccccgagggcctgatcagcagaaccggcagcagcagcctgcccggcagacccagcgtgatccccgaccacagcaagaagaacatcggcaacggcatcatcagcagccccctgaccggcaagagacaggacagcggcaccatgaagaagccccacaccaccgaggagatcggcgtgcccatcagcagaaacggcagcaccctgggcctgaagagccagaacggctgcatcccccccaagctgcccagcggcagccccagccccaagctgagccagacccccacccacatgcccaccatcctggacgaccccggcaagaaggtgaagaagcccgcccccccccagcacttcagccccagaaccgcccagggcctgcccggcaccagcaacagcaacagcagcagaagcggcagccagagacagggcagctgggacagcagagacgtggtgctgagcaccagccccaagctgctggccaccgccaccgccaacggccacggcctgaagggcaacgacgagagcgccggcctggacagaagaggcagcagcagcagcagccccgagcacagcgccagcagcgacagcaccaaggccccccagacccccagaagcggcgccgcccacctgtgcgacagccaggagaccaactgcagcaccgccggccacagcaagaccccccccagcggcgccgacagcaagaccgtgaagctgaagagccccgtgctgagcaacaccaccaccgagcccgccagcaccatgagccccccccccgccaagaagctggccctgagcgccaagaaggccagcaccctgtggagagccaccggcaacgacctgagaccccccccccccagccccagcagcgacctgacccaccccatgaagaccagccaccccgtggtggccagcacctggcccgtgcacagagccagagccgtgagccccgccccccagagcagcagcagactgcagccccccttcagcccccaccccaccctgctgagcagcacccccaagccccccggcaccagcgagcccagaagctgcagcagcatcagcaccgccctgccccaggtgaacgaggacctggtgagcctgccccaccagctgcccgaggccagcgagcccccccagagccccagcgagaagagaaagaagaccttcgtgggcgagccccagagactgggcagcgagaccagactgccccagcacatcagagaggccaccgccgccccccacggcaagagaaagagaaagaagaagaagagacccgaggacaccgccgccagcgccctgcaggagggccagacccagagacagcccggcagccccatgtacagaagagagggccaggcccagctgcccgccgtgagaagacaggaggacggcacccagccccaggtgaacggccagcaggtgggctgcgtgaccgacggccaccacgccagcagcagaaagagaagaagaaagggcgccgagggcctgggcgaggagggcggcctgcaccaggaccccctgagacacagctgcagccccatgggcgacggcgaccccgaggccatggaggagagccccagaaagaagaagaagaagaagagaaagcaggagacccagagagccgtggaggaggacggccacctgaagtgccccagaagcgccaagccccaggacgccgtggtgcccgagagcagcagctgcgcccccagcgccaacggctggtgccccggcgacagaatgggcctgagccaggccccccccgtgagctggaacggcgagagagagagcgacgtggtgcaggagctgctgaagtacagcagcgacaaggcctacggcagaaaggtgctgacctgggacggcaagatgagcgccgtgagccaggacgccatcgaggacagcagacaggccagaaccgagaccgtggtggacgactgggacgaggagttcgacagaggcaaggagaagaagatcaagaagttcaagagagagaagagaagaaacttcaacgccttccagaagctgcagaccagaagaaacttctggagcgtgacccaccccgccaaggccgccagcctgagctacagaagatag

SEQ ID NO: 104399 - DNA, 1647 bp, synthetic construct
  misc_feature 1..1647: note = Description of Artificial Sequence: Synthetic coding sequence
  source 1..1647: mol_type = other DNA
atgcccatcgtggacaagctgaaggaggccctgaagcccggcagaaaggacagcgccgacgacggcgagctgggcaagctgctggccagcagcgccaagaaggtgctgctgcagaagatcgagttcgagcccgccagcaagagcttcagctaccagctggaggccctgaagagcaagtacgtgctgctgaaccccaagaccgagggcgccagcagacacaagagcggcgacgacccccccgccagaagacagggcagcgagcacacctacgagagctgcggcgacggcgtgcccgccccccagaaggtgctgttccccaccgagagactgagcctgagatgggagagagtgttcagagtgggcgccggcctgcacaacctgggcaacacctgcttcctgaacgccaccatccagtgcctgacctacaccccccccctggccaactacctgctgagcaaggagcacgccagaagctgccaccagggcagcttctgcatgctgtgcgtgatgcagaaccacatcgtgcaggccttcgccaacagcggcaacgccatcaagcccgtgagcttcatcagagacctgaagaagatcgccagacacttcagattcggcaaccaggaggacgcccacgagttcctgagatacaccatcgacgccatgcagaaggcctgcctgaacggctgcgccaagctggacagacagacccaggccaccaccctggtgcaccagatcttcggcggctacctgagaagcagagtgaagtgcagcgtgtgcaagagcgtgagcgacacctacgacccctacctggacgtggccctggagatcagacaggccgccaacatcgtgagagccctggagctgttcgtgaaggccgacgtgctgagcggcgagaacgcctacatgtgcgccaagtgcaagaagaaggtgcccgccagcaagagattcaccatccacagaaccagcaacgtgctgaccctgagcctgaagagattcgccaacttcagcggcggcaagatcaccaaggacgtgggctaccccgagttcctgaacatcagaccctacatgagccagaacaacggcgaccccgtgatgtacggcctgtacgccgtgctggtgcacagcggctacagctgccacgccggccactactactgctacgtgaaggccagcaacggccagtggtaccagatgaacgacagcctggtgcacagcagcaacgtgaaggtggtgctgaaccagcaggcctacgtgctgttctacctgagaatccccggcagcaagaagagccccgagggcctgatcagcagaaccggcagcagcagcctgcccggcagacccagcgtgatccccgaccacagcaagaagaacatcggcaacggcatcatcagcagccccctgaccggcaagagacaggacagcggcaccatgaagaagccccacaccaccgaggagatcggcgtgcccatcagcagaaacggcagcaccctgggcctgaagagccagaacggctgcatcccccccaagctgcccagcggcagccccagccccaagctgagccagacccccacccacatgcccaccatcctggacgaccccggcaagaaggtgaagaagcccgccccccccctgcccaccggcatgggctag

SEQ ID NO: 104400 - DNA, 2187 bp, synthetic construct
  misc_feature 1..2187: note = Description of Artificial Sequence: Synthetic coding sequence
  source 1..2187: mol_type = other DNA
atgtgcgccaagtgcaagaagaaggtgcccgccagcaagagattcaccatccacagaaccagcaacgtgctgaccctgagcctgaagagattcgccaacttcagcggcggcaagatcaccaaggacgtgggctaccccgagttcctgaacatcagaccctacatgagccagaacaacggcgaccccgtgatgtacggcctgtacgccgtgctggtgcacagcggctacagctgccacgccggccactactactgctacgtgaaggccagcaacggccagtggtaccagatgaacgacagcctggtgcacagcagcaacgtgaaggtggtgctgaaccagcaggcctacgtgctgttctacctgagaatccccggcagcaagaagagccccgagggcctgatcagcagaaccggcagcagcagcctgcccggcagacccagcgtgatccccgaccacagcaagaagaacatcggcaacggcatcatcagcagccccctgaccggcaagagacaggacagcggcaccatgaagaagccccacaccaccgaggagatcggcgtgcccatcagcagaaacggcagcaccctgggcctgaagagccagaacggctgcatcccccccaagctgcccagcggcagccccagccccaagctgagccagacccccacccacatgcccaccatcctggacgaccccggcaagaaggtgaagaagcccgcccccccccagcacttcagccccagaaccgcccagggcctgcccggcaccagcaacagcaacagcagcagaagcggcagccagagacagggcagctgggacagcagagacgtggtgctgagcaccagccccaagctgctggccaccgccaccgccaacggccacggcctgaagggcaacgacgagagcgccggcctggacagaagaggcagcagcagcagcagccccgagcacagcgccagcagcgacagcaccaaggccccccagacccccagaagcggcgccgcccacctgtgcgacagccaggagaccaactgcagcaccgccggccacagcaagaccccccccagcggcgccgacagcaagaccgtgaagctgaagagccccgtgctgagcaacaccaccaccgagcccgccagcaccatgagccccccccccgccaagaagctggccctgagcgccaagaaggccagcaccctgtggagagccaccggcaacgacctgagaccccccccccccagccccagcagcgacctgacccaccccatgaagaccagccaccccgtggtggccagcacctggcccgtgcacagagccagagccgtgagccccgccccccagagcagcagcagactgcagccccccttcagcccccaccccaccgccgccagcgccctgcaggagggccagacccagagacagcccggcagccccatgtacagaagagagggccaggcccagctgcccgccgtgagaagacaggaggacggcacccagccccaggtgaacggccagcaggtgggctgcgtgaccgacggccaccacgccagcagcagaaagagaagaagaaagggcgccgagggcctgggcgaggagggcggcctgcaccaggaccccctgagacacagctgcagccccatgggcgacggcgaccccgaggccatggaggagagccccagaaagaagaagaagaagaagagaaagcaggagacccagagagccgtggaggaggacggccacctgaagtgccccagaagcgccaagccccaggacgccgtggtgcccgagagcagcagctgcgcccccagcgccaacggctggtgccccggcgacagaatgggcctgagccaggccccccccgtgagctggaacggcgagagagagagcgacgtggtgcaggagctgctgaagtacagcagcgacaaggcctacggcagaaaggtgctgacctgggacggcaagatgagcgccgtgagccaggacgccatcgaggacagcagacaggccagaaccgagaccgtggtggacgactgggacgaggagttcgacagaggcaaggagaagaagatcaagaagttcaagagagagaagagaagaaacttcaacgccttccagaagctgcagaccagaagaaacttctggagcgtgacccaccccgccaaggccgccagcctgagctacagaagatag

SEQ ID NO: 104401 - DNA, 3372 bp, synthetic construct; identical to SEQ ID NO: 104398
  misc_feature 1..3372: note = Description of Artificial Sequence: Synthetic coding sequence
  source 1..3372: mol_type = other DNA

SEQ ID NO: 104402 - DNA, 1698 bp, synthetic construct
  misc_feature 1..1698: note = Description of Artificial Sequence: Synthetic coding sequence
  source 1..1698: mol_type = other DNA
atgagcggcagaagcaagagagagagcagaggcagcaccagaggcaagagagagagcgagagcagaggcagcagcggcagagtgaagagagagagagacagagagagagagcccgaggccgccagcagcagaggcagccccgtgagagtgaagagagagttcgagcccgccagcgccagagaggcccccgccagcgtggtgcccttcgtgagagtgaagagagagagagaggtggacgaggacagcgagcccgagagagaggtgagagccaagaacggcagagtggacagcgaggacagaagaagcagacactgcccctacctggacaccatcaacagaagcgtgctggacttcgacttcgagaagctgtgcagcatcagcctgagccacatcaacgcctacgcctgcctggtgtgcggcaagtacttccagggcagaggcctgaagagccacgcctacatccacagcgtgcagttcagccaccacgtgttcctgaacctgcacaccctgaagttctactgcctgcccgacaactacgagatcatcgacagcagcctggaggacatcacctacgtgctgaagcccaccttcaccaagcagcagatcgccaacctggacaagcaggccaagctgagcagagcctacgacggcaccacctacctgcccggcatcgtgggcctgaacaacatcaaggccaacgactacgccaacgccgtgctgcaggccctgagcaacgtgccccccctgagaaactacttcctggaggaggacaactacaagaacatcaagagaccccccggcgacatcatgttcctgctggtgcagagattcggcgagctgatgagaaagctgtggaaccccagaaacttcaaggcccacgtgagcccccacgagatgctgcaggccgtggtgctgtgcagcaagaagaccttccagatcaccaagcagggcgacggcgtggacttcctgagctggttcctgaacgccctgcacagcgccctgggcggcaccaagaagaagaagaagaccatcgtgaccgacgtgttccagggcagcatgagaatcttcaccaagaagctgccccaccccgacctgcccgccgaggagaaggagcagctgctgcacaacgacgagtaccaggagaccatggtggagagcaccttcatgtacctgaccctggacctgcccaccgcccccctgtacaaggacgagaaggagcagctgatcatcccccaggtgcccctgttcaacatcctggccaagttcaacggcatcaccgagaaggagtacaagacctacaaggagaacttcctgaagagattccagctgaccaagctgcccccctacctgatcttctgcatcaagagattcaccaagaacaacttcttcgtggagaagaaccccaccatcgtgaacttccccatcaccaacgtggacctgagagagtacctgagcgaggaggtgcaggccgtgcacaagaacaccacctacgacctgatcgccaacatcgtgcacgacggcaagcccagcgagggcagctacagaatccacgtgctgcaccacggcaccggcaagtggtacgagctgcaggacctgcaggtgaccgacatcctgccccagatgatcaccctgagcgaggcctacatccagatctggaagagaagagacaacgacgagaccaaccagcagggcgcctag

SEQ ID NO: 104403 - DNA, 1698 bp, synthetic construct; identical to SEQ ID NO: 104402
  misc_feature 1..1698: note = Description of Artificial Sequence: Synthetic coding sequence
  source 1..1698: mol_type = other DNA

SEQ ID NO: 104404 - DNA, 1389 bp, synthetic construct
  misc_feature 1..1389: note = Description of Artificial Sequence: Synthetic coding sequence
  source 1..1389: mol_type = other DNA
atgctgaccgccgtgcccagccacctgttcagcgccaagaacggcagagtggacagcgaggacagaagaagcagacactgcccctacctggacaccatcaacagcttcagccccttccccaccggcagaggcctgaagagccacgcctacatccacagcgtgcagttcagccaccacgtgttcctgaacctgcacaccctgaagttctactgcctgcccgacaactacgagatcatcgacagcagcctggaggacatcacctacgtgctgaagcccaccttcaccaagcagcagatcgccaacctggacaagcaggccaagctgagcagagcctacgacggcaccacctacctgcccggcatcgtgggcctgaacaacatcaaggccaacgactacgccaacgccgtgctgcaggccctgagcaacgtgccccccctgagaaactacttcctggaggaggacaactacaagaacatcaagagaccccccggcgacatcatgttcctgctggtgcagagattcggcgagctgatgagaaagctgtggaaccccagaaacttcaaggcccacgtgagcccccacgagatgctgcaggccgtggtgctgtgcagcaagaagaccttccagatcaccaagcagggcgacggcgtggacttcctgagctggttcctgaacgccctgcacagcgccctgggcggcaccaagaagaagaagaagaccatcgtgaccgacgtgttccagggcagcatgagaatcttcaccaagaagctgccccaccccgacctgcccgccgaggagaaggagcagctgctgcacaacgacgagtaccaggagaccatggtggagagcaccttcatgtacctgaccctggacctgcccaccgcccccctgtacaaggacgagaaggagcagctgatcatcccccaggtgcccctgttcaacatcctggccaagttcaacggcatcaccgagaaggagtacaagacctacaaggagaacttcctgaagagattccagctgaccaagctgcccccctacctgatcttctgcatcaagagattcaccaagaacaacttcttcgtggagaagaaccccaccatcgtgaacttccccatcaccaacgtggacctgagagagtacctgagcgaggaggtgcaggccgtgcacaagaacaccacctacgacctgatcgccaacatcgtgcacgacggcaagcccagcgagggcagctacagaatccacgtgctgcaccacggcaccggcaagtggtacgagctgcaggacctgcaggtgaccgacatcctgccccagatgatcaccctgagcgaggcctacatccagatctggaagagaagagacaacgacgagaccaaccagcagggcgcctag

SEQ ID NO: 104405 - DNA, 1467 bp, synthetic construct
  misc_feature 1..1467: note = Description of Artificial Sequence: Synthetic coding sequence
  source 1..1467: mol_type = other DNA
atgagcggcagaagcaagagagagagcagaggcagcaccagaggcaagagagagagcgagagcagaggcagcagcggcagagtgaagagagagagagacagagagagagagcccgaggccgccagcagcagaggcagccccgtgagagtgaagagagagttcgagcccgccagcgccagagaggcccccgccagcgtggtgcccttcgtgagagtgaagagagagagagaggtggacgaggacagcgagcccgagagagaggtgagagccaagaacggcagagtggacagcgaggacagaagaagcagacactgcccctacctggacaccatcaacagaagcgtgctggacttcgacttcgagaagctgtgcagcatcagcctgagccacatcaacgcctacgcctgcctggtgtgcggcaagtacttccagggcagaggcctgaagagccacgcctacatccacagcgtgcagttcagccaccacgtgttcctgaacctgcacaccctgaagttctactgcctgcccgacaactacgagatcatcgacagcagcctggaggacatcacctacgtgctgaagcccaccttcaccaagcagcagatcgccaacctggacaagcaggccaagctgagcagagcctacgacggcaccacctacctgcccggcatcgtgggcctgaacaacatcaaggccaacgactacgccaacgccgtgctgcaggccctgagcaacgtgccccccctgagaaactacttcctggaggaggacaactacaagaacatcaagagaccccccggcgacatcatgttcctgctggtgcagagattcggcgagctgatgagaaagctgtggaaccccagaaacttcaaggcccacgtgagcccccacgagatgctgcaggccgtggtgctgtgcagcaagaagaccttccagatcaccaagcagggcgacggcgtggacttcctgagctggttcctgaacgccctgcacagcgccctgggcggcaccaagaagaagaagaagaccatcgtgaccgacgtgttccagggcagcatgagaatcttcaccaagaagctgccccaccccgacctgcccgccgaggagaaggagcagctgctgcacaacgacgagtaccaggagaccatggtggagagcaccttcatgtacctgaccctggacctgcccaccgcccccctgtacaaggacgagaaggagcagctgatcatcccccaggtgcccctgttcaacatcctggccaagttcaacggcatcaccgagaaggagtacaagacctacaaggagaacttcctgaagagattccagctgaccaagctgcccccctacctgatcttctgcatcaagagattcaccaagaacaacttcttcgtggagaagaaccccaccatcgtgaacttccccatcaccggccaggccaacggcatgaactacaagaccagcagatag

SEQ ID NO: 104406 - DNA, 2892 bp, synthetic construct
  misc_feature 1..2892: note = Description of Artificial Sequence: Synthetic coding sequence
  source 1..2892: mol_type = other DNA
atggccgagggcggcggctgcagagagagacccgacgccgagacccagaagagcgagctgggccccctgatgagaaccaccctgcagagaggcgcccagtggtacctgatcgacagcagatggttcaagcagtggaagaagtacgtgggcttcgacagctgggacatgtacaacgtgggcgagcacaacctgttccccggccccatcgacaacagcggcctgttcagcgaccccgagagccagaccctgaaggagcacctgatcgacgagctggactacgtgctggtgcccaccgaggcctggaacaagctgctgaactggtacggctgcgtggagggccagcagcccatcgtgagaaaggtggtggagcacggcctgttcgtgaagcactgcaaggtggaggtgtacctgctggagctgaagctgtgcgagaacagcgaccccaccaacgtgctgagctgccacttcagcaaggccgacaccatcgccaccatcgagaaggagatgagaaagctgttcaacatccccgccgagagagagaccagactgtggaacaagtacatgagcaacacctacgagcagctgagcaagctggacaacaccgtgcaggacgccggcctgtaccagggccaggtgctggtgatcgagccccagaacgaggacggcacctggcccagacagaccctgcagagcaagagcagcaccgcccccagcagaaacttcaccaccagccccaagagcagcgccagcccctacagcagcgtgagcgccagcctgatcgccaacggcgacagcaccagcacctgcggcatgcacagcagcggcgtgagcagaggcggcagcggcttcagcgccagctacaactgccaggagccccccagcagccacatccagcccggcctgtgcggcctgggcaacctgggcaacacctgcttcatgaacagcgccctgcagtgcctgagcaacaccgcccccctgaccgactacttcctgaaggacgagtacgaggccgagatcaacagagacaaccccctgggcatgaagggcgagatcgccgaggcctacgccgagctgatcaagcagatgtggagcggcagagacgcccacgtggcccccagaatgttcaagacccaggtgggcagattcgccccccagttcagcggctaccagcagcaggacagccaggagctgctggccttcctgctggacggcctgcacgaggacctgaacagagtgaagaagaagccctacctggagctgaaggacgccaacggcagacccgacgccgtggtggccaaggaggcctgggagaaccacagactgagaaacgacagcgtgatcgtggacaccttccacggcctgttcaagagcaccctggtgtgccccgagtgcgccaaggtgagcgtgaccttcgaccccttctgctacctgaccctgcccctgcccctgaagaaggacagagtgatggaggtgttcctggtgcccgccgacccccactgcagacccacccagtacagagtgaccgtgcccctgatgggcgccgtgagcgacctgtgcgaggccctgagcagactgagcggcatcgccgccgagaacatggtggtggccgacgtgtacaaccacagattccacaagatcttccagatggacgagggcctgaaccacatcatgcccagagacgacatcttcgtgtacgaggtgtgcagcaccagcgtggacggcagcgagtgcgtgaccctgcccgtgtacttcagagagagaaagagcagacccagcagcaccagcagcgccagcgccctgtacggccagcccctgctgctgagcgtgcccaagcacaagctgaccctggagagcctgtaccaggccgtgtgcgacagaatcagcagatacgtgaagcagcccctgcccgacgagttcggcagcagccccctggagcccggcgcctgcaacggcagcagaaacagctgcgagggcgaggacgaggaggagatggagcaccaggaggagggcaaggagcagctgagcgagaccgagggcagcggcgaggacgagcccggcaacgaccccagcgagaccacccagaagaagatcaagggccagccctgccccaagagactgttcaccttcagcctggtgaacagctacggcaccgccgacatcaacagcctggccgccgacggcaagctgctgaagctgaacagcagaagcaccctggccatggactgggacagcgagaccagaagactgtactacgacgagcaggagagcgaggcctacgagaagcacgtgagcatgctgcagccccagaagaagaagaagaccaccgtggccctgagagactgcatcgagctgttcaccaccatggagaccctgggcgagcacgacccctggtactgccccaactgcaagaagcaccagcaggccaccaagaagttcgacctgtggagcctgcccaagatcctggtggtgcacctgaagagattcagctacaacagatactggagagacaagctggacaccgtggtggagttccccatcagaggcctgaacatgagcgagttcgtgtgcaacctgagcgccagaccctacgtgtacgacctgatcgccgtgagcaaccactacggcgccatgggcgtgggccactacaccgcctacgccaagaacaagctgaacggcaagtggtactacttcgacgacagcaacgtgagcctggccagcgaggaccagatcgtgaccaaggccgcctacgtgctgttctaccagagaagagacgacgagttctacaagacccccagcctgagcagcagcggcagcagcgacggcggcaccagacccagcagcagccagcagggcttcggcgacgacgaggcctgcagcatggacaccaactag

SEQ ID NO: 104407 - DNA, 2751 bp, synthetic construct
  misc_feature 1..2751: note = Description of Artificial Sequence: Synthetic coding sequence
  source 1..2751: mol_type = other DNA
atggccgagggcggcggctgcagagagagacccgacgccgagacccagaagagcgagctgggccccctgatgagaaccaccctgcagagaggcgcccagtggtacctgatcgacagcagatggttcaagcagtggaagaagtacgtgggcttcgacagctgggacatgtacaacgtgggcgagcacaacctgttccccggccccatcgacaacagcggcctgttcagcgaccccgagagccagaccctgaaggagcacctgatcgacgagctggactacgtgctggtgcccaccgaggcctggaacaagctgctgaactggtacggctgcgtggagggccagcagcccatcgtgagaaaggtggtggagcacggcctgttcgtgaagcactgcaaggtggaggtgtacctgctggagctgaagctgtgcgagaacagcgaccccaccaacgtgctgagctgccacttcagcaaggccgacaccatcgccaccatcgagaaggagatgagaaagctgttcaacatccccgccgagagagagaccagactgtggaacaagtacatgagcaacacctacgagcagctgagcaagctggacaacaccgtgcaggacgccggcctgtaccagggccaggtgctggtgatcgagccccagaacgaggacggcacctggcccagacagaccctgcagagcaacggcagcggcttcagcgccagctacaactgccaggagccccccagcagccacatccagcccggcctgtgcggcctgggcaacctgggcaacacctgcttcatgaacagcgccctgcagtgcctgagcaacaccgcccccctgaccgactacttcctgaaggacgagtacgaggccgagatcaacagagacaaccccctgggcatgaagggcgagatcgccgaggcctacgccgagctgatcaagcagatgtggagcggcagagacgcccacgtggcccccagaatgttcaagacccaggtgggcagattcgccccccagttcagcggctaccagcagcaggacagccaggagctgctggccttcctgctggacggcctgcacgaggacctgaacagagtgaagaagaagccctacctggagctgaaggacgccaacggcagacccgacgccgtggtggccaaggaggcctgggagaaccacagactgagaaacgacagcgtgatcgtggacaccttccacggcctgttcaagagcaccctggtgtgccccgagtgcgccaaggtgagcgtgaccttcgaccccttctgctacctgaccctgcccctgcccctgaagaaggacagagtgatggaggtgttcctggtgcccgccgacccccactgcagacccacccagtacagagtgaccgtgcccctgatgggcgccgtgagcgacctgtgcgaggccctgagcagactgagcggcatcgccgccgagaacatggtggtggccgacgtgtacaaccacagattccacaagatcttccagatggacgagggcctgaaccacatcatgcccagagacgacatcttcgtgtacgaggtgtgcagcaccagcgtggacggcagcgagtgcgtgaccctgcccgtgtacttcagagagagaaagagcagacccagcagcaccagcagcgccagcgccctgtacggccagcccctgctgctgagcgtgcccaagcacaagctgaccctggagagcctgtaccaggccgtgtgcgacagaatcagcagatacgtgaagcagcccctgcccgacgagttcggcagcagccccctggagcccggcgcctgcaacggcagcagaaacagctgcgagggcgaggacgaggaggagatggagcaccaggaggagggcaaggagcagctgagcgagaccgagggcagcggcgaggacgagcccggcaacgaccccagcgagaccacccagaagaagatcaagggccagccctgccccaagagactgttcaccttcagcctggtgaacagctacggcaccgccgacatcaacagcctggccgccgacggcaagctgctgaagctgaacagcagaagcaccctggccatggactgggacagcgagaccagaagactgtactacgacgagcaggagagcgaggcctacgagaagcacgtgagcatgctgcagccccagaagaagaagaagaccaccgtggccctgagagactgcatcgagctgttcaccaccatggagaccctgggcgagcacgacccctggtactgccccaactgcaagaagcaccagcaggccaccaagaagttcgacctgtggagcctgcccaagatcctggtggtgcacctgaagagattcagctacaacagatactggagagacaagctggacaccgtggtggagttccccatcagaggcctgaacatgagcgagttcgtgtgcaacctgagcgccagaccctacgtgtacgacctgatcgccgtgagcaaccactacggcgccatgggcgtgggccactacaccgcctacgccaagaacaagctgaacggcaagtggtactacttcgacgacagcaacgtgagcctggccagcgaggaccagatcgtgaccaaggccgcctacgtgctgttctaccagagaagagacgacgagttctacaagacccccagcctgagcagcagcggcagcagcgacggcggcaccagacccagcagcagccagcagggcttcggcgacgacgaggcctgcagcatggacaccaactag

SEQ ID NO: 104408 - DNA, 942 bp, synthetic construct
  misc_feature 1..942: note = Description of Artificial Sequence: Synthetic coding sequence
  source 1..942: mol_type = other DNA
atggccgagggcggcggctgcagagagagacccgacgccgagacccagaagagcgagctgggccccctgatgagaaccaccctgcagagaggcgcccagtggtacctgatcgacagcagatggttcaagcagtggaagaagtacgtgggcttcgacagctgggacatgtacaacgtgggcgagcacaacctgttccccggccccatcgacaacagcggcctgttcagcgaccccgagagccagaccctgaaggagcacctgatcgacgagctggactacgtgctggtgcccaccgaggcctggaacaagctgctgaactggtacggctgcgtggagggccagcagcccatcgtgagaaaggtggtggagcacggcctgttcgtgaagcactgcaaggtggaggtgtacctgctggagctgaagctgtgcgagaacagcgaccccaccaacgtgctgagctgccacttcagcaaggccgacaccatcgccaccatcgagaaggagatgagaaagctgttcaacatccccgccgagagagagaccagactgtggaacaagtacatgagcaacacctacgagcagctgagcaagctggacaacaccgtgcaggacgccggcctgtaccagggccaggtgctggtgatcgagccccagaacgaggacggcacctggcccagacagaccctgcagagcaaggtgagcttcttcctgcccagactggagtgcaacggcgccatcctggcccactgcaacttctgcctgcccggcagcagcaacagccccgccagcgccagcagagtggcccccagccacctggccaacttcttcttcttcgagatggagagccacagcgtgaccaagctggagtgcggcggcgccgtgagcgcctacagcagagtgcaggtgatgctgctgccccagccccccgagtggctgggctag

SEQ ID NO: 104409 - DNA, 2139 bp, synthetic construct
  misc_feature 1..2139: note = Description of Artificial Sequence: Synthetic coding sequence
  source 1..2139: mol_type = other DNA
atgctggccatggacacctgcaagcacgtgggccagctgcagctggcccaggaccacagcagcctgaacccccagaagtggcactgcgtggactgcaacaccaccgagagcatctgggcctgcctgagctgcagccacgtggcctgcggcagatacatcgaggagcacgccctgaagcacttccaggagagcagccaccccgtggccctggaggtgaacgagatgtacgtgttctgctacctgtgcgacgactacgtgctgaacgacaacaccaccggcgacctgaagctgctgagaagaaccctgagcgccatcaagagccagaactaccactgcaccaccagaagcggcagattcctgagaagcatgggcaccggcgacgacagctacttcctgcacgacggcgcccagagcctgctgcagagcgaggaccagctgtacaccgccctgtggcacagaagaagaatcctgatgggcaagatcttcagaacctggttcgagcagagccccatcggcagaaagaagcaggaggagcccttccaggagaagatcgtggtgaagagagaggtgaagaagagaagacaggagctggagtaccaggtgaaggccgagctggagagcatgccccccagaaagagcctgagactgcagggcctggcccagagcaccatcatcgagatcgtgagcgtgcaggtgcccgcccagacccccgccagccccgccaaggacaaggtgctgagcaccagcgagaacgagatcagccagaaggtgagcgacagcagcgtgaagagaagacccatcgtgacccccggcgtgaccggcctgagaaacctgggcaacacctgctacatgaacagcgtgctgcaggtgctgagccacctgctgatcttcagacagtgcttcctgaagctggacctgaaccagtggctggccatgaccgccagcgagaagaccagaagctgcaagcacccccccgtgaccgacaccgtggtgtaccagatgaacgagtgccaggagaaggacaccggcttcgtgtgcagcagacagagcagcctgagcagcggcctgagcggcggcgccagcaagggcagaaagatggagctgatccagcccaaggagcccaccagccagtacatcagcctgtgccacgagctgcacaccctgttccaggtgatgtggagcggcaagtgggccctggtgagccccttcgccatgctgcacagcgtgtggagactgatccccgccttcagaggctacgcccagcaggacgcccaggagttcctgtgcgagctgctggacaagatccagagagagctggagaccaccggcaccagcctgcccgccctgatccccaccagccagagaaagctgatcaagcaggtgctgaacgtggtgaacaacatcttccacggccagctgctgagccaggtgacctgcctggcctgcgacaacaagagcaacaccatcgagcccttctgggacctgagcctggagttccccgagagataccagtgcagcggcaaggacatcgccagccagccctgcctggtgaccgagatgctggccaagttcaccgagaccgaggccctggagggcaagatctacgtgtgcgaccagtgcaacagcaagagaagaagattcagcagcaagcccgtggtgctgaccgaggcccagaagcagctgatgatctgccacctgccccaggtgctgagactgcacctgaagagattcagatggagcggcagaaacaacagagagaagatcggcgtgcacgtgggcttcgaggagatcctgaacatggagccctactgctgcagagagaccctgaagagcctgagacccgagtgcttcatctacgacctgagcgccgtggtgatgcaccacggcaagggcttcggcagcggccactacaccgcctactgctacaacagcgagggcggcttctgggtgcactgcaacgacagcaagctgagcatgtgcaccatggacgaggtgtgcaaggcccaggcctacatcctgttctacacccagagagtgaccgagaacggccacagcaagctgctgccccccgagctgctgctgggcagccagcaccccaacgaggacgccgacaccagcagcaacgagatcctgagctag

SEQ ID NO: 104410 - DNA, 2139 bp, synthetic construct; identical to SEQ ID NO: 104409
  misc_feature 1..2139: note = Description of Artificial Sequence: Synthetic coding sequence
  source 1..2139: mol_type = other DNA

SEQ ID NO: 104411 - DNA, 2139 bp, synthetic construct; identical to SEQ ID NO: 104409
  misc_feature 1..2139: note = Description of Artificial Sequence: Synthetic coding sequence
  source 1..2139: mol_type = other DNA

SEQ ID NO: 104412 - DNA, 336 bp, synthetic construct
  misc_feature 1..336: note = Description of Artificial Sequence: Synthetic coding sequence
  source 1..336: mol_type = other DNA
atgctggccatggacacctgcaagcacgtgggccagctgcagctggcccaggaccacagcagcctgaacccccagaagtggcactgcgtggactgcaacaccaccgagagcatctgggcctgcctgagctgcagccacgtggcctgcggcagatacatcgaggagcacgccctgaagcacttccaggagagcagccaccccgtggccctggaggtgaacgagatgtacgtgttctgctacctgtgcgacgactacgtgctgaacgacaacaccaccggcgacctgaagctgctgagaagaaccctgagcgccatcaagagccagaactaccactag

SEQ ID NO: 104413 - DNA, 495 bp, synthetic construct
  misc_feature 1..495: note = Description of Artificial Sequence: Synthetic coding sequence
  source 1..495: mol_type = other DNA
atgctggccatggacacctgcaagcacgtgggccagctgcagctggcccaggaccacagcagcctgaacccccagaagtggcactgcgtggactgcaacaccaccgagagcatctgggcctgcctgagctgcagccacgtggcctgcggcagatacatcgaggagcacgccctgaagcacttccaggagagcagccaccccgtggccctggaggtgaacgagatgtacgtgttctgctacctgtgcgacgactacgtgctgaacgacaacaccaccggcgacctgaagctgctgagaagaaccctgagcgccatcaagagccagaactaccactgcaccaccagaagcggcagattcctgagaagcatgggcaccggcgacgacagctacttcctgcacgacggcgcccagagcctgctgcagagcgaggaccagctgtacaccgccctgtggcacagaagaagaatcctgatgggcaagatcttcagaacctag

SEQ ID NO: 104414 - DNA, 1101 bp, synthetic construct
  misc_feature 1..1101: note = Description of Artificial Sequence: Synthetic coding sequence
  source 1..1101: mol_type = other DNA
atgaccgtgagaaacatcgccagcatctgcaacatgggcaccaacgccagcgccctggagaaggacatcggccccgagcagttccccatcaacgagcactacttcggcctggtgaacttcggcaacacctgctactgcaacagcgtgctgcaggccctgtacttctgcagacccttcagagagaacgtgctggcctacaaggcccagcagaagaagaaggagaacctgctgacctgcctggccgacctgttccacagcatcgccacccagaagaagaaggtgggcgtgatcccccccaagaagttcatcagcagactgagaaaggagaacgacctgttcgacaactacatgcagcaggacgcccacgagttcctgaactacctgctgaacaccatcgccgacatcctgcaggaggagaagaagcaggagaagcagaacggcaagctgaagaacggcaacatgaacgagcccgccgagaacaacaagcccgagctgacctgggtgcacgagatcttccagggcaccctgaccaacgagaccagatgcctgaactgcgagaccgtgagcagcaaggacgaggacttcctggacctgagcgtggacgtggagcagaacaccagcatcacccactgcctgagagacttcagcaacaccgagaccctgtgcagcgagcagaagtactactgcgagacctgctgcagcaagcaggaggcccagaagagaatgagagtgaagaagctgcccatgatcctggccctgcacctgaagagattcaagtacatggagcagctgcacagatacaccaagctgagctacagagtggtgttccccctggagctgagactgttcaacaccagcagcgacgccgtgaacctggacagaatgtacgacctggtggccgtggtggtgcactgcggcagcggccccaacagaggccactacatcaccatcgtgaagagccacggcttctggctgctgttcgacgacgacatcgtggagaagatcgacgcccaggccatcgaggagttctacggcctgaccagcgacatcagcaagaacagcgagagcggctacatcctgttctaccagagcagagagtag

SEQ ID NO: 104415 - DNA, 1080 bp, synthetic construct
  misc_feature 1..1080: note = Description of Artificial Sequence: Synthetic coding sequence
  source 1..1080: mol_type = other DNA
atgaactgcttccagggcaccaacgccagcgccctggagaaggacatcggccccgagcagttccccatcaacgagcactacttcggcctggtgaacttcggcaacacctgctactgcaacagcgtgctgcaggccctgtacttctgcagacccttcagagagaacgtgctggcctacaaggcccagcagaagaagaaggagaacctgctgacctgcctggccgacctgttccacagcatcgccacccagaagaagaaggtgggcgtgatcccccccaagaagttcatcagcagactgagaaaggagaacgacctgttcgacaactacatgcagcaggacgcccacgagttcctgaactacctgctgaacaccatcgccgacatcctgcaggaggagaagaagcaggagaagcagaacggcaagctgaagaacggcaacatgaacgagcccgccgagaacaacaagcccgagctgacctgggtgcacgagatcttccagggcaccctgaccaacgagaccagatgcctgaactgcgagaccgtgagcagcaaggacgaggacttcctggacctgagcgtggacgtggagcagaacaccagcatcacccactgcctgagagacttcagcaacaccgagaccctgtgcagcgagcagaagtactactgcgagacctgctgcagcaagcaggaggcccagaagagaatgagagtgaagaagctgcccatgatcctggccctgcacctgaagagattcaagtacatggagcagctgcacagatacaccaagctgagctacagagtggtgttccccctggagctgagactgttcaacaccagcagcgacgccgtgaacctggacagaatgtacgacctggtggccgtggtggtgcactgcggcagcggccccaacagaggccactacatcaccatcgtgaagagccacggcttctggctgctgttcgacgacgacatcgtggagaagatcgacgcccaggccatcgaggagttctacggcctgaccagcgacatcagcaagaacagcgagagcggctacatcctgttctaccagagcagagagtag

SEQ ID NO: 104416 - DNA, 4221 bp, synthetic construct
  misc_feature 1..4221: note = Description of Artificial Sequence: Synthetic coding sequence
  source 1..4221: mol_type = other DNA
atggacatggtggagaacgccgacagcctgcaggcccaggagagaaaggacatcctgatgaagtacgacaagggccacagagccggcctgcccgaggacaagggccccgagcccgtgggcatcaacagcagcatcgacagattcggcatcctgcacgagaccgagctgccccccgtgaccgccagagaggccaagaagatcagaagagagatgaccagaaccagcaagtggatggagatgctgggcgagtgggagacctacaagcacagcagcaagctgatcgacagagtgtacaagggcatccccatgaacatcagaggccccgtgtggagcgtgctgctgaacatccaggagatcaagctgaagaaccccggcagataccagatcatgaaggagagaggcaagagaagcagcgagcacatccaccacatcgacctggacgtgagaaccaccctgagaaaccacgtgttcttcagagacagatacggcgccaagcagagagagctgttctacatcctgctggcctacagcgagtacaaccccgaggtgggctactgcagagacctgagccacatcaccgccctgttcctgctgtacctgcccgaggaggacgccttctgggccctggtgcagctgctggccagcgagagacacagcctgcccggcttccacagccccaacggcggcaccgtgcagggcctgcaggaccagcaggagcacgtggtgcccaagagccagcccaagaccatgtggcaccaggacaaggagggcctgtgcggccagtgcgccagcctgggctgcctgctgagaaacctgatcgacggcatcagcctgggcctgaccctgagactgtgggacgtgtacctggtggagggcgagcaggtgctgatgcccatcaccagcatcgccctgaaggtgcagcagaagagactgatgaagaccagcagatgcggcctgtgggccagactgagaaaccagttcttcgacacctgggccatgaacgacgacaccgtgctgaagcacctgagagccagcaccaagaagctgaccagaaagcagggcgacctgcccccccccgccaagagagagcagggcagcctggcccccagacccgtgcccgccagcagaggcggcaagaccctgtgcaagggctacagacaggccccccccggcccccccgcccagttccagagacccatctgcagcgccagccccccctgggccagcagattcagcaccccctgccccggcggcgccgtgagagaggacacctaccccgtgggcacccagggcgtgcccagcctggccctggcccagggcggcccccagggcagctggagattcctggagtggaagagcatgcccagactgcccaccgacctggacatcggcggcccctggttcccccactacgacttcgagtggagctgctgggtgagagccatcagccaggaggaccagctggccacctgctggcaggccgagcactgcggcgaggtgcacaacaaggacatgagctggcccgaggagatgagcttcaccgccaacagcagcaagatcgacagacagaaggtgcccaccgagaagggcgccaccggcctgagcaacctgggcaacacctgcttcatgaacagcagcatccagtgcgtgagcaacacccagcccctgacccagtacttcatcagcggcagacacctgtacgagctgaacagaaccaaccccatcggcatgaagggccacatggccaagtgctacggcgacctggtgcaggagctgtggagcggcacccagaagagcgtggcccccctgaagctgagaagaaccatcgccaagtacgcccccaagttcgacggcttccagcagcaggacagccaggagctgctggccttcctgctggacggcctgcacgaggacctgaacagagtgcacgagaagccctacgtggagctgaaggacagcgacggcagacccgactgggaggtggccgccgaggcctgggacaaccacctgagaagaaacagaagcatcatcgtggacctgttccacggccagctgagaagccaggtgaagtgcaagacctgcggccacatcagcgtgagattcgaccccttcaacttcctgagcctgcccctgcccatggacagctacatggacctggagatcaccgtgatcaagctggacggcaccacccccgtgagatacggcctgagactgaacatggacgagaagtacaccggcctgaagaagcagctgagagacctgtgcggcctgaacagcgagcagatcctgctggccgaggtgcacgacagcaacatcaagaacttcccccaggacaaccagaaggtgcagctgagcgtgagcggcttcctgtgcgccttcgagatccccgtgcccagcagccccatcagcgccagcagccccacccagatcgacttcagcagcagccccagcaccaacggcatgttcaccctgaccaccaacggcgacctgcccaagcccatcttcatccccaacggcatgcccaacaccgtggtgccctgcggcaccgagaagaacttcaccaacggcatggtgaacggccacatgcccagcctgcccgacagccccttcaccggctacatcatcgccgtgcacagaaagatgatgagaaccgagctgtacttcctgagcccccaggagaacagacccagcctgttcggcatgcccctgatcgtgccctgcaccgtgcacaccagaaagaaggacctgtacgacgccgtgtggatccaggtgagctggctggccagacccctgcccccccaggaggccagcatccacgcccaggacagagacaactgcatgggctaccagtaccccttcaccctgagagtggtgcagaaggacggcaacagctgcgcctggtgcccccagtacagattctgcagaggctgcaagatcgactgcggcgaggacagagccttcatcggcaacgcctacatcgccgtggactggcaccccaccgccctgcacctgagataccagaccagccaggagagagtggtggacaagcacgagagcgtggagcagagcagaagagcccaggccgagcccatcaacctggacagctgcctgagagccttcaccagcgaggaggagctgggcgagagcgagatgtactactgcagcaagtgcaagacccactgcctggccaccaagaagctggacctgtggagactgccccccttcctgatcatccacctgaagagattccagttcgtgaacgaccagtggatcaagagccagaagatcgtgagattcctgagagagagcttcgaccccagcgccttcctggtgcccagagaccccgccctgtgccagcacaagcccctgaccccccagggcgacgagctgagcaagcccagaatcctggccagagaggtgaagaaggtggacgcccagagcagcgccggcaaggaggacatgctgctgagcaagagccccagcagcctgagcgccaacatcagcagcagccccaagggcagccccagcagcagcagaaagagcggcaccagctgccccagcagcaagaacagcagccccaacagcagccccagaaccctgggcagaagcaagggcagactgagactgccccagatcggcagcaagaacaagcccagcagcagcaagaagaacctggacgccagcaaggagaacggcgccggccagatctgcgagctggccgacgccctgagcagaggccacatgagaggcggcagccagcccgagctggtgaccccccaggaccacgaggtggccctggccaacggcttcctgtacgagcacgaggcctgcggcaacggctgcggcgacggctacagcaacggccagctgggcaaccacagcgaggaggacagcaccgacgaccagagagaggacacccacatcaagcccatctacaacctgtacgccatcagctgccacagcggcatcctgagcggcggccactacatcacctacgccaagaaccccaactgcaagtggtactgctacaacgacagcagctgcgaggagctgcaccccgacgagatcgacaccgacagcgcctacatcctgttctacgagcagcagggcatcgactacgcccagttcctgcccaagatcgacggcaagaagatggccgacaccagcagcaccgacgaggacagcgagagcgactacgagaagtacagcatgctgcagtag

SEQ ID NO: 104417 - DNA, 3270 bp, synthetic construct
  misc_feature 1..3270: note = Description of Artificial Sequence: Synthetic coding sequence
  source 1..3270: mol_type = other DNA
atgccccagagactgccccacgccagacagcacacccccctgcccctgggcagcgccgactacagaagagtggtgagcgtgagaccccagggcccccacagagaccccaaggacagcagagacgccgccaagagagagcagggcagcctggcccccagacccgtgcccgccagcagaggcggcaagaccctgtgcaagggctacagacaggccccccccggcccccccgcccagttccagagacccatctgcagcgccagccccccctgggccagcagattcagcaccccctgccccggcggcgccgtgagagaggacacctaccccgtgggcacccagggcgtgcccagcctggccctggcccagggcggcccccagggcagctggagattcctggagtggaagagcatgcccagactgcccaccgacctggacatcggcggcccctggttcccccactacgacttcgagtggagctgctgggtgagagccatcagccaggaggaccagctggccacctgctggcaggccgagcactgcggcgaggtgcacaacaaggacatgagctggcccgaggagatgagcttcaccgccaacagcagcaagatcgacagacagaaggtgcccaccgagaagggcgccaccggcctgagcaacctgggcaacacctgcttcatgaacagcagcatccagtgcgtgagcaacacccagcccctgacccagtacttcatcagcggcagacacctgtacgagctgaacagaaccaaccccatcggcatgaagggccacatggccaagtgctacggcgacctggtgcaggagctgtggagcggcacccagaagagcgtggcccccctgaagctgagaagaaccatcgccaagtacgcccccaagttcgacggcttccagcagcaggacagccaggagctgctggccttcctgctggacggcctgcacgaggacctgaacagagtgcacgagaagccctacgtggagctgaaggacagcgacggcagacccgactgggaggtggccgccgaggcctgggacaaccacctgagaagaaacagaagcatcatcgtggacctgttccacggccagctgagaagccaggtgaagtgcaagacctgcggccacatcagcgtgagattcgaccccttcaacttcctgagcctgcccctgcccatggacagctacatggacctggagatcaccgtgatcaagctggacggcaccacccccgtgagatacggcctgagactgaacatggacgagaagtacaccggcctgaagaagcagctgagagacctgtgcggcctgaacagcgagcagatcctgctggccgaggtgcacgacagcaacatcaagaacttcccccaggacaaccagaaggtgcagctgagcgtgagcggcttcctgtgcgccttcgagatccccgtgcccagcagccccatcagcgccagcagccccacccagatcgacttcagcagcagccccagcaccaacggcatgttcaccctgaccaccaacggcgacctgcccaagcccatcttcatccccaacggcatgcccaacaccgtggtgccctgcggcaccgagaagaacttcaccaacggcatggtgaacggccacatgcccagcctgcccgacagccccttcaccggctacatcatcgccgtgcacagaaagatgatgagaaccgagctgtacttcctgagcccccaggagaacagacccagcctgttcggcatgcccctgatcgtgccctgcaccgtgcacaccagaaagaaggacctgtacgacgccgtgtggatccaggtgagctggctggccagacccctgcccccccaggaggccagcatccacgcccaggacagagacaactgcatgggctaccagtaccccttcaccctgagagtggtgcagaaggacggcaacagctgcgcctggtgcccccagtacagattctgcagaggctgcaagatcgactgcggcgaggacagagccttcatcggcaacgcctacatcgccgtggactggcaccccaccgccctgcacctgagataccagaccagccaggagagagtggtggacaagcacgagagcgtggagcagagcagaagagcccaggccgagcccatcaacctggacagctgcctgagagccttcaccagcgaggaggagctgggcgagagcgagatgtactactgcagcaagtgcaagacccactgcctggccaccaagaagctggacctgtggagactgccccccttcctgatcatccacctgaagagattccagttcgtgaacgaccagtggatcaagagccagaagatcgtgagattcctgagagagagcttcgaccccagcgccttcctggtgcccagagaccccgccctgtgccagcacaagcccctgaccccccagggcgacgagctgagcaagcccagaatcctggccagagaggtgaagaaggtggacgcccagagcagcgccggcaaggaggacatgctgctgagcaagagccccagcagcctgagcgccaacatcagcagcagccccaagggcagccccagcagcagcagaaagagcggcaccagctgccccagcagcaagaacagcagccccaacagcagccccagaaccctgggcagaagcaagggcagactgagactgccccagatcggcagcaagaacaagcccagcagcagcaagaagaacctggacgccagcaaggagaacggcgccggccagatctgcgagctggccgacgccctgagcagaggccacatgagaggcggcagccagcccgagctggtgaccccccaggaccacgaggtggccctggccaacggcttcctgtacgagcacgaggcctgcggcaacggctgcggcgacggctacagcaacggccagctgggcaaccacagcgaggaggacagcaccgacgaccagagagaggacacccacatcaagcccatctacaacctgtacgccatcagctgccacagcggcatcctgagcggcggccactacatcacctacgccaagaaccccaactgcaagtggtactgctacaacgacagcagctgcgaggagctgcaccccgacgagatcgacaccgacagcgcctacatcctgttctacgagcagcagggcatcgactacgcccagttcctgcccaagatcgacggcaagaagatggccgacaccagcagcaccgacgaggacagcgagagcgactacgagaagtacagcatgctgcagtag

SEQ ID NO: 104418 - DNA, 2361 bp, synthetic construct
  misc_feature 1..2361: note = Description of Artificial Sequence: Synthetic coding sequence
  source 1..2361: mol_type = other DNA
atggacatggtggagaacgccgacagcctgcaggcccaggagagaaaggacatcctgatgaagtacgacaagggccacagagccggcctgcccgaggacaagggccccgagcccgtgggcatcaacagcagcatcgacagattcggcatcctgcacgagaccgagctgccccccgtgaccgccagagaggccaagaagatcagaagagagatgaccagaaccagcaagtggatggagatgctgggcgagtgggagacctacaagcacagcagcaagctgatcgacagagtgtacaagggcatccccatgaacatcagaggccccgtgtggagcgtgctgctgaacatccaggagatcaagctgaagaaccccggcagataccagatcatgaaggagagaggcaagagaagcagcgagcacatccaccacatcgacctggacgtgagaaccaccctgagaaaccacgtgttcttcagagacagatacggcgccaagcagagagagctgttctacatcctgctggcctacagcgagtacaaccccgaggtgggctactgcagagacctgagccacatcaccgccctgttcctgctgtacctgcccgaggaggacgccttctgggccctggtgcagctgctggccagcgagagacacagcctgcccggcttccacagccccaacggcggcaccgtgcagggcctgcaggaccagcaggagcacgtggtgcccaagagccagcccaagaccatgtggcaccaggacaaggagggcctgtgcggccagtgcgccagcctgggctgcctgctgagaaacctgatcgacggcatcagcctgggcctgaccctgagactgtgggacgtgtacctggtggagggcgagcaggtgctgatgcccatcaccagcatcgccctgaaggtgcagcagaagagactgatgaagaccagcagatgcggcctgtgggccagactgagaaaccagttcttcgacacctgggccatgaacgacgacaccgtgctgaagcacctgagagccagcaccaagaagctgaccagaaagcagggcgacctgcccccccccgccaagagagagcagggcagcctggcccccagacccgtgcccgccagcagaggcggcaagaccctgtgcaagggctacagacaggccccccccggcccccccgcccagttccagagacccatctgcagcgccagccccccctgggccagcagattcagcaccccctgccccggcggcgccgtgagagaggacacctaccccgtgggcacccagggcgtgcccagcctggccctggcccagggcggcccccagggcagctggagattcctggagtggaagagcatgcccagactgcccaccgacctggacatcggcggcccctggttcccccactacgacttcgagtggagctgctgggtgagagccatcagccaggaggaccagctggccacctgctggcaggccgagcactgcggcgaggtgcacaacaaggacatgagctggcccgaggagatgagcttcaccgccaacagcagcaagatcgacagacagaaggtgcccaccgagaagggcgccaccggcctgagcaacctgggcaacacctgcttcatgaacagcagcatccagtgcgtgagcaacacccagcccctgacccagtacttcatcagcggcagacacctgtacgagctgaacagaaccaaccccatcggcatgaagggccacatggccaagtgctacggcgacctggtgcaggagctgtggagcggcacccagaagagcgtggcccccctgaagctgagaagaaccatcgccaagtacgcccccaagttcgacggcttccagcagcaggacagccaggagctgctggccttcctgctggacggcctgcacgaggacctgaacagagtgcacgagaagccctacgtggagctgaaggacagcgacggcagacccgactgggaggtggccgccgaggcctgggacaaccacctgagaagaaacagaagcatcatcgtggacctgttccacggccagctgagaagccaggtgaagtgcaagacctgcggccacatcagcgtgagattcgaccccttcaacttcctgagcctgcccctgcccatggacagctacatggacctggagatcaccgtgatcaagctggacggcaccacccccgtgagatacggcctgagactgaacatggacgagaagtacaccggcctgaagaagcagctgagagacctgtgcggcctgaacagcgagcagatcctgctggccgaggtgcacgacagcaacatcaagatcagccccctgcaccacctgcagatggagtgcagcccctag

SEQ ID NO: 104419 - DNA, 84 bp, synthetic construct
  misc_feature 1..84: note = Description of Artificial Sequence: Synthetic coding sequence
  source 1..84: mol_type = other DNA
atggacatggtggagaacgccgacagcctgcaggcccaggagagaaaggacatcctgatgaagtacgacaagggccacagatag

SEQ ID NO: 104420 - DNA, 174 bp, synthetic construct
  misc_feature 1..174: note = Description of Artificial Sequence: Synthetic coding sequence
  source 1..174: mol_type = other DNA
atggacatggtggagaacgccgacagcctgcaggcccaggagagaaaggacatcctgatgaagtacgacaagggccacagagccggcctgcccgaggacaagggcagccccctggagagcaccgccgccctgatcgtgctggccttctgcatgagaagaagctgcctgctgtag

SEQ ID NO: 104421 - DNA, 3309 bp, synthetic construct
  misc_feature 1..3309: note = Description of Artificial Sequence: Synthetic coding sequence
  source 1..3309: mol_type = other DNA
atgaaccaccagcagcagcagcagcagcagaaggccggcgagcagcagctgagcgagcccgaggacatggagatggaggccggcgacaccgacgacccccccagaatcacccagaaccccgtgatcaacggcaacgtggccctgagcgacggccacaacaccgccgaggaggacatggaggacgacaccagctggagaagcgaggccaccttccagttcaccgtggagagattcagcagactgagcgagagcgtgctgagccccccctgcttcgtgagaaacctgccctggaagatcatggtgatgcccagattctaccccgacagaccccaccagaagagcgtgggcttcttcctgcagtgcaacgccgagagcgacagcaccagctggagctgccacgcccaggccgtgctgaagatcatcaactacagagacgacgagaagagcttcagcagaagaatcagccacctgttcttccacaaggagaacgactggggcttcagcaacttcatggcctggagcgaggtgaccgaccccgagaagggcttcatcgacgacgacaaggtgaccttcgaggtgttcgtgcaggccgacgccccccacggcgtggcctgggacagcaagaagcacaccggctacgtgggcctgaagaaccagggcgccacctgctacatgaacagcctgctgcagaccctgttcttcaccaaccagctgagaaaggccgtgtacatgatgcccaccgagggcgacgacagcagcaagagcgtgcccctggccctgcagagagtgttctacgagctgcagcacagcgacaagcccgtgggcaccaagaagctgaccaagagcttcggctgggagaccctggacagcttcatgcagcacgacgtgcaggagctgtgcagagtgctgctggacaacgtggagaacaagatgaagggcacctgcgtggagggcaccatccccaagctgttcagaggcaagatggtgagctacatccagtgcaaggaggtggactacagaagcgacagaagagaggactactacgacatccagctgagcatcaagggcaagaagaacatcttcgagagcttcgtggactacgtggccgtggagcagctggacggcgacaacaagtacgacgccggcgagcacggcctgcaggaggccgagaagggcgtgaagttcctgaccctgccccccgtgctgcacctgcagctgatgagattcatgtacgacccccagaccgaccagaacatcaagatcaacgacagattcgagttccccgagcagctgcccctggacgagttcctgcagaagaccgaccccaaggaccccgccaactacatcctgcacgccgtgctggtgcacagcggcgacaaccacggcggccactacgtggtgtacctgaaccccaagggcgacggcaagtggtgcaagttcgacgacgacgtggtgagcagatgcaccaaggaggaggccatcgagcacaactacggcggccacgacgacgacctgagcgtgagacactgcaccaacgcctacatgctggtgtacatcagagagagcaagctgagcgaggtgctgcaggccgtgaccgaccacgacatcccccagcagctggtggagagactgcaggaggagaagagaatcgaggcccagaagagaaaggagagacaggaggcccacctgtacatgcaggtgcagatcgtggccgaggaccagttctgcggccaccagggcaacgacatgtacgacgaggagaaggtgaagtacaccgtgttcaaggtgctgaagaacagcagcctggccgagttcgtgcagagcctgagccagaccatgggcttcccccaggaccagatcagactgtggcccatgcaggccagaagcaacggcaccaagagacccgccatgctggacaacgaggccgacggcaacaagaccatgatcgagctgagcgacaacgagaacccctggaccatcttcctggagaccgtggaccccgagctggccgccagcggcgccaccctgcccaagttcgacaaggaccacgacgtgatgctgttcctgaagatgtacgaccccaagaccagaagcctgaactactgcggccacatctacacccccatcagctgcaagatcagagacctgctgcccgtgatgtgcgacagagccggcttcatccaggacaccagcctgatcctgtacgaggaggtgaagcccaacctgaccgagagaatccaggactacgacgtgagcctggacaaggccctggacgagctgatggacggcgacatcatcgtgttccagaaggacgaccccgagaacgacaacagcgagctgcccaccgccaaggagtacttcagagacctgtaccacagagtggacgtgatcttctgcgacaagaccatccccaacgaccccggcttcgtggtgaccctgagcaacagaatgaactacttccaggtggccaagaccgtggcccagagactgaacaccgaccccatgctgctgcagttcttcaagagccagggctacagagacggccccggcaaccccctgagacacaactacgagggcaccctgagagacctgctgcagttcttcaagcccagacagcccaagaagctgtactaccagcagctgaagatgaagatcaccgacttcgagaacagaagaagcttcaagtgcatctggctgaacagccagttcagagaggaggagatcaccctgtaccccgacaagcacggctgcgtgagagacctgctggaggagtgcaagaaggccgtggagctgggcgagaaggccagcggcaagctgagactgctggagatcgtgagctacaagatcatcggcgtgcaccaggaggacgagctgctggagtgcctgagccccgccaccagcagaaccttcagaatcgaggagatccccctggaccaggtggacatcgacaaggagaacgagatgctggtgaccgtggcccacttccacaaggaggtgttcggcaccttcggcatccccttcctgctgagaatccaccagggcgagcacttcagagaggtgatgaagagaatccagagcctgctggacatccaggagaaggagttcgagaagttcaagttcgccatcgtgatgatgggcagacaccagtacatcaacgaggacgagtacgaggtgaacctgaaggacttcgagccccagcccggcaacatgagccaccccagaccctggctgggcctggaccacttcaacaaggcccccaagagaagcagatacacctacctggagaaggccatcaagatccacaactag

SEQ ID NO: 104422 - DNA, 3333 bp, synthetic construct
  misc_feature 1..3333: note = Description of Artificial Sequence: Synthetic coding sequence
  source 1..3333: mol_type = other DNA
tgcagccacagcgacgtgggcgagagaaccagccccatcccccagcagagacccctgcagagccacgccgagatggccggcaaccacagactgggcctggaggccggcgacaccgacgacccccccagaatcacccagaaccccgtgatcaacggcaacgtggccctgagcgacggccacaacaccgccgaggaggacatggaggacgacaccagctggagaagcgaggccaccttccagttcaccgtggagagattcagcagactgagcgagagcgtgctgagccccccctgcttcgtgagaaacctgccctggaagatcatggtgatgcccagattctaccccgacagaccccaccagaagagcgtgggcttcttcctgcagtgcaacgccgagagcgacagcaccagctggagctgccacgcccaggccgtgctgaagatcatcaactacagagacgacgagaagagcttcagcagaagaatcagccacctgttcttccacaaggagaacgactggggcttcagcaacttcatggcctggagcgaggtgaccgaccccgagaagggcttcatcgacgacgacaaggtgaccttcgaggtgttcgtgcaggccgacgccccccacggcgtggcctgggacagcaagaagcacaccggctacgtgggcctgaagaaccagggcgccacctgctacatgaacagcctgctgcagaccctgttcttcaccaaccagctgagaaaggccgtgtacatgatgcccaccgagggcgacgacagcagcaagagcgtgcccctggccctgcagagagtgttctacgagctgcagcacagcgacaagcccgtgggcaccaagaagctgaccaagagcttcggctgggagaccctggacagcttcatgcagcacgacgtgcaggagctgtgcagagtgctgctggacaacgtggagaacaagatgaagggcacctgcgtggagggcaccatccccaagctgttcagaggcaagatggtgagctacatccagtgcaaggaggtggactacagaagcgacagaagagaggactactacgacatccagctgagcatcaagggcaagaagaacatcttcgagagcttcgtggactacgtggccgtggagcagctggacggcgacaacaagtacgacgccggcgagcacggcctgcaggaggccgagaagggcgtgaagttcctgaccctgccccccgtgctgcacctgcagctgatgagattcatgtacgacccccagaccgaccagaacatcaagatcaacgacagattcgagttccccgagcagctgcccctggacgagttcctgcagaagaccgaccccaaggaccccgccaactacatcctgcacgccgtgctggtgcacagcggcgacaaccacggcggccactacgtggtgtacctgaaccccaagggcgacggcaagtggtgcaagttcgacgacgacgtggtgagcagatgcaccaaggaggaggccatcgagcacaactacggcggccacgacgacgacctgagcgtgagacactgcaccaacgcctacatgctggtgtacatcagagagagcaagctgagcgaggtgctgcaggccgtgaccgaccacgacatcccccagcagctggtggagagactgcaggaggagaagagaatcgaggcccagaagagaaaggagagacaggaggcccacctgtacatgcaggtgcagatcgtggccgaggaccagttctgcggccaccagggcaacgacatgtacgacgaggagaaggtgaagtacaccgtgttcaaggtgctgaagaacagcagcctggccgagttcgtgcagagcctgagccagaccatgggcttcccccaggaccagatcagactgtggcccatgcaggccagaagcaacggcaccaagagacccgccatgctggacaacgaggccgacggcaacaagaccatgatcgagctgagcgacaacgagaacccctggaccatcttcctggagaccgtggaccccgagctggccgccagcggcgccaccctgcccaagttcgacaaggaccacgacgtgatgctgttcctgaagatgtacgaccccaagaccagaagcctgaactactgcggccacatctacacccccatcagctgcaagatcagagacctgctgcccgtgatgtgcgacagagccggcttcatccaggacaccagcctgatcctgtacgaggaggtgaagcccaacctgaccgagagaatccaggactacgacgtgagcctggacaaggccctggacgagctgatggacggcgacatcatcgtgttccagaaggacgaccccgagaacgacaacagcgagctgcccaccgccaaggagtacttcagagacctgtaccacagagtggacgtgatcttctgcgacaagaccatccccaacgaccccggcttcgtggtgaccctgagcaacagaatgaactacttccaggtggccaagaccgtggcccagagactgaacaccgaccccatgctgctgcagttcttcaagagccagggctacagagacggccccggcaaccccctgagacacaactacgagggcaccctgagagacctgctgcagttcttcaagcccagacagcccaagaagctgtactaccagcagctgaagatgaagatcaccgacttcgagaacagaagaagcttcaagtgcatctggctgaacagccagttcagagaggaggagatcaccctgtaccccgacaagcacggctgcgtgagagacctgctggaggagtgcaagaaggccgtggagctgggcgagaaggccagcggcaagctgagactgctggagatcgtgagctacaagatcatcggcgtgcaccaggaggacgagctgctggagtgcctgagccccgccaccagcagaaccttcagaatcgaggagatccccctggaccaggtggacatcgacaaggagaacgagatgctggtgaccgtggcccacttccacaaggaggtgttcggcaccttcggcatccccttcctgctgagaatccaccagggcgagcacttcagagaggtgatgaagagaatccagagcctgctggacatccaggagaaggagttcgagaagttcaagttcgccatcgtgatgatgggcagacaccagtacatcaacgaggacgagtacgaggtgaacctgaaggacttcgagccccagcccggcaacatgagccaccccagaccctggctgggcctggaccacttcaacaaggcccccaagagaagcagatacacctacctggagaaggccatcaagatccacaactag

SEQ ID NO: 104423 - DNA, 3012 bp, synthetic construct
  misc_feature 1..3012: note = Description of Artificial Sequence: Synthetic coding sequence
  source 1..3012: mol_type = other DNA
atggtgatgcccagattctaccccgacagaccccaccagaagagcgtgggcttcttcctgcagtgcaacgccgagagcgacagcaccagctggagctgccacgcccaggccgtgctgaagatcatcaactacagagacgacgagaagagcttcagcagaagaatcagccacctgttcttccacaaggagaacgactggggcttcagcaacttcatggcctggagcgaggtgaccgaccccgagaagggcttcatcgacgacgacaaggtgaccttcgaggtgttcgtgcaggccgacgccccccacggcgtggcctgggacagcaagaagcacaccggctacgtgggcctgaagaaccagggcgccacctgctacatgaacagcctgctgcagaccctgttcttcaccaaccagctgagaaaggccgtgtacatgatgcccaccgagggcgacgacagcagcaagagcgtgcccctggccctgcagagagtgttctacgagctgcagcacagcgacaagcccgtgggcaccaagaagctgaccaagagcttcggctgggagaccctggacagcttcatgcagcacgacgtgcaggagctgtgcagagtgctgctggacaacgtggagaacaagatgaagggcacctgcgtggagggcaccatccccaagctgttcagaggcaagatggtgagctacatccagtgcaaggaggtggactacagaagcgacagaagagaggactactacgacatccagctgagcatcaagggcaagaagaacatcttcgagagcttcgtggactacgtggccgtggagcagctggacggcgacaacaagtacgacgccggcgagcacggcctgcaggaggccgagaagggcgtgaagttcctgaccctgccccccgtgctgcacctgcagctgatgagattcatgtacgacccccagaccgaccagaacatcaagatcaacgacagattcgagttccccgagcagctgcccctggacgagttcctgcagaagaccgaccccaaggaccccgccaactacatcctgcacgccgtgctggtgcacagcggcgacaaccacggcggccactacgtggtgtacctgaaccccaagggcgacggcaagtggtgcaagttcgacgacgacgtggtgagcagatgcaccaaggaggaggccatcgagcacaactacggcggccacgacgacgacctgagcgtgagacactgcaccaacgcctacatgctggtgtacatcagagagagcaagctgagcgaggtgctgcaggccgtgaccgaccacgacatcccccagcagctggtggagagactgcaggaggagaagagaatcgaggcccagaagagaaaggagagacaggaggcccacctgtacatgcaggtgcagatcgtggccgaggaccagttctgcggccaccagggcaacgacatgtacgacgaggagaaggtgaagtacaccgtgttcaaggtgctgaagaacagcagcctggccgagttcgtgcagagcctgagccagaccatgggcttcccccaggaccagatcagactgtggcccatgcaggccagaagcaacggcaccaagagacccgccatgctggacaacgaggccgacggcaacaagaccatgatcgagctgagcgacaacgagaacccctggaccatcttcctggagaccgtggaccccgagctggccgccagcggcgccaccctgcccaagttcgacaaggaccacgacgtgatgctgttcctgaagatgtacgaccccaagaccagaagcctgaactactgcggccacatctacacccccatcagctgcaagatcagagacctgctgcccgtgatgtgcgacagagccggcttcatccaggacaccagcctgatcctgtacgaggaggtgaagcccaacctgaccgagagaatccaggactacgacgtgagcctggacaaggccctggacgagctgatggacggcgacatcatcgtgttccagaaggacgaccccgagaacgacaacagcgagctgcccaccgccaaggagtacttcagagacctgtaccacagagtggacgtgatcttctgcgacaagaccatccccaacgaccccggcttcgtggtgaccctgagcaacagaatgaactacttccaggtggccaagaccgtggcccagagactgaacaccgaccccatgctgctgcagttcttcaagagccagggctacagagacggccccggcaaccccctgagacacaactacgagggcaccctgagagacctgctgcagttcttcaagcccagacagcccaagaagctgtactaccagcagctgaagatgaagatcaccgacttcgagaacagaagaagcttcaagtgcatctggctgaacagccagttcagagaggaggagatcaccctgtaccccgacaagcacggctgcgtgagagacctgctggaggagtgcaagaaggccgtggagctgggcgagaaggccagcggcaagctgagactgctggagatcgtgagctacaagatcatcggcgtgcaccaggaggacgagctgctggagtgcctgagccccgccaccagcagaaccttcagaatcgaggagatccccctggaccaggtggacatcgacaaggagaacgagatgctggtgaccgtggcccacttccacaaggaggtgttcggcaccttcggcatccccttcctgctgagaatccaccagggcgagcacttcagagaggtgatgaagagaatccagagcctgctggacatccaggagaaggagttcgagaagttcaagttcgccatcgtgatgatgggcagacaccagtacatcaacgaggacgagtacgaggtgaacctgaaggacttcgagccccagcccggcaacatgagccaccccagaccctggctgggcctggaccacttcaacaaggcccccaagagaagcagatacacctacctggagaaggccatcaagatccacaactag

SEQ ID NO: 104424 - DNA, 1530 bp, synthetic construct
  misc_feature 1..1530: note = Description of Artificial Sequence: Synthetic coding sequence
  source 1..1530: mol_type = other DNA
atggaggacgacaccagctggagaagcgaggccaccttccagttcaccgtggagagattcagcagactgagcgagagcgtgctgagccccccctgcttcgtgagaaacctgccctggaagatcatggtgatgcccagattctaccccgacagaccccaccagaagagcgtgggcttcttcctgcagtgcaacgccgagagcgacagcaccagctggagctgccacgcccaggccgtgctgaagatcatcaactacagagacgacgagaagagcttcagcagaagaatcagccacctgttcttccacaaggagaacgactggggcttcagcaacttcatggcctggagcgaggtgaccgaccccgagaagggcttcatcgacgacgacaaggtgaccttcgaggtgttcgtgcaggccgacgccccccacggcgtggcctgggacagcaagaagcacaccggctacgtgggcctgaagaaccagggcgccacctgctacatgaacagcctgctgcagaccctgttcttcaccaaccagctgagaaaggccgtgtacatgatgcccaccgagggcgacgacagcagcaagagcgtgcccctggccctgcagagagtgttctacgagctgcagcacagcgacaagcccgtgggcaccaagaagctgaccaagagcttcggctgggagaccctggacagcttcatgcagcacgacgtgcaggagctgtgcagagtgctgctggacaacgtggagaacaagatgaagggcacctgcgtggagggcaccatccccaagctgttcagaggcaagatggtgagctacatccagtgcaaggaggtggactacagaagcgacagaagagaggactactacgacatccagctgagcatcaagggcaagaagaacatcttcgagagcttcgtggactacgtggccgtggagcagctggacggcgacaacaagtacgacgccggcgagcacggcctgcaggaggccgagaagggcgtgaagttcctgaccctgccccccgtgctgcacctgcagctgatgagattcatgtacgacccccagaccgaccagaacatcaagatcaacgacagattcgagttccccgagcagctgcccctggacgagttcctgcagaagaccgaccccaaggaccccgccaactacatcctgcacgccgtgctggtgcacagcggcgacaaccacggcggccactacgtggtgtacctgaaccccaagggcgacggcaagtggtgcaagttcgacgacgacgtggtgagcagatgcaccaaggaggaggccatcgagcacaactacggcggccacgacgacgacctgagcgtgagacactgcaccaacgcctacatgctggtgtacatcagagagagcaagctgaccgtgggcggcgccatcaccagaagagagaaggacagaggcagcgaggccgagggcgccgccggcagccccagcctgtacgccagcgccgacagcagaagaggccccgtgctgtggccccccagagagtag

SEQ ID NO: 104425 - DNA, 7713 bp, synthetic construct
  misc_feature 1..7713: note = Description of Artificial Sequence: Synthetic coding sequence
  source 1..7713: mol_type = other DNA
atgaccgccaccaccagaggcagccccgtgggcggcaacgacaaccagggccaggcccccgacggccagagccagccccccctgcagcagaaccagaccagcagccccgacagcagcaacgagaacagccccgccaccccccccgacgagcagggccagggcgacgcccccccccagctggaggacgaggagcccgccttcccccacaccgacctggccaagctggacgacatgatcaacagacccagatgggtggtgcccgtgctgcccaagggcgagctggaggtgctgctggaggccgccatcgacctgagcaagaagggcctggacgtgaagagcgaggcctgccagagattcttcagagacggcctgaccatcagcttcaccaagatcctgaccgacgaggccgtgagcggctggaagttcgagatccacagatgcatcatcaacaacacccacagactggtggagctgtgcgtggccaagctgagccaggactggttccccctgctggagctgctggccatggccctgaacccccactgcaagttccacatctacaacggcaccagaccctgcgagagcgtgagcagcagcgtgcagctgcccgaggacgagctgttcgccagaagccccgaccccagaagccccaagggctggctggtggacctgctgaacaagttcggcaccctgaacggcttccagatcctgcacgacagattcatcaacggcagcgccctgaacgtgcagatcatcgccgccctgatcaagcccttcggccagtgctacgagttcctgaccctgcacaccgtgaagaagtacttcctgcccatcatcgagatggtgccccagttcctggagaacctgaccgacgaggagctgaagaaggaggccaagaacgaggccaagaacgacgccctgagcatgatcatcaagagcctgaagaacctggccagcagagtgcccggccaggaggagaccgtgaagaacctggagatcttcagactgaagatgatcctgagactgctgcagatcagcagcttcaacggcaagatgaacgccctgaacgaggtgaacaaggtgatcagcagcgtgagctactacacccacagacacggcaaccccgaggaggaggagtggctgaccgccgagagaatggccgagtggatccagcagaacaacatcctgagcatcgtgctgagagacagcctgcaccagccccagtacgtggagaagctggagaagatcctgagattcgtgatcaaggagaaggccctgaccctgcaggacctggacaacatctgggccgcccaggccggcaagcacgaggccatcgtgaagaacgtgcacgacctgctggccaagctggcctgggacttcagccccgagcagctggaccacctgttcgactgcttcaaggccagctggaccaacgccagcaagaagcagagagagaagctgctggagctgatcagaagactggccgaggacgacaaggacggcgtgatggcccacaaggtgctgaacctgctgtggaacctggcccacagcgacgacgtgcccgtggacatcatggacctggccctgagcgcccacatcaagatcctggactacagctgcagccaggacagagacacccagaagatccagtggatcgacagattcatcgaggagctgagaaccaacgacaagtgggtgatccccgccctgaagcagatcagagagatctgcagcctgttcggcgaggccccccagaacctgagccagacccagagaagcccccacgtgttctacagacacgacctgatcaaccagctgcagcacaaccacgccctggtgaccctggtggccgagaacctggccacctacatggagagcatgagactgtacgccagagaccacgaggactacgacccccagaccgtgagactgggcagcagatacagccacgtgcaggaggtgcaggagagactgaacttcctgagattcctgctgaaggacggccagctgtggctgtgcgccccccaggccaagcagatctggaagtgcctggccgagaacgccgtgtacctgtgcgacagagaggcctgcttcaagtggtacagcaagctgatgggcgacgagcccgacctggaccccgacatcaacaaggacttcttcgagagcaacgtgctgcagctggaccccagcctgctgaccgagaacggcatgaagtgcttcgagagattcttcaaggccgtgaactgcagagagggcaagctggtggccaagagaagagcctacatgatggacgacctggagctgatcggcctggactacctgtggagagtggtgatccagagcaacgacgacatcgccagcagagccatcgacctgctgaaggagatctacaccaacctgggccccagactgcaggtgaaccaggtggtgatccacgaggacttcatccagagctgcttcgacagactgaaggccagctacgacaccctgtgcgtgctggacggcgacaaggacagcgtgaactgcgccagacaggaggccgtgagaatggtgagagtgctgaccgtgctgagagagtacatcaacgagtgcgacagcgactaccacgaggagagaaccatcctgcccatgagcagagccttcagaggcaagcacctgagcttcgtggtgagattccccaaccagggcagacaggtggacgacctggaggtgtggagccacaccaacgacaccatcggcagcgtgagaagatgcatcctgaacagaatcaaggccaacgtggcccacaccaagatcgagctgttcgtgggcggcgagctgatcgaccccgccgacgacagaaagctgatcggccagctgaacctgaaggacaagagcctgatcaccgccaagctgacccagatcagcagcaacatgcccagcagccccgacagcagcagcgacagcagcaccggcagccccggcaaccacggcaaccactacagcgacggccccaaccccgaggtggagagctgcctgcccggcgtgatcatgagcctgcaccccagatacatcagcttcctgtggcaggtggccgacctgggcagcagcctgaacatgccccccctgagagacggcgccagagtgctgatgaagctgatgccccccgacagcaccaccatcgagaagctgagagccatctgcctggaccacgccaagctgggcgagagcagcctgagccccagcctggacagcctgttcttcggccccagcgccagccaggtgctgtacctgaccgaggtggtgtacgccctgctgatgcccgccggcgcccccctggccgacgacagcagcgacttccagttccacttcctgaagagcggcggcctgcccctggtgctgagcatgctgaccagaaacaacttcctgcccaacgccgacatggagaccagaagaggcgcctacctgaacgccctgaagatcgccaagctgctgctgaccgccatcggctacggccacgtgagagccgtggccgaggcctgccagcccggcgtggagggcgtgaaccccatgacccagatcaaccaggtgacccacgaccaggccgtggtgctgcagagcgccctgcagagcatccccaaccccagcagcgagtgcatgctgagaaacgtgagcgtgagactggcccagcagatcagcgacgaggccagcagatacatgcccgacatctgcgtgatcagagccatccagaagatcatctgggccagcggctgcggcagcctgcagctggtgttcagccccaacgaggagatcaccaagatctacgagaagaccaacgccggcaacgagcccgacctggaggacgagcaggtgtgctgcgaggccctggaggtgatgaccctgtgcttcgccctgatccccaccgccctggacgccctgagcaaggagaaggcctggcagaccttcatcatcgacctgctgctgcactgccacagcaagaccgtgagacaggtggcccaggagcagttcttcctgatgtgcaccagatgctgcatgggccacagacccctgctgttcttcatcaccctgctgttcaccgtgctgggcagcaccgccagagagagagccaagcacagcggcgactacttcaccctgctgagacacctgctgaactacgcctacaacagcaacatcaacgtgcccaacgccgaggtgctgctgaacaacgagatcgactggctgaagagaatcagagacgacgtgaagagaaccggcgagaccggcatcgaggagaccatcctggagggccacctgggcgtgaccaaggagctgctggccttccagaccagcgagaagaagttccacatcggctgcgagaagggcggcgccaacctgatcaaggagctgatcgacgacttcatcttccccgccagcaacgtgtacctgcagtacatgagaaacggcgagctgcccgccgagcaggccatccccgtgtgcggcagcccccccaccatcaacgccggcttcgagctgctggtggccctggccgtgggctgcgtgagaaacctgaagcagatcgtggacagcctgaccgagatgtactacatcggcaccgccatcaccacctgcgaggccctgaccgagtgggagtacctgccccccgtgggccccagaccccccaagggcttcgtgggcctgaagaacgccggcgccacctgctacatgaacagcgtgatccagcagctgtacatgatccccagcatcagaaacggcatcctggccatcgagggcaccggcagcgacgtggacgacgacatgagcggcgacgagaagcaggacaacgagagcaacgtggaccccagagacgacgtgttcggctacccccagcagttcgaggacaagcccgccctgagcaagaccgaggacagaaaggagtacaacatcggcgtgctgagacacctgcaggtgatcttcggccacctggccgccagcagactgcagtactacgtgcccagaggcttctggaagcagttcagactgtggggcgagcccgtgaacctgagagagcagcacgacgccctggagttcttcaacagcctggtggacagcctggacgaggccctgaaggccctgggccaccccgccatgctgagcaaggtgctgggcggcagcttcgccgaccagaagatctgccagggctgcccccacagatacgagtgcgaggagagcttcaccaccctgaacgtggacatcagaaaccaccagaacctgctggacagcctggagcagtacgtgaagggcgacctgctggagggcgccaacgcctaccactgcgagaagtgcaacaagaaggtggacaccgtgaagagactgctgatcaagaagctgccccccgtgctggccatccagctgaagagattcgactacgactgggagagagagtgcgccatcaagttcaacgactacttcgagttccccagagagctggacatggagccctacaccgtggccggcgtggccaagctggagggcgacaacgtgaaccccgagagccagctgatccagcagagcgagcagagcgagagcgagaccgccggcagcaccaagtacagactggtgggcgtgctggtgcacagcggccaggccagcggcggccactactacagctacatcatccagagaaacggcggcgacggcgagagaaacagatggtacaagttcgacgacggcgacgtgaccgagtgcaagatggacgacgacgaggagatgaagaaccagtgcttcggcggcgagtacatgggcgaggtgttcgaccacatgatgaagagaatgagctacagaagacagaagagatggtggaacgcctacatcctgttctacgagagaatggacaccatcgaccaggacgacgagctgatcagatacatcagcgagctggccatcaccaccagaccccaccagatcatcatgcccagcgccatcgagagaagcgtgagaaagcagaacgtgcagttcatgcacaacagaatgcagtacagcatggagtacttccagttcatgaagaagctgctgacctgcaacggcgtgtacctgaaccccccccccggccaggaccacctgctgcccgaggccgaggagatcaccatgatcagcatccagctggccgccagattcctgttcaccaccggcttccacaccaagaaggtggtgagaggcagcgccagcgactggtacgacgccctgtgcatcctgctgagacacagcaagaacgtgagattctggttcgcccacaacgtgctgttcaacgtgagcaacagattcagcgagtacctgctggagtgccccagcgccgaggtgagaggcgccttcgccaagctgatcgtgttcatcgcccacttcagcctgcaggacggcccctgccccagccccttcgccagccccggccccagcagccaggcctacgacaacctgagcctgagcgaccacctgctgagagccgtgctgaacctgctgagaagagaggtgagcgagcacggcagacacctgcagcagtacttcaacctgttcgtgatgtacgccaacctgggcgtggccgagaagacccagctgctgaagctgagcgtgcccgccaccttcatgctggtgagcctggacgagggccccggcccccccatcaagtaccagtacgccgagctgggcaagctgtacagcgtggtgagccagctgatcagatgctgcaacgtgagcagcagaatgcagagcagcatcaacggcaacccccccctgcccaaccccttcggcgaccccaacctgagccagcccatcatgcccatccagcagaacgtggccgacatcctgttcgtgagaaccagctacgtgaagaagatcatcgaggactgcagcaacagcgaggagaccgtgaagctgctgagattctgctgctgggagaacccccagttcagcagcaccgtgctgagcgagctgctgtggcaggtggcctacagctacacctacgagctgagaccctacctggacctgctgctgcagatcctgctgatcgaggacagctggcagacccacagaatccacaacgccctgaagggcatccccgacgacagagacggcctgttcgacaccatccagagaagcaagaaccactaccagaagagagcctaccagtgcatcaagtgcatggtggccctgttcagcaactgccccgtggcctaccagatcctgcagggcaacggcgacctgaagagaaagtggacctgggccgtggagtggctgggcgacgagctggagagaagaccctacaccggcaacccccagtacacctacaacaactggagcccccccgtgcagagcaacgagaccagcaacggctacttcctggagagaagccacagcgccagaatgaccctggccaaggcctgcgagctgtgccccgaggaggtgaagaaggccaccagcgtgcagcagatcgagatggaggagagcaaggagcccgacgaccaggacgcccccgacgagcacgagagccccccccccgaggacgcccccctgtacccccacagccccggcagccagtaccagcagaacaaccacgtgcacggccagccctacaccggccccgccgcccaccacatgaacaacccccagagaaccggccagagagcccaggagaactacgagggcagcgaggaggtgagccccccccagaccaaggaccagtag

SEQ ID NO: 104426 - DNA, 7665 bp, synthetic construct
  misc_feature 1..7665: note = Description of Artificial Sequence: Synthetic coding sequence
  source 1..7665: mol_type = other DNA
atgaccgccaccaccagaggcagccccgtgggcggcaacgacaaccagggccaggcccccgacggccagagccagccccccctgcagcagaaccagaccagcagccccgacagcagcaacgagaacagccccgccaccccccccgacgagcagggccagggcgacgcccccccccagctggaggacgaggagcccgccttcccccacaccgacctggccaagctggacgacatgatcaacagacccagatgggtggtgcccgtgctgcccaagggcgagctggaggtgctgctggaggccgccatcgacctgagcaagaagggcctggacgtgaagagcgaggcctgccagagattcttcagagacggcctgaccatcagcttcaccaagatcctgaccgacgaggccgtgagcggctggaagttcgagatccacagatgcatcatcaacaacacccacagactggtggagctgtgcgtggccaagctgagccaggactggttccccctgctggagctgctggccatggccctgaacccccactgcaagttccacatctacaacggcaccagaccctgcgagagcgtgagcagcagcgtgcagctgcccgaggacgagctgttcgccagaagccccgaccccagaagccccaagggctggctggtggacctgctgaacaagttcggcaccctgaacggcttccagatcctgcacgacagattcatcaacggcagcgccctgaacgtgcagatcatcgccgccctgatcaagcccttcggccagtgctacgagttcctgaccctgcacaccgtgaagaagtacttcctgcccatcatcgagatggtgccccagttcctggagaacctgaccgacgaggagctgaagaaggaggccaagaacgaggccaagaacgacgccctgagcatgatcatcaagagcctgaagaacctggccagcagagtgcccggccaggaggagaccgtgaagaacctggagatcttcagactgaagatgatcctgagactgctgcagatcagcagcttcaacggcaagatgaacgccctgaacgaggtgaacaaggtgatcagcagcgtgagctactacacccacagacacggcaaccccgaggaggaggagtggctgaccgccgagagaatggccgagtggatccagcagaacaacatcctgagcatcgtgctgagagacagcctgcaccagccccagtacgtggagaagctggagaagatcctgagattcgtgatcaaggagaaggccctgaccctgcaggacctggacaacatctgggccgcccaggccggcaagcacgaggccatcgtgaagaacgtgcacgacctgctggccaagctggcctgggacttcagccccgagcagctggaccacctgttcgactgcttcaaggccagctggaccaacgccagcaagaagcagagagagaagctgctggagctgatcagaagactggccgaggacgacaaggacggcgtgatggcccacaaggtgctgaacctgctgtggaacctggcccacagcgacgacgtgcccgtggacatcatggacctggccctgagcgcccacatcaagatcctggactacagctgcagccaggacagagacacccagaagatccagtggatcgacagattcatcgaggagctgagaaccaacgacaagtgggtgatccccgccctgaagcagatcagagagatctgcagcctgttcggcgaggccccccagaacctgagccagacccagagaagcccccacgtgttctacagacacgacctgatcaaccagctgcagcacaaccacgccctggtgaccctggtggccgagaacctggccacctacatggagagcatgagactgtacgccagagaccacgaggactacgacccccagaccgtgagactgggcagcagatacagccacgtgcaggaggtgcaggagagactgaacttcctgagattcctgctgaaggacggccagctgtggctgtgcgccccccaggccaagcagatctggaagtgcctggccgagaacgccgtgtacctgtgcgacagagaggcctgcttcaagtggtacagcaagctgatgggcgacgagcccgacctggaccccgacatcaacaaggacttcttcgagagcaacgtgctgcagctggaccccagcctgctgaccgagaacggcatgaagtgcttcgagagattcttcaaggccgtgaactgcagagagggcaagctggtggccaagagaagagcctacatgatggacgacctggagctgatcggcctggactacctgtggagagtggtgatccagagcaacgacgacatcgccagcagagccatcgacctgctgaaggagatctacaccaacctgggccccagactgcaggtgaaccaggtggtgatccacgaggacttcatccagagctgcttcgacagactgaaggccagctacgacaccctgtgcgtgctggacggcgacaaggacagcgtgaactgcgccagacaggaggccgtgagaatggtgagagtgctgaccgtgctgagagagtacatcaacgagtgcgacagcgactaccacgaggagagaaccatcctgcccatgagcagagccttcagaggcaagcacctgagcttcgtggtgagattccccaaccagggcagacaggtggacgacctggaggtgtggagccacaccaacgacaccatcggcagcgtgagaagatgcatcctgaacagaatcaaggccaacgtggcccacaccaagatcgagctgttcgtgggcggcgagctgatcgaccccgccgacgacagaaagctgatcggccagctgaacctgaaggacaagagcctgatcaccgccaagctgacccagatcagcagcaacatgcccagcagccccgacagcagcagcgacagcagcaccggcagccccggcaaccacggcaaccactacagcgacggccccaaccccgaggtggagagctgcctgcccggcgtgatcatgagcctgcaccccagatacatcagcttcctgtggcaggtggccgacctgggcagcagcctgaacatgccccccctgagagacggcgccagagtgctgatgaagctgatgccccccgacagcaccaccatcgagaagctgagagccatctgcctggaccacgccaagctgggcgagagcagcctgagccccagcctggacagcctgttcttcggccccagcgccagccaggtgctgtacctgaccgaggtggtgtacgccctgctgatgcccgccggcgcccccctggccgacgacagcagcgacttccagttccacttcctgaagagcggcggcctgcccctggtgctgagcatgctgaccagaaacaacttcctgcccaacgccgacatggagaccagaagaggcgcctacctgaacgccctgaagatcgccaagctgctgctgaccgccatcggctacggccacgtgagagccgtggccgaggcctgccagcccggcgtggagggcgtgaaccccatgacccagatcaaccaggtgacccacgaccaggccgtggtgctgcagagcgccctgcagagcatccccaaccccagcagcgagtgcatgctgagaaacgtgagcgtgagactggcccagcagatcagcgacgaggccagcagatacatgcccgacatctgcgtgatcagagccatccagaagatcatctgggccagcggctgcggcagcctgcagctggtgttcagccccaacgaggagatcaccaagatctacgagaagaccaacgccggcaacgagcccgacctggaggacgagcaggtgtgctgcgaggccctggaggtgatgaccctgtgcttcgccctgatccccaccgccctggacgccctgagcaaggagaaggcctggcagaccttcatcatcgacctgctgctgcactgccacagcaagaccgtgagacaggtggcccaggagcagttcttcctgatgtgcaccagatgctgcatgggccacagacccctgctgttcttcatcaccctgctgttcaccgtgctgggcagcaccgccagagagagagccaagcacagcggcgactacttcaccctgctgagacacctgctgaactacgcctacaacagcaacatcaacgtgcccaacgccgaggtgctgctgaacaacgagatcgactggctgaagagaatcagagacgacgtgaagagaaccggcgagaccggcatcgaggagaccatcctggagggccacctgggcgtgaccaaggagctgctggccttccagaccagcgagaagaagttccacatcggctgcgagaagggcggcgccaacctgatcaaggagctgatcgacgacttcatcttccccgccagcaacgtgtacctgcagtacatgagaaacggcgagctgcccgccgagcaggccatccccgtgtgcggcagcccccccaccatcaacgccggcttcgagctgctggtggccctggccgtgggctgcgtgagaaacctgaagcagatcgtggacagcctgaccgagatgtactacatcggcaccgccatcaccacctgcgaggccctgaccgagtgggagtacctgccccccgtgggccccagaccccccaagggcttcgtgggcctgaagaacgccggcgccacctgctacatgaacagcgtgatccagcagctgtacatgatccccagcatcagaaacggcatcctggccatcgagggcaccggcagcgacgtggacgacgacatgagcggcgacgagaagcaggacaacgagagcaacgtggaccccagagacgacgtgttcggctacccccagcagttcgaggacaagcccgccctgagcaagaccgaggacagaaaggagtacaacatcggcgtgctgagacacctgcaggtgatcttcggccacctggccgccagcagactgcagtactacgtgcccagaggcttctggaagcagttcagactgtggggcgagcccgtgaacctgagagagcagcacgacgccctggagttcttcaacagcctggtggacagcctggacgaggccctgaaggccctgggccaccccgccatgctgagcaaggtgctgggcggcagcttcgccgaccagaagatctgccagggctgcccccacagatacgagtgcgaggagagcttcaccaccctgaacgtggacatcagaaaccaccagaacctgctggacagcctggagcagtacgtgaagggcgacctgctggagggcgccaacgcctaccactgcgagaagtgcaacaagaaggtggacaccgtgaagagactgctgatcaagaagctgccccccgtgctggccatccagctgaagagattcgactacgactgggagagagagtgcgccatcaagttcaacgactacttcgagttccccagagagctggacatggagccctacaccgtggccggcgtggccaagctggagggcgacaacgtgaaccccgagagccagctgatccagcagagcgagcagagcgagagcgagaccgccggcagcaccaagtacagactggtgggcgtgctggtgcacagcggccaggccagcggcggccactactacagctacatcatccagagaaacggcggcgacggcgagagaaacagatggtacaagttcgacgacggcgacgtgaccgagtgcaagatggacgacgacgaggagatgaagaaccagtgcttcggcggcgagtacatgggcgaggtgttcgaccacatgatgaagagaatgagctacagaagacagaagagatggtggaacgcctacatcctgttctacgagagaatggacaccatcgaccaggacgacgagctgatcagatacatcagcgagctggccatcaccaccagaccccaccagatcatcatgcccagcgccatcgagagaagcgtgagaaagcagaacgtgcagttcatgcacaacagaatgcagtacagcatggagtacttccagttcatgaagaagctgctgacctgcaacggcgtgtacctgaaccccccccccggccaggaccacctgctgcccgaggccgaggagatcaccatgatcagcatccagctggccgccagattcctgttcaccaccggcttccacaccaagaaggtggtgagaggcagcgccagcgactggtacgacgccctgtgcatcctgctgagacacagcaagaacgtgagattctggttcgcccacaacgtgctgttcaacgtgagcaacagattcagcgagtacctgctggagtgccccagcgccgaggtgagaggcgccttcgccaagctgatcgtgttcatcgcccacttcagcctgcaggacggcccctgccccagccccttcgccagccccggccccagcagccaggcctacgacaacctgagcctgagcgaccacctgctgagagccgtgctgaacctgctgagaagagaggtgagcgagcacggcagacacctgcagcagtacttcaacctgttcgtgatgtacgccaacctgggcgtggccgagaagacccagctgctgaagctgagcgtgcccgccaccttcatgctggtgagcctggacgagggccccggcccccccatcaagtaccagtacgccgagctgggcaagctgtacagcgtggtgagccagctgatcagatgctgcaacgtgagcagcagaatgcagagcagcatcaacggcaacccccccctgcccaaccccttcggcgaccccaacctgagccagcccatcatgcccatccagcagaacgtggccgacatcctgttcgtgagaaccagctacgtgaagaagatcatcgaggactgcagcaacagcgaggagaccgtgaagctgctgagattctgctgctgggagaacccccagttcagcagcaccgtgctgagcgagctgctgtggcaggtggcctacagctacacctacgagctgagaccctacctggacctgctgctgcagatcctgctgatcgaggacagctggcagacccacagaatccacaacgccctgaagggcatccccgacgacagagacggcctgttcgacaccatccagagaagcaagaaccactaccagaagagagcctaccagtgcatcaagtgcatggtggccctgttcagcaactgccccgtggcctaccagatcctgcagggcaacggcgacctgaagagaaagtggacctgggccgtggagtggctgggcgacgagctggagagaagaccctacaccggcaacccccagtacacctacaacaactggagcccccccgtgcagagcaacgagaccagcaacggctacttcctggagagaagccacagcgccagaatgaccctggccaaggcctgcgagctgtgccccgaggaggagcccgacgaccaggacgcccccgacgagcacgagagccccccccccgaggacgcccccctgtacccccacagccccggcagccagtaccagcagaacaaccacgtgcacggccagccctacaccggccccgccgcccaccacatgaacaacccccagagaaccggccagagagcccaggagaactacgagggcagcgaggaggtgagccccccccagaccaaggaccagtag

SEQ ID NO: 104427 - DNA, 7668 bp, synthetic construct
  misc_feature 1..7668: note = Description of Artificial Sequence: Synthetic coding sequence
  source 1..7668: mol_type = other DNA
atgaccgccatcacccacggcagccccgtgggcggcaacgacagccagggccaggtgctggacggccagagccagcacctgttccagcagaaccagaccagcagccccgacagcagcaacgagaacagcgtggccacccccccccccgaggagcagggccagggcgacgcccccccccagcacgaggacgaggagcccgccttcccccacaccgagctggccaacctggacgacatgatcaacagacccagatgggtggtgcccgtgctgcccaagggcgagctggaggtgctgctggaggccgccatcgacctgagcgtgaagggcctggacgtgaagagcgaggcctgccagagattcttcagagacggcctgaccatcagcttcaccaagatcctgatggacgaggccgtgagcggctggaagttcgagatccacagatgcatcatcaacaacacccacagactggtggagctgtgcgtggccaagctgagccaggactggttccccctgctggagctgctggccatggccctgaacccccactgcaagttccacatctacaacggcaccagaccctgcgagctgatcagcagcaacgcccagctgcccgaggacgagctgttcgccagaagcagcgaccccagaagccccaagggctggctggtggacctgatcaacaagttcggcaccctgaacggcttccagatcctgcacgacagattcttcaacggcagcgccctgaacatccagatcatcgccgccctgatcaagcccttcggccagtgctacgagttcctgagccagcacaccctgaagaagtacttcatccccgtgatcgagatcgtgccccacctgctggagaacctgaccgacgaggagctgaagaaggaggccaagaacgaggccaagaacgacgccctgagcatgatcatcaagagcctgaagaacctggccagcagaatcagcggccaggacgagaccatcaagaacctggagatcttcagactgaagatgatcctgagactgctgcagatcagcagcttcaacggcaagatgaacgccctgaacgagatcaacaaggtgatcagcagcgtgagctactacacccacagacacagcaaccccgaggaggaggagtggctgaccgccgagagaatggccgagtggatccagcagaacaacatcctgagcatcgtgctgcaggacagcctgcaccagccccagtacgtggagaagctggagaagatcctgagattcgtgatcaaggagaaggccctgaccctgcaggacctggacaacatctgggccgcccaggccggcaagcacgaggccatcgtgaagaacgtgcacgacctgctggccaagctggcctgggacttcagccccggccagctggaccacctgttcgactgcttcaaggccagctggaccaacgccagcaagaagcagagagagaagctgctggagctgatcagaagactggccgaggacgacaaggacggcgtgatggcccacaaggtgctgaacctgctgtggaacctggcccagagcgacgacgtgcccgtggacatcatggacctggccctgagcgcccacatcaagatcctggactacagctgcagccaggacagagacgcccagaagatccagtggatcgaccacttcatcgaggagctgagaaccaacgacaagtgggtgatccccgccctgaagcagatcagagagatctgcagcctgttcggcgaggccagccagaacctgagccagacccagagaagcccccacatcttctacagacacgacctgatcaaccagctgcagcagaaccacgccctggtgaccctggtggccgagaacctggccacctacatgaacagcatcagactgtacgccggcgaccacgaggactacgacccccagaccgtgagactgggcagcagatacagccacgtgcaggaggtgcaggagagactgaacttcctgagattcctgctgaaggacggccagctgtggctgtgcgccccccaggccaagcagatctggaagtgcctggccgagaacgccgtgtacctgtgcgacagagaggcctgcttcaagtggtacagcaagctgatgggcgacgagcccgacctggaccccgacatcaacaaggacttcttcgagagcaacgtgctgcagctggaccccagcctgctgaccgagaacggcatgaagtgcttcgagagattcttcaaggccgtgaactgcagagagagaaagctgatcgccaagagaagaagctacatgatggacgacctggagctgatcggcctggactacctgtggagagtggtgatccagagcagcgacgagatcgccaacagagccatcgacctgctgaaggagatctacaccaacctgggccccagactgaaggccaaccaggtggtgatccacgaggacttcatccagagctgcttcgacagactgaaggccagctacgacaccctgtgcgtgttcgacggcgacaagaacagcatcaactgcgccagacaggaggccatcagaatggtgagagtgctgaccgtgatcaaggagtacatcaacgagtgcgacagcgactaccacaaggagagaatgatcctgcccatgagcagagccttcagaggcaagcacctgagcctgatcgtgagattccccaaccagggcagacaggtggacgagctggacatctggagccacaccaacgacaccatcggcagcgtgagaagatgcatcgtgaacagaatcaaggccaacgtggcccacaagaagatcgagctgttcgtgggcggcgagctgatcgacagcgaggacgacagaaagctgatcggccagctgaacctgaaggacaagagcctgatcaccgccaagctgacccagatcaacttcaacatgcccagcagccccgacagcagcagcgacagcagcaccgccagccccggcaaccacagaaaccactacaacgacggccccaacctggaggtggagagctgcctgcccggcgtgatcatgagcgtgcaccccagatacatcagcttcctgtggcaggtggccgacctgggcagcaacctgaacatgccccccctgagagacggcgccagagtgctgatgaagctgatgccccccgacagaaccgccgtggagaagctgagagccgtgtgcctggaccacgccaagctgggcgagggcaagctgagcccccccctggacagcctgttcttcggccccagcgccagccaggtgctgtacctgaccgaggtggtgtacgccctgctgatgcccgccggcgtgcccctgaccgacggcagcagcgacttccaggtgcacttcctgaagagcggcggcctgcccctggtgctgagcatgctgatcagaaacaacttcctgcccaacaccgacatggagaccagaagaggcgcctacctgaacgccctgaagatcgccaagctgctgctgaccgccatcggctacggccacgtgagagccgtggccgaggcctgccagcccgtggtggacggcaccgaccccatcacccagatcaaccaggtgacccacgaccaggccgtggtgctgcagagcgccctgcagagcatccccaaccccagcagcgagtgcgtgctgagaaacgagagcatcctgctggcccaggagatcagcaacgaggccagcagatacatgcccgacatctgcgtgatcagagccatccagaagatcatctgggccagcgcctgcggcgccctgggcctggtgttcagccccaacgaggagatcaccaagatctaccagatgaccaccaacggcagcaacaagctggaggtggaggacgagcaggtgtgctgcgaggccctggaggtgatgaccctgtgcttcgccctgctgcccaccgccctggacgccctgagcaaggagaaggcctggcagaccttcatcatcgacctgctgctgcactgccccagcaagaccgtgagacagctggcccaggagcagttcttcctgatgtgcaccagatgctgcatgggccacagacccctgctgttcttcatcaccctgctgttcaccatcctgggcagcaccgccagagagaagggcaagtacagcggcgactacttcaccctgctgagacacctgctgaactacgcctacaacggcaacatcaacatccccaacgccgaggtgctgctggtgagcgagatcgactggctgaagagaatcagagacaacgtgaagaacaccggcgagaccggcgtggaggagcccatcctggagggccacctgggcgtgaccaaggagctgctggccttccagaccagcgagaagaagtaccacttcggctgcgagaagggcggcgccaacctgatcaaggagctgatcgacgacttcatcttccccgccagcaaggtgtacctgcagtacctgagaagcggcgagctgcccgccgagcaggccatccccgtgtgcagcagccccgtgaccatcaacgccggcttcgagctgctggtggccctggccatcggctgcgtgagaaacctgaagcagatcgtggactgcctgaccgagatgtactacatgggcaccgccatcaccacctgcgaggccctgaccgagtgggagtacctgccccccgtgggccccagaccccccaagggcttcgtgggcctgaagaacgccggcgccacctgctacatgaacagcgtgatccagcagctgtacatgatccccagcatcagaaacagcatcctggccatcgagggcaccggcagcgacctgcacgacgacatgttcggcgacgagaagcaggacagcgagagcaacgtggaccccagagacgacgtgttcggctacccccaccagttcgaggacaagcccgccctgagcaagaccgaggacagaaaggagtacaacatcggcgtgctgagacacctgcaggtgatcttcggccacctggccgccagccagctgcagtactacgtgcccagaggcttctggaagcagttcagactgtggggcgagcccgtgaacctgagagagcagcacgacgccctggagttcttcaacagcctggtggacagcctggacgaggccctgaaggccctgggccaccccgccatcctgagcaaggtgctgggcggcagcttcgccgaccagaagatctgccagggctgcccccacagatacgagtgcgaggagagcttcaccaccctgaacgtggacatcagaaaccaccagaacctgctggacagcctggagcagtacatcaagggcgacctgctggagggcgccaacgcctaccactgcgagaagtgcgacaagaaggtggacaccgtgaagagactgctgatcaagaagctgcccagagtgctggccatccagctgaagagattcgactacgactgggagagagagtgcgccatcaagttcaacgactacttcgagttccccagagagctggacatgggcccctacaccgtggccggcgtggccaacctggagagagacaacgtgaacagcgagaacgagctgatcgagcagaaggagcagagcgacaacgagaccgccggcggcaccaagtacagactggtgggcgtgctggtgcacagcggccaggccagcggcggccactactacagctacatcatccagagaaacggcaaggacgaccagaccgaccactggtacaagttcgacgacggcgacgtgaccgagtgcaagatggacgacgacgaggagatgaagaaccagtgcttcggcggcgagtacatgggcgaggtgttcgaccacatgatgaagagaatgagctacagaagacagaagagatggtggaacgcctacatcctgttctacgagcagatggacatgatcgacgaggacgacgagatgatcagatacatcagcgagctgaccatcgccagaccccaccagatcatcatgagccccgccatcgagagaagcgtgagaaagcagaacgtgaagttcatgcacaacagactgcagtacagcctggagtacttccagttcgtgaagaagctgctgacctgcaacggcgtgtacctgaaccccgcccccggccaggactacctgctgcccgaggccgaggagatcaccatgatcagcatccagctggccgccagattcctgttcaccaccggcttccacaccaagaagatcgtgagaggccccgccagcgactggtacgacgccctgtgcgtgctgctgagacacagcaagaacgtgagattctggttcacccacaacgtgctgttcaacgtgagcaacagattcagcgagtacctgctggagtgccccagcgccgaggtgagaggcgccttcgccaagctgatcgtgttcatcgcccacttcagcctgcaggacggcagctgccccagccccttcgccagccccggccccagcagccaggcctgcgacaacctgagcctgagcgaccacctgctgagagccaccctgaacctgctgagaagagaggtgagcgagcacggccaccacctgcagcagtacttcaacctgttcgtgatgtacgccaacctgggcgtggccgagaagacccagctgctgaagctgaacgtgcccgccaccttcatgctggtgagcctggacgagggccccggcccccccatcaagtaccagtacgccgagctgggcaagctgtacagcgtggtgagccagctgatcagatgctgcaacgtgagcagcaccatgcagagcagcatcaacggcaacccccccctgcccaaccccttcggcgacctgaacctgagccagcccatcatgcccatccagcagaacgtgctggacatcctgttcgtgagaaccagctacgtgaagaagatcatcgaggactgcagcaacagcgaggacaccatcaagctgctgagattctgcagctgggagaacccccagttcagcagcaccgtgctgagcgagctgctgtggcaggtggcctacagctacacctacgagctgagaccctacctggacctgctgttccagatcctgctgatcgaggacagctggcagacccacagaatccacaacgccctgaagggcatccccgacgacagagacggcctgttcgacaccatccagagaagcaagaaccactaccagaagagagcctaccagtgcatcaagtgcatggtggccctgttcagcagctgccccgtggcctaccagatcctgcagggcaacggcgacctgaagagaaagtggacctgggccgtggagtggctgggcgacgagctggagagaagaccctacaccggcaacccccagtacagctacaacaactggagcccccccgtgcagagcaacgagaccgccaacggctacttcctggagagaagccacagcgccagaatgaccctggccaaggcctgcgagctgtgccccgaggaggagcccgacgaccaggacgcccccgacgagcacgagcccagccccagcgaggacgcccccctgtacccccacagccccgccagccagtaccagcagaacaaccacgtgcacggccagccctacaccggccccgccgcccaccacctgaacaacccccagaagaccggccagagaacccaggagaactacgagggcaacgaggaggtgagcagcccccagatgaaggaccagtag

SEQ ID NO: 104428 - DNA, 714 bp, synthetic construct
  misc_feature 1..714: note = Description of Artificial Sequence: Synthetic coding sequence
  source 1..714: mol_type = other DNA
tgactgctgaagaccgccgtgacccagagaatccccagcaactacttcgccttcgccctgggcagaatcctgagcagccacctgctgagcagcgccaacttcagcggcagaatccacaacgccctgaagggcatccccgacgacagagacggcctgttcgacaccatccagagaagcaagaaccactaccagaagagagcctaccagtgcatcaagtgcatggtggccctgttcagcagctgccccgtggcctaccagatcctgcagggcaacggcgacctgaagagaaagtggacctgggccgtggagtggctgggcgacgagctggagagaagaccctacaccggcaacccccagtacagctacaacaactggagcccccccgtgcagagcaacgagaccgccaacggctacttcctggagagaagccacagcgccagaatgaccctggccaaggcctgcgagctgtgccccgaggaggagcccgacgaccaggacgcccccgacgagcacgagcccagccccagcgaggacgcccccctgtacccccacagccccgccagccagtaccagcagaacaaccacgtgcacggccagccctacaccggccccgccgcccaccacctgaacaacccccagaagaccggccagagaacccaggagaactacgagggcaacgaggaggtgagcagcccccagatgaaggaccagtag

SEQ ID NO: 104429 - DNA, 3201 bp, synthetic construct
  misc_feature 1..3201: note = Description of Artificial Sequence: Synthetic coding sequence
  source 1..3201: mol_type = other DNA
atgaccgaccaggagaacaacaacaacatcagcagcaaccccttcgccgccctgttcggcagcctggccgacgccaagcagttcgccgccatccagaaggagcagctgaagcagcagagcgacgagctgcccgccagccccgacgacagcgacaacagcgtgagcgagagcctggacgagttcgactacagcgtggccgagatcagcagaagcttcagaagccagcaggagatctgcgagcagctgaacatcaaccacatgatccagagaatcttcctgatcaccctggacaacagcgaccccagcctgaagagcggcaacggcatccccagcagatgcgtgtacctggaggagatggccgtggagctggaggaccaggactggctggacatgagcaacgtggagcaggccctgttcgccagactgctgctgcaggaccccggcaaccacctgatcaacatgaccagcagcaccaccctgaacctgagcgccgacagagacgccggcgagagacacatcttctgctacctgtacagctgcttccagagagccaaggaggagatcaccaaggtgcccgagaacctgctgcccttcgccgtgcagtgcagaaacctgaccgtgagcaacaccagaaccgtgctgctgacccccgagatctacgtggaccagaacatccacgagcagctggtggacctgatgctggaggccatccagggcgcccacttcgaggacgtgaccgagttcctggaggaggtgatcgaggccctgatcctggacgaggaggtgagaaccttccccgaggtgatgatccccgtgttcgacatcctgctgggcagaatcaaggacctggagctgtgccagatcctgctgtacgcctacctggacatcctgctgtacttcaccagacagaaggacatggccaaggtgttcgtggagtacatccagcccaaggaccccaccaacggccagatgtaccagaagaccctgctgggcgtgatcctgagcatcagctgcctgctgaagacccccggcgtggtggagaaccacggctacttcctgaaccccagcagaagcagcccccaggagatcaaggtgcaggaggccaacatccaccagttcatggcccagttccacgagaagatctaccagatgctgaagaacctgctgcagctgagccccgagaccaagcactgcatcctgagctggctgggcaactgcctgcacgccaacgccggcagaaccaagatctgggccaaccagatgcccgagatcttcttccagatgtacgccagcgacgccttcttcctgaacctgggcgccgccctgctgaagctgtgccagcccttctgcaagcccagaagcagcagactgctgaccttcaaccccacctactgcgccctgaaggagctgaacgacgaggagagaaagatcaagaacgtgcacatgagaggcctggacaaggagacctgcctgatccccgccgtgcaggagcccaagttcccccagaactacaacctggtgaccgagaacctggccctgaccgagtacaccctgtacctgggcttccacagactgcacgaccagatggtgaagatcaaccagaacctgcacagactgcaggtggcctggagagacgcccagcagagcagcagccccgccgccgacaacctgagagagcagttcgagagactgatgaccatctacctgagcaccaagaccgccatgaccgagccccagatgctgcagaactgcctgaacctgcaggtgagcatggccgtgctgctggtgcagctggccatcggcaacgagggcagccagcccatcgagctgaccttccccctgcccgacggctacagcagcctggcctacgtgcccgagttcttcgccgacaacctgggcgacttcctgatcttcctgagaagattcgccgacgacatcctggagaccagcgccgacagcctggagcacgtgctgcacttcatcaccatcttcaccggcagcatcgagagaatgaagaacccccacctgagagccaagctggccgaggtgctggaggccgtgatgccccacctggaccagacccccaaccccctggtgagcagcgtgttccacagaaagagagtgttctgcaacttccagtacgccccccagctggccgaggccctgatcaaggtgttcgtggacatcgagttcaccggcgacccccaccagttcgagcagaagttcaactacagaagacccatgtaccccatcctgagatacatgtggggcaccgacacctacagagagagcatcaaggacctggccgactacgccagcaagaacctggaggccatgaacccccccctgttcctgagattcctgaacctgctgatgaacgacgccatcttcctgctggacgaggccatccagtacctgagcaagatcaagatccagcagatcgagaaggacagaggcgagtgggacagcctgacccccgaggccagaagagagaaggaggccggcctgcagatgttcggccagctggccagattccacaacatcatgagcaacgagaccatcggcaccctggccttcctgaccagcgagatcaagagcctgttcgtgcaccccttcctggccgagagaatcatcagcatgctgaactacttcctgcagcacctggtgggccccaagatgggcgccctgaaggtgaaggacttcagcgagttcgacttcaagccccagcagctggtgagcgacatctgcaccatctacctgaacctgggcgacgaggagaacttctgcgccaccgtgcccaaggacggcagaagctacagccccaccctgttcgcccagaccgtgagagtgctgaagaagatcaacaagcccggcaacatgatcatggccttcagcaacctggccgagagaatcaagagcctggccgacctgcagcagcaggaggaggagacctacgccgacgcctgcgacgagttcctggaccccatcatgagcaccctgatgtgcgaccccgtggtgctgcccagcagcagagtgaccgtggacagaagcaccatcgccagacacctgctgagcgaccagaccgaccccttcaacagaagccccctgaccatggaccagatcagacccaacaccgagctgaaggagaagatccagagatggctggccgagagaaagcagcagaaggagcagctggagtag

SEQ ID NO: 104430 - DNA, 3222 bp, synthetic construct
  misc_feature 1..3222: note = Description of Artificial Sequence: Synthetic coding sequence
  source 1..3222: mol_type = other DNA
atgaccgaccaggagaacaacaacaacatcagcagcaaccccttcgccgccctgttcggcagcctggccgacgccaagcagttcgccgccatccagaaggagcagctgaagcagcagagcgacgagctgcccgccagccccgacgacagcgacaacagcgtgagcgagagcctggacgagttcgactacagcgtggccgagatcagcagaagcttcagaagccagcaggagatctgcgagcagctgaacatcaaccacatgatccagagaatcttcctgatcaccctggacaacagcgaccccagcctgaagagcggcaacggcatccccagcagatgcgtgtacctggaggagatggccgtggagctggaggaccaggactggctggacatgagcaacgtggagcaggccctgttcgccagactgctgctgcaggaccccggcaaccacctgatcaacatgaccagcagcaccaccctgaacctgagcgccgacagagacgccggcgagagacacatcttctgctacctgtacagctgcttccagagagccaaggaggagatcaccaaggtgcccgagaacctgctgcccttcgccgtgcagtgcagaaacctgaccgtgagcaacaccagaaccgtgctgctgacccccgagatctacgtggaccagaacatccacgagcagctggtggacctgatgctggaggccatccagggcgccagagagtacatgaacaagatctacttcgaggacgtgaccgagttcctggaggaggtgatcgaggccctgatcctggacgaggaggtgagaaccttccccgaggtgatgatccccgtgttcgacatcctgctgggcagaatcaaggacctggagctgtgccagatcctgctgtacgcctacctggacatcctgctgtacttcaccagacagaaggacatggccaaggtgttcgtggagtacatccagcccaaggaccccaccaacggccagatgtaccagaagaccctgctgggcgtgatcctgagcatcagctgcctgctgaagacccccggcgtggtggagaaccacggctacttcctgaaccccagcagaagcagcccccaggagatcaaggtgcaggaggccaacatccaccagttcatggcccagttccacgagaagatctaccagatgctgaagaacctgctgcagctgagccccgagaccaagcactgcatcctgagctggctgggcaactgcctgcacgccaacgccggcagaaccaagatctgggccaaccagatgcccgagatcttcttccagatgtacgccagcgacgccttcttcctgaacctgggcgccgccctgctgaagctgtgccagcccttctgcaagcccagaagcagcagactgctgaccttcaaccccacctactgcgccctgaaggagctgaacgacgaggagagaaagatcaagaacgtgcacatgagaggcctggacaaggagacctgcctgatccccgccgtgcaggagcccaagttcccccagaactacaacctggtgaccgagaacctggccctgaccgagtacaccctgtacctgggcttccacagactgcacgaccagatggtgaagatcaaccagaacctgcacagactgcaggtggcctggagagacgcccagcagagcagcagccccgccgccgacaacctgagagagcagttcgagagactgatgaccatctacctgagcaccaagaccgccatgaccgagccccagatgctgcagaactgcctgaacctgcaggtgagcatggccgtgctgctggtgcagctggccatcggcaacgagggcagccagcccatcgagctgaccttccccctgcccgacggctacagcagcctggcctacgtgcccgagttcttcgccgacaacctgggcgacttcctgatcttcctgagaagattcgccgacgacatcctggagaccagcgccgacagcctggagcacgtgctgcacttcatcaccatcttcaccggcagcatcgagagaatgaagaacccccacctgagagccaagctggccgaggtgctggaggccgtgatgccccacctggaccagacccccaaccccctggtgagcagcgtgttccacagaaagagagtgttctgcaacttccagtacgccccccagctggccgaggccctgatcaaggtgttcgtggacatcgagttcaccggcgacccccaccagttcgagcagaagttcaactacagaagacccatgtaccccatcctgagatacatgtggggcaccgacacctacagagagagcatcaaggacctggccgactacgccagcaagaacctggaggccatgaacccccccctgttcctgagattcctgaacctgctgatgaacgacgccatcttcctgctggacgaggccatccagtacctgagcaagatcaagatccagcagatcgagaaggacagaggcgagtgggacagcctgacccccgaggccagaagagagaaggaggccggcctgcagatgttcggccagctggccagattccacaacatcatgagcaacgagaccatcggcaccctggccttcctgaccagcgagatcaagagcctgttcgtgcaccccttcctggccgagagaatcatcagcatgctgaactacttcctgcagcacctggtgggccccaagatgggcgccctgaaggtgaaggacttcagcgagttcgacttcaagccccagcagctggtgagcgacatctgcaccatctacctgaacctgggcgacgaggagaacttctgcgccaccgtgcccaaggacggcagaagctacagccccaccctgttcgcccagaccgtgagagtgctgaagaagatcaacaagcccggcaacatgatcatggccttcagcaacctggccgagagaatcaagagcctggccgacctgcagcagcaggaggaggagacctacgccgacgcctgcgacgagttcctggaccccatcatgagcaccctgatgtgcgaccccgtggtgctgcccagcagcagagtgaccgtggacagaagcaccatcgccagacacctgctgagcgaccagaccgaccccttcaacagaagccccctgaccatggaccagatcagacccaacaccgagctgaaggagaagatccagagatggctggccgagagaaagcagcagaaggagcagctggagtag

SEQ ID NO: 104431 - DNA, 1617 bp, synthetic construct
  misc_feature 1..1617: note = Description of Artificial Sequence: Synthetic coding sequence
  source 1..1617: mol_type = other DNA
atggtgaagatcaaccagaacctgcacagactgcaggtggcctggagagacgcccagcagagcagcagccccgccgccgacaacctgagagagcagttcgagagactgatgaccatctacctgagcaccaagaccgccatgaccgagccccagatgctgcagaactgcctgaacctgcaggtgagcatggccgtgctgctggtgcagctggccatcggcaacgagggcagccagcccatcgagctgaccttccccctgcccgacggctacagcagcctggcctacgtgcccgagttcttcgccgacaacctgggcgacttcctgatcttcctgagaagattcgccgacgacatcctggagaccagcgccgacagcctggagcacgtgctgcacttcatcaccatcttcaccggcagcatcgagagaatgaagaacccccacctgagagccaagctggccgaggtgctggaggccgtgatgccccacctggaccagacccccaaccccctggtgagcagcgtgttccacagaaagagagtgttctgcaacttccagtacgccccccagctggccgaggccctgatcaaggtgttcgtggacatcgagttcaccggcgacccccaccagttcgagcagaagttcaactacagaagacccatgtaccccatcctgagatacatgtggggcaccgacacctacagagagagcatcaaggacctggccgactacgccagcaagaacctggaggccatgaacccccccctgttcctgagattcctgaacctgctgatgaacgacgccatcttcctgctggacgaggccatccagtacctgagcaagatcaagatccagcagatcgagaaggacagaggcgagtgggacagcctgacccccgaggccagaagagagaaggaggccggcctgcagatgttcggccagctggccagattccacaacatcatgagcaacgagaccatcggcaccctggccttcctgaccagcgagatcaagagcctgttcgtgcaccccttcctggccgagagaatcatcagcatgctgaactacttcctgcagcacctggtgggccccaagatgggcgccctgaaggtgaaggacttcagcgagttcgacttcaagccccagcagctggtgagcgacatctgcaccatctacctgaacctgggcgacgaggagaacttctgcgccaccgtgcccaaggacggcagaagctacagccccaccctgttcgcccagaccgtgagagtgctgaagaagatcaacaagcccggcaacatgatcatggccttcagcaacctggccgagagaatcaagagcctggccgacctgcagcagcaggaggaggagacctacgccgacgcctgcgacgagttcctggaccccatcatgagcaccctgatgtgcgaccccgtggtgctgcccagcagcagagtgaccgtggacagaagcaccatcgccagacacctgctgagcgaccagaccgaccccttcaacagaagccccctgaccatggaccagatcagacccaacaccgagctgaaggagaagatccagagatggctggccgagagaaagcagcagaaggagcagctggagtag

SEQ ID NO: 104432 - DNA, 3522 bp, synthetic construct
  misc_feature 1..3522: note = Description of Artificial Sequence: Synthetic coding sequence
  source 1..3522: mol_type = other DNA
atggaggagctgagcgccgacgagatcagaagaagaagactggccagactggccggcggccagaccagccagcccaccacccccctgaccagcccccagagagagaacccccccggcccccccatcgccgccagcgcccccggccccagccagagcctgggcctgaacgtgcacaacatgacccccgccaccagccccatcggcgccagcggcgtggcccacagaagccagagcagcgagggcgtgagcagcctgagcagcagccccagcaacagcctggagacccagagccagagcctgagcagaagccagagcatggacatcgacggcgtgagctgcgagaagagcatgagccaggtggacgtggacagcggcatcgagaacatggaggtggacgagaacgacagaagagagaagagaagcctgagcgacaaggagcccagcagcggccccgaggtgagcgaggagcaggccctgcagctggtgtgcaagatcttcagagtgagctggaaggacagagacagagacgtgatcttcctgagcagcctgagcgcccagttcaagcagaaccccaaggaggtgttcagcgacttcaaggacctgatcggccagatcctgatggaggtgctgatgatgagcacccagaccagagacgagaaccccttcgccagcctgaccgccaccagccagcccatcgccgccgccgccagaagccccgacagaaacctgctgctgaacaccggcagcaaccccggcaccagccccatgttctgcagcgtggccagcttcggcgccagcagcctgagcagcctgggcgccagcggcggcgccagcaactgggacagctacagcgaccacttcaccatcgagacctgcaaggagaccgacatgctgaactacctgatcgagtgcttcgacagagtgggcatcgaggagaagaaggcccccaagatgtgcagccagcccgccgtgagccagctgctgagcaacatcagaagccagtgcatcagccacaccgccctggtgctgcagggcagcctgacccagcccagaagcctgcagcagcccagcttcctggtgccctacatgctgtgcagaaacctgccctacggcttcatccaggagctggtgagaaccacccaccaggacgaggaggtgttcaagcagatcttcatccccatcctgcagggcctggccctggccgccaaggagtgcagcctggacagcgactacttcaagtaccccctgatggccctgggcgagctgtgcgagaccaagttcggcaagacccaccccgtgtgcaacctggtggccagcctgagactgtggctgcccaagagcctgagccccggctgcggcagagagctgcagagactgagctacctgggcgccttcttcagcttcagcgtgttcgccgaggacgacgtgaaggtggtggagaagtacttcagcggccccgccatcaccctggagaacaccagagtggtgagccagagcctgcagcactacctggagctgggcagacaggagctgttcaagatcctgcacagcatcctgctgaacggcgagaccagagaggccgccctgagctacatggccgccgtggtgaacgccaacatgaagaaggcccagatgcagaccgacgacagactggtgagcaccgacggcttcatgctgaacttcctgtgggtgctgcagcagctgagcaccaagatcaagctggagaccgtggaccccacctacatcttccaccccagatgcagaatcaccctgcccaacgacgagaccagagtgaacgccaccatggaggacgtgaacgactggctgaccgagctgtacggcgaccagccccccttcagcgagcccaagttccccaccgagtgcttcttcctgaccctgcacgcccaccacctgagcatcctgcccagctgcagaagatacatcagaagactgagagccatcagagagctgaacagaaccgtggaggacctgaagaacaacgagagccagtggaaggacagccccctggccaccagacacagagagatgctgaagagatgcaagacccagctgaagaagctggtgagatgcaaggcctgcgccgacgccggcctgctggacgagagcttcctgagaagatgcctgaacttctacggcctgctgatccagctgctgctgagaatcctggaccccgcctaccccgacatcaccctgcccctgaacagcgacgtgcccaaggtgttcgccgccctgcccgagttctacgtggaggacgtggccgagttcctgttcttcatcgtgcagtacagcccccaggccctgtacgagccctgcacccaggacatcgtgatgttcctggtggtgatgctgtgcaaccagaactacatcagaaacccctacctggtggccaagctggtggaggtgatgttcatgaccaaccccgccgtgcagcccagaacccagaagttcttcgagatgatcgagaaccaccccctgagcaccaagctgctggtgcccagcctgatgaagttctacaccgacgtggagcacaccggcgccaccagcgagttctacgacaagttcaccatcagataccacatcagcaccatcttcaagagcctgtggcagaacatcgcccaccacggcaccttcatggaggagttcaacagcggcaagcagttcgtgagatacatcaacatgctgatcaacgacaccaccttcctgctggacgagagcctggagagcctgaagagaatccacgaggtgcaggaggagatgaagaacaaggagcagtgggaccagctgcccagagaccagcagcaggccagacagagccagctggcccaggacgagagagtgagcagaagctacctggccctggccaccgagaccgtggacatgttccacatcctgaccaagcaggtgcagaagcccttcctgagacccgagctgggccccagactggccgccatgctgaacttcaacctgcagcagctgtgcggccccaagtgcagagacctgaaggtggagaaccccgagaagtacggcttcgagcccaagaagctgctggaccagctgaccgacatctacctgcagctggactgcgccagattcgccaaggccatcgccgacgaccagagaagctacagcaaggagctgttcgaggaggtgatcagcaagatgagaaaggccggcatcaagagcaccatcgccatcgagaagttcaagctgctggccgagaaggtggaggagatcgtggccaagaacgccagagccgagatcgactacagcgacgcccccgacgagttcagagaccccctgatggacaccctgatgaccgaccccgtgagactgcccagcggcaccatcatggacagaagcatcatcctgagacacctgctgaacagccccaccgaccccttcaacagacagaccctgaccgagagcatgctggagcccgtgcccgagctgaaggagcagatccaggcctggatgagagagaagcagaacagcgaccactag

SEQ ID NO: 104433 - DNA, 3909 bp, synthetic construct
  misc_feature 1..3909: note = Description of Artificial Sequence: Synthetic coding sequence
  source 1..3909: mol_type = other DNA
atggaggagctgagcgccgacgagatcagaagaagaagactggccagactggccggcggccagaccagccagcccaccacccccctgaccagcccccagagagagaacccccccggcccccccatcgccgccagcgcccccggccccagccagagcctgggcctgaacgtgcacaacatgacccccgccaccagccccatcggcgccagcggcgtggcccacagaagccagagcagcgagggcgtgagcagcctgagcagcagccccagcaacagcctggagacccagagccagagcctgagcagaagccagagcatggacatcgacggcgtgagctgcgagaagagcatgagccaggtggacgtggacagcggcatcgagaacatggaggtggacgagaacgacagaagagagaagagaagcctgagcgacaaggagcccagcagcggccccgaggtgagcgaggagcaggccctgcagctggtgtgcaagatcttcagagtgagctggaaggacagagacagagacgtgatcttcctgagcagcctgagcgcccagttcaagcagaaccccaaggaggtgttcagcgacttcaaggacctgatcggccagatcctgatggaggtgctgatgatgagcacccagaccagagacgagaaccccttcgccagcctgaccgccaccagccagcccatcgccgccgccgccagaagccccgacagaaacctgctgctgaacaccggcagcaaccccggcaccagccccatgttctgcagcgtggccagcttcggcgccagcagcctgagcagcctgtacgagagcagccccgcccccacccccagcttctggagcagcgtgcccgtgatgggccccagcctggccagccccagcagagccgccagccagctggccgtgcccagcacccccctgagcccccacagcgccgccagcggcaccgccgccggcagccagcccagcagccccagatacagaccctacaccgtgacccacccctgggccagcagcggcgtgagcatcctgagcagcagccccagcccccccgccctggccagcagcccccaggccgtgcccgccagcagcagcagacagagacccagcagcaccggcccccccctgccccccgccagccccagcgccaccagcagaagacccagcagcctgagaatcagccccagcctgggcgccagcggcggcgccagcaactgggacagctacagcgaccacttcaccatcgagacctgcaaggagaccgacatgctgaactacctgatcgagtgcttcgacagagtgggcatcgaggagaagaaggcccccaagatgtgcagccagcccgccgtgagccagctgctgagcaacatcagaagccagtgcatcagccacaccgccctggtgctgcagggcagcctgacccagcccagaagcctgcagcagcccagcttcctggtgccctacatgctgtgcagaaacctgccctacggcttcatccaggagctggtgagaaccacccaccaggacgaggaggtgttcaagcagatcttcatccccatcctgcagggcctggccctggccgccaaggagtgcagcctggacagcgactacttcaagtaccccctgatggccctgggcgagctgtgcgagaccaagttcggcaagacccaccccgtgtgcaacctggtggccagcctgagactgtggctgcccaagagcctgagccccggctgcggcagagagctgcagagactgagctacctgggcgccttcttcagcttcagcgtgttcgccgaggacgacgtgaaggtggtggagaagtacttcagcggccccgccatcaccctggagaacaccagagtggtgagccagagcctgcagcactacctggagctgggcagacaggagctgttcaagatcctgcacagcatcctgctgaacggcgagaccagagaggccgccctgagctacatggccgccgtggtgaacgccaacatgaagaaggcccagatgcagaccgacgacagactggtgagcaccgacggcttcatgctgaacttcctgtgggtgctgcagcagctgagcaccaagatcaagctggagaccgtggaccccacctacatcttccaccccagatgcagaatcaccctgcccaacgacgagaccagagtgaacgccaccatggaggacgtgaacgactggctgaccgagctgtacggcgaccagccccccttcagcgagcccaagttccccaccgagtgcttcttcctgaccctgcacgcccaccacctgagcatcctgcccagctgcagaagatacatcagaagactgagagccatcagagagctgaacagaaccgtggaggacctgaagaacaacgagagccagtggaaggacagccccctggccaccagacacagagagatgctgaagagatgcaagacccagctgaagaagctggtgagatgcaaggcctgcgccgacgccggcctgctggacgagagcttcctgagaagatgcctgaacttctacggcctgctgatccagctgctgctgagaatcctggaccccgcctaccccgacatcaccctgcccctgaacagcgacgtgcccaaggtgttcgccgccctgcccgagttctacgtggaggacgtggccgagttcctgttcttcatcgtgcagtacagcccccaggccctgtacgagccctgcacccaggacatcgtgatgttcctggtggtgatgctgtgcaaccagaactacatcagaaacccctacctggtggccaagctggtggaggtgatgttcatgaccaaccccgccgtgcagcccagaacccagaagttcttcgagatgatcgagaaccaccccctgagcaccaagctgctggtgcccagcctgatgaagttctacaccgacgtggagcacaccggcgccaccagcgagttctacgacaagttcaccatcagataccacatcagcaccatcttcaagagcctgtggcagaacatcgcccaccacggcaccttcatggaggagttcaacagcggcaagcagttcgtgagatacatcaacatgctgatcaacgacaccaccttcctgctggacgagagcctggagagcctgaagagaatccacgaggtgcaggaggagatgaagaacaaggagcagtgggaccagctgcccagagaccagcagcaggccagacagagccagctggcccaggacgagagagtgagcagaagctacctggccctggccaccgagaccgtggacatgttccacatcctgaccaagcaggtgcagaagcccttcctgagacccgagctgggccccagactggccgccatgctgaacttcaacctgcagcagctgtgcggccccaagtgcagagacctgaaggtggagaaccccgagaagtacggcttcgagcccaagaagctgctggaccagctgaccgacatctacctgcagctggactgcgccagattcgccaaggccatcgccgacgaccagagaagctacagcaaggagctgttcgaggaggtgatcagcaagatgagaaaggccggcatcaagagcaccatcgccatcgagaagttcaagctgctggccgagaaggtggaggagatcgtggccaagaacgccagagccgagatcgactacagcgacgcccccgacgagttcagagaccccctgatggacaccctgatgaccgaccccgtgagactgcccagcggcaccatcatggacagaagcatcatcctgagacacctgctgaacagccccaccgaccccttcaacagacagaccctgaccgagagcatgctggagcccgtgcccgagctgaaggagcagatccaggcctggatgagagagaagcagaacagcgaccactag

SEQ ID NO: 104434 - DNA, 303 bp, synthetic construct
  misc_feature 1..303: note = Description of Artificial Sequence: Synthetic coding sequence
  source 1..303: mol_type = other DNA
atggaggagctgagcgccgacgagatcagaagaagaagactggccagactggccggcggccagaccagccagcccaccacccccctgaccagcccccagagagagaacccccccggcccccccatcgccgccagcgcccccggccccagccagagcctgggcctgaacgtgcacaacatgacccccgccaccagccccatcggcgccagcggcctgggcatcatcagcgacgacaagatgatcaagaccgagttcggcagcgccgacttcatgaacctggtggacggcttcaagatcaagtag

SEQ ID NO: 104435 - DNA, 3186 bp, synthetic construct
  misc_feature 1..3186: note = Description of Artificial Sequence: Synthetic coding sequence
  source 1..3186: mol_type = other DNA
atgagccaggtggacgtggacagcggcatcgagaacatggaggtggacgagaacgacagaagagagaagagaagcctgagcgacaaggagcccagcagcggccccgaggtgagcgaggagcaggccctgcagctggtgtgcaagatcttcagagtgagctggaaggacagagacagagacgtgatcttcctgagcagcctgagcgcccagttcaagcagaaccccaaggaggtgttcagcgacttcaaggacctgatcggccagatcctgatggaggtgctgatgatgagcacccagaccagagacgagaaccccttcgccagcctgaccgccaccagccagcccatcgccgccgccgccagaagccccgacagaaacctgctgctgaacaccggcagcaaccccggcaccagccccatgttctgcagcgtggccagcttcggcgccagcagcctgagcagcctgggcgccagcggcggcgccagcaactgggacagctacagcgaccacttcaccatcgagacctgcaaggagaccgacatgctgaactacctgatcgagtgcttcgacagagtgggcatcgaggagaagaaggcccccaagatgtgcagccagcccgccgtgagccagctgctgagcaacatcagaagccagtgcatcagccacaccgccctggtgctgcagggcagcctgacccagcccagaagcctgcagcagcccagcttcctggtgccctacatgctgtgcagaaacctgccctacggcttcatccaggagctggtgagaaccacccaccaggacgaggaggtgttcaagcagatcttcatccccatcctgcagggcctggccctggccgccaaggagtgcagcctggacagcgactacttcaagtaccccctgatggccctgggcgagctgtgcgagaccaagttcggcaagacccaccccgtgtgcaacctggtggccagcctgagactgtggctgcccaagagcctgagccccggctgcggcagagagctgcagagactgagctacctgggcgccttcttcagcttcagcgtgttcgccgaggacgacgtgaaggtggtggagaagtacttcagcggccccgccatcaccctggagaacaccagagtggtgagccagagcctgcagcactacctggagctgggcagacaggagctgttcaagatcctgcacagcatcctgctgaacggcgagaccagagaggccgccctgagctacatggccgccgtggtgaacgccaacatgaagaaggcccagatgcagaccgacgacagactggtgagcaccgacggcttcatgctgaacttcctgtgggtgctgcagcagctgagcaccaagatcaagctggagaccgtggaccccacctacatcttccaccccagatgcagaatcaccctgcccaacgacgagaccagagtgaacgccaccatggaggacgtgaacgactggctgaccgagctgtacggcgaccagccccccttcagcgagcccaagttccccaccgagtgcttcttcctgaccctgcacgcccaccacctgagcatcctgcccagctgcagaagatacatcagaagactgagagccatcagagagctgaacagaaccgtggaggacctgaagaacaacgagagccagtggaaggacagccccctggccaccagacacagagagatgctgaagagatgcaagacccagctgaagaagctggtgagatgcaaggcctgcgccgacgccggcctgctggacgagagcttcctgagaagatgcctgaacttctacggcctgctgatccagctgctgctgagaatcctggaccccgcctaccccgacatcaccctgcccctgaacagcgacgtgcccaaggtgttcgccgccctgcccgagttctacgtggaggacgtggccgagttcctgttcttcatcgtgcagtacagcccccaggccctgtacgagccctgcacccaggacatcgtgatgttcctggtggtgatgctgtgcaaccagaactacatcagaaacccctacctggtggccaagctggtggaggtgatgttcatgaccaaccccgccgtgcagcccagaacccagaagttcttcgagatgatcgagaaccaccccctgagcaccaagctgctggtgcccagcctgatgaagttctacaccgacgtggagcacaccggcgccaccagcgagttctacgacaagttcaccatcagataccacatcagcaccatcttcaagagcctgtggcagaacatcgcccaccacggcaccttcatggaggagttcaacagcggcaagcagttcgtgagatacatcaacatgctgatcaacgacaccaccttcctgctggacgagagcctggagagcctgaagagaatccacgaggtgcaggaggagatgaagaacaaggagcagtgggaccagctgcccagagaccagcagcaggccagacagagccagctggcccaggacgagagagtgagcagaagctacctggccctggccaccgagaccgtggacatgttccacatcctgaccaagcaggtgcagaagcccttcctgagacccgagctgggccccagactggccgccatgctgaacttcaacctgcagcagctgtgcggccccaagtgcagagacctgaaggtggagaaccccgagaagtacggcttcgagcccaagaagctgctggaccagctgaccgacatctacctgcagctggactgcgccagattcgccaaggccatcgccgacgaccagagaagctacagcaaggagctgttcgaggaggtgatcagcaagatgagaaaggccggcatcaagagcaccatcgccatcgagaagttcaagctgctggccgagaaggtggaggagatcgtggccaagaacgccagagccgagatcgactacagcgacgcccccgacgagttcagaggcaagtggacccaccccctgatggacaccctgatgaccgaccccgtgagactgcccagcggcaccatcatggacagaagcatcatcctgagacacctgctgaacagccccaccgaccccttcaacagacagaccctgaccgagagcatgctggagcccgtgcccgagctgaaggagcagatccaggcctggatgagagagaagcagaacagcgaccactag

SEQ ID NO: 104436 - DNA, 513 bp, synthetic construct
  misc_feature 1..513: note = Description of Artificial Sequence: Synthetic coding sequence
  source 1..513: mol_type = other DNA
atgcccggcgaggtgcaggccagctacctgaagagccagagcaagctgagcgacgagggcagactggagcccagaaagttccactgcaagggcgtgaaggtgcccagaaacttcagactgctggaggagctggaggagggccagaagggcgtgggcgacggcaccgtgagctggggcctggaggacgacgaggacatgaccctgaccagatggaccggcatgatcatcggcccccccagaaccatctacgagaacagaatctacagcctgaagatcgagtgcggccccaagtaccccgaggccccccccttcgtgagattcgtgaccaagatcaacatgaacggcgtgaacagcagcaacggcgtggtggaccccagagccatcagcgtgctggccaagtggcagaacagctacagcatcaaggtggtgctgcaggagctgagaagactgatgatgagcaaggagaacatgaagctgccccagccccccgagggccagtgctacagcaactag

SEQ ID NO: 104437 - DNA, 312 bp, synthetic construct
  misc_feature 1..312: note = Description of Artificial Sequence: Synthetic coding sequence
  source 1..312: mol_type = other DNA
atggagaagggcctgaacaccaagaacttcaccgagcagaccatctacgagaacagaatctacagcctgaagatcgagtgcggccccaagtaccccgaggccccccccttcgtgagattcgtgaccaagatcaacatgaacggcgtgaacagcagcaacggcgtggtggaccccagagccatcagcgtgctggccaagtggcagaacagctacagcatcaaggtggtgctgcaggagctgagaagactgatgatgagcaaggagaacatgaagctgccccagccccccgagggccagtgctacagcaactag

SEQ ID NO: 104438 - DNA, 444 bp, synthetic construct
  misc_feature 1..444: note = Description of Artificial Sequence: Synthetic coding sequence
  source 1..444: mol_type = other DNA
atggccgccaccaccggcagcggcgtgaaggtgcccagaaacttcagactgctggaggagctggaggagggccagaagggcgtgggcgacggcaccgtgagctggggcctggaggacgacgaggacatgaccctgaccagatggaccggcatgatcatcggcccccccagaaccatctacgagaacagaatctacagcctgaagatcgagtgcggccccaagtaccccgaggccccccccttcgtgagattcgtgaccaagatcaacatgaacggcgtgaacagcagcaacggcgtggtggaccccagagccatcagcgtgctggccaagtggcagaacagctacagcatcaaggtggtgctgcaggagctgagaagactgatgatgagcaaggagaacatgaagctgccccagccccccgagggccagtgctacagcaactag

SEQ ID NO: 104439 - DNA, 513 bp, synthetic construct; identical to SEQ ID NO: 104436
  misc_feature 1..513: note = Description of Artificial Sequence: Synthetic coding sequence
  source 1..513: mol_type = other DNA

SEQ ID NO: 104440 - DNA, 312 bp, synthetic construct
  misc_feature 1..312: note = Description of Artificial Sequence: Synthetic coding sequence
  source 1..312: mol_type = other DNA
atgaaggaggacctgaacctggagaacttcaccgccaagaccatctacgagaacagaatctacagcctgaagatcgagtgcggccccaagtaccccgaggccccccccttcgtgagattcgtgaccaagatcaacatgaacggcgtgaacagcagcaacggcgtggtggaccccagagccatcagcgtgctggccaagtggcagaacagctacagcatcaaggtggtgctgcaggagctgagaagactgatgatgagcaaggagaacatgaagctgccccagccccccgagggccagtgctacagcaactag

SEQ ID NO: 104441 - DNA, 312 bp, synthetic construct; identical to SEQ ID NO: 104440
  misc_feature 1..312: note = Description of Artificial Sequence: Synthetic coding sequence
  source 1..312: mol_type = other DNA

SEQ ID NO: 104442 - DNA, 318 bp, synthetic construct
  misc_feature 1..318: note = Description of Artificial Sequence: Synthetic coding sequence
  source 1..318: mol_type = other DNA
atggccgccaccaccggcagcggcgtgaaggtgcccagaaacttcagactgctggaggagctggaggagggccagaagggcgtgggcgacggcaccgtgagctggggcctggaggacgacgaggacatgaccctgaccagatggaccggcatgatcatcggcccccccagagtggaccccagagccatcagcgtgctggccaagtggcagaacagctacagcatcaaggtggtgctgcaggagctgagaagactgatgatgagcaaggagaacatgaagctgccccagccccccgagggccagtgctacagcaactag

SEQ ID NO: 104443 - DNA, 369 bp, synthetic construct
  misc_feature 1..369: note = Description of Artificial Sequence: Synthetic coding sequence
  source 1..369: mol_type = other DNA
atgagcacccccgccagaagaagactgatgagagacttcaagagactgcaggaggacccccccgccggcgtgagcggcgcccccagcgagaacaacatcatggtgtggaacgccgtgatcttcggccccgagggcacccccttcgaggacgtgtacgccgacggcagcatctgcctggacatcctgcagaacagatggagccccacctacgacgtgagcagcatcctgaccagcatccagagcctgctggacgagcccaaccccaacagccccgccaacagccaggccgcccagctgtaccaggagaacaagagagagtacgagaagagagtgagcgccatcgtggagcagagctggagagactgctag

SEQ ID NO: 104444 - DNA, 459 bp, synthetic construct
  misc_feature 1..459: note = Description of Artificial Sequence: Synthetic coding sequence
  source 1..459: mol_type = other DNA
atgagcacccccgccagaagaagactgatgagagacttcaagagactgcaggaggacccccccgccggcgtgagcggcgcccccagcgagaacaacatcatggtgtggaacgccgtgatcttcggccccgagggcacccccttcgaggacggcaccttcaagctgaccatcgagttcaccgaggagtaccccaacaagccccccaccgtgagattcgtgagcaagatgttccaccccaacgtgtacgccgacggcagcatctgcctggacatcctgcagaacagatggagccccacctacgacgtgagcagcatcctgaccagcatccagagcctgctggacgagcccaaccccaacagccccgccaacagccaggccgcccagctgtaccaggagaacaagagagagtacgagaagagagtgagcgccatcgtggagcagagctggagagactgctag

SEQ ID NO: 104445 - DNA, 234 bp, synthetic construct
  misc_feature 1..234: note = Description of Artificial Sequence: Synthetic coding sequence
  source 1..234: mol_type = other DNA
atgttccaccccaacgtgtacgccgacggcagcatctgcctggacatcctgcagaacagatggagccccacctacgacgtgagcagcatcctgaccagcatccagagcctgctggacgagcccaaccccaacagccccgccaacagccaggccgcccagctgtaccaggagaacaagagagagtacgagaagagagtgagcgccatcgtggagcagagctggagagactgctag

SEQ ID NO: 104446 - DNA, 459 bp, synthetic construct
  misc_feature 1..459: note = Description of Artificial Sequence: Synthetic coding sequence
  source 1..459: mol_type = other DNA
atgagcacccccgccagaagaagactgatgagagacttcaagagactgcaggaggacccccccgtgggcgtgagcggcgcccccagcgagaacaacatcatgcagtggaacgccgtgatcttcggccccgagggcacccccttcgaggacggcaccttcaagctggtgatcgagttcagcgaggagtaccccaacaagccccccaccgtgagattcctgagcaagatgttccaccccaacgtgtacgccgacggcagcatctgcctggacatcctgcagaacagatggagccccacctacgacgtgagcagcatcctgaccagcatccagagcctgctggacgagcccaaccccaacagccccgccaacagccaggccgcccagctgtaccaggagaacaagagagagtacgagaagagagtgagcgccatcgtggagcagagctggaacgacagctag

SEQ ID NO: 104447 - DNA, 153 bp, synthetic construct
  misc_feature 1..153: note = Description of Artificial Sequence: Synthetic coding sequence
  source 1..153: mol_type = other DNA
atggccagccagaacagagaccccgccgccaccagcgtggccgccgccagaaagggcgccgagcccagcggcggcgccgccagaggccccgtgggcaagagactgcagcaggagctgatgaccctgatgaaccccaccctgatcgtgccctag

SEQ ID NO: 104448 - DNA, 486 bp, synthetic construct
  misc_feature 1..486: note = Description of Artificial Sequence: Synthetic coding sequence
  source 1..486: mol_type = other DNA
atggccagccagaacagagaccccgccgccaccagcgtggccgccgccagaaagggcgccgagcccagcggcggcgccgccagaggccccgtgggcaagagactgcagcaggagctgatgaccctgatgatgagcggcgacaagggcatcagcgccttccccgagagcgacaacctgttcaagtgggtgggcaccatccacggcgccgccggcaccgccgtgggcagcatcagaaccagcagcaccgtgtgcctgctgagcggccccagagagacccaggacagcagcaagcccctggtgtggggcctgggctgggacatgagactgctgctggagctgaccctgcagctgttcctgcagatgcccgagcccaacatcgacagccccctgaacacccacgccgccgagctgtggaagaaccccaccgccttcaagaagtacctgcaggagacctacagcaagcaggtgaccagccaggagccctag

SEQ ID NO: 104449 - DNA, 453 bp, synthetic construct
  misc_feature 1..453: note = Description of Artificial Sequence: Synthetic coding sequence
  source 1..453: mol_type = other DNA
atggccagccagaacagagaccccgccgccaccagcgtggccgccgccagaaagggcgccgagcccagcggcggcgccgccagaggccccgtgggcaagagactgcagcaggagctgatgaccctgatggtgtacgaggacctgagatacaagctgagcctggagttccccagcggctacccctacaacgcccccaccgtgaagttcctgaccccctgctaccaccccaacgtggacacccagggcaacatctgcctggacatcctgaaggagaagtggagcgccctgtacgacgtgagaaccatcctgctgagcatccagagcctgctgggcgagcccaacatcgacagccccctgaacacccacgccgccgagctgtggaagaaccccaccgccttcaagaagtacctgcaggagacctacagcaagcaggtgaccagccaggagccctag

SEQ ID NO: 104450 - DNA, 540 bp, synthetic construct
  misc_feature 1..540: note = Description of Artificial Sequence: Synthetic coding sequence
  source 1..540: mol_type = other DNA
atggccagccagaacagagaccccgccgccaccagcgtggccgccgccagaaagggcgccgagcccagcggcggcgccgccagaggccccgtgggcaagagactgcagcaggagctgatgaccctgatgatgagcggcgacaagggcatcagcgccttccccgagagcgacaacctgttcaagtgggtgggcaccatccacggcgccgccggcaccgtgtacgaggacctgagatacaagctgagcctggagttccccagcggctacccctacaacgcccccaccgtgaagttcctgaccccctgctaccaccccaacgtggacacccagggcaacatctgcctggacatcctgaaggagaagtggagcgccctgtacgacgtgagaaccatcctgctgagcatccagagcctgctgggcgagcccaacatcgacagccccctgaacacccacgccgccgagctgtggaagaaccccaccgccttcaagaagtacctgcaggagacctacagcaagcaggtgaccagccaggagccctag

SEQ ID NO: 104451 - DNA, 423 bp, synthetic construct
  misc_feature 1..423: note = Description of Artificial Sequence: Synthetic coding sequence
  source 1..423: mol_type = other DNA
atgaccctgatgatgagcggcgacaagggcatcagcgccttccccgagagcgacaacctgttcaagtgggtgggcaccatccacggcgccgccggcaccgtgtacgaggacctgagatacaagctgagcctggagttccccagcggctacccctacaacgcccccaccgtgaagttcctgaccccctgctaccaccccaacgtggacacccagggcaacatctgcctggacatcctgaaggagaagtggagcgccctgtacgacgtgagaaccatcctgctgagcatccagagcctgctgggcgagcccaacatcgacagccccctgaacacccacgccgccgagctgtggaagaaccccaccgccttcaagaagtacctgcaggagacctacagcaagcaggtgaccagccaggagccctag

SEQ ID NO: 104452 - DNA, 423 bp, synthetic construct; identical to SEQ ID NO: 104451
  misc_feature 1..423: note = Description of Artificial Sequence: Synthetic coding sequence
  source 1..423: mol_type = other DNA

SEQ ID NO: 104453 - DNA, 114 bp, synthetic construct
  misc_feature 1..114: note = Description of Artificial Sequence: Synthetic coding sequence
  source 1..114: mol_type = other DNA
atggccgccagcgccgccgagaccagagtgttcctggaggtgagaggccagctgcagagcgccctgctgatcctgggcgacagagtgagcccctactgcccctgctggagctag

SEQ ID NO: 104454 - DNA, 1170 bp, synthetic construct
  misc_feature 1..1170: note = Description of Artificial Sequence: Synthetic coding sequence
  source 1..1170: mol_type = other DNA
atggccgccagcgccgccgagaccagagtgttcctggaggtgagaggccagctgcagagcgccctgctgatcctgggcgagcccaaggagggcggcatgcccatgaacatcagcatcatgcccagcagcctgcagatgaagacccccgagggctgcaccgagatccagctgcccgccgaggtgagactggtgcccagcagctgcagaggcctgcagttcgtggtgggcgacggcctgcacctgagactgcagacccaggccaagctgggcaccaagctgatcagcatgttcaaccagagcagccagacccaggagtgctgcaccttctactgccagagctgcggcgaggtgatcatcaaggacagaaagctgctgagagtgctgcccctgcccagcgagaactggggcgccctggtgggcgagtggtgctgccaccccgaccccttcgccaacaagagcctgcacccccaggagaacgactgcttcatcggcgacagcttcttcctggtgaacctgagaaccagcctgtggcagcagagacccgagctgagccccgtggagatgtgctgcgtgagcagcgacaaccactgcaagctggagcccaaggccaacaccaaggtgatctgcaagagatgcaaggtgatgctgggcgagaccgtgagcagcgagaccaccaagttctacatgaccgagatcatcatccagagcagcgagagaagcttccccatcatccccagaagctggttcgtgcagagcgtgatcgcccagtgcctggtgcagctgagcagcgccagaagcaccttcagattcaccatccagggccaggacgacaaggtgtacatcctgctgtggctgctgaacagcgacagcctggtgatcgagagcctgagaaacagcaagtacatcaagaagttccccctgctggagaacaccttcaaggccgacagcagcagcgcctggagcgccgtgaaggtgctgtaccagccctgcatcaagagcagaaacgagaagctggtgagcctgtgggagagcgacatcagcgtgcaccccctgaccctgcccagcgccacctgcctggagctgctgctgatcctgagcaagagcaacgccaacctgcccagcagcctgagaagagtgaacagcttccaggtggccttcctgaagatgtag

SEQ ID NO: 104455 - DNA, 444 bp, synthetic construct
  misc_feature 1..444: note = Description of Artificial Sequence: Synthetic coding sequence
  source 1..444: mol_type = other DNA
atggccctgaagagaatccagaaggagctgagcgacctgcagagagacccccccgcccactgcagcgccggccccgtgggcgacgacctgttccactggcaggccaccatcatgggcccccccgacagcgcctaccagggcggcgtgttcttcctgaccgtgcacttccccaccgactaccccttcaagccccccaagatcgccttcaccaccaagatctaccaccccaacatcaacagcaacggcagcatctgcctggacatcctgagaagccagtggagccccgccctgaccgtgagcaaggtgctgctgagcatctgcagcctgctgtgcgaccccaaccccgacgaccccctggtgcccgacatcgcccagatctacaagagcgacaaggagaagtacaacagacacgccagagagtggacccagaagtacgccatgtag

SEQ ID NO: 104456 - DNA, 606 bp, synthetic construct
  misc_feature 1..606: note = Description of Artificial Sequence: Synthetic coding sequence
  source 1..606: mol_type = other DNA
atgagcaccgaggcccagagagtggacgacagccccagcaccagcggcggcagcagcgacggcgaccagagagagagcgtgcagcaggagcccgagagagagcaggtgcagcccaagaagaaggagggcaagatcagcagcaagaccgccgccaagctgagcaccagcgccaagagaatccagaaggagctggccgagatcaccctggaccccccccccaactgcagcgccggccccaagggcgacaacatctacgagtggagaagcaccatcctgggcccccccggcagcgtgtacgagggcggcgtgttcttcctggacatcaccttcagccccgactaccccttcaagccccccaaggtgaccttcagaaccagaatctaccactgcaacatcaacagccagggcgtgatctgcctggacatcctgaaggacaactggagccccgccctgaccatcagcaaggtgctgctgagcatctgcagcctgctgaccgactgcaaccccgccgaccccctggtgggcagcatcgccacccagtacatgaccaacagagccgagcacgacagaatggccagacagtggaccaagagatacgccacctag

SEQ ID NO: 104457 - DNA, 606 bp, synthetic construct; identical to SEQ ID NO: 104456
  misc_feature 1..606: note = Description of Artificial Sequence: Synthetic coding sequence
  source 1..606: mol_type = other DNA

SEQ ID NO: 104458 - DNA, 624 bp, synthetic construct
  misc_feature 1..624: note = Description of Artificial Sequence: Synthetic coding sequence
  source 1..624: mol_type = other DNA
atgagcagcgacagacagagaagcgacgacgagagccccagcaccagcagcggcagcagcgacgccgaccagagagaccccgccgcccccgagcccgaggagcaggaggagagaaagcccagcgccacccagcagaagaagaacaccaagctgagcagcaagaccaccgccaagctgagcaccagcgccaagagaatccagaaggagctggccgagatcaccctggaccccccccccaactgcagcgccggccccaagggcgacaacatctacgagtggagaagcaccatcctgggcccccccggcagcgtgtacgagggcggcgtgttcttcctggacatcaccttcagcagcgactaccccttcaagccccccaaggtgaccttcagaaccagaatctaccactgcaacatcaacagccagggcgtgatctgcctggacatcctgaaggacaactggagccccgccctgaccatcagcaaggtgctgctgagcatctgcagcctgctgaccgactgcaaccccgccgaccccctggtgggcagcatcgccacccagtacctgaccaacagagccgagcacgacagaatcgccagacagtggaccaagagatacgccacctag

SEQ ID NO: 104459 - DNA, 624 bp, synthetic construct; identical to SEQ ID NO: 104458
  misc_feature 1..624: note = Description of Artificial Sequence: Synthetic coding sequence
  source 1..624: mol_type = other DNA

SEQ ID NO: 104460 - DNA, 624 bp, synthetic construct; identical to SEQ ID NO: 104458
  misc_feature 1..624: note = Description of Artificial Sequence: Synthetic coding sequence
  source 1..624: mol_type = other DNA

SEQ ID NO: 104461 - DNA, 624 bp, synthetic construct; identical to SEQ ID NO: 104458
  misc_feature 1..624: note = Description of Artificial Sequence: Synthetic coding sequence
  source 1..624: mol_type = other DNA

SEQ ID NO: 104462 - DNA, 528 bp, synthetic construct
  misc_feature 1..528: note = Description of Artificial Sequence: Synthetic coding sequence
  source 1..528: mol_type = other DNA
atgagcagcgacagacagagaagcgacgacgagagccccagcaccagcagcggcagcagcgacgccgaccagagagaccccgccgcccccgagcccgaggagcaggaggagagaaagcccagcgccacccagcagaagaagaacaccaagctgagcagcaagaccaccgccaagctgagcaccagcgccaagagaatccagaaggagctggccgagatcaccctggaccccccccccaactgcagcgccggccccaagggcgacaacatctacgagtggagaagcaccatcctgggcccccccggcagcgtgtacgagggcggcgtgttcttcctggacatcaccttcagcagcgactaccccttcaagccccccaaggtgaccttcagaaccagaatctaccactgcaacatcaacagccagggcgtgatctgcctggacatcctgaaggacaactggagccccgccctgaccatcagcaaggtgctgctgagcatctgcagcctgctgaccgactgcaacccctag

SEQ ID NO: 104463 - DNA, 528 bp, synthetic construct; identical to SEQ ID NO: 104462
  misc_feature 1..528: note = Description of Artificial Sequence: Synthetic coding sequence
  source 1..528: mol_type = other DNA

SEQ ID NO: 104464 - DNA, 528 bp, synthetic construct; identical to SEQ ID NO: 104462
  misc_feature 1..528: note = Description of Artificial Sequence: Synthetic coding sequence
  source 1..528: mol_type = other DNA

SEQ ID NO: 104465 - DNA, 414 bp, synthetic construct
  misc_feature 1..414: note = Description of Artificial Sequence: Synthetic coding sequence
  source 1..414: mol_type = other DNA
atgaacgaggagaacttcttcgagtgggaggccctgatcatgggccccgaggacacctgcttcgagttcggcgtgttccccgccatcctgagcttccccctggactaccccctgagcccccccaagatgagattcacctgcgagatgttccaccccaacatctaccccgacggcagagtgtgcatcagcatcctgcacgcccccggcgacgaccccatgggctacgagagcagcgccgagagatggagccccgtgcagagcgtggagaagatcctgctgagcgtggtgagcatgctggccgagcccaacgacgagagcggcgccaacgtggacgccagcaagatgtggagagacgacagagagcagttctacaagatcgccaagcagatcgtgcagaagagcctgggcctgtag

SEQ ID NO: 104466 - DNA, 498 bp, synthetic construct
  misc_feature 1..498: note = Description of Artificial Sequence: Synthetic coding sequence
  source 1..498: mol_type = other DNA
atggccggcaccgccctgaagagactgatggccgagtacaagcagctgaccctgaacccccccgagggcatcgtggccggccccatgaacgaggagaacttcttcgagtgggaggccctgatcatgggccccgaggacacctgcttcgagttcggcgtgttccccgccatcctgagcttccccctggactaccccctgagcccccccaagatgagattcacctgcgagatgttccaccccaacatctaccccgacggcagagtgtgcatcagcatcctgcacgcccccggcgacgaccccatgggctacgagagcagcgccgagagatggagccccgtgcagagcgtggagaagatcctgctgagcgtggtgagcatgctggccgagcccaacgacgagagcggcgccaacgtggacgccagcaagatgtggagagacgacagagagcagttctacaagatcgccaagcagatcgtgcagaagagcctgggcctgtag

SEQ ID NO: 104467 - DNA, 552 bp, synthetic construct
  misc_feature 1..552: note = Description of Artificial Sequence: Synthetic coding sequence
  source 1..552: mol_type = other DNA
atgagcagccccagccccggcaagagaagaatggacaccgacgtggtgaagctgatcgagagcaagcacgaggtgaccatcctgggcggcctgaacgagttcgtggtgaagttctacggcccccagggcaccccctacgagggcggcgtgtggaaggtgagagtggacctgcccgacaagtaccccttcaagagccccagcatcggcttcatgaacaagatcttccaccccaacatcgacgaggccagcggcaccgtgtgcctggacgtgatcaaccagacctggaccgccctgtacgacctgaccaacatcttcgagagcttcctgccccagctgctggcctaccccaaccccatcgaccccctgaacggcgacgccgccgccatgtacctgcacagacccgaggagtacaagcagaagatcaaggagtacatccagaagtacgccaccgaggaggccctgaaggagcaggaggagggcaccggcgacagcagcagcgagagcagcatgagcgacttcagcgaggacgaggcccaggacatggagctgtag

SEQ ID NO: 104468 - DNA, 459 bp, synthetic construct
  misc_feature 1..459: note = Description of Artificial Sequence: Synthetic coding sequence
  source 1..459: mol_type = other DNA
atgagcagccccagccccggcaagagaagaatggacaccgacgtggtgaagctgatcgagagcaagcacgaggtgaccatcctgggcggcctgaacgagttcgtggtgaagttctacggcccccagggcaccccctacgagggcggcgtgtggaaggtgagagtggacctgcccgacaagtaccccttcaagagccccagcatcgacctgaccaacatcttcgagagcttcctgccccagctgctggcctaccccaaccccatcgaccccctgaacggcgacgccgccgccatgtacctgcacagacccgaggagtacaagcagaagatcaaggagtacatccagaagtacgccaccgaggaggccctgaaggagcaggaggagggcaccggcgacagcagcagcgagagcagcatgagcgacttcagcgaggacgaggcccaggacatggagctgtag

SEQ ID NO: 104469 - DNA, 477 bp, synthetic construct
  misc_feature 1..477: note = Description of Artificial Sequence: Synthetic coding sequence
  source 1..477: mol_type = other DNA
atgagcggcatcgccctgagcagactggcccaggagagaaaggcctggagaaaggaccaccccttcggcttcgtggccgtgcccaccaagaaccccgacggcaccatgaacctgatgaactgggagtgcgccatccccggcaagaagggcaccccctgggagggcggcctgttcaagctgagaatgctgttcaaggacgactaccccagcagcccccccaagtgcaagttcgagccccccctgttccaccccaacgtgtaccccagcggcaccgtgtgcctgagcatcctggaggaggacaaggactggagacccgccatcaccatcaagcagatcctgctgggcatccaggagctgctgaacgagcccaacatccaggaccccgcccaggccgaggcctacaccatctactgccagaacagagtggagtacgagaagagagtgagagcccaggccaagaagttcgcccccagctag

SEQ ID NO: 104470 - DNA, 477 bp, synthetic construct; identical to SEQ ID NO: 104469
  misc_feature 1..477: note = Description of Artificial Sequence: Synthetic coding sequence
  source 1..477: mol_type = other DNA

SEQ ID NO: 104471 - DNA, 477 bp, synthetic construct; identical to SEQ ID NO: 104469
  misc_feature 1..477: note = Description of Artificial Sequence: Synthetic coding sequence
  source 1..477: mol_type = other DNA

SEQ ID NO: 104472 - DNA, 477 bp, synthetic construct; identical to SEQ ID NO: 104469
  misc_feature 1..477: note = Description of Artificial Sequence: Synthetic coding sequence
  source 1..477: mol_type = other DNA

SEQ ID NO: 104473 - DNA, 477 bp, synthetic construct; identical to SEQ ID NO: 104469
  misc_feature 1..477: note = Description of Artificial Sequence: Synthetic coding sequence
  source 1..477: mol_type = other DNA

SEQ ID NO: 104474 - DNA, 477 bp, synthetic construct; identical to SEQ ID NO: 104469
  misc_feature 1..477: note = Description of Artificial Sequence: Synthetic coding sequence
  source 1..477: mol_type = other DNA

SEQ ID NO: 104475 - DNA, 465 bp, synthetic construct
  misc_feature 1..465: note = Description of Artificial Sequence: Synthetic coding sequence
  source 1..465: mol_type = other DNA
atggccgccagcagaagactgatgaaggagctggaggagatcagaaagtgcggcatgaagaacttcagaaacatccaggtggacgaggccaacctgctgacctggcagggcctgatcgtgcccgacaaccccccctacgacaagggcgccttcagaatcgagatcaacttccccgccgagtaccccttcaagccccccaagatcaccttcaagaccaagatctaccaccccaacatcgacgagaagggccaggtgtgcctgcccgtgatcagcgccgagaactggaagcccgccaccaagaccgaccaggtgatccagagcctgatcgccctggtgaacgacccccagcccgagcaccccctgagagccgacctggccgaggagtacagcaaggacagaaagaagttctgcaagaacgccgaggagttcaccaagaagtacggcgagaagagacccgtggactag

SEQ ID NO: 104476 - DNA, 639 bp, synthetic construct
  misc_feature 1..639: note = Description of Artificial Sequence: Synthetic coding sequence
  source 1..639: mol_type = other DNA
atgcaggtggccgccggcaccagaggcgacaccagactgcaggaggtggccctgctgccccagctgttcgacctgctggtgctgggccagagaagagccagactgctgagacaggtgcccagcgccctggccggcaaggacctggcccagctgcaggccggcgccaccctggccggctacagaagagcccacggccccgaggagctggaggagatcagaaagtgcggcatgaagaacttcagaaacatccaggtggacgaggccaacctgctgacctggcagggcctgatcgtgcccgacaaccccccctacgacaagggcgccttcagaatcgagatcaacttccccgccgagtaccccttcaagccccccaagatcaccttcaagaccaagatctaccaccccaacatcgacgagaagggccaggtgtgcctgcccgtgatcagcgccgagaactggaagcccgccaccaagaccgaccaggtgatccagagcctgatcgccctggtgaacgacccccagcccgagcaccccctgagagccgacctggccgaggagtacagcaaggacagaaagaagttctgcaagaacgccgaggagttcaccaagaagtacggcgagaagagacccgtggactag

SEQ ID NO: 104477 - DNA, 369 bp, synthetic construct
  misc_feature 1..369: note = Description of Artificial Sequence: Synthetic coding sequence
  source 1..369: mol_type = other DNA
atggccgccagcagaagactgatgaaggacaaccccccctacgacaagggcgccttcagaatcgagatcaacttccccgccgagtaccccttcaagccccccaagatcaccttcaagaccaagatctaccaccccaacatcgacgagaagggccaggtgtgcctgcccgtgatcagcgccgagaactggaagcccgccaccaagaccgaccaggtgatccagagcctgatcgccctggtgaacgacccccagcccgagcaccccctgagagccgacctggccgaggagtacagcaaggacagaaagaagttctgcaagaacgccgaggagttcaccaagaagtacggcgagaagagacccgtggactag

SEQ ID NO: 104478 - DNA, 462 bp, synthetic construct
  misc_feature 1..462: note = Description of Artificial Sequence: Synthetic coding sequence
  source 1..462: mol_type = other DNA
atgatggccagcatgagagtggtgaaggagctggaggacctgcagaagaagccccccccctacctgagaaacctgagcagcgacgacgccaacgtgctggtgtggcacgccctgctgctgcccgaccagcccccctaccacctgaaggccttcaacctgagaatcagcttcccccccgagtaccccttcaagccccccatgatcaagttcaccaccaagatctaccaccccaacgtggacgagaacggccagatctgcctgcccatcatcagcagcgagaactggaagccctgcaccaagacctgccaggtgctggaggccctgaacgtgctggtgaacagacccaacatcagagagcccctgagaatggacctggccgacctgctgacccagaaccccgagctgttcagaaagaacgccgaggagttcaccctgagattcggcgtggacagacccagctag

SEQ ID NO: 104479 - DNA, 264 bp, synthetic construct
  misc_feature 1..264: note = Description of Artificial Sequence: Synthetic coding sequence
  source 1..264: mol_type = other DNA
atgatcaagttcaccaccaagatctaccaccccaacgtggacgagaacggccagatctgcctgcccatcatcagcagcgagaactggaagccctgcaccaagacctgccaggtgctggaggccctgaacgtgctggtgaacagacccaacatcagagagcccctgagaatggacctggccgacctgctgacccagaaccccgagctgttcagaaagaacgccgaggagttcaccctgagattcggcgtggacagacccagctag

SEQ ID NO: 104480 - DNA, 198 bp, synthetic construct
  misc_feature 1..198: note = Description of Artificial Sequence: Synthetic coding sequence
  source 1..198: mol_type = other DNA
atgatcaagttcaccaccaagatctaccaccccaacgtggacgagaacggccagatctgcctgcccatcatcagcagcgagaactggaagccctgcaccaagacctgccaggtgctggaggccctgaacgtgctggtgaacagacccaacatcagagagcccctgagaatggacctggccgacctgctgacccagtag

SEQ ID NO: 104481 - DNA, 1128 bp, synthetic construct
  misc_feature 1..1128: note = Description of Artificial Sequence: Synthetic coding sequence
  source 1..1128: mol_type = other DNA
atgagcgtgagcggcctgaaggccgagctgaagttcctggccagcatcttcgacaagaaccacgagagattcagaatcgtgagctggaagctggacgagctgcactgccagttcctggtgccccagcagggcagcccccacagcctgcccccccccctgaccctgcactgcaacatcaccgagagctaccccagcagcagccccatctggttcgtggacagcgaggaccccaacctgaccagcgtgctggagagactggaggacaccaagaacaacaacctgctgagacagcagctgaagtggctgatctgcgagctgtgcagcctgtacaacctgcccaagcacctggacgtggagatgctggaccagcccctgcccaccggccagaacggcaccaccgaggaggtgaccagcgaggaggaggaggaggaggaggagatggccgaggacatcgaggacctggaccactacgagatgaaggaggaggagcccatcagcggcaagaagagcgaggacgagggcatcgagaaggagaacctggccatcctggagaagatcagaaagacccagagacaggaccacctgaacggcgccgtgagcggcagcgtgcaggccagcgacagactgatgaaggagctgagagacatctacagaagccagagctacaagaccggcatctacagcgtggagctgatcaacgacagcctgtacgactggcacgtgaagctgcagaaggtggaccccgacagccccctgcacagcgacctgcagatcctgaaggagaaggagggcatcgagtacatcctgctgaacttcagcttcaaggacaacttccccttcgacccccccttcgtgagagtggtgctgcccgtgctgagcggcggctacgtgctgggcggcggcgccctgtgcatggagctgctgaccaagcagggctggagcagcgcctacagcatcgagagcgtgatcatgcagatcaacgccaccctggtgaagggcaaggccagagtgcagttcggcgccaacaagaaccagtacaacctggccagagcccagcagagctacaacagcatcgtgcagatccacgagaagaacggctggtacaccccccccaaggaggacggctag

SEQ ID NO: 104482 - DNA, 945 bp, synthetic construct
  misc_feature 1..945: note = Description of Artificial Sequence: Synthetic coding sequence
  source 1..945: mol_type = other DNA
atgagcgtgagcggcctgaaggccgagctgaagttcctggccagcatcttcgacaagaaccacgagagattcagaatcgtgagctggaagctggacgagctgcactgccagttcctggtgccccagcagggcagcccccacagcctgcccccccccctgaccctgcactgcaacatcaccgagagctaccccagcagcagccccatctggttcgtggacagcgaggaccccaacctgaccagcgtgctggagagactggaggacaccaagaacaacaacctgctgagacagcagctgaagtggctgatctgcgagctgtgcagcctgtacaacctgcccaagcacctggacgtggagatgctggaccagcccctgcccaccggccagaacggcaccaccgaggaggtgaccagcgaggaggaggaggaggaggaggagatggccgaggacatcgaggacctggaccactacgagatgaaggaggaggagcccatcagcggcaagaagagcgaggacgagggcatcgagaaggagaacctggccatcctggagaagatcagaaagacccagagacaggaccacctgaacggcgccgtgagcggcagcgtgcaggccagcgacagactgatgaaggagctgagagacatctacagaagccagagctacaagaccggcatctacagcgtggagctgatcaacgacagcctgtacgactggcacgtgaagctgcagaaggtggaccccgacagccccctgcacagcgacctgcagatcctgaaggagaaggagggcatcgagtacatcctgctgaacttcagcttcaaggacaacttccccttcgacccccccttcgtgagagtggtgctgcccgtgctgagcggcggcctggtgcaccccagcaagggcagatggctgaacgtgctgaccgtggtgtgcctggactag

SEQ ID NO: 104483 - DNA, 1080 bp, synthetic construct
  misc_feature 1..1080: note = Description of Artificial Sequence: Synthetic coding sequence
  source 1..1080: mol_type = other DNA
atgagaatggacagcctgaccgaggagaagctggagtgcagactgtggtgctgcctgagcgaccccagcccccccggcctggccgccagatgctgcgtgctggagagaagcatcgtgcccagcctgagacaggagagctaccccagcagcagccccatctggttcgtggacagcgaggaccccaacctgaccagcgtgctggagagactggaggacaccaagaacaacaacctgctgagacagcagctgaagtggctgatctgcgagctgtgcagcctgtacaacctgcccaagcacctggacgtggagatgctggaccagcccctgcccaccggccagaacggcaccaccgaggaggtgaccagcgaggaggaggaggaggaggaggagatggccgaggacatcgaggacctggaccactacgagatgaaggaggaggagcccatcagcggcaagaagagcgaggacgagggcatcgagaaggagaacctggccatcctggagaagatcagaaagacccagagacaggaccacctgaacggcgccgtgagcggcagcgtgcaggccagcgacagactgatgaaggagctgagagacatctacagaagccagagctacaagaccggcatctacagcgtggagctgatcaacgacagcctgtacgactggcacgtgaagctgcagaaggtggaccccgacagccccctgcacagcgacctgcagatcctgaaggagaaggagggcatcgagtacatcctgctgaacttcagcttcaaggacaacttccccttcgacccccccttcgtgagagtggtgctgcccgtgctgagcggcggctacgtgctgggcggcggcgccctgtgcatggagctgctgaccaagcagggctggagcagcgcctacagcatcgagagcgtgatcatgcagatcaacgccaccctggtgaagggcaaggccagagtgcagttcggcgccaacaagaaccagtacaacctggccagagcccagcagagctacaacagcatcgtgcagatccacgagaagaacggctggtacaccccccccaaggaggacggctag

SEQ ID NO: 104484 - DNA, 1080 bp, synthetic construct; identical to SEQ ID NO: 104483
  misc_feature 1..1080: note = Description of Artificial Sequence: Synthetic coding sequence
  source 1..1080: mol_type = other DNA

SEQ ID NO: 104485 - DNA, 717 bp, synthetic construct
  misc_feature 1..717: note = Description of Artificial Sequence: Synthetic coding sequence
  source 1..717: mol_type = other DNA
atggcccagcagcagatgaccagcagccagaaggccctgatgctggagctgaagagcctgcaggaggagcccgtggagggcttcagaatcaccctggtggacgagagcgacctgtacaactgggaggtggccatcttcggcccccccaacaccctgtacgagggcggctacttcaaggcccacatcaagttccccatcgactacccctacagcccccccaccttcagattcctgaccaagatgtggcaccccaacatctacgagaacggcgacgtgtgcatcagcatcctgcacccccccgtggacgacccccagagcggcgagctgcccagcgagagatggaaccccacccagaacgtgagaaccatcctgctgagcgtgatcagcctgctgaacgagcccaacaccttcagccccgccaacgtggacgccagcgtgatgttcagaaagtggagagacagcaagggcaaggacaaggagtacgccgagatcatcagaaagcaggtgagcgccaccaaggccgaggccgagaaggacggcgtgaaggtgcccaccaccctggccgagtactgcatcaagaccaaggtgcccagcaacgacaacagcagcgacctgctgtacgacgacctgtacgacgacgacatcgacgacgaggacgaggaggaggaggacgccgactgctacgacgacgacgacagcggcaacgaggagagctag

SEQ ID NO: 104486 - DNA, 669 bp, synthetic construct
  misc_feature 1..669: note = Description of Artificial Sequence: Synthetic coding sequence
  source 1..669: mol_type = other DNA
atgaacagcaacgtggagaacctgcccccccacatcatcagactggtgtacaaggaggtgaccaccctgaccgccgacccccccgacggcatcaaggtgttccccaacgaggaggacctgaccgacctgcaggtgaccatcgagggccccgagggcaccccctacgccggcggcctgttcagaatgaagctgctgctgggcaaggacttccccgccagcccccccaagggctacttcctgaccaagatcttccaccccaacgtgggcgccaacggcgagatctgcgtgaacgtgctgaagagagactggaccgccgagctgggcatcagacacgtgctgctgaccatcaagtgcctgctgatccaccccaaccccgagagcgccctgaacgaggaggccggcagactgctgctggagaactacgaggagtacgccgccagagccagactgctgaccgagatccacggcggcgccggcggccccagcggcagagccgaggccggcagagccctggccagcggcaccgaggccagcagcaccgaccccggcgcccccggcggccccggcggcgccgagggccccatggccaagaagcacgccggcgagagagacaagaagctggccgccaagaagaagaccgacaagaagagagccctgagaagactgtag

SEQ ID NO: 104487 - DNA, 594 bp, synthetic construct
  misc_feature 1..594: note = Description of Artificial Sequence: Synthetic coding sequence
  source 1..594: mol_type = other DNA
atgcagagagccagcagactgaagagagagctgcacatgctggccaccgagcccccccccggcatcacctgctggcaggacaaggaccagatggacgacctgagagcccagatcctgggcggcgccaacaccccctacgagaagggcgtgttcaagctggaggtgatcatccccgagagataccccttcgagcccccccagatcagattcctgacccccatctaccaccccaacatcgacagcgccggcagaatctgcctggacgtgctgaagctgccccccaagggcgcctggagacccagcctgaacatcgccaccgtgctgaccagcatccagctgctgatgagcgagcccaaccccgacgaccccctgatggccgacatcagcagcgagttcaagtacaacaagcccgccttcctgaagaacgccagacagtggaccgagaagcacgccagacagaagcagaaggccgacgaggaggagatgctggacaacctgcccgaggccggcgacagcagagtgcacaacagcacccagaagagaaaggccagccagctggtgggcatcgagaagaagttccaccccgacgtgtag

SEQ ID NO: 104488 - DNA, 489 bp, synthetic construct
  misc_feature 1..489: note = Description of Artificial Sequence: Synthetic coding sequence
  source 1..489: mol_type = other DNA
atggccagcatgcagaccaccggcagaagagtggaggtgtggttccccaagagactgcagaaggagctgctggccctgcagaacgaccccccccccggcatgaccctgaacgagaagagcgtgcagaacagcatcacccagtggatcgtggacatggagggcgcccccggcaccctgtacgagggcgagaagttccagctgctgttcaagttcagcagcagataccccttcgacagcccccaggtgatgttcaccggcgagaacatccccgtgcacccccacgtgtacagcaacggccacatctgcctgagcatcctgaccgaggactggagccccgccctgagcgtgcagagcgtgtgcctgagcatcatcagcatgctgagcagctgcaaggagaagagaagaccccccgacaacagcttctacgtgagaacctgcaacaagaaccccaagaagaccaagtggtggtaccacgacgacacctgctag

SEQ ID NO: 104489 - DNA, 480 bp, synthetic construct
  misc_feature 1..480: note = Description of Artificial Sequence: Synthetic coding sequence
  source 1..480: mol_type = other DNA
atggccagcatgcagaagagactgcagaaggagctgctggccctgcagaacgaccccccccccggcatgaccctgaacgagaagagcgtgcagaacagcatcacccagtggatcgtggacatggagggcgcccccggcaccctgtacgagggcgagaagttccagctgctgttcaagttcagcagcagataccccttcgacagcccccaggtgatgttcaccggcgagaacatccccgtgcacccccacgtgtacagcaacggccacatctgcctgagcatcctgaccgaggactggagccccgccctgagcgtgcagagcgtgtgcctgagcatcatcagcatgctgagcagctgcaaggagaagagaagaccccccgacaacagcttctacgtgagaacctgcaacaagaaccccaagaagaccaagtggtggtaccacgagctgaagagcgccttcatcctgagcatcaccgactag

SEQ ID NO: 104490 - DNA, 456 bp, synthetic construct
  misc_feature 1..456: note = Description of Artificial Sequence: Synthetic coding sequence
  source 1..456: mol_type = other DNA
atggccagcatgcagaagagactgcagaaggagctgctggccctgcagaacgaccccccccccggcatgaccctgaacgagaagagcgtgcagaacagcatcacccagtggatcgtggacatggagggcgcccccggcaccctgtacgagggcgagaagttccagctgctgttcaagttcagcagcagataccccttcgacagcccccaggtgatgttcaccggcgagaacatccccgtgcacccccacgtgtacagcaacggccacatctgcctgagcatcctgaccgaggactggagccccgccctgagcgtgcagagcgtgtgcctgagcatcatcagcatgctgagcagctgcaaggagaagagaagaccccccgacaacagcttctacgtgagaacctgcaacaagaaccccaagaagaccaagtggtggtaccacgacgacacctgctag

SEQ ID NO: 104491 - DNA, 354 bp, synthetic construct
  misc_feature 1..354: note = Description of Artificial Sequence: Synthetic coding sequence
  source 1..354: mol_type = other DNA
atgagcagcaacgtgcccgccgacatgatcaacctgagactgatcctggtgagcggcaagaccaaggagttcctgttcagccccaacgacagcgccagcgacatcgccaagcacgtgtacgacaactggcccatggactgggaggaggagcaggtgagcagccccaacatcctgagactgatctaccagggcagattcctgcacggcaacgtgaccctgggcgccctgaagctgcccttcggcaagaccaccgtgatgcacctggtggccagagagaccctgcccgagcccaacagccagggccagagaaacagagagaagaccggcgagagcaactgctgcgtgatcctgtag

SEQ ID NO: 104492 - DNA, 474 bp, synthetic construct
  misc_feature 1..474: note = Description of Artificial Sequence: Synthetic coding sequence
  source 1..474: mol_type = other DNA
atgcagctgaccgtgaaggccctgcagggcagagagtgcagcctgcaggtgcccgaggacgagctggtgagcaccctgaagcagctggtgagcgagaagctgaacgtgcccgtgagacagcagagactgctgttcaagggcaaggccctggccgacggcaagagactgagcgactacagcatcggccccaacagcaagctgaacctggtggtgaagcccctggagaaggtgctgctggaggagggcgaggcccagagactggccgacagcccccccccccaggtgtggcagctgatcagcaaggtgctggccagacacttcagcgccgccgacgccagcagagtgctggagcagctgcagagagactacgagagaagcctgagcagactgaccctggacgacatcgagagactggccagcagattcctgcaccccgaggtgaccgagaccatggagaagggcttcagcaagtag

SEQ ID NO: 104493 - DNA, 525 bp, synthetic construct
  misc_feature 1..525: note = Description of Artificial Sequence: Synthetic coding sequence
  source 1..525: mol_type = other DNA
atgttcctgaccgtgaagctgctgctgggccagagatgcagcctgaaggtgagcggccaggagagcgtggccaccctgaagagactggtgagcagaagactgaaggtgcccgaggagcagcagcacctgctgttcagaggccagctgctggaggacgacaagcacctgagcgactactgcatcggccccaacgccagcatcaacgtgatcatgcagcccctggagaagatggccctgaaggaggcccaccagccccagacccagcccctgtggcaccagctgggcctggtgctggccaagcacttcgagccccaggacgccaaggccgtgctgcagctgctgagacaggagcacgaggagagactgcagaagatcagcctggagcacctggagcagctggcccagtacctgctggccgaggagccccacgtggagcccgccggcgagagagagctggaggccaaggccagaccccagagcagctgcgacatggaggagaaggaggaggccgccgccgaccagtag

SEQ ID NO: 104494 - DNA, 222 bp, synthetic construct
  misc_feature 1..222: note = Description of Artificial Sequence: Synthetic coding sequence
  source 1..222: mol_type = other DNA
atgatcgaggtggtgtgcaacgacagactgggcaagaaggtgagagtgaagtgcaacaccgacgacaccatcggcgacctgaagaagctgatcgccgcccagaccggcaccagatggaacaagatcgtgctgaagaagtggtacaccatcttcaaggaccacgtgagcctgggcgactacgagatccacgacggcatgaacctggagctgtactaccagtag

SEQ ID NO: 104495 - DNA, 222 bp, synthetic construct; identical to SEQ ID NO: 104494
  misc_feature 1..222: note = Description of Artificial Sequence: Synthetic coding sequence
  source 1..222: mol_type = other DNA

SEQ ID NO: 104496 - DNA, 1143 bp, synthetic construct
  misc_feature 1..1143: note = Description of Artificial Sequence: Synthetic coding sequence
  source 1..1143: mol_type = other DNA
atgagcctgagcgactggcacctggccgtgaagctggccgaccagcccctgacccccaagagcatcctgagactgcccgagaccgagctgggcgagtacagcctgggcggctacagcatcagcttcctgaagcagctgatcgccggcaagctgcaggagagcgtgcccgaccccgagctgatcgacctgatctactgcggcagaaagctgaaggacgaccagaccctggacttctacggcatccagcccggcagcaccgtgcacgtgctgagaaagagctggcccgagcccgaccagaagcccgagcccgtggacaaggtggccgccatgagagagttcagagtgctgcacaccgccctgcacagcagcagcagctacagagaggccgtgttcaagatgctgagcaacaaggagagcctggaccagatcatcgtggccacccccggcctgagcagcgaccccatcgccctgggcgtgctgcaggacaaggacctgttcagcgtgttcgccgaccccaacatgctggacaccctggtgcccgcccaccccgccctggtgaacgccatcgtgctggtgctgcacagcgtggccggcagcgcccccatgcccggcaccgacagcagcagcagaagcatgcccagcagcagctacagagacatgcccggcggcttcctgttcgagggcctgagcgacgacgaggacgacttccaccccaacaccagaagcacccccagcagcagcacccccagcagcagacccgccagcctgggctacagcggcgccgccggccccagacccatcacccagagcgagctggccaccgccctggccctggccagcacccccgagagcagcagccacacccccacccccggcacccagggccacagcagcggcaccagccccatgagcagcggcgtgcagagcggcacccccatcaccaacgacctgttcagccaggccctgcagcacgccctgcaggccagcggccagcccagcctgcagagccagtggcagccccagctgcagcagctgagagacatgggcatccaggacgacgagctgagcctgagagccctgcaggccaccggcggcgacatccaggccgccctggagctgatcttcgccggcggcgccccctag

SEQ ID NO: 104497 - DNA, 1143 bp, synthetic construct; identical to SEQ ID NO: 104496
  misc_feature 1..1143: note = Description of Artificial Sequence: Synthetic coding sequence
  source 1..1143: mol_type = other DNA

SEQ ID NO: 104498 - DNA, 957 bp, synthetic construct
  misc_feature 1..957: note = Description of Artificial Sequence: Synthetic coding sequence
  source 1..957: mol_type = other DNA
atggccctgcccatcatcgtgaagtggggcggccaggagtacagcgtgaccaccctgagcgaggacgacaccgtgctggacctgaagcagttcctgaagaccctgaccggcgtgctgcccgagagacagaagctgctgggcctgaaggtgaagggcaagcccgccgagaacgacgtgaagctgggcgccctgaagctgaagcccaacaccaagatcatgatgatgggcaccagagaggagagcctggaggacgtgctgggccccccccccgacaacgacgacgtggtgaacgacttcgacatcgaggacgaggtggtggaggtggagaacagagaggagaacctgctgaagatcagcagaagagtgaaggagtacaaggtggagatcctgaacccccccagagagggcaagaagctgctggtgctggacgtggactacaccctgttcgaccacagaagctgcgccgagaccggcgtggagctgatgagaccctacctgcacgagttcctgaccagcgcctacgaggactacgacatcgtgatctggagcgccaccaacatgaagtggatcgaggccaagatgaaggagctgggcgtgagcaccaacgccaactacaagatcaccttcatgctggacagcgccgccatgatcaccgtgcacacccccagaagaggcctgatcgacgtgaagcccctgggcgtgatctggggcaagttcagcgagttctacagcaagaagaacaccatcatgttcgacgacatcggcagaaacttcctgatgaacccccagaacggcctgaagatcagacccttcatgaaggcccacctgaacagagacaaggacaaggagctgctgaagctgacccagtacctgaaggagatcgccaagctggacgacttcctggacctgaaccacaagtactgggagagatacctgagcaagaagcagggccagtag

SEQ ID NO: 104499 - DNA, 1923 bp, synthetic construct
  misc_feature 1..1923: note = Description of Artificial Sequence: Synthetic coding sequence
  source 1..1923: mol_type = other DNA
atggccctgagcagaggcctgcccagagagctggccgaggccgtggccggcggcagagtgctggtggtgggcgccggcggcatcggctgcgagctgctgaagaacctggtgctgaccggcttcagccacatcgacctgatcgacctggacaccatcgacgtgagcaacctgaacagacagttcctgttccagaagaagcacgtgggcagaagcaaggcccaggtggccaaggagagcgtgctgcagttctaccccaaggccaacatcgtggcctaccacgacagcatcatgaaccccgactacaacgtggagttcttcagacagttcatcctggtgatgaacgccctggacaacagagccgccagaaaccacgtgaacagaatgtgcctggccgccgacgtgcccctgatcgagagcggcaccgccggctacctgggccaggtgaccaccatcaagaagggcgtgaccgagtgctacgagtgccaccccaagcccacccagagaaccttccccggctgcaccatcagaaacacccccagcgagcccatccactgcatcgtgtgggccaagtacctgttcaaccagctgttcggcgaggaggacgccgaccaggaggtgagccccgacagagccgaccccgaggccgcctgggagcccaccgaggccgaggccagagccagagccagcaacgaggacggcgacatcaagagaatcagcaccaaggagtgggccaagagcaccggctacgaccccgtgaagctgttcaccaagctgttcaaggacgacatcagatacctgctgaccatggacaagctgtggagaaagagaaagccccccgtgcccctggactgggccgaggtgcagagccagggcgaggagaccaacgccagcgaccagcagaacgagccccagctgggcctgaaggaccagcaggtgctggacgtgaagagctacgccagactgttcagcaagagcatcgagaccctgagagtgcacctggccgagaagggcgacggcgccgagctgatctgggacaaggacgaccccagcgccatggacttcgtgaccagcgccgccaacctgagaatgcacatcttcagcatgaacatgaagagcagattcgacatcaagagcatggccggcaacatcatccccgccatcgccaccaccaacgccgtgatcgccggcctgatcgtgctggagggcctgaagatcctgagcggcaagatcgaccagtgcagaaccatcttcctgaacaagcagcccaaccccagaaagaagctgctggtgccctgcgccctggacccccccaaccccaactgctacgtgtgcgccagcaagcccgaggtgaccgtgagactgaacgtgcacaaggtgaccgtgctgaccctgcaggacaagatcgtgaaggagaagttcgccatggtggcccccgacgtgcagatcgaggacggcaagggcaccatcctgatcagcagcgaggagggcgagaccgaggccaacaaccacaagaagctgagcgagttcggcatcagaaacggcagcagactgcaggccgacgacttcctgcaggactacaccctgctgatcaacatcctgcacagcgaggacctgggcaaggacgtggagttcgaggtggtgggcgacgcccccgagaaggtgggccccaagcaggccgaggacgccgccaagagcatcaccaacggcagcgacgacggcgcccagcccagcaccagcaccgcccaggagcaggacgacgtgctgatcgtggacagcgacgaggaggacagcagcaacaacgccgacgtgagcgaggaggagagaagcagaaagagaaagctggacgagaaggagaacctgagcgccaagagaagcagaatcgagcagaaggaggagctggacgacgtgatcgccctggactag

SEQ ID NO: 104500 - DNA, 1635 bp, synthetic construct
  misc_feature 1..1635: note = Description of Artificial Sequence: Synthetic coding sequence
  source 1..1635: mol_type = other DNA
atgaaccccgactacaacgtggagttcttcagacagttcatcctggtgatgaacgccctggacaacagagccgccagaaaccacgtgaacagaatgtgcctggccgccgacgtgcccctgatcgagagcggcaccgccggctacctgggccaggtgaccaccatcaagaagggcgtgaccgagtgctacgagtgccaccccaagcccacccagagaaccttccccggctgcaccatcagaaacacccccagcgagcccatccactgcatcgtgtgggccaagtacctgttcaaccagctgttcggcgaggaggacgccgaccaggaggtgagccccgacagagccgaccccgaggccgcctgggagcccaccgaggccgaggccagagccagagccagcaacgaggacggcgacatcaagagaatcagcaccaaggagtgggccaagagcaccggctacgaccccgtgaagctgttcaccaagctgttcaaggacgacatcagatacctgctgaccatggacaagctgtggagaaagagaaagccccccgtgcccctggactgggccgaggtgcagagccagggcgaggagaccaacgccagcgaccagcagaacgagccccagctgggcctgaaggaccagcaggtgctggacgtgaagagctacgccagactgttcagcaagagcatcgagaccctgagagtgcacctggccgagaagggcgacggcgccgagctgatctgggacaaggacgaccccagcgccatggacttcgtgaccagcgccgccaacctgagaatgcacatcttcagcatgaacatgaagagcagattcgacatcaagagcatggccggcaacatcatccccgccatcgccaccaccaacgccgtgatcgccggcctgatcgtgctggagggcctgaagatcctgagcggcaagatcgaccagtgcagaaccatcttcctgaacaagcagcccaaccccagaaagaagctgctggtgccctgcgccctggacccccccaaccccaactgctacgtgtgcgccagcaagcccgaggtgaccgtgagactgaacgtgcacaaggtgaccgtgctgaccctgcaggacaagatcgtgaaggagaagttcgccatggtggcccccgacgtgcagatcgaggacggcaagggcaccatcctgatcagcagcgaggagggcgagaccgaggccaacaaccacaagaagctgagcgagttcggcatcagaaacggcagcagactgcaggccgacgacttcctgcaggactacaccctgctgatcaacatcctgcacagcgaggacctgggcaaggacgtggagttcgaggtggtgggcgacgcccccgagaaggtgggccccaagcaggccgaggacgccgccaagagcatcaccaacggcagcgacgacggcgcccagcccagcaccagcaccgcccaggagcaggacgacgtgctgatcgtggacagcgacgaggaggacagcagcaacaacgccgacgtgagcgaggaggagagaagcagaaagagaaagctggacgagaaggagaacctgagcgccaagagaagcagaatcgagcagaaggaggagctggacgacgtgatcgccctggactag

SEQ ID NO: 104501 - DNA, 879 bp, synthetic construct
  misc_feature 1..879: note = Description of Artificial Sequence: Synthetic coding sequence
  source 1..879: mol_type = other DNA
atgtgcctggccgccgacgtgcccctgatcgagagcggcaccgccggctacctgggccaggtgaccaccatcaagaagggcgtgaccgagtgctacgagtgccaccccaagcccacccagagaaccttccccggctgcaccatcagaaacacccccagcgagcccatccactgcatcgtgtgggccaagtacctgttcaaccagctgttcggcgaggaggacgccgaccaggaggtgagccccgacagagccgaccccgaggccgcctgggagcccaccgaggccgaggccagagccagagccagcaacgaggacggcgacatcaagagaatcagcaccaaggagtgggccaagagcaccggctacgaccccgtgaagctgttcaccaagctgttcaaggacgacatcagatacctgctgaccatggacaagctgtggagaaagagaaagccccccgtgcccctggactgggccgaggtgcagagccagggcgaggagaccaacgccagcgaccagcagaacgagccccagctgggcctgaaggaccagcaggtgctggacgtgaagagctacgccagactgttcagcaagagcatcgagaccctgagagtgcacctggccgagaagggcgacggcgccgagctgatctgggacaaggacgaccccagcgccatggacttcgtgaccagcgccgccaacctgagaatgcacatcttcagcatgaacatgaagagcagattcgacatcaagagcatggccggcaacatcatccccgccatcgccaccaccaacgccgtgatcgccggcctgatcgtgctggagggcctgaagatcctgagcggcaagatcgaccagtgcagaaccgacttcttcgagtag

SEQ ID NO: 104502 - DNA, 1047 bp, synthetic construct
  misc_feature 1..1047: note = Description of Artificial Sequence: Synthetic coding sequence
  source 1..1047: mol_type = other DNA
atggccctgaagagaatgggcatcgtgagcgactacgagaagatcagaaccttcgccgtggccatcgtgggcgtgggcggcgtgggcagcgtgaccgccgagatgctgaccagatgcggcatcggcaagctgctgctgttcgactacgacaaggtggagctggccaacatgaacagactgttcttccagccccaccaggccggcctgagcaaggtgcaggccgccgagcacaccctgagaaacatcaaccccgacgtgctgttcgaggtgcacaactacaacatcaccaccgtggagaacttccagcacttcatggacagaatcagcaacggcggcctggaggagggcaagcccgtggacctggtgctgagctgcgtggacaacttcgaggccagaatgaccatcaacaccgcctgcaacgagctgggccagacctggatggagagcggcgtgagcgagaacgccgtgagcggccacatccagctgatcatccccggcgagagcgcctgcttcgcctgcgccccccccctggtggtggccgccaacatcgacgagaagaccctgaagagagagggcgtgtgcgccgccagcctgcccaccaccatgggcgtggtggccggcatcctggtgcagaacgtgctgaagttcctgctgaacttcggcaccgtgagcttctacctgggctacaacgccatgcaggacttcttccccaccatgagcatgaagcccaacccccagtgcgacgacagaaactgcagaaagcagcaggaggagtacaagaagaaggtggccgccctgcccaagcaggaggtgatccaggaggaggaggagatcatccacgaggacaacgagtggggcatcgagctggtgagcgaggtgagcgaggaggagctgaagaacttcagcggccccgtgcccgacctgcccgagggcatcaccgtggcctacaccatccccaagaagcaggaggacagcgtgaccgagctgaccgtggaggacagcggcgagagcctggaggacctgatggccaagatgaagaacatgtag

SEQ ID NO: 104503 - DNA, 1215 bp, synthetic construct
  misc_feature 1..1215: note = Description of Artificial Sequence: Synthetic coding sequence
  source 1..1215: mol_type = other DNA
atggccgagagcgtggagagactgcagcagagagtgcaggagctggagagagagctggcccaggagagaagcctgcaggtgcccagaagcggcgacggcggcggcggcagagtgagaatcgagaagatgagcagcgaggtggtggacagcaacccctacagcagactgatggccctgaagagaatgggcatcgtgagcgactacgagaagatcagaaccttcgccgtggccatcgtgggcgtgggcggcgtgggcagcgtgaccgccgagatgctgaccagatgcggcatcggcaagctgctgctgttcgactacgacaaggtggagctggccaacatgaacagactgttcttccagccccaccaggccggcctgagcaaggtgcaggccgccgagcacaccctgagaaacatcaaccccgacgtgctgttcgaggtgcacaactacaacatcaccaccgtggagaacttccagcacttcatggacagaatcagcaacggcggcctggaggagggcaagcccgtggacctggtgctgagctgcgtggacaacttcgaggccagaatgaccatcaacaccgcctgcaacgagctgggccagacctggatggagagcggcgtgagcgagaacgccgtgagcggccacatccagctgatcatccccggcgagagcgcctgcttcgcctgcgccccccccctggtggtggccgccaacatcgacgagaagaccctgaagagagagggcgtgtgcgccgccagcctgcccaccaccatgggcgtggtggccggcatcctggtgcagaacgtgctgaagttcctgctgaacttcggcaccgtgagcttctacctgggctacaacgccatgcaggacttcttccccaccatgagcatgaagcccaacccccagtgcgacgacagaaactgcagaaagcagcaggaggagtacaagaagaaggtggccgccctgcccaagcaggaggtgatccaggaggaggaggagatcatccacgaggacaacgagtggggcatcgagctggtgagcgaggtgagcgaggaggagctgaagaacttcagcggccccgtgcccgacctgcccgagggcatcaccgtggcctacaccatccccaagaagcaggaggacagcgtgaccgagctgaccgtggaggacagcggcgagagcctggaggacctgatggccaagatgaagaacatgtag

SEQ ID NO: 104504 - DNA, 2379 bp, synthetic construct
  misc_feature 1..2379: note = Description of Artificial Sequence: Synthetic coding sequence
  source 1..2379: mol_type = other DNA
atgtggatccaggtgagaaccatggacggcagacagacccacaccgtggacagcctgagcagactgaccaaggtggaggagctgagaagaaagatccaggagctgttccacgtggagcccggcctgcagagactgttctacagaggcaagcagatggaggacggccacaccctgttcgactacgaggtgagactgaacgacaccatccagctgctggtgagacagagcctggtgctgccccacagcaccaaggagagagacagcgagctgagcgacaccgacagcggctgctgcctgggccagagcgagagcgacaagagcagcacccacggcgaggccgccgccgagaccgacagcagacccgccgacgaggacatgtgggacgagaccgagctgggcctgtacaaggtgaacgagtacgtggacgccagagacaccaacatgggcgcctggttcgaggcccaggtggtgagagtgaccagaaaggcccccagcagagacgagccctgcagcagcaccagcagacccgccctggaggaggacgtgatctaccacgtgaagtacgacgactaccccgagaacggcgtggtgcagatgaacagcagagacgtgagagccagagccagaaccatcatcaagtggcaggacctggaggtgggccaggtggtgatgctgaactacaaccccgacaaccccaaggagagaggcttctggtacgacgccgagatcagcagaaagagagagaccagaaccgccagagagctgtacgccaacgtggtgctgggcgacgacagcctgaacgactgcagaatcatcttcgtggacgaggtgttcaagatcgagagacccggcgagggcagccccatggtggacaaccccatgagaagaaagagcggccccagctgcaagcactgcaaggacgacgtgaacagactgtgcagagtgtgcgcctgccacctgtgcggcggcagacaggaccccgacaagcagctgatgtgcgacgagtgcgacatggccttccacatctactgcctggacccccccctgagcagcgtgcccagcgaggacgagtggtactgccccgagtgcagaaacgacgccagcgaggtggtgctggccggcgagagactgagagagagcaagaagaaggccaagatggccagcgccaccagcagcagccagagagactggggcaagggcatggcctgcgtgggcagaaccaaggagtgcaccatcgtgcccagcaaccactacggccccatccccggcatccccgtgggcaccatgtggagattcagagtgcaggtgagcgagagcggcgtgcacagaccccacgtggccggcatccacggcagaagcaacgacggcgcctacagcctggtgctggccggcggctacgaggacgacgtggaccacggcaacttcttcacctacaccggcagcggcggcagagacctgagcggcaacaagagaaccgccgagcagagctgcgaccagaagctgaccaacaccaacagagccctggccctgaactgcttcgcccccatcaacgaccaggagggcgccgaggccaaggactggagaagcggcaagcccgtgagagtggtgagaaacgtgaagggcggcaagaacagcaagtacgcccccgccgagggcaacagatacgacggcatctacaaggtggtgaagtactggcccgagaagggcaagagcggcttcctggtgtggagatacctgctgagaagagacgacgacgagcccggcccctggaccaaggagggcaaggacagaatcaagaagctgggcctgaccatgcagtaccccgagggctacctggaggccctggccaacagagagagagagaaggagaacagcaagagagaggaggaggagcagcaggagggcggcttcgccagccccagaaccggcaagggcaagtggaagagaaagagcgccggcggcggccccagcagagccggccccagaagaaccagcaagaagaccaaggtggagccctacagcctgaccgcccagcagagcagcctgatcagagaggacaagagcaacgccaagctgtggaacgaggtgctggccagcctgaaggacagacccgccagcggcagccccttccagctgttcctgagcaaggtggaggagaccttccagtgcatctgctgccaggagctggtgttcagacccatcaccaccgtgtgccagcacaacgtgtgcaaggactgcctggacagaagcttcagagcccaggtgttcagctgccccgcctgcagatacgacctgggcagaagctacgccatgcaggtgaaccagcccctgcagaccgtgctgaaccagctgttccccggctacggcaacggcagatag

SEQ ID NO: 104505 - DNA, 1224 bp, synthetic construct
  misc_feature 1..1224: note = Description of Artificial Sequence: Synthetic coding sequence
  source 1..1224: mol_type = other DNA
atggccagcgccaccagcagcagccagagagactggggcaagggcatggcctgcgtgggcagaaccaaggagtgcaccatcgtgcccagcaaccactacggccccatccccggcatccccgtgggcaccatgtggagattcagagtgcaggtgagcgagagcggcgtgcacagaccccacgtggccggcatccacggcagaagcaacgacggcgcctacagcctggtgctggccggcggctacgaggacgacgtggaccacggcaacttcttcacctacaccggcagcggcggcagagacctgagcggcaacaagagaaccgccgagcagagctgcgaccagaagctgaccaacaccaacagagccctggccctgaactgcttcgcccccatcaacgaccaggagggcgccgaggccaaggactggagaagcggcaagcccgtgagagtggtgagaaacgtgaagggcggcaagaacagcaagtacgcccccgccgagggcaacagatacgacggcatctacaaggtggtgaagtactggcccgagaagggcaagagcggcttcctggtgtggagatacctgctgagaagagacgacgacgagcccggcccctggaccaaggagggcaaggacagaatcaagaagctgggcctgaccatgcagtaccccgagggctacctggaggccctggccaacagagagagagagaaggagaacagcaagagagaggaggaggagcagcaggagggcggcttcgccagccccagaaccggcaagggcaagtggaagagaaagagcgccggcggcggccccagcagagccggccccagaagaaccagcaagaagaccaaggtggagccctacagcctgaccgcccagcagagcagcctgatcagagaggacaagagcaacgccaagctgtggaacgaggtgctggccagcctgaaggacagacccgccagcggcagccccttccagctgttcctgagcaaggtggaggagaccttccagtgcatctgctgccaggagctggtgttcagacccatcaccaccgtgtgccagcacaacgtgtgcaaggactgcctggacagaagcttcagagcccaggtgttcagctgccccgcctgcagatacgacctgggcagaagctacgccatgcaggtgaaccagcccctgcagaccgtgctgaaccagctgttccccggctacggcaacggcagatag

SEQ ID NO: 104506 - DNA, 2418 bp, synthetic construct
  misc_feature 1..2418: note = Description of Artificial Sequence: Synthetic coding sequence
  source 1..2418: mol_type = other DNA
atgggcgtgttcgccgtgccccccctgagcgccgacaccatgtggatccaggtgagaaccatggacggcagacagacccacaccgtggacagcctgagcagactgaccaaggtggaggagctgagaagaaagatccaggagctgttccacgtggagcccggcctgcagagactgttctacagaggcaagcagatggaggacggccacaccctgttcgactacgaggtgagactgaacgacaccatccagctgctggtgagacagagcctggtgctgccccacagcaccaaggagagagacagcgagctgagcgacaccgacagcggctgctgcctgggccagagcgagagcgacaagagcagcacccacggcgaggccgccgccgagaccgacagcagacccgccgacgaggacatgtgggacgagaccgagctgggcctgtacaaggtgaacgagtacgtggacgccagagacaccaacatgggcgcctggttcgaggcccaggtggtgagagtgaccagaaaggcccccagcagagacgagccctgcagcagcaccagcagacccgccctggaggaggacgtgatctaccacgtgaagtacgacgactaccccgagaacggcgtggtgcagatgaacagcagagacgtgagagccagagccagaaccatcatcaagtggcaggacctggaggtgggccaggtggtgatgctgaactacaaccccgacaaccccaaggagagaggcttctggtacgacgccgagatcagcagaaagagagagaccagaaccgccagagagctgtacgccaacgtggtgctgggcgacgacagcctgaacgactgcagaatcatcttcgtggacgaggtgttcaagatcgagagacccggcgagggcagccccatggtggacaaccccatgagaagaaagagcggccccagctgcaagcactgcaaggacgacgtgaacagactgtgcagagtgtgcgcctgccacctgtgcggcggcagacaggaccccgacaagcagctgatgtgcgacgagtgcgacatggccttccacatctactgcctggacccccccctgagcagcgtgcccagcgaggacgagtggtactgccccgagtgcagaaacgacgccagcgaggtggtgctggccggcgagagactgagagagagcaagaagaaggccaagatggccagcgccaccagcagcagccagagagactggggcaagggcatggcctgcgtgggcagaaccaaggagtgcaccatcgtgcccagcaaccactacggccccatccccggcatccccgtgggcaccatgtggagattcagagtgcaggtgagcgagagcggcgtgcacagaccccacgtggccggcatccacggcagaagcaacgacggcgcctacagcctggtgctggccggcggctacgaggacgacgtggaccacggcaacttcttcacctacaccggcagcggcggcagagacctgagcggcaacaagagaaccgccgagcagagctgcgaccagaagctgaccaacaccaacagagccctggccctgaactgcttcgcccccatcaacgaccaggagggcgccgaggccaaggactggagaagcggcaagcccgtgagagtggtgagaaacgtgaagggcggcaagaacagcaagtacgcccccgccgagggcaacagatacgacggcatctacaaggtggtgaagtactggcccgagaagggcaagagcggcttcctggtgtggagatacctgctgagaagagacgacgacgagcccggcccctggaccaaggagggcaaggacagaatcaagaagctgggcctgaccatgcagtaccccgagggctacctggaggccctggccaacagagagagagagaaggagaacagcaagagagaggaggaggagcagcaggagggcggcttcgccagccccagaaccggcaagggcaagtggaagagaaagagcgccggcggcggccccagcagagccggccccagaagaaccagcaagaagaccaaggtggagccctacagcctgaccgcccagcagagcagcctgatcagagaggacaagagcaacgccaagctgtggaacgaggtgctggccagcctgaaggacagacccgccagcggcagccccttccagctgttcctgagcaaggtggaggagaccttccagtgcatctgctgccaggagctggtgttcagacccatcaccaccgtgtgccagcacaacgtgtgcaaggactgcctggacagaagcttcagagcccaggtgttcagctgccccgcctgcagatacgacctgggcagaagctacgccatgcaggtgaaccagcccctgcagaccgtgctgaaccagctgttccccggctacggcaacggcagatag

SEQ ID NO: 104507 - DNA, 2379 bp, synthetic construct; identical to SEQ ID NO: 104504
  misc_feature 1..2379: note = Description of Artificial Sequence: Synthetic coding sequence
  source 1..2379: mol_type = other DNA

SEQ ID NO: 104508 - DNA, 2379 bp, synthetic construct; identical to SEQ ID NO: 104504
  misc_feature 1..2379: note = Description of Artificial Sequence: Synthetic coding sequence
  source 1..2379: mol_type = other DNA

SEQ ID NO: 104509 - DNA, 3240 bp, synthetic construct
  misc_feature 1..3240: note = Description of Artificial Sequence: Synthetic coding sequence
  source 1..3240: mol_type = other DNA
atgaagagctgcgccgtgagcctgaccaccgccgccgtggccttcggcgacgaggccaagaagatggccgagggcaaggccagcagagagagcgaggaggagagcgtgagcctgaccgtggaggagagagaggccctgggcggcatggacagcagactgttcggcttcgtgagactgcacgaggacggcgccagaaccaagaccctgctgggcaaggccgtgagatgctacgagagcctgatcctgaaggccgagggcaaggtggagagcgacttcttctgccagctgggccacttcaacctgctgctggaggactacagcaaggccctgagcgcctaccagagatactacagcctgcaggccgactactggaagaacgccgccttcctgtacggcctgggcctggtgtacttctactacaacgccttccactgggccatcaaggccttccaggacgtgctgtacgtggaccccagcttctgcagagccaaggagatccacctgagactgggcctgatgttcaaggtgaacaccgactacaagagcagcctgaagcacttccagctggccctgatcgactgcaacccctgcaccctgagcaacgccgagatccagttccacatcgcccacctgtacgagacccagagaaagtaccacagcgccaaggaggcctacgagcagctgctgcagaccgagaacctgcccgcccaggtgaaggccaccgtgctgcagcagctgggctggatgcaccacaacatggacctggtgggcgacaaggccaccaaggagagctacgccatccagtacctgcagaagagcctggaggccgaccccaacagcggccagagctggtacttcctgggcagatgctacagcagcatcggcaaggtgcaggacgccttcatcagctacagacagagcatcgacaagagcgaggccagcgccgacacctggtgcagcatcggcgtgctgtaccagcagcagaaccagcccatggacgccctgcaggcctacatctgcgccgtgcagctggaccacggccacgccgccgcctggatggacctgggcaccctgtacgagagctgcaaccagccccaggacgccatcaagtgctacctgaacgccgccagaagcaagagatgcagcaacaccagcaccctggccgccagaatcaagttcctgcagaacggcagcgacaactggaacggcggccagagcctgagccaccaccccgtgcagcaggtgtacagcctgtgcctgaccccccagaagctgcagcacctggagcagctgagagccaacagagacaacctgaaccccgcccagaagcaccagctggagcagctggagagccagttcgtgctgatgcagcagatgagacacaaggaggtggcccaggtgagaaccaccggcatccacaacggcgccatcaccgacagcagcctgcccaccaacagcgtgagcaacagacagccccacggcgccctgaccagagtgagcagcgtgagccagcccggcgtgagacccgcctgcgtggagaagctgctgagcagcggcgccttcagcgccggctgcatcccctgcggcaccagcaagatcctgggcagcaccgacaccatcctgctgggcagcaactgcatcgccggcagcgagagcaacggcaacgtgccctacctgcagcagaacacccacaccctgccccacaaccacaccgacctgaacagcagcaccgaggagccctggagaaagcagctgagcaacagcgcccagggcctgcacaagagccagagcagctgcctgagcggccccaacgaggagcagcccctgttcagcaccggcagcgcccagtaccaccaggccaccagcaccggcatcaagaaggccaacgagcacctgaccctgcccagcaacagcgtgccccagggcgacgccgacagccacctgagctgccacaccgccaccagcggcggccagcagggcatcatgttcaccaaggagagcaagcccagcaagaacagaagcctggtgcccgagaccagcagacacaccggcgacaccagcaacggctgcgccgacgtgaagggcctgagcaaccacgtgcaccagctgatcgccgacgccgtgagcagccccaaccacggcgacagccccaacctgctgatcgccgacaacccccagctgagcgccctgctgatcggcaaggccaacggcaacgtgggcaccggcacctgcgacaaggtgaacaacatccaccccgccgtgcacaccaagaccgaccacagcgtggccagcagccccagcagcgccatcagcaccgccacccccagccccaagagcaccgagcagagaagcatcaacagcgtgaccagcctgaacagcccccacagcggcctgcacaccgtgaacggcgagggcctgggcaagagccagagcagcaccaaggtggacctgcccctggccagccacagaagcaccagccagatcctgcccagcatgagcgtgagcatctgccccagcagcaccgaggtgctgaaggcctgcagaaaccccggcaagaacggcctgagcaacagctgcatcctgctggacaagtgccccccccccagaccccccaccagcccctacccccccctgcccaaggacaagctgaacccccccacccccagcatctacctggagaacaagagagacgccttcttcccccccctgcaccagttctgcaccaaccccaagaaccccgtgaccgtgatcagaggcctggccggcgccctgaagctggacctgggcctgttcagcaccaagaccctggtggaggccaacaacgagcacatggtggaggtgagaacccagctgctgcagcccgccgacgagaactgggaccccaccggcaccaagaagatctggagatgcgagagcaacagaagccacaccaccatcgccaagtacgcccagtaccaggccagcagcttccaggagagcctgagagccggcatgcagtggtgcgacctgagcagcctgcagccccccccccccggcttcaagagattcagccacctgagcctgcccaacagctggaactacagacacctgcccagctgccccaccaacttctgcatcttcgtggagaccggcttccaccacgtgggccaggcctgcctggagctgctgaccagcggcggcctgctggccagcgccagccagagcgccggcatcaccggcgtgagccaccacgccagatag

SEQ ID NO: 104510 - DNA, 4044 bp, synthetic construct
  misc_feature 1..4044: note = Description of Artificial Sequence: Synthetic coding sequence
  source 1..4044: mol_type = other DNA
atgaagagctgcgccgtgagcctgaccaccgccgccgtggccttcggcgacgaggccaagaagatggccgagggcaaggccagcagagagagcgaggaggagagcgtgagcctgaccgtggaggagagagaggccctgggcggcatggacagcagactgttcggcttcgtgagactgcacgaggacggcgccagaaccaagaccctgctgggcaaggccgtgagatgctacgagagcctgatcctgaaggccgagggcaaggtggagagcgacttcttctgccagctgggccacttcaacctgctgctggaggactacagcaaggccctgagcgcctaccagagatactacagcctgcaggccgactactggaagaacgccgccttcctgtacggcctgggcctggtgtacttctactacaacgccttccactgggccatcaaggccttccaggacgtgctgtacgtggaccccagcttctgcagagccaaggagatccacctgagactgggcctgatgttcaaggtgaacaccgactacaagagcagcctgaagcacttccagctggccctgatcgactgcaacccctgcaccctgagcaacgccgagatccagttccacatcgcccacctgtacgagacccagagaaagtaccacagcgccaaggaggcctacgagcagctgctgcagaccgagaacctgcccgcccaggtgaaggccaccgtgctgcagcagctgggctggatgcaccacaacatggacctggtgggcgacaaggccaccaaggagagctacgccatccagtacctgcagaagagcctggaggccgaccccaacagcggccagagctggtacttcctgggcagatgctacagcagcatcggcaaggtgcaggacgccttcatcagctacagacagagcatcgacaagagcgaggccagcgccgacacctggtgcagcatcggcgtgctgtaccagcagcagaaccagcccatggacgccctgcaggcctacatctgcgccgtgcagctggaccacggccacgccgccgcctggatggacctgggcaccctgtacgagagctgcaaccagccccaggacgccatcaagtgctacctgaacgccgccagaagcaagagatgcagcaacaccagcaccctggccgccagaatcaagttcctgcagaacggcagcgacaactggaacggcggccagagcctgagccaccaccccgtgcagcaggtgtacagcctgtgcctgaccccccagaagctgcagcacctggagcagctgagagccaacagagacaacctgaaccccgcccagaagcaccagctggagcagctggagagccagttcgtgctgatgcagcagatgagacacaaggaggtggcccaggtgagaaccaccggcatccacaacggcgccatcaccgacagcagcctgcccaccaacagcgtgagcaacagacagccccacggcgccctgaccagagtgagcagcgtgagccagcccggcgtgagacccgcctgcgtggagaagctgctgagcagcggcgccttcagcgccggctgcatcccctgcggcaccagcaagatcctgggcagcaccgacaccatcctgctgggcagcaactgcatcgccggcagcgagagcaacggcaacgtgccctacctgcagcagaacacccacaccctgccccacaaccacaccgacctgaacagcagcaccgaggagccctggagaaagcagctgagcaacagcgcccagggcctgcacaagagccagagcagctgcctgagcggccccaacgaggagcagcccctgttcagcaccggcagcgcccagtaccaccaggccaccagcaccggcatcaagaaggccaacgagcacctgaccctgcccagcaacagcgtgccccagggcgacgccgacagccacctgagctgccacaccgccaccagcggcggccagcagggcatcatgttcaccaaggagagcaagcccagcaagaacagaagcctggtgcccgagaccagcagacacaccggcgacaccagcaacggctgcgccgacgtgaagggcctgagcaaccacgtgcaccagctgatcgccgacgccgtgagcagccccaaccacggcgacagccccaacctgctgatcgccgacaacccccagctgagcgccctgctgatcggcaaggccaacggcaacgtgggcaccggcacctgcgacaaggtgaacaacatccaccccgccgtgcacaccaagaccgaccacagcgtggccagcagccccagcagcgccatcagcaccgccacccccagccccaagagcaccgagcagagaagcatcaacagcgtgaccagcctgaacagcccccacagcggcctgcacaccgtgaacggcgagggcctgggcaagagccagagcagcaccaaggtggacctgcccctggccagccacagaagcaccagccagatcctgcccagcatgagcgtgagcatctgccccagcagcaccgaggtgctgaaggcctgcagaaaccccggcaagaacggcctgagcaacagctgcatcctgctggacaagtgccccccccccagaccccccaccagcccctacccccccctgcccaaggacaagctgaacccccccacccccagcatctacctggagaacaagagagacgccttcttcccccccctgcaccagttctgcaccaaccccaagaaccccgtgaccgtgatcagaggcctggccggcgccctgaagctggacctgggcctgttcagcaccaagaccctggtggaggccaacaacgagcacatggtggaggtgagaacccagctgctgcagcccgccgacgagaactgggaccccaccggcaccaagaagatctggagatgcgagagcaacagaagccacaccaccatcgccaagtacgcccagtaccaggccagcagcttccaggagagcctgagagaggagaacgagaagagaacccagcacaaggaccacagcgacaacgagagcaccagcagcgagaacagcggcagaagaagaaagggccccttcaagaccatcaagttcggcaccaacatcgacctgagcgacaacaagaagtggaagctgcagctgcacgagctgaccaagctgcccgccttcgccagagtggtgagcgccggcaacctgctgacccacgtgggccacaccatcctgggcatgaacaccgtgcagctgtacatgaaggtgcccggcagcagaacccccggccaccaggagaacaacaacttctgcagcgtgaacatcaacatcggccccggcgactgcgagtggttcgtggtgcccgaggactactggggcgtgctgaacgacttctgcgagaagaacaacctgaacttcctgatgagcagctggtggcccaacctggaggacctgtacgaggccaacgtgcccgtgtacagattcatccagagacccggcgacctggtgtggatcaacgccggcaccgtgcactgggtgcaggccgtgggctggtgcaacaacatcgcctggaacgtgggccccctgaccgcctgccagtacaagctggccgtggagagatacgagtggaacaagctgaagagcgtgaagagccccgtgcccatggtgcacctgagctggaacatggccagaaacatcaaggtgagcgaccccaagctgttcgagatgatcaagtactgcctgctgaagatcctgaagcagtaccagaccctgagagaggccctggtggccgccggcaaggaggtgatctggcacggcagaaccaacgacgagcccgcccactactgcagcatctgcgaggtggaggtgttcaacctgctgttcgtgaccaacgagagcaacacccagaagacctacatcgtgcactgccacgactgcgccagaaagaccagcaagagcctggagaacttcgtggtgctggagcagtacaagatggaggacctgatccaggtgtacgaccagttcaccctggccctgagcctgagcagcagcagctag

SEQ ID NO: 104511 - DNA, 3723 bp, synthetic construct
  misc_feature 1..3723: note = Description of Artificial Sequence: Synthetic coding sequence
  source 1..3723: mol_type = other DNA
atgaagagctgcgccgtgagcctgaccaccgccgccgtggccttcggcgacgaggccaagaagatggccgagggcaaggccagcagagagagcgaggaggagagcgtgagcctgaccgtggaggagagagaggccctgggcggcatggacagcagactgttcggcttcgtgagactgcacgaggacggcgccagaaccaagaccctgctgggcaaggccgtgagatgctacgagagcctgatcctgaaggccgagggcaaggtggagagcgacttcttctgccagctgggccacttcaacctgctgctggaggactacagcaaggccctgagcgcctaccagagatactacagcctgcaggccgactactggaagaacgccgccttcctgtacggcctgggcctggtgtacttctactacaacgccttccactgggccatcaaggccttccaggacgtgctgtacgtggaccccagcttctgcagagccaaggagatccacctgagactgggcctgatgttcaaggtgaacaccgactacaagagcagcctgaagcacttccagctggccctgatcgactgcaacccctgcaccctgagcaacgccgagatccagttccacatcgcccacctgtacgagacccagagaaagtaccacagcgccaaggaggcctacgagcagctgctgcagaccgagaacctgcccgcccaggtgaaggccaccgtgctgcagcagctgggctggatgcaccacaacatggacctggtgggcgacaaggccaccaaggagagctacgccatccagtacctgcagaagagcctggaggccgaccccaacagcggccagagctggtacttcctgggcagatgctacagcagcatcggcaaggtgcaggacgccttcatcagctacagacagagcatcgacaagagcgaggccagcgccgacacctggtgcagcatcggcgtgctgtaccagcagcagaaccagcccatggacgccctgcaggcctacatctgcgccgtgcagctggaccacggccacgccgccgcctggatggacctgggcaccctgtacgagagctgcaaccagccccaggacgccatcaagtgctacctgaacgccgccagaagcaagagatgcagcaacaccagcaccctggccgccagaatcaagttcctgcagaacggcagcgacaactggaacggcggccagagcctgagccaccaccccgtgcagcaggtgtacagcctgtgcctgaccccccagaagctgcagcacctggagcagctgagagccaacagagacaacctgaaccccgcccagaagcaccagctggagcagctggagagccagttcgtgctgatgcagcagatgagacacaaggaggtggcccaggtgagaaccaccggcatccacaacggcgccatcaccgacagcagcctgcccaccaacagcgtgagcaacagacagccccacggcgccctgaccagagtgagcagcgtgagccagcccggcgtgagacccgcctgcgtggagaagctgctgagcagcggcgccttcagcgccggctgcatcccctgcggcaccagcaagatcctgggcagcaccgacaccatcctgctgggcagcaactgcatcgccggcagcgagagcaacggcaacgtgccctacctgcagcagaacacccacaccctgccccacaaccacaccgacctgaacagcagcaccgaggagccctggagaaagcagctgagcaacagcgcccagggcctgcacaagagccagagcagctgcctgagcggccccaacgaggagcagcccctgttcagcaccggcagcgcccagtaccaccaggccaccagcaccggcatcaagaaggccaacgagcacctgaccctgcccagcaacagcgtgccccagggcgacgccgacagccacctgagctgccacaccgccaccagcggcggccagcagggcatcatgttcaccaaggagagcaagcccagcaagaacagaagcctggtgcccgagaccagcagacacaccggcgacaccagcaacggctgcgccgacgtgaagggcctgagcaaccacgtgcaccagctgatcgccgacgccgtgagcagccccaaccacggcgacagccccaacctgctgatcgccgacaacccccagctgagcgccctgctgatcggcaaggccaacggcaacgtgggcaccggcacctgcgacaaggtgaacaacatccaccccgccgtgcacaccaagaccgaccacagcgtggccagcagccccagcagcgccatcagcaccgccacccccagccccaagagcaccgagcagagaagcatcaacagcgtgaccagcctgaacagcccccacagcggcctgcacaccgtgaacggcgagggcctgggcaagagccagagcagcaccaaggtggacctgcccctggccagccacagaagcaccagccagatcctgcccagcatgagcgtgagcatctgccccagcagcaccgaggtgctgaaggcctgcagaaaccccggcaagaacggcctgagcaacagctgcatcctgctggacaagtgccccccccccagaccccccaccagcccctacccccccctgcccaaggacaagctgaacccccccacccccagcatctacctggagaacaagagagacgccttcttcccccccctgcaccagttctgcaccaaccccaagaaccccgtgaccgtgatcagaggcctggccggcgccctgaagctggacctgggcctgttcagcaccaagaccctggtggaggccaacaacgagcacatggtggaggtgagaacccagctgctgcagcccgccgacgagaactgggaccccaccggcaccaagaagatctggagatgcgagagcaacagaagccacaccaccatcgccaagtacgcccagtaccaggccagcagcttccaggagagcctgagagaggagaacgagaagagaacccagcacaaggaccacagcgacaacgagagcaccagcagcgagaacagcggcagaagaagaaagggccccttcaagaccatcaagttcggcaccaacatcgacctgagcgacaacaagaagtggaagctgcagctgcacgagctgaccaagctgcccgccttcgccagagtggtgagcgccggcaacctgctgacccacgtgggccacaccatcctgggcatgaacaccgtgcagctgtacatgaaggtgcccggcagcagaacccccggccaccaggagaacaacaacttctgcagcgtgaacatcaacatcggccccggcgactgcgagtggttcgtggtgcccgaggactactggggcgtgctgaacgacttctgcgagaagaacaacctgaacttcctgatgagcagctggtggcccaacctggaggacctgtacgaggccaacgtgcccgtgtacagattcatccagagacccggcgacctggtgtggatcaacgccggcaccgtgcactgggtgcaggccgtgggctggtgcaacaacatcgcctggaacgtgggccccctgaccgcctgccagtacaagctggccgtggagagatacgagtggaacaagctgaagagcgtgaagagccccgtgcccatggtgcacctgagctggaacatggccagaaacatcaaggtgagcgaccccaagctgttcgagatgatcaagtag

SEQ ID NO: 104512 - DNA, 624 bp, synthetic construct
  misc_feature 1..624: note = Description of Artificial Sequence: Synthetic coding sequence
  source 1..624: mol_type = other DNA
atgaagagctgcgccgtgagcctgaccaccgccgccgtggccttcggcgacgaggccaagaagatggccgagggcaaggccagcagagagagcgaggaggagagcgtgagcctgaccgtggaggagagagaggccctgggcggcatggacagcagactgttcggcttcgtgagactgcacgaggacggcgccagaaccaagaccctgctgggcaaggccgtgagatgctacgagagcctgatcctgaaggccgagggcaaggtggagagcgacttcttctgccagctgggccacttcaacctgctgctggaggactacagcaaggccctgagcgcctaccagagatactacagcctgcaggccgactactggaagaacgccgccttcctgtacggcctgggcctggtgtacttctactacaacgccttccactgggccatcaaggccttccaggacgtgctgtacgtggaccccagcttctgcagagccaaggagatccacctgagactgggcctgatgttcaaggtgaacaccgactacaagagcagcctgaagcacttccagctggccctgatcgactgcaacccctgcaccctgagcaacgccgagagcaagtacttctag

SEQ ID NO: 104513 - DNA, 4179 bp, synthetic construct
  misc_feature 1..4179: note = Description of Artificial Sequence: Synthetic coding sequence
  source 1..4179: mol_type = other DNA
atgaagagctgcgccgtgagcctgaccaccgccgccgtggccttcggcgacgaggccaagaagatggccgagggcaaggccagcagagagagcgaggaggagagcgtgagcctgaccgtggaggagagagaggccctgggcggcatggacagcagactgttcggcttcgtgagactgcacgaggacggcgccagaaccaagaccctgctgggcaaggccgtgagatgctacgagagcctgatcctgaaggccgagggcaaggtggagagcgacttcttctgccagctgggccacttcaacctgctgctggaggactacagcaaggccctgagcgcctaccagagatactacagcctgcaggccgactactggaagaacgccgccttcctgtacggcctgggcctggtgtacttctactacaacgccttccactgggccatcaaggccttccaggacgtgctgtacgtggaccccagcttctgcagagccaaggagatccacctgagactgggcctgatgttcaaggtgaacaccgactacaagagcagcctgaagcacttccagctggccctgatcgactgcaacccctgcaccctgagcaacgccgagatccagttccacatcgcccacctgtacgagacccagagaaagtaccacagcgccaaggaggcctacgagcagctgctgcagaccgagaacctgcccgcccaggtgaaggccaccgtgctgcagcagctgggctggatgcaccacaacatggacctggtgggcgacaaggccaccaaggagagctacgccatccagtacctgcagaagagcctggaggccgaccccaacagcggccagagctggtacttcctgggcagatgctacagcagcatcggcaaggtgcaggacgccttcatcagctacagacagagcatcgacaagagcgaggccagcgccgacacctggtgcagcatcggcgtgctgtaccagcagcagaaccagcccatggacgccctgcaggcctacatctgcgccgtgcagctggaccacggccacgccgccgcctggatggacctgggcaccctgtacgagagctgcaaccagccccaggacgccatcaagtgctacctgaacgccgccagaagcaagagatgcagcaacaccagcaccctggccgccagaatcaagttcctgcaggcccagctgtgcaacctgccccagagcagcctgcagaacaagaccaagctgctgcccagcatcgaggaggcctggagcctgcccatccccgccgagctgaccagcagacagggcgccatgaacaccgcccagcagaacggcagcgacaactggaacggcggccagagcctgagccaccaccccgtgcagcaggtgtacagcctgtgcctgaccccccagaagctgcagcacctggagcagctgagagccaacagagacaacctgaaccccgcccagaagcaccagctggagcagctggagagccagttcgtgctgatgcagcagatgagacacaaggaggtggcccaggtgagaaccaccggcatccacaacggcgccatcaccgacagcagcctgcccaccaacagcgtgagcaacagacagccccacggcgccctgaccagagtgagcagcgtgagccagcccggcgtgagacccgcctgcgtggagaagctgctgagcagcggcgccttcagcgccggctgcatcccctgcggcaccagcaagatcctgggcagcaccgacaccatcctgctgggcagcaactgcatcgccggcagcgagagcaacggcaacgtgccctacctgcagcagaacacccacaccctgccccacaaccacaccgacctgaacagcagcaccgaggagccctggagaaagcagctgagcaacagcgcccagggcctgcacaagagccagagcagctgcctgagcggccccaacgaggagcagcccctgttcagcaccggcagcgcccagtaccaccaggccaccagcaccggcatcaagaaggccaacgagcacctgaccctgcccagcaacagcgtgccccagggcgacgccgacagccacctgagctgccacaccgccaccagcggcggccagcagggcatcatgttcaccaaggagagcaagcccagcaagaacagaagcctggtgcccgagaccagcagacacaccggcgacaccagcaacggctgcgccgacgtgaagggcctgagcaaccacgtgcaccagctgatcgccgacgccgtgagcagccccaaccacggcgacagccccaacctgctgatcgccgacaacccccagctgagcgccctgctgatcggcaaggccaacggcaacgtgggcaccggcacctgcgacaaggtgaacaacatccaccccgccgtgcacaccaagaccgaccacagcgtggccagcagccccagcagcgccatcagcaccgccacccccagccccaagagcaccgagcagagaagcatcaacagcgtgaccagcctgaacagcccccacagcggcctgcacaccgtgaacggcgagggcctgggcaagagccagagcagcaccaaggtggacctgcccctggccagccacagaagcaccagccagatcctgcccagcatgagcgtgagcatctgccccagcagcaccgaggtgctgaaggcctgcagaaaccccggcaagaacggcctgagcaacagctgcatcctgctggacaagtgccccccccccagaccccccaccagcccctacccccccctgcccaaggacaagctgaacccccccacccccagcatctacctggagaacaagagagacgccttcttcccccccctgcaccagttctgcaccaaccccaagaaccccgtgaccgtgatcagaggcctggccggcgccctgaagctggacctgggcctgttcagcaccaagaccctggtggaggccaacaacgagcacatggtggaggtgagaacccagctgctgcagcccgccgacgagaactgggaccccaccggcaccaagaagatctggagatgcgagagcaacagaagccacaccaccatcgccaagtacgcccagtaccaggccagcagcttccaggagagcctgagagaggagaacgagaagagaacccagcacaaggaccacagcgacaacgagagcaccagcagcgagaacagcggcagaagaagaaagggccccttcaagaccatcaagttcggcaccaacatcgacctgagcgacaacaagaagtggaagctgcagctgcacgagctgaccaagctgcccgccttcgccagagtggtgagcgccggcaacctgctgacccacgtgggccacaccatcctgggcatgaacaccgtgcagctgtacatgaaggtgcccggcagcagaacccccggccaccaggagaacaacaacttctgcagcgtgaacatcaacatcggccccggcgactgcgagtggttcgtggtgcccgaggactactggggcgtgctgaacgacttctgcgagaagaacaacctgaacttcctgatgagcagctggtggcccaacctggaggacctgtacgaggccaacgtgcccgtgtacagattcatccagagacccggcgacctggtgtggatcaacgccggcaccgtgcactgggtgcaggccgtgggctggtgcaacaacatcgcctggaacgtgggccccctgaccgcctgccagtacaagctggccgtggagagatacgagtggaacaagctgaagagcgtgaagagccccgtgcccatggtgcacctgagctggaacatggccagaaacatcaaggtgagcgaccccaagctgttcgagatgatcaagtactgcctgctgaagatcctgaagcagtaccagaccctgagagaggccctggtggccgccggcaaggaggtgatctggcacggcagaaccaacgacgagcccgcccactactgcagcatctgcgaggtggaggtgttcaacctgctgttcgtgaccaacgagagcaacacccagaagacctacatcgtgcactgccacgactgcgccagaaagaccagcaagagcctggagaacttcgtggtgctggagcagtacaagatggaggacctgatccaggtgtacgaccagttcaccctggccctgagcctgagcagcagcagctag

SEQ ID NO: 104514 - DNA, 3636 bp, synthetic construct
  misc_feature 1..3636: note = Description of Artificial Sequence: Synthetic coding sequence
  source 1..3636: mol_type = other DNA
atgaagagctgcgccgtgagcctgaccaccgccgccgtggccttcggcgacgaggccaagaagatggccgagggcaaggccagcagagagagcgaggaggagagcgtgagcctgaccgtggaggagagagaggccctgggcggcatggacagcagactgttcggcttcgtgagactgcacgaggacggcgccagaaccaagaccctgctgggcaaggccgtgagatgctacgagagcctgatcctgaaggccgagggcaaggtggagagcgacttcttctgccagctgggccacttcaacctgctgctggaggactacagcaaggccctgagcgcctaccagagatactacagcctgcaggccgactactggaagaacgccgccttcctgtacggcctgggcctggtgtacttctactacaacgccttccactgggccatcaaggccttccaggacgtgctgtacgtggaccccagcttctgcagagccaaggagatccacctgagactgggcctgatgttcaaggtgaacaccgactacaagagcagcctgaagcacttccagctggccctgatcgactgcaacccctgcaccctgagcaacgccgagatccagttccacatcgcccacctgtacgagacccagagaaagtaccacagcgccaaggaggcctacgagcagctgctgcagaccgagaacctgcccgcccaggtgaaggccaccgtgctgcagcagctgggctggatgcaccacaacatggacctggtgggcgacaaggccaccaaggagagctacgccatccagtacctgcagaagagcctggaggccgaccccaacagcggccagagctggtacttcctgggcagatgctacagcagcatcggcaaggtgcaggacgccttcatcagctacagacagagcatcgacaagagcgaggccagcgccgacacctggtgcagcatcggcgtgctgtaccagcagcagaaccagcccatggacgccctgcaggcctacatctgcgccgtgcagctggaccacggccacgccgccgcctggatggacctgggcaccctgtacgagagctgcaaccagccccaggacgccatcaagtgctacctgaacgccgccagaagcaagagatgcagcaacaccagcaccctggccgccagaatcaagttcctgcaggcccagctgtgcaacctgccccagagcagcctgcagaacaagaccaagctgctgcccagcatcgaggaggcctggagcctgcccatccccgccgagctgaccagcagacagggcgccatgaacaccgcccagcagaacggcagcgacaactggaacggcggccagagcctgagccaccaccccgtgcagcaggtgtacagcctgtgcctgaccccccagaagctgcagcacctggagcagctgagagccaacagagacaacctgaaccccgcccagaagcaccagctggagcagctggagagccagttcgtgctgatgcagcagatgagacacaaggaggtggcccagggcctgcacaagagccagagcagctgcctgagcggccccaacgaggagcagcccctgttcagcaccggcagcgcccagtaccaccaggccaccagcaccggcatcaagaaggccaacgagcacctgaccctgcccagcaacagcgtgccccagggcgacgccgacagccacctgagctgccacaccgccaccagcggcggccagcagggcatcatgttcaccaaggagagcaagcccagcaagaacagaagcctggtgcccgagaccagcagacacaccggcgacaccagcaacggctgcgccgacgtgaagggcctgagcaaccacgtgcaccagctgatcgccgacgccgtgagcagccccaaccacggcgacagccccaacctgctgatcgccgacaacccccagctgagcgccctgctgatcggcaaggccaacggcaacgtgggcaccggcacctgcgacaaggtgaacaacatccaccccgccgtgcacaccaagaccgaccacagcgtggccagcagccccagcagcgccatcagcaccgccacccccagccccaagagcaccgagcagagaagcatcaacagcgtgaccagcctgaacagcccccacagcggcctgcacaccgtgaacggcgagggcctgggcaagagccagagcagcaccaaggtggacctgcccctggccagccacagaagcaccagccagatcctgcccagcatgagcgtgagcatctgccccagcagcaccgaggtgctgaaggcctgcagaaaccccggcaagaacggcctgagcaacagctgcatcctgctggacaagtgccccccccccagaccccccaccagcccctacccccccctgcccaaggacaagctgaacccccccacccccagcatctacctggagaacaagagagacgccttcttcccccccctgcaccagttctgcaccaaccccaagaaccccgtgaccgtgatcagaggcctggccggcgccctgaagctggacctgggcctgttcagcaccaagaccctggtggaggccaacaacgagcacatggtggaggtgagaacccagctgctgcagcccgccgacgagaactgggaccccaccggcaccaagaagatctggagatgcgagagcaacagaagccacaccaccatcgccaagtacgcccagtaccaggccagcagcttccaggagagcctgagagaggagaacgagaagagaacccagcacaaggaccacagcgacaacgagagcaccagcagcgagaacagcggcagaagaagaaagggccccttcaagaccatcaagttcggcaccaacatcgacctgagcgacaacaagaagtggaagctgcagctgcacgagctgaccaagctgcccgccttcgccagagtggtgagcgccggcaacctgctgacccacgtgggccacaccatcctgggcatgaacaccgtgcagctgtacatgaaggtgcccggcagcagaacccccggccaccaggagaacaacaacttctgcagcgtgaacatcaacatcggccccggcgactgcgagtggttcgtggtgcccgaggactactggggcgtgctgaacgacttctgcgagaagaacaacctgaacttcctgatgagcagctggtggcccaacctggaggacctgtacgaggccaacgtgcccgtgtacagattcatccagagacccggcgacctggtgtggatcaacgccggcaccgtgcactgggtgcaggccgtgggctggtgcaacaacatcgcctggaacgtgggccccctgaccgcctgccagtacaagctggccgtggagagatacgagtggaacaagctgaagagcgtgaagagccccgtgcccatggtgcacctgagctggaacatggccagaaacatcaaggtgagcgaccccaagctgttcgagatgatcaagtactgcctgctgaagatcctgaagcagtaccagaccctgagagaggccctggtggccgccggcaaggaggtgatctggcacggcagaaccaacgacgagcccgcccactactgcagcatctgcgaggccctgagcctgagcagcagcagctag

SEQ ID NO: 104515 - DNA, 3141 bp, synthetic construct
  misc_feature 1..3141: note = Description of Artificial Sequence: Synthetic coding sequence
  source 1..3141: mol_type = other DNA
atgaagagctgcgccgtgagcctgaccaccgccgccgtggccttcggcgacgaggccaagaagatggccgagggcaaggccagcagagagagcgaggaggagagcgtgagcctgaccgtggaggagagagaggccctgggcggcatggacagcagactgttcggcttcgtgagactgcacgaggacggcgccagaaccaagaccctgctgggcaaggccgtgagatgctacgagagcctgatcctgaaggccgagggcaaggtggagagcgacttcttctgccagctgggccacttcaacctgctgctggaggactacagcaaggccctgagcgcctaccagagatactacagcctgcaggccgactactggaagaacgccgccttcctgtacggcctgggcctggtgtacttctactacaacgccttccactgggccatcaaggccttccaggacgtgctgtacgtggaccccagcttctgcagagccaaggagatccacctgagactgggcctgatgttcaaggtgaacaccgactacaagagcagcctgaagcacttccagctggccctgatcgactgcaacccctgcaccctgagcaacgccgagatccagttccacatcgcccacctgtacgagacccagagaaagtaccacagcgccaaggaggcctacgagcagctgctgcagaccgagaacctgcccgcccaggtgaaggccaccgtgctgcagcagctgggctggatgcaccacaacatggacctggtgggcgacaaggccaccaaggagagctacgccatccagtacctgcagaagagcctggaggccgaccccaacagcggccagagctggtacttcctgggcagcgtgctgtaccagcagcagaaccagcccatggacgccctgcaggcctacatctgcgccgtgcagctggaccacggccacgccgccgcctggatggacctgggcaccctgtacgagagctgcaaccagccccaggacgccatcaagtgctacctgaacgccgccagaagcaagagatgcagcaacaccagcaccctggccgccagaatcaagttcctgcagaacggcagcgacaactggaacggcggccagagcctgagccaccaccccgtgcagcaggtgtacagcctgtgcctgaccccccagaagctgcagcacctggagcagctgagagccaacagagacaacctgaaccccgcccagaagcaccagctggagcagctggagagccagttcgtgctgatgcagcagatgagacacaaggaggtggcccaggtgagaaccaccggcatccacaacggcgccatcaccgacagcagcctgcccaccaacagcgtgagcaacagacagccccacggcgccctgaccagagtgagcagcgtgagccagcccggcgtgagacccgcctgcgtggagaagctgctgagcagcggcgccttcagcgccggctgcatcccctgcggcaccagcaagatcctgggcagcaccgacaccatcctgctgggcagcaactgcatcgccggcagcgagagcaacggcaacgtgccctacctgcagcagaacacccacaccctgccccacaaccacaccgacctgaacagcagcaccgaggagccctggagaaagcagctgagcaacagcgcccagggcctgcacaagagccagagcagctgcctgagcggccccaacgaggagcagcccctgttcagcaccggcagcgcccagtaccaccaggccaccagcaccggcatcaagaaggccaacgagcacctgaccctgcccagcaacagcgtgccccagggcgacgccgacagccacctgagctgccacaccgccaccagcggcggccagcagggcatcatgttcaccaaggagagcaagcccagcaagaacagaagcctggtgcccgagaccagcagacacaccggcgacaccagcaacggctgcgccgacgtgaagggcctgagcaaccacgtgcaccagctgatcgccgacgccgtgagcagccccaaccacggcgacagccccaacctgctgatcgccgacaacccccagctgagcgccctgctgatcggcaaggccaacggcaacgtgggcaccggcacctgcgacaaggtgaacaacatccaccccgccgtgcacaccaagaccgaccacagcgtggccagcagccccagcagcgccatcagcaccgccacccccagccccaagagcaccgagcagagaagcatcaacagcgtgaccagcctgaacagcccccacagcggcctgcacaccgtgaacggcgagggcctgggcaagagccagagcagcaccaaggtggacctgcccctggccagccacagaagcaccagccagatcctgcccagcatgagcgtgagcatctgccccagcagcaccgaggtgctgaaggcctgcagaaaccccggcaagaacggcctgagcaacagctgcatcctgctggacaagtgccccccccccagaccccccaccagcccctacccccccctgcccaaggacaagctgaacccccccacccccagcatctacctggagaacaagagagacgccttcttcccccccctgcaccagttctgcaccaaccccaagaaccccgtgaccgtgatcagaggcctggccggcgccctgaagctggacctgggcctgttcagcaccaagaccctggtggaggccaacaacgagcacatggtggaggtgagaacccagctgctgcagcccgccgacgagaactgggaccccaccggcaccaagaagatctggagatgcgagagcaacagaagccacaccaccatcgccaagtacgcccagtaccaggccagcagcttccaggagagcctgagagccggcatgcagtggtgcgacctgagcagcctgcagccccccccccccggcttcaagagattcagccacctgagcctgcccaacagctggaactacagacacctgcccagctgccccaccaacttctgcatcttcgtggagaccggcttccaccacgtgggccaggcctgcctggagctgctgaccagcggcggcctgctggccagcgccagccagagcgccggcatcaccggcgtgagccaccacgccagatag

SEQ ID NO: 104516 - DNA, 3018 bp, synthetic construct
  misc_feature 1..3018: note = Description of Artificial Sequence: Synthetic coding sequence
  source 1..3018: mol_type = other DNA
atgaagagctgcgccgtgagcctgaccaccgccgccgtggccttcggcgacgaggccaagaagatggccgagggcaaggccagcagagagagcgaggaggagagcgtgagcctgaccgtggaggagagagaggccctgggcggcatggacagcagactgttcggcttcgtgagactgcacgaggacggcgccagaaccaagaccctgctgggcaaggccgtgagatgctacgagagcctgatcctgaaggccgagggcaaggtggagagcgacttcttctgccagctgggccacttcaacctgctgctggaggactacagcaaggccctgagcgcctaccagagatactacagcctgcaggccgactactggaagaacgccgccttcctgtacggcctgggcctggtgtacttctactacaacgccttccactgggccatcaaggccttccaggacgtgctgtacgtggaccccagcttctgcagagccaaggagatccacctgagactgggcctgatgttcaaggtgaacaccgactacaagagcagcctgaagcacttccagctggccctgatcgactgcaacccctgcaccctgagcaacgccgagatccagttccacatcgcccacctgtacgagacccagagaaagtaccacagcgccaaggaggcctacgagcagctgctgcagaccgagaacctgcccgcccaggtgaaggccaccgtgctgcagcagctgggctggatgcaccacaacatggacctggtgggcgacaaggccaccaaggagagctacgccatccagtacctgcagaagagcctggaggccgaccccaacagcggccagagctggtacttcctgggcagcgtgctgtaccagcagcagaaccagcccatggacgccctgcaggcctacatctgcgccgtgcagctggaccacggccacgccgccgcctggatggacctgggcaccctgtacgagagctgcaaccagccccaggacgccatcaagtgctacctgaacgccgccagaagcaagagatgcagcaacaccagcaccctggccgccagaatcaagttcctgcagcagagcctgagcctgcacatgatcaccagcagccaggtggagggcctgagcagccccgccaagaagaagagaaccagcagccccaccaagaacggcagcgacaactggaacggcggccagagcctgagccaccaccccgtgcagcaggtgtacagcctgtgcctgaccccccagaagctgcagcacctggagcagctgagagccaacagagacaacctgaaccccgcccagaagcaccagctggagcagctggagagccagttcgtgctgatgcagcagatgagacacaaggaggtggcccaggtgagaaccaccggcatccacaacggcgccatcaccgacagcagcctgcccaccaacagcgtgagcaacagacagccccacggcgccctgaccagagtgagcagcgtgagccagcccggcgtgagacccgcctgcgtggagaagctgctgagcagcggcgccttcagcgccggctgcatcccctgcggcaccagcaagatcctgggcagcaccgacaccatcctgctgggcagcaactgcatcgccggcagcgagagcaacggcaacgtgccctacctgcagcagaacacccacaccctgccccacaaccacaccgacctgaacagcagcaccgaggagccctggagaaagcagctgagcaacagcgcccagggcctgcacaagagccagagcagctgcctgagcggccccaacgaggagcagcccctgttcagcaccggcagcgcccagtaccaccaggccaccagcaccggcatcaagaaggccaacgagcacctgaccctgcccagcaacagcgtgccccagggcgacgccgacagccacctgagctgccacaccgccaccagcggcggccagcagggcatcatgttcaccaaggagagcaagcccagcaagaacagaagcctggtgcccgagaccagcagacacaccggcgacaccagcaacggctgcgccgacgtgaagggcctgagcaaccacgtgcaccagctgatcgccgacgccgtgagcagccccaaccacggcgacagccccaacctgctgatcgccgacaacccccagctgagcgccctgctgatcggcaaggccaacggcaacgtgggcaccggcacctgcgacaaggtgaacaacatccaccccgccgtgcacaccaagaccgaccacagcgtggccagcagccccagcagcgccatcagcaccgccacccccagccccaagagcaccgagcagagaagcatcaacagcgtgaccagcctgaacagcccccacagcggcctgcacaccgtgaacggcgagggcctgggcaagagccagagcagcaccaaggtggacctgcccctggccagccacagaagcaccagccagatcctgcccagcatgagcgtgagcatctgccccagcagcaccgaggtgctgaaggcctgcagaaaccccggcaagaacggcctgagcaacagctgcatcctgctggacaagtgccccccccccagaccccccaccagcccctacccccccctgcccaaggacaagctgaacccccccacccccagcatctacctggagaacaagagagacgccttcttcccccccctgcaccagttctgcaccaaccccaagaaccccgtgaccgtgatcagaggcctggccggcgccctgaagctggacctgggcctgttcagcaccaagaccctggtggaggccaacaacgagcacatggtggaggtgagaacccagctgctgcagcccgccgacgagaactgggaccccaccggcaccaagaagatctggagatgcgagagcaacagaagccacaccaccatcgccaagtacgcccagtaccaggccagcagcttccaggagagcctgagaagcctgatcctgagccaccccggctggaacgccatggtgtag

SEQ ID NO: 104517 - DNA, 3213 bp, synthetic construct
  misc_feature 1..3213: note = Description of Artificial Sequence: Synthetic coding sequence
  source 1..3213: mol_type = other DNA
atgaagagctgcgccgtgagcctgaccaccgccgccgtggccttcggcgacgaggccaagaagatggccgagggcaaggccagcagagagagcgaggaggagagcgtgagcctgaccgtggaggagagagaggccctgggcggcatggacagcagactgttcggcttcgtgagactgcacgaggacggcgccagaaccaagaccctgctgggcaaggccgtgagatgctacgagagcctgatcctgaaggccgagggcaaggtggagagcgacttcttctgccagctgggccacttcaacctgctgctggaggactacagcaaggccctgagcgcctaccagagatactacagcctgcaggccgactactggaagaacgccgccttcctgtacggcctgggcctggtgtacttctactacaacgccttccactgggccatcaaggccttccaggacgtgctgtacgtggaccccagcttctgcagagccaaggagatccacctgagactgggcctgatgttcaaggtgaacaccgactacaagagcagcctgaagcacttccagctggccctgatcgactgcaacccctgcaccctgagcaacgccgagatccagttccacatcgcccacctgtacgagacccagagaaagtaccacagcgccaaggaggcctacgagcagctgctgcagaccgagaacctgcccgcccaggtgaaggccaccgtgctgcagcagctgggctggatgcaccacaacatggacctggtgggcgacaaggccaccaaggagagctacgccatccagtacctgcagaagagcctggaggccgaccccaacagcggccagagctggtacttcctgggcagatgctacagcagcatcggcaaggtgcaggacgccttcatcagctacagacagagcatcgacaagagcgaggccagcgccgacacctggtgcagcatcggcgtgctgtaccagcagcagaaccagcccatggacgccctgcaggcctacatctgcgccgtgcagctggaccacggccacgccgccgcctggatggacctgggcaccctgtacgagagctgcaaccagccccaggacgccatcaagtgctacctgaacgccgccagaagcaagagatgcagcaacaccagcaccctggccgccagaatcaagttcctgcaggcccagctgtgcaacctgccccagagcagcctgcagaacaagaccaagctgctgcccagcatcgaggaggcctggagcctgcccatccccgccgagctgaccagcagacagggcgccatgaacaccgcccagcagcagagcctgagcctgcacatgatcaccagcagccaggtggagggcctgagcagccccgccaagaagaagagaaccagcagccccaccaagaacggcagcgacaactggaacggcggccagagcctgagccaccaccccgtgcagcaggtgtacagcctgtgcctgaccccccagaagctgcagcacctggagcagctgagagccaacagagacaacctgaaccccgcccagaagcaccagctggagcagctggagagccagttcgtgctgatgcagcagatgagacacaaggaggtggcccaggtgagaaccaccggcatccacaacggcgccatcaccgacagcagcctgcccaccaacagcgtgagcaacagacagccccacggcgccctgaccagagtgagcagcgtgagccagcccggcgtgagacccgcctgcgtggagaagctgctgagcagcggcgccttcagcgccggctgcatcccctgcggcaccagcaagatcctgggcagcaccgacaccatcctgctgggcagcaactgcatcgccggcagcgagagcaacggcaacgtgccctacctgcagcagaacacccacaccctgccccacaaccacaccgacctgaacagcagcaccgaggagccctggagaaagcagctgagcaacagcgcccagggcctgcacaagagccagagcagctgcctgagcggccccaacgaggagcagcccctgttcagcaccggcagcgcccagtaccaccaggccaccagcaccggcatcaagaaggccaacgagcacctgaccctgcccagcaacagcgtgccccagggcgacgccgacagccacctgagctgccacaccgccaccagcggcggccagcagggcatcatgttcaccaaggagagcaagcccagcaagaacagaagcctggtgcccgagaccagcagacacaccggcgacaccagcaacggctgcgccgacgtgaagggcctgagcaaccacgtgcaccagctgatcgccgacgccgtgagcagccccaaccacggcgacagccccaacctgctgatcgccgacaacccccagctgagcgccctgctgatcggcaaggccaacggcaacgtgggcaccggcacctgcgacaaggtgaacaacatccaccccgccgtgcacaccaagaccgaccacagcgtggccagcagccccagcagcgccatcagcaccgccacccccagccccaagagcaccgagcagagaagcatcaacagcgtgaccagcctgaacagcccccacagcggcctgcacaccgtgaacggcgagggcctgggcaagagccagagcagcaccaaggtggacctgcccctggccagccacagaagcaccagccagatcctgcccagcatgagcgtgagcatctgccccagcagcaccgaggtgctgaaggcctgcagaaaccccggcaagaacggcctgagcaacagctgcatcctgctggacaagtgccccccccccagaccccccaccagcccctacccccccctgcccaaggacaagctgaacccccccacccccagcatctacctggagaacaagagagacgccttcttcccccccctgcaccagttctgcaccaaccccaagaaccccgtgaccgtgatcagaggcctggccggcgccctgaagctggacctgggcctgttcagcaccaagaccctggtggaggccaacaacgagcacatggtggaggtgagaacccagctgctgcagcccgccgacgagaactgggaccccaccggcaccaagaagatctggagatgcgagagcaacagaagccacaccaccatcgccaagtacgcccagtaccaggccagcagcttccaggagagcctgagatag

SEQ ID NO: 104518 - DNA, 798 bp, synthetic construct
  misc_feature 1..798: note = Description of Artificial Sequence: Synthetic coding sequence
  source 1..798: mol_type = other DNA
atgcccaacatggtgttcatcggcggcatcaactgcaagaagagaaaggacctgagccaggagttcgaggcctacatcaacgccagcggcgagcacggcatcgtggtgttcagcctgggcagcatggtgagcgagatccccgagaagaaggccatggccatcgccgacgccctgggcaagatcccccagaccgtgctgtggagatacaccggcaccagacccagcaacctggccaacaacaccatcctggtgaagtggctgccccagaacgacctgctgggccaccccatgaccagagccttcatcacccacgccggcagccacggcgtgtacgagagcatctgcaacggcgtgcccatggtgatgatgcccctgttcggcgaccagatggacaacgccaagagaatggagaccaagggcgccggcgtgaccctgaacgtgctggagatgaccagcgaggacctggagaacgccctgaaggccgtgatcaacgacaagagctacaaggagaacatcatgagactgagcagcctgcacaaggacagacccgtggagcccctggacctggccgtgttctgggtggagttcgtgatgagacacaagggcgccccccacctgagacccgccgcccacgacctgacctggtaccagtaccacagcctggacgtgatcggcttcctgctggccgtggtgctgaccgtggccttcatcaccttcaagtgctgcgcctacggctacagaaagtgcctgggcaagaagggcagagtgaagaaggcccacaagagcaagacccactag

SEQ ID NO: 104519 - DNA, 1605 bp, synthetic construct
  misc_feature 1..1605: note = Description of Artificial Sequence: Synthetic coding sequence
  source 1..1605: mol_type = other DNA
atggccaccggcctgcaggtgcccctgccccagctggccaccggcctgctgctgctgctgagcgtgcagccctgggccgagagcggcaaggtgctggtggtgcccaccgacggcagccactggctgagcatgagagaggccctgagagacctgcacgccagaggccaccaggtggtggtgctgaccctggaggtgaacatgtacatcaaggaggagaacttcttcaccctgaccacctacgccatcagctggacccaggacgagttcgacagactgctgctgggccacacccagagcttcttcgagaccgagcacctgctgatgaagttcagcagaagaatggccatcatgaacaacatgagcctgatcatccacagaagctgcgtggagctgctgcacaacgaggccctgatcagacacctgcacgccaccagcttcgacgtggtgctgaccgaccccttccacctgtgcgccgccgtgctggccaagtacctgagcatccccgccgtgttcttcctgagaaacatcccctgcgacctggacttcaagggcacccagtgccccaaccccagcagctacatccccagactgctgaccaccaacagcgaccacatgaccttcctgcagagagtgaagaacatgctgtaccccctggccctgagctacctgtgccacgccgtgagcgccccctacgccagcctggccagcgagctgttccagagagaggtgagcgtggtggacctggtgagccacgccagcgtgtggctgttcagaggcgacttcgtgatggactaccccagacccatcatgcccaacatggtgttcatcggcggcatcaactgcgccaacggcaagcccctgagccaggagttcgaggcctacatcaacgccagcggcgagcacggcatcgtggtgttcagcctgggcagcatggtgagcgagatccccgagaagaaggccatggccatcgccgacgccctgggcaagatcccccagaccgtgctgtggagatacaccggcaccagacccagcaacctggccaacaacaccatcctggtgaagtggctgccccagaacgacctgctgggccaccccatgaccagagccttcatcacccacgccggcagccacggcgtgtacgagagcatctgcaacggcgtgcccatggtgatgatgcccctgttcggcgaccagatggacaacgccaagagaatggagaccaagggcgccggcgtgaccctgaacgtgctggagatgaccagcgaggacctggagaacgccctgaaggccgtgatcaacgacaagagctacaaggagaacatcatgagactgagcagcctgcacaaggacagacccgtggagcccctggacctggccgtgttctgggtggagttcgtgatgagacacaagggcgccccccacctgagacccgccgcccacgacctgacctggtaccagtaccacagcctggacgtgatcggcttcctgctggccgtggtgctgaccgtggccttcatcaccttcaagtgctgcgcctacggctacagaaagtgcctgggcaagaagggcagagtgaagaaggcccacaagagcaagacccactag

SEQ ID NO: 104520 - DNA, 1599 bp, synthetic construct
  misc_feature 1..1599: note = Description of Artificial Sequence: Synthetic coding sequence
  source 1..1599: mol_type = other DNA
atggcctgcctgctgagaagcttccagagaatcagcgccggcgtgttcttcctggccctgtggggcatggtggtgggcgacaagctgctggtggtgccccaggacggcagccactggctgagcatgaaggacatcgtggaggtgctgagcgacagaggccacgagatcgtggtggtggtgcccgaggtgaacctgctgctgaaggagagcaagtactacaccagaaagatctaccccgtgccctacgaccaggaggagctgaagaacagataccagagcttcggcaacaaccacttcgccgagagaagcttcctgaccgccccccagaccgagtacagaaacaacatgatcgtgatcggcctgtacttcatcaactgccagagcctgctgcaggacagagacaccctgaacttcttcaaggagagcaagttcgacgccctgttcaccgaccccgccctgccctgcggcgtgatcctggccgagtacctgggcctgcccagcgtgtacctgttcagaggcttcccctgcagcctggagcacaccttcagcagaagccccgaccccgtgagctacatccccagatgctacaccaagttcagcgaccacatgaccttcagccagagagtggccaacttcctggtgaacctgctggagccctacctgttctactgcctgttcagcaagtacgaggagctggccagcgccgtgctgaagagagacgtggacatcatcaccctgtaccagaaggtgagcgtgtggctgctgagatacgacttcgtgctggagtaccccagacccgtgatgcccaacatggtgttcatcggcggcatcaactgcaagaagagaaaggacctgagccaggagttcgaggcctacatcaacgccagcggcgagcacggcatcgtggtgttcagcctgggcagcatggtgagcgagatccccgagaagaaggccatggccatcgccgacgccctgggcaagatcccccagaccgtgctgtggagatacaccggcaccagacccagcaacctggccaacaacaccatcctggtgaagtggctgccccagaacgacctgctgggccaccccatgaccagagccttcatcacccacgccggcagccacggcgtgtacgagagcatctgcaacggcgtgcccatggtgatgatgcccctgttcggcgaccagatggacaacgccaagagaatggagaccaagggcgccggcgtgaccctgaacgtgctggagatgaccagcgaggacctggagaacgccctgaaggccgtgatcaacgacaagagctacaaggagaacatcatgagactgagcagcctgcacaaggacagacccgtggagcccctggacctggccgtgttctgggtggagttcgtgatgagacacaagggcgccccccacctgagacccgccgcccacgacctgacctggtaccagtaccacagcctggacgtgatcggcttcctgctggccgtggtgctgaccgtggccttcatcaccttcaagtgctgcgcctacggctacagaaagtgcctgggcaagaagggcagagtgaagaaggcccacaagagcaagacccactag

SEQ ID NO: 104521 - DNA, 570 bp, synthetic construct
  misc_feature 1..570: note = Description of Artificial Sequence: Synthetic coding sequence
  source 1..570: mol_type = other DNA
atggcctgcctgctgagaagcttccagagaatcagcgccggcgtgttcttcctggccctgtggggcatggtggtgggcgacaagctgctggtggtgccccaggacggcagccactggctgagcatgaaggacatcgtggaggtgctgagcgacagaggccacgagatcgtggtggtggtgcccgaggtgaacctgctgctgaaggagagcaagtactacaccagaaagatctaccccgtgccctacgaccaggaggagctgaagaacagataccagagcttcggcaacaaccacttcgccgagagaagcttcctgaccgccccccagaccgagtacagaaacaacatgatcgtgatcggcctgtacttcatcaactgccagagcctgctgcaggacagagacaccctgaacttcttcaaggagagcaagttcgacgccctgttcaccgaccccgccctgccctgcggcgtgatcctggccgagtacctgggcctgcccagcgtgtacctgttcagaggcttcccctgcagcctggagcacaccttcagcagaagccccgaccccgtgtag

SEQ ID NO: 104522 - DNA, 1593 bp, synthetic construct
  misc_feature 1..1593: note = Description of Artificial Sequence: Synthetic coding sequence
  source 1..1593: mol_type = other DNA
atggccagagccggctggaccggcctgctgcccctgtacgtgtgcctgctgctgacctgcggcttcgccaaggccggcaagctgctggtggtgcccatggacggcagccactggttcaccatgcagagcgtggtggagaagctgatcctgagaggccacgaggtggtggtggtgatgcccgaggtgagctggcagctgggcagaagcctgaactgcaccgtgaagacctacagcaccagctacaccctggaggaccaggacagagagttcatggtgttcgccgacgccagatggaccgcccccctgagaagcgccttcagcctgctgaccagcagcagcaacggcatcttcgacctgttcttcagcaactgcagaagcctgttcaacgacagaaagctggtggagtacctgaaggagagctgcttcgacgccgtgttcctggaccccttcgacgcctgcggcctgatcgtggccaagtacttcagcctgcccagcgtggtgttcgccagaggcatcttctgccactacctggaggagggcgcccagtgccccgcccccctgagctacgtgcccagactgctgctgggcttcagcgacgccatgaccttcaaggagagagtgtggaaccacatcatgcacctggaggagcacctgttctgcccctacttcttcaagaacgtgctggagatcgccagcgagatcctgcagacccccgtgaccgcctacgacctgtacagccacaccagcatctggctgctgagaaccgacttcgtgctggagtaccccaagcccgtgatgcccaacatgatcttcatcggcggcatcaactgccaccagggcaagcccgtgcccatggagttcgaggcctacatcaacgccagcggcgagcacggcatcgtggtgttcagcctgggcagcatggtgagcgagatccccgagaagaaggccatggccatcgccgacgccctgggcaagatcccccagaccgtgctgtggagatacaccggcaccagacccagcaacctggccaacaacaccatcctggtgaagtggctgccccagaacgacctgctgggccaccccatgaccagagccttcatcacccacgccggcagccacggcgtgtacgagagcatctgcaacggcgtgcccatggtgatgatgcccctgttcggcgaccagatggacaacgccaagagaatggagaccaagggcgccggcgtgaccctgaacgtgctggagatgaccagcgaggacctggagaacgccctgaaggccgtgatcaacgacaagagctacaaggagaacatcatgagactgagcagcctgcacaaggacagacccgtggagcccctggacctggccgtgttctgggtggagttcgtgatgagacacaagggcgccccccacctgagacccgccgcccacgacctgacctggtaccagtaccacagcctggacgtgatcggcttcctgctggccgtggtgctgaccgtggccttcatcaccttcaagtgctgcgcctacggctacagaaagtgcctgggcaagaagggcagagtgaagaaggcccacaagagcaagacccactag

SEQ ID NO: 104523 - DNA, 1593 bp, synthetic construct
  misc_feature 1..1593: note = Description of Artificial Sequence: Synthetic coding sequence
  source 1..1593: mol_type = other DNA
atggccagaaccggctggaccagccccatccccctgtgcgtgagcctgctgctgacctgcggcttcgccgaggccggcaagctgctggtggtgcccatggacggcagccactggttcaccatgcagagcgtggtggagaagctgatcctgagaggccacgaggtggtggtggtgatgcccgaggtgagctggcagctgggcaagagcctgaactgcaccgtgaagacctacagcaccagctacaccctggaggacctggacagagagttcatggacttcgccgacgcccagtggaaggcccaggtgagaagcctgttcagcctgttcctgagcagcagcaacggcttcttcaacctgttcttcagccactgcagaagcctgttcaacgacagaaagctggtggagtacctgaaggagagcagcttcgacgccgtgttcctggaccccttcgacgcctgcggcctgatcgtggccaagtacttcagcctgcccagcgtggtgttcgccagaggcatcgcctgccactacctggaggagggcgcccagtgccccgcccccctgagctacgtgcccagaatcctgctgggcttcagcgacgccatgaccttcaaggagagagtgagaaaccacatcatgcacctggaggagcacctgttctgccagtacttcagcaagaacgccctggagatcgccagcgagatcctgcagacccccgtgaccgcctacgacctgtacagccacaccagcatctggctgctgagaaccgacttcgtgctggactaccccaagcccgtgatgcccaacatgatcttcatcggcggcatcaactgccaccagggcaagcccctgcccatggagttcgaggcctacatcaacgccagcggcgagcacggcatcgtggtgttcagcctgggcagcatggtgagcgagatccccgagaagaaggccatggccatcgccgacgccctgggcaagatcccccagaccgtgctgtggagatacaccggcaccagacccagcaacctggccaacaacaccatcctggtgaagtggctgccccagaacgacctgctgggccaccccatgaccagagccttcatcacccacgccggcagccacggcgtgtacgagagcatctgcaacggcgtgcccatggtgatgatgcccctgttcggcgaccagatggacaacgccaagagaatggagaccaagggcgccggcgtgaccctgaacgtgctggagatgaccagcgaggacctggagaacgccctgaaggccgtgatcaacgacaagagctacaaggagaacatcatgagactgagcagcctgcacaaggacagacccgtggagcccctggacctggccgtgttctgggtggagttcgtgatgagacacaagggcgccccccacctgagacccgccgcccacgacctgacctggtaccagtaccacagcctggacgtgatcggcttcctgctggccgtggtgctgaccgtggccttcatcaccttcaagtgctgcgcctacggctacagaaagtgcctgggcaagaagggcagagtgaagaaggcccacaagagcaagacccactag

SEQ ID NO: 104524 - DNA, 1593 bp, synthetic construct
  misc_feature 1..1593: note = Description of Artificial Sequence: Synthetic coding sequence
  source 1..1593: mol_type = other DNA
atggcctgcaccggctggaccagccccctgcccctgtgcgtgtgcctgctgctgacctgcggcttcgccgaggccggcaagctgctggtggtgcccatggacggcagccactggttcaccatgagaagcgtggtggagaagctgatcctgagaggccacgaggtggtggtggtgatgcccgaggtgagctggcagctgggcagaagcctgaactgcaccgtgaagacctacagcaccagctacaccctggaggacctggacagagagttcaaggccttcgcccacgcccagtggaaggcccaggtgagaagcatctacagcctgctgatgggcagctacaacgacatcttcgacctgttcttcagcaactgcagaagcctgttcaaggacaagaagctggtggagtacctgaaggagagcagcttcgacgccgtgttcctggaccccttcgacaactgcggcctgatcgtggccaagtacttcagcctgcccagcgtggtgttcgccagaggcatcctgtgccactacctggaggagggcgcccagtgccccgcccccctgagctacgtgcccagaatcctgctgggcttcagcgacgccatgaccttcaaggagagagtgagaaaccacatcatgcacctggaggagcacctgctgtgccacagattcttcaagaacgccctggagatcgccagcgagatcctgcagacccccgtgaccgagtacgacctgtacagccacaccagcatctggctgctgagaaccgacttcgtgctggactaccccaagcccgtgatgcccaacatgatcttcatcggcggcatcaactgccaccagggcaagcccctgcccatggagttcgaggcctacatcaacgccagcggcgagcacggcatcgtggtgttcagcctgggcagcatggtgagcgagatccccgagaagaaggccatggccatcgccgacgccctgggcaagatcccccagaccgtgctgtggagatacaccggcaccagacccagcaacctggccaacaacaccatcctggtgaagtggctgccccagaacgacctgctgggccaccccatgaccagagccttcatcacccacgccggcagccacggcgtgtacgagagcatctgcaacggcgtgcccatggtgatgatgcccctgttcggcgaccagatggacaacgccaagagaatggagaccaagggcgccggcgtgaccctgaacgtgctggagatgaccagcgaggacctggagaacgccctgaaggccgtgatcaacgacaagagctacaaggagaacatcatgagactgagcagcctgcacaaggacagacccgtggagcccctggacctggccgtgttctgggtggagttcgtgatgagacacaagggcgccccccacctgagacccgccgcccacgacctgacctggtaccagtaccacagcctggacgtgatcggcttcctgctggccgtggtgctgaccgtggccttcatcaccttcaagtgctgcgcctacggctacagaaagtgcctgggcaagaagggcagagtgaagaaggcccacaagagcaagacccactag

SEQ ID NO: 104525 - DNA, 1584 bp, synthetic construct
  misc_feature 1..1584: note = Description of Artificial Sequence: Synthetic coding sequence
  source 1..1584: mol_type = other DNA
atgctgaacaacctgctgctgttcagcctgcagatcagcctgatcggcaccaccctgggcggcaacgtgctgatctggcccatggagggcagccactggctgaacgtgaagatcatcatcgacgagctgatcaagaaggagcacaacgtgaccgtgctggtggccagcggcgccctgttcatcacccccaccagcaaccccagcctgaccttcgagatctacagagtgcccttcggcaaggagagaatcgagggcgtgatcaaggacttcgtgctgacctggctggagaacagacccagccccagcaccatctggagattctaccaggagatggccaaggtgatcaaggacttccacatggtgagccaggagatctgcgacggcgtgctgaagaaccagcagctgatggccaagctgaagaagagcaagttcgaggtgctggtgagcgaccccgtgttcccctgcggcgacatcgtggccctgaagctgggcatccccttcatgtacagcctgagattcagccccgccagcaccgtggagaagcactgcggcaaggtgccctacccccccagctacgtgcccgccgtgctgagcgagctgaccgaccagatgagcttcaccgacagaatcagaaacttcatcagctaccacctgcaggactacatgttcgagaccctgtggaagagctgggacagctactacagcaaggccctgggcggcctgctgctgtgctgccccggctggagcgccgtggccgacctgggcagcctgcagcccctgctgcccggcttcaagagattcagcagactgagcctgcactgcagctgggactacagactgcccgccggcagacccaccaccctgtgcgagaccatgggcaaggccgagatctggctgatcagaacctactgggacttcgagttccccagaccctacctgcccaacttcgagttcgtgggcggcctgcactgcaagcccgccaagcccctgcccaaggtgctgtggagatacaagggcaagaagcccgccaccctgggcaacaacacccagctgttcgactggatcccccagaacgacctgctgggccaccccaagaccaaggccttcatcacccacggcggcaccaacggcatctacgaggccatctaccacggcgtgcccatggtgggcgtgcccatgttcgccgaccagcccgacaacatcgcccacatgaaggccaagggcgccgccgtggaggtgaacctgaacaccatgaccagcgtggacctgctgagcgccctgagaaccgtgatcaacgagcccagctacaaggagaacgccatgagactgagcagaatccaccacgaccagcccgtgaagcccctggacagagccgtgttctggatcgagttcgtgatgagacacaagggcgccaagcacctgagagtggccgcccacgacctgacctggttccagtaccacagcctggacgtgatcggcttcctgctggtgtgcgtgaccaccgccatcttcctggtgatccagtgctgcctgttcagctgccagaagttcggcaagatcggcaagaagaagaagagagagtag

SEQ ID NO: 104526 - DNA, 2082 bp, synthetic construct
  misc_feature 1..2082: note = Description of Artificial Sequence: Synthetic coding sequence
  source 1..2082: mol_type = other DNA
atgctgaacaacctgctgctgttcagcctgcagatcagcctgatcggcaccaccctgggcggcaacgtgctgatctggcccatggagggcagccactggctgaacgtgaagatcatcatcgacgagctgatcaagaaggagcacaacgtgaccgtgctggtggccagcggcgccctgttcatcacccccaccagcaaccccagcctgaccttcgagatctacagagtgcccttcggcaaggagagaatcgagggcgtgatcaaggacttcgtgctgacctggctggagaacagacccagccccagcaccatctggagattctaccaggagatggccaaggtgatcaaggacttccacatggtgagccaggagatctgcgacggcgtgctgaagaaccagcagctgatggccaagctgaagaagagcaagttcgaggtgctggtgagcgaccccgtgttcccctgcggcgacatcgtggccctgaagctgggcatccccttcatgtacagcctgagattcagccccgccagcaccgtggagaagcactgcggcaaggtgccctacccccccagctacgtgcccgccgtgctgagcgagctgaccgaccagatgagcttcaccgacagaatcagaaacttcatcagctaccacctgcaggactacatgttcgagaccctgtggaagagctgggacagctactacagcaaggccctggacggcagccactggctgaacatcaagatcatcctggaggagctgatccagagaaaccacaacgtgaccgtgctggccagcagcgccaccctgttcatcaacagcaaccccgacagccccgtgaacttcgaggtgatccccgtgagctacaagaagagcaacatcgacagcctgatcgagcacatgatcatgctgtggatcgaccacagacccacccccctgaccatctgggccttctacaaggagctgggcaagctgctggacaccttcttccagatcaacatccagctgtgcgacggcgtgctgaagaaccccaagctgatggccagactgcagaagggcggcttcgacgtgctggtggccgaccccgtgaccatctgcggcgacctggtggccctgaagctgggcatccccttcatgtacaccctgagattcagccccgccagcaccgtggagagacactgcggcaagatccccgcccccgtgagctacgtgcccgccgccctgagcgagctgaccgaccagatgaccttcggcgagagaatcaagaacaccatcagctacagcctgcaggactacatcttccagagctactggggcgagtggaacagctactacagcaagatcctgggcagacccaccaccctgtgcgagaccatgggcaaggccgagatctggctgatcagaacctactgggacttcgagttccccagaccctacctgcccaacttcgagttcgtgggcggcctgcactgcaagcccgccaagcccctgcccaaggtgctgtggagatacaagggcaagaagcccgccaccctgggcaacaacacccagctgttcgactggatcccccagaacgacctgctgggccaccccaagaccaaggccttcatcacccacggcggcaccaacggcatctacgaggccatctaccacggcgtgcccatggtgggcgtgcccatgttcgccgaccagcccgacaacatcgcccacatgaaggccaagggcgccgccgtggaggtgaacctgaacaccatgaccagcgtggacctgctgagcgccctgagaaccgtgatcaacgagcccagctacaaggagaacgccatgagactgagcagaatccaccacgaccagcccgtgaagcccctggacagagccgtgttctggatcgagttcgtgatgagacacaagggcgccaagcacctgagagtggccgcccacgacctgacctggttccagtaccacagcctggacgtgatcggcttcctgctggtgtgcgtgaccaccgccatcttcctggtgatccagtgctgcctgttcagctgccagaagttcggcaagatcggcaagaagaagaagagagagtag

SEQ ID NO: 104527 - DNA, 1611 bp, synthetic construct
  misc_feature 1..1611: note = Description of Artificial Sequence: Synthetic coding sequence
  source 1..1611: mol_type = other DNA
atggtgagcatcagagacttcaccatgcccaagaagttcgtgcagatgctggtgttcaacctgaccctgaccgaggtggtgctgagcggcaacgtgctgatctggcccaccgacggcagccactggctgaacatcaagatcatcctggaggagctgatccagagaaaccacaacgtgaccgtgctggccagcagcgccaccctgttcatcaacagcaaccccgacagccccgtgaacttcgaggtgatccccgtgagctacaagaagagcaacatcgacagcctgatcgagcacatgatcatgctgtggatcgaccacagacccacccccctgaccatctgggccttctacaaggagctgggcaagctgctggacaccttcttccagatcaacatccagctgtgcgacggcgtgctgaagaaccccaagctgatggccagactgcagaagggcggcttcgacgtgctggtggccgaccccgtgaccatctgcggcgacctggtggccctgaagctgggcatccccttcatgtacaccctgagattcagccccgccagcaccgtggagagacactgcggcaagatccccgcccccgtgagctacgtgcccgccgccctgagcgagctgaccgaccagatgaccttcggcgagagaatcaagaacaccatcagctacagcctgcaggactacatcttccagagctactggggcgagtggaacagctactacagcaagatcctgggcagacccaccaccctgtgcgagaccatgggcaaggccgagatctggctgatcagaacctactgggacttcgagttccccagaccctacctgcccaacttcgagttcgtgggcggcctgcactgcaagcccgccaagcccctgcccaaggagatggaggagttcatccagagcagcggcaagaacggcgtggtggtgttcagcctgggcagcatggtgaagaacctgaccgaggagaaggccaacctgatcgccagcgccctggcccagatcccccagaaggtgctgtggagatacaagggcaagaagcccgccaccctgggcaacaacacccagctgttcgactggatcccccagaacgacctgctgggccaccccaagaccaaggccttcatcacccacggcggcaccaacggcatctacgaggccatctaccacggcgtgcccatggtgggcgtgcccatgttcgccgaccagcccgacaacatcgcccacatgaaggccaagggcgccgccgtggaggtgaacctgaacaccatgaccagcgtggacctgctgagcgccctgagaaccgtgatcaacgagcccagctacaaggagaacgccatgagactgagcagaatccaccacgaccagcccgtgaagcccctggacagagccgtgttctggatcgagttcgtgatgagacacaagggcgccaagcacctgagagtggccgcccacgacctgacctggttccagtaccacagcctggacgtgatcggcttcctgctggtgtgcgtgaccaccgccatcttcctggtgatccagtgctgcctgttcagctgccagaagttcggcaagatcggcaagaagaagaagagagagtag

SEQ ID NO: 104528 - DNA, 1584 bp, synthetic construct
  misc_feature 1..1584: note = Description of Artificial Sequence: Synthetic coding sequence
  source 1..1584: mol_type = other DNA
atgctgaacaacctgctgctgttcagcctgcagatcagcctgatcggcaccaccctgggcggcaacgtgctgatctggcccatggagggcagccactggctgaacgtgaagatcatcatcgacgagctgatcaagaaggagcacaacgtgaccgtgctggtggccagcggcgccctgttcatcacccccaccagcaaccccagcctgaccttcgagatctacagagtgcccttcggcaaggagagaatcgagggcgtgatcaaggacttcgtgctgacctggctggagaacagacccagccccagcaccatctggagattctaccaggagatggccaaggtgatcaaggacttccacatggtgagccaggagatctgcgacggcgtgctgaagaaccagcagctgatggccaagctgaagaagagcaagttcgaggtgctggtgagcgaccccgtgttcccctgcggcgacatcgtggccctgaagctgggcatccccttcatgtacagcctgagattcagccccgccagcaccgtggagaagcactgcggcaaggtgccctacccccccagctacgtgcccgccgtgctgagcgagctgaccgaccagatgagcttcaccgacagaatcagaaacttcatcagctaccacctgcaggactacatgttcgagaccctgtggaagagctgggacagctactacagcaaggccctgggcagacccaccaccctgtgcgagaccatgggcaaggccgagatctggctgatcagaacctactgggacttcgagttccccagaccctacctgcccaacttcgagttcgtgggcggcctgcactgcaagcccgccaagcccctgcccaaggagatggaggagttcatccagagcagcggcaagaacggcgtggtggtgttcagcctgggcagcatggtgaagaacctgaccgaggagaaggccaacctgatcgccagcgccctggcccagatcccccagaaggtgctgtggagatacaagggcaagaagcccgccaccctgggcaacaacacccagctgttcgactggatcccccagaacgacctgctgggccaccccaagaccaaggccttcatcacccacggcggcaccaacggcatctacgaggccatctaccacggcgtgcccatggtgggcgtgcccatgttcgccgaccagcccgacaacatcgcccacatgaaggccaagggcgccgccgtggaggtgaacctgaacaccatgaccagcgtggacctgctgagcgccctgagaaccgtgatcaacgagcccagctacaaggagaacgccatgagactgagcagaatccaccacgaccagcccgtgaagcccctggacagagccgtgttctggatcgagttcgtgatgagacacaagggcgccaagcacctgagagtggccgcccacgacctgacctggttccagtaccacagcctggacgtgatcggcttcctgctggtgtgcgtgaccaccgccatcttcctggtgatccagtgctgcctgttcagctgccagaagttcggcaagatcggcaagaagaagaagagagagtag

SEQ ID NO: 104529 - DNA, 477 bp, synthetic construct
  misc_feature 1..477: note = Description of Artificial Sequence: Synthetic coding sequence
  source 1..477: mol_type = other DNA
atgctgaacaacctgctgctgttcagcctgcagatcagcctgatcggcaccaccctgggcggcaacgtgctgatctggcccatggagggcagccactggctgaacgtgaagatcatcatcgacgagctgatcaagaaggagcacaacgtgaccgtgctggtggccagcggcgccctgttcatcacccccaccagcaaccccagcctgaccttcgagatctacagagtgcccttcggcaaggagagaatcgagggcgtgatcaaggacttcgtgctgacctggctggagaacagacccagccccagcaccatctggagattctaccaggagatggccaaggtgatcaaggacttccacatggtgagccaggagatctgcgacggcgtgctgaagaaccagcagctgatggccaagctgaagaagagcaagttcgaggtgctggtgagcgaccccgtgttcccctgcggcgacatctag

SEQ ID NO: 104530 - DNA, 1590 bp, synthetic construct
  misc_feature 1..1590: note = Description of Artificial Sequence: Synthetic coding sequence
  source 1..1590: mol_type = other DNA
atgaccctgaagtggaccagcgtgctgctgctgatccacctgagctgctacttcagcagcggcagctgcggcaaggtgctggtgtgggccgccgagtacagccactggatgaacatgaagaccatcctgaaggagctggtgcagagaggccacgaggtgaccgtgctggccagcagcgccagcatcctgttcgaccccaacgacgccagcaccctgaagttcgaggtgtaccccaccagcctgaccaagaccgagttcgagaacatcatcatgcagcaggtgaagagatggagcgacatcagaaaggacagcttctggctgtacttcagccaggagcaggagatcctgtgggagctgtacgacatcttcagaaacttctgcaaggacgtggtgagcaacaagaaggtgatgaagaagctgcaggagagcagattcgacatcgtgttcgccgacgccgtgttcccctgcggcgagctgctggccgccctgctgaacatcagattcgtgtacagcctgagattcacccccggctacaccatcgagagacacagcggcggcctgatcttcccccccagctacatccccatcgtgatgagcaagctgagcgaccagatgaccttcatggagagagtgaagaacatgatctacgtgctgtacttcgacttctggttccagatgagcgacatgaagaagtgggaccagttctacagcgaggtgctgggcagacccaccaccctgttcgagaccatgggcaaggccgacatctggctgatgagaaacagctggagcttccagttcccccaccccttcctgcccaacgtggacttcgtgggcggcttccactgcaagcccgccaagcccctgcccaaggagatggaggagttcgtgcagagcagcggcgagaacggcgtggtggtgttcagcctgggcagcgtgatcagcaacatgaccgccgagagagccaacgtgatcgccaccgccctggccaagatcccccagaaggtgctgtggagattcgacggcaacaagcccgacgccctgggcctgaacaccagactgtacaagtggatcccccagaacgacctgctgggccaccccaagaccagagccttcatcacccacggcggcgccaacggcatctacgaggccatctaccacggcatccccatggtgggcatccccctgttcttcgaccagcccgacaacatcgcccacatgaaggccaagggcgccgccgtgagactggacttcaacaccatgagcagcaccgacctgctgaacgccctgaagaccgtgatcaacgaccccctgtacaaggagaacatcatgaagctgagcagaatccagcacgaccagcccgtgaagcccctggacagagccgtgttctggatcgagttcgtgatgccccacaagggcgccaagcacctgagagtggccgcccacgacctgacctggttccagtaccacagcctggacgtgatcggcttcctgctggcctgcgtggccaccgtgatcttcatcatcaccaagttctgcctgttctgcttctggaagttcgccagaaagggcaagaagggcaagagagactag

SEQ ID NO: 104531 - DNA, 1593 bp, synthetic construct
  misc_feature 1..1593: note = Description of Artificial Sequence: Synthetic coding sequence
  source 1..1593: mol_type = other DNA
atgagcctgaagtggaccagcgtgttcctgctgatccagctgagctgctacttcagcagcggcagctgcggcaaggtgctggtgtggcccaccgagtacagccactggatcaacatgaagaccatcctggaggagctggtgcagagaggccacgaggtgaccgtgctgaccagcagcgccagcaccctggtgaacgccagcaagagcagcgccatcaagctggaggtgtaccccaccagcctgaccaagaactacctggaggacagcctgctgaagatcctggacagatggatctacggcgtgagcaagaacaccttctggagctacttcagccagctgcaggagctgtgctgggagtactacgactacagcaacaagctgtgcaaggacgccgtgctgaacaagaagctgatgatgaagctgcaggagagcaagttcgacgtgatcctggccgacgccctgaacccctgcggcgagctgctggccgagctgttcaacatccccttcctgtacagcctgagattcagcgtgggctacaccttcgagaagaacggcggcggcttcctgttcccccccagctacgtgcccgtggtgatgagcgagctgagcgaccagatgatcttcatggagagaatcaagaacatgatccacatgctgtacttcgacttctggttccagatctacgacctgaagaagtgggaccagttctacagcgaggtgctgggcagacccaccaccctgttcgagaccatgggcaaggccgagatgtggctgatcagaacctactgggacttcgagttccccagacccttcctgcccaacgtggacttcgtgggcggcctgcactgcaagcccgccaagcccctgcccaaggagatggaggagttcgtgcagagcagcggcgagaacggcatcgtggtgttcagcctgggcagcatgatcagcaacatgagcgaggagagcgccaacatgatcgccagcgccctggcccagatcccccagaaggtgctgtggagattcgacggcaagaagcccaacaccctgggcagcaacaccagactgtacaagtggctgccccagaacgacctgctgggccaccccaagaccaaggccttcatcacccacggcggcaccaacggcatctacgaggccatctaccacggcatccccatggtgggcatccccctgttcgccgaccagcacgacaacatcgcccacatgaaggccaagggcgccgccctgagcgtggacatcagaaccatgagcagcagagacctgctgaacgccctgaagagcgtgatcaacgaccccgtgtacaaggagaacgtgatgaagctgagcagaatccaccacgaccagcccatgaagcccctggacagagccgtgttctggatcgagttcgtgatgagacacaagggcgccaagcacctgagagtggccgcccacaacctgacctggatccagtaccacagcctggacgtgatcgccttcctgctggcctgcgtggccaccgtgatcttcatcatcaccaagttctgcctgttctgcttcagaaagctggccaagaagggcaagaagaagaagagagactag

SEQ ID NO: 104532 - DNA, 1593 bp, synthetic construct
  misc_feature 1..1593: note = Description of Artificial Sequence: Synthetic coding sequence
  source 1..1593: mol_type = other DNA
atgagcctgaagtggatgagcgtgttcctgctgatgcagctgagctgctacttcagcagcggcagctgcggcaaggtgctggtgtggcccaccgagtacagccactggatcaacatgaagaccatcctggaggagctggtgcagagaggccacgaggtgatcgtgctgaccagcagcgccagcatcctggtgaacgccagcaagagcagcgccatcaagctggaggtgtaccccaccagcctgaccaagaacgacctggaggacttcttcatgaagatgttcgacagatggacctacagcatcagcaagaacaccttctggagctacttcagccagctgcaggagctgtgctgggagtacagcgactacaacatcaagctgtgcgaggacgccgtgctgaacaagaagctgatgagaaagctgcaggagagcaagttcgacgtgctgctggccgacgccgtgaacccctgcggcgagctgctggccgagctgctgaacatccccttcctgtacagcctgagattcagcgtgggctacaccgtggagaagaacggcggcggcttcctgttcccccccagctacgtgcccgtggtgatgagcgagctgagcgaccagatgatcttcatggagagaatcaagaacatgatctacatgctgtacttcgacttctggttccaggcctacgacctgaagaagtgggaccagttctacagcgaggtgctgggcagacccaccaccctgttcgagaccatgggcaaggccgagatgtggctgatcagaacctactgggacttcgagttccccagacccttcctgcccaacgtggacttcgtgggcggcctgcactgcaagcccgccaagcccctgcccaaggagatggaggagttcgtgcagagcagcggcgagaacggcatcgtggtgttcagcctgggcagcatgatcagcaacatgagcgaggagagcgccaacatgatcgccagcgccctggcccagatcccccagaaggtgctgtggagattcgacggcaagaagcccaacaccctgggcagcaacaccagactgtacaagtggctgccccagaacgacctgctgggccaccccaagaccaaggccttcatcacccacggcggcaccaacggcatctacgaggccatctaccacggcatccccatggtgggcatccccctgttcgccgaccagcacgacaacatcgcccacatgaaggccaagggcgccgccctgagcgtggacatcagaaccatgagcagcagagacctgctgaacgccctgaagagcgtgatcaacgaccccatctacaaggagaacatcatgaagctgagcagaatccaccacgaccagcccgtgaagcccctggacagagccgtgttctggatcgagttcgtgatgagacacaagggcgccaagcacctgagagtggccgcccacaacctgacctggatccagtaccacagcctggacgtgatcgccttcctgctggcctgcgtggccaccatgatcttcatgatcaccaagtgctgcctgttctgcttcagaaagctggccaagaccggcaagaagaagaagagagactag

SEQ ID NO: 104533 - DNA, 1590 bp, synthetic construct
  misc_feature 1..1590: note = Description of Artificial Sequence: Synthetic coding sequence
  source 1..1590: mol_type = other DNA
atggccctgaagtggaccagcgtgctgctgctgatccacctgggctgctacttcagcagcggcagctgcggcaaggtgctggtgtggaccggcgagtacagccactggatgaacatgaagaccatcctgaaggagctggtgcagagaggccacgaggtgaccgtgctggccagcagcgccagcatcctgttcgaccccaacgacgccttcaccctgaagctggaggtgtaccccaccagcctgaccaagaccgagttcgagaacatcatcatgcagcaggtgaagagatggagcgacatccagaaggacagcttctggctgtacttcagccaggagcaggagatcctgtgggagttccacgacatcttcagaaacttctgcaaggacgtggtgagcaacaagaaggtgatgaagaagctgcaggagagcagattcgacatcatcttcgccgacgccttcttcccctgcggcgagctgctggccgccctgctgaacatccccttcgtgtacagcctgtgcttcacccccggctacaccatcgagagacacagcggcggcctgatcttcccccccagctacatccccgtggtgatgagcaagctgagcgaccagatgaccttcatggagagagtgaagaacatgatctacgtgctgtacttcgacttctggttccagatgtgcgacatgaagaagtgggaccagttctacagcgaggtgctgggcagacccaccaccctgttcgagaccatgggcaaggccgacatctggctgatgagaaacagctggagcttccagttcccccaccccttcctgcccaacatcgacttcgtgggcggcctgcactgcaagcccgccaagcccctgcccaaggagatggaggagttcgtgcagagcagcggcgagaacggcgtggtggtgttcagcctgggcagcgtgatcagcaacatgaccgccgagagagccaacgtgatcgccaccgccctggccaagatcccccagaaggtgctgtggagattcgacggcaacaagcccgacgccctgggcctgaacaccagactgtacaagtggatcccccagaacgacctgctgggcctgcccaagaccagagccttcatcacccacggcggcgccaacggcatctacgaggccatctaccacggcatccccatggtgggcatccccctgttctgggaccagcccgacaacatcgcccacatgaaggccaagggcgccgccgtgagactggacttccacaccatgagcagcaccgacctgctgaacgccctgaagaccgtgatcaacgaccccagctacaaggagaacgtgatgaagctgagcatcatccagcacgaccagcccgtgaagcccctgcacagagccgtgttctggatcgagttcgtgatgtgccacaagggcgccaagcacctgagagtggccgccagagacctgacctggttccagtaccacagcctggacgtgatcggcttcctgctggcctgcgtggccaccgtgatcttcgtggtgaccaagttctgcctgttctgcttctggaagttcgccagaaagggcaagaagggcaagagagactag

SEQ ID NO: 104534 - DNA, 1008 bp, synthetic construct
  misc_feature 1..1008: note = Description of Artificial Sequence: Synthetic coding sequence
  source 1..1008: mol_type = other DNA
atggccctgaagtggaccagcgtgctgctgctgatccacctgggctgctacttcagcagcggcagctgcggcaaggtgctggtgtggaccggcgagtacagccactggatgaacatgaagaccatcctgaaggagctggtgcagagaggccacgaggtgaccgtgctggccagcagcgccagcatcctgttcgaccccaacgacgccttcaccctgaagctggaggtgtaccccaccagcctgaccaagaccgagttcgagaacatcatcatgcagcaggtgaagagatggagcgacatccagaaggacagcttctggctgtacttcagccaggagcaggagatcctgtgggagttccacgacatcttcagaaacttctgcaaggacgtggtgagcaacaagaaggtgatgaagaagctgcaggagagcagattcgacatcatcttcgccgacgccttcttcccctgcggcgagctgctggccgccctgctgaacatccccttcgtgtacagcctgtgcttcacccccggctacaccatcgagagacacagcggcggcctgatcttcccccccagctacatccccgtggtgatgagcaagctgagcgaccagatgaccttcatggagagagtgaagaacatgatctacgtgctgtacttcgacttctggttccagatgtgcgacatgaagaagtgggaccagttctacagcgaggtgctgggcagacccaccaccctgttcgagaccatgggcaaggccgacatctggctgatgagaaacagctggagcttccagttcccccaccccttcctgcccaacatcgacttcgtgggcggcctgcactgcaagcccgccaagcccctgcccaaggagatggaggagttcgtgcagagcagcggcgagaacggcgtggtggtgttcagcctgggcagcgtgatcagcaacatgaccgccgagagagccaacgtgatcgccaccgccctggccaagatcccccagaagatctag

SEQ ID NO: 104535 - DNA, 1587 bp, synthetic construct
  misc_feature 1..1587: note = Description of Artificial Sequence: Synthetic coding sequence
  source 1..1587: mol_type = other DNA
atgagcatgaagtggaccagcgccctgctgctgatccagctgagctgctacttcagcagcggcagctgcggcaaggtgctggtgtggcccaccgagttcagccactggatgaacatcaagaccatcctggacgagctggtgcagagaggccacgaggtgaccgtgctggccagcagcgccagcatcagcttcgaccccaacagccccagcaccctgaagttcgaggtgtaccccgtgagcctgaccaagaccgagttcgaggacatcatcaagcagctggtgaagagatgggccgagctgcccaaggacaccttctggagctacttcagccaggtgcaggagatcatgtggaccttcaacgacatcctgagaaagttctgcaaggacatcgtgagcaacaagaagctgatgaagaagctgcaggagagcagattcgacgtggtgctggccgacgccgtgttccccttcggcgagctgctggccgagctgctgaagatccccttcgtgtacagcctgagattcagccccggctacgccatcgagaagcacagcggcggcctgctgttcccccccagctacgtgcccgtggtgatgagcgagctgagcgaccagatgaccttcatcgagagagtgaagaacatgatctacgtgctgtacttcgagttctggttccagatcttcgacatgaagaagtgggaccagttctacagcgaggtgctgggcagacccaccaccctgagcgagaccatggccaaggccgacatctggctgatcagaaactactgggacttccagttcccccaccccctgctgcccaacgtggagttcgtgggcggcctgcactgcaagcccgccaagcccctgcccaaggagatggaggagttcgtgcagagcagcggcgagaacggcgtggtggtgttcagcctgggcagcatggtgagcaacaccagcgaggagagagccaacgtgatcgccagcgccctggccaagatcccccagaaggtgctgtggagattcgacggcaacaagcccgacaccctgggcctgaacaccagactgtacaagtggatcccccagaacgacctgctgggccaccccaagaccagagccttcatcacccacggcggcgccaacggcatctacgaggccatctaccacggcatccccatggtgggcgtgcccctgttcgccgaccagcccgacaacatcgcccacatgaaggccaagggcgccgccgtgagcctggacttccacaccatgagcagcaccgacctgctgaacgccctgaagaccgtgatcaacgaccccctgtacaaggagaacgccatgaagctgagcagaatccaccacgaccagcccgtgaagcccctggacagagccgtgttctggatcgagttcgtgatgagacacaagggcgccaagcacctgagagtggccgcccacgacctgacctggttccagtaccacagcctggacgtgaccggcttcctgctggcctgcgtggccaccgtgatcttcatcatcaccaagtgcctgttctgcgtgtggaagttcgtgagaaccggcaagaagggcaagagagactag

SEQ ID NO: 104536 - DNA, 1179 bp, synthetic construct
  misc_feature 1..1179: note = Description of Artificial Sequence: Synthetic coding sequence
  source 1..1179: mol_type = other DNA
atgttcttcgccctgctgcacgtgagcagcaccaacggcctggacgccgtgttccccttcggcgagctgctggccgagctgctgaagatccccttcgtgtacagcctgagattcagccccggctacgccatcgagaagcacagcggcggcctgctgttcccccccagctacgtgcccgtggtgatgagcgagctgagcgaccagatgaccttcatcgagagagtgaagaacatgatctacgtgctgtacttcgagttctggttccagatcttcgacatgaagaagtgggaccagttctacagcgaggtgctgggcagacccaccaccctgagcgagaccatggccaaggccgacatctggctgatcagaaactactgggacttccagttcccccaccccctgctgcccaacgtggagttcgtgggcggcctgcactgcaagcccgccaagcccctgcccaaggagatggaggagttcgtgcagagcagcggcgagaacggcgtggtggtgttcagcctgggcagcatggtgagcaacaccagcgaggagagagccaacgtgatcgccagcgccctggccaagatcccccagaaggtgctgtggagattcgacggcaacaagcccgacaccctgggcctgaacaccagactgtacaagtggatcccccagaacgacctgctgggccaccccaagaccagagccttcatcacccacggcggcgccaacggcatctacgaggccatctaccacggcatccccatggtgggcgtgcccctgttcgccgaccagcccgacaacatcgcccacatgaaggccaagggcgccgccgtgagcctggacttccacaccatgagcagcaccgacctgctgaacgccctgaagaccgtgatcaacgaccccctgtacaaggagaacgccatgaagctgagcagaatccaccacgaccagcccgtgaagcccctggacagagccgtgttctggatcgagttcgtgatgagacacaagggcgccaagcacctgagagtggccgcccacgacctgacctggttccagtaccacagcctggacgtgaccggcttcctgctggcctgcgtggccaccgtgatcttcatcatcaccaagtgcctgttctgcgtgtggaagttcgtgagaaccggcaagaagggcaagagagactag

SEQ ID NO: 104537 - DNA, 165 bp, synthetic construct
  misc_feature 1..165: note = Description of Artificial Sequence: Synthetic coding sequence
  source 1..165: mol_type = other DNA
atgagcatgaagtggaccagcgccctgctgctgatccagctgagctgctacttcagcagcggcagctgcggcaaggtgctggtgtggcccaccgagttcagccactggatgaacatcaagaccatcctggacgagctggtgcagagaggccacgaggtgacctag

SEQ ID NO: 104538 - DNA, 1590 bp, synthetic construct
  misc_feature 1..1590: note = Description of Artificial Sequence: Synthetic coding sequence
  source 1..1590: mol_type = other DNA
atgagcgtgaagtggaccagcgtgatcctgctgatccagctgagcttctgcttcagcagcggcaactgcggcaaggtgctggtgtgggccgccgagtacagccactggatgaacatcaagaccatcctggacgagctgatccagagaggccacgaggtgaccgtgctggccagcagcgccagcatcctgttcgaccccaacaacagcagcgccctgaagatcgagatctaccccaccagcctgaccaagaccgagctggagaacttcatcatgcagcagatcaagagatggagcgacctgcccaaggacaccttctggctgtacttcagccaggtgcaggagatcatgagcatcttcggcgacatcaccagaaagttctgcaaggacgtggtgagcaacaagaagttcatgaagaaggtgcaggagagcagattcgacgtgatcttcgccgacgccatcttcccctgcagcgagctgctggccgagctgttcaacatccccttcgtgtacagcctgagcttcagccccggctacaccttcgagaagcacagcggcggcttcatcttcccccccagctacgtgcccgtggtgatgagcgagctgaccgaccagatgaccttcatggagagagtgaagaacatgatctacgtgctgtacttcgacttctggttcgagatcttcgacatgaagaagtgggaccagttctacagcgaggtgctgggcagacccaccaccctgagcgagaccatgggcaaggccgacgtgtggctgatcagaaacagctggaacttccagttcccctaccccctgctgcccaacgtggacttcgtgggcggcctgcactgcaagcccgccaagcccctgcccaaggagatggaggacttcgtgcagagcagcggcgagaacggcgtggtggtgttcagcctgggcagcatggtgagcaacatgaccgaggagagagccaacgtgatcgccagcgccctggcccagatcccccagaaggtgctgtggagattcgacggcaacaagcccgacaccctgggcctgaacaccagactgtacaagtggatcccccagaacgacctgctgggccaccccaagaccagagccttcatcacccacggcggcgccaacggcatctacgaggccatctaccacggcatccccatggtgggcatccccctgttcgccgaccagcccgacaacatcgcccacatgaaggccagaggcgccgccgtgagagtggacttcaacaccatgagcagcaccgacctgctgaacgccctgaagagagtgatcaacgaccccagctacaaggagaacgtgatgaagctgagcagaatccagcacgaccagcccgtgaagcccctggacagagccgtgttctggatcgagttcgtgatgagacacaagggcgccaagcacctgagagtggccgcccacgacctgacctggttccagtaccacagcctggacgtgatcggcttcctgctggtgtgcgtggccaccgtgatcttcatcgtgaccaagtgctgcctgttctgcttctggaagttcgccagaaaggccaagaagggcaagaacgactag

SEQ ID NO: 104539 - DNA, 1269 bp, synthetic construct
  misc_feature 1..1269: note = Description of Artificial Sequence: Synthetic coding sequence
  source 1..1269: mol_type = other DNA
atgctgcagtggagaagaagacactgctgcttcgccaagatgacctggaacgccaagagaagcctgttcagaacccacctgatcggcgtgctgagcctggtgttcctgttcgccatgttcctgttcttcaaccaccacgactggctgcccggcagagccggcttcaaggagaaccccgtgacctacaccttcagaggcttcagaagcaccaagagcgagaccaaccacagcagcctgagaaacatctggaaggagaccgtgccccagaccctgagaccccagaccgccaccaacagcaacaacaccgacctgagcccccagggcgtgaccggcctggagaacaccctgagcgccaacggcagcatctacaacgagaagggcaccggccaccccaacagctaccacttcaagtacatcatcaacgagcccgagaagtgccaggagaagagccccttcctgatcctgctgatcgccgccgagcccggccagatcgaggccagaagagccatcagacagacctggggcaacgagagcctggcccccggcatccagatcaccagaatcttcctgctgggcctgagcatcaagctgaacggctacctgcagagagccatcctggaggagagcagacagtaccacgacatcatccagcaggagtacctggacacctactacaacctgaccatcaagaccctgatgggcatgaactgggtggccacctactgcccccacatcccctacgtgatgaagaccgacagcgacatgttcgtgaacaccgagtacctgatcaacaagctgctgaagcccgacctgccccccagacacaactacttcaccggctacctgatgagaggctacgcccccaacagaaacaaggacagcaagtggtacatgccccccgacctgtaccccagcgagagataccccgtgttctgcagcggcaccggctacgtgttcagcggcgacctggccgagaagatcttcaaggtgagcctgggcatcagaagactgcacctggaggacgtgtacgtgggcatctgcctggccaagctgagaatcgaccccgtgcccccccccaacgagttcgtgttcaaccactggagagtgagctacagcagctgcaagtacagccacctgatcaccagccaccagttccagcccagcgagctgatcaagtactggaaccacctgcagcagaacaagcacaacgcctgcgccaacgccgccaaggagaaggccggcagatacagacacagaaagctgcactag

SEQ ID NO: 104540 - DNA, 1137 bp, synthetic construct
  misc_feature 1..1137: note = Description of Artificial Sequence: Synthetic coding sequence
  source 1..1137: mol_type = other DNA
atgcagctgagactgttcagaagactgctgctggccgccctgctgctggtgatcgtgtggaccctgttcggccccagcggcctgggcgaggagctgctgagcctgagcctggccagcctgctgcccgcccccgccagccccggcccccccctggccctgcccagactgctgatccccaaccaggaggcctgcagcggccccggcgccccccccttcctgctgatcctggtgtgcaccgcccccgagaacctgaaccagagaaacgccatcagagccagctggggcggcctgagagaggccagaggcctgagagtgcagaccctgttcctgctgggcgagcccaacgcccagcaccccgtgtggggcagccagggcagcgacctggccagcgagagcgccgcccagggcgacatcctgcaggccgccttccaggacagctacagaaacctgaccctgaagaccctgagcggcctgaactgggccgagaagcactgccccatggccagatacgtgctgaagaccgacgacgacgtgtacgtgaacgtgcccgagctggtgagcgagctggtgctgagaggcggcagatggggccagtgggagagaagcaccgagccccagagagaggccgagcaggagggcggccaggtgctgcacagcgaggaggtgcccctgctgtacctgggcagagtgcactggagagtgaaccccagcagaacccccggcggcagacacagagtgagcgaggagcagtggccccacacctggggccccttccccccctacgccagcggcaccggctacgtgctgagcgccagcgccgtgcagctgatcctgaaggtggccagcagagcccccctgctgcccctggaggacgtgttcgtgggcgtgagcgccagaagaggcggcctggcccccacccagtgcgtgaagctggccggcgccacccactaccccctggacagatgctgctacggcaagttcctgctgaccagccacagactggacccctggaagatgcaggaggcctggaagctggtgggcggcagcgacggcgagagaaccgcccccttctgcagctggttccagggcgtgctgggcatcctgagatgcagagccatcgcctggctgcagagctag

SEQ ID NO: 104541 - DNA, 1137 bp, synthetic construct; identical to SEQ ID NO: 104540
  misc_feature 1..1137: note = Description of Artificial Sequence: Synthetic coding sequence
  source 1..1137: mol_type = other DNA

SEQ ID NO: 104542 - DNA, 1137 bp, synthetic construct; identical to SEQ ID NO: 104540
  misc_feature 1..1137: note = Description of Artificial Sequence: Synthetic coding sequence
  source 1..1137: mol_type = other DNA

SEQ ID NO: 104543 - DNA, 1137 bp, synthetic construct; identical to SEQ ID NO: 104540
  misc_feature 1..1137: note = Description of Artificial Sequence: Synthetic coding sequence
  source 1..1137: mol_type = other DNA

SEQ ID NO: 104544 - DNA, 1137 bp, synthetic construct; identical to SEQ ID NO: 104540
  misc_feature 1..1137: note = Description of Artificial Sequence: Synthetic coding sequence
  source 1..1137: mol_type = other DNA

SEQ ID NO: 104545 - DNA, 933 bp, synthetic construct
  misc_feature 1..933: note = Description of Artificial Sequence: Synthetic coding sequence
  source 1..933: mol_type = other DNA
atggccttccccaagatgagactgatgtacatctgcctgctggtgctgggcgccctgtgcctgtacttcagcatgtacagcctgaaccccttcaaggagcagagcttcgtgtacaagaaggacggcaacttcctgaagctgcccgacaccgactgcagacagaccccccccttcctggtgctgctggtgaccagcagccacaagcagctggccgagagaatggccatcagacagacctggggcaaggagagaatggtgaagggcaagcagctgaagaccttcttcctgctgggcaccaccagcagcgccgccgagaccaaggaggtggaccaggagagccagagacacggcgacatcatccagaaggacttcctggacgtgtactacaacctgaccctgaagaccatgatgggcatcgagtgggtgcacagattctgcccccaggccgccttcgtgatgaagaccgacagcgacatgttcatcaacgtggactacctgaccgagctgctgctgaagaagaacagaaccaccagattcttcaccggcttcctgaagctgaacgagttccccatcagacagcccttcagcaagtggttcgtgagcaagagcgagtacccctgggacagatacccccccttctgcagcggcaccggctacgtgttcagcggcgacgtggccagccaggtgtacaacgtgagcaagagcgtgccctacatcaagctggaggacgtgttcgtgggcctgtgcctggagagactgaacatcagactggaggagctgcacagccagcccaccttcttccccggcggcctgagattcagcgtgtgcctgttcagaagaatcgtggcctgccacttcatcaagcccagaaccctgctggactactggcaggccctggagaacagcagaggcgaggactgcccccccgtgtag

SEQ ID NO: 104546 - DNA, 933 bp, synthetic construct; identical to SEQ ID NO: 104545
  misc_feature 1..933: note = Description of Artificial Sequence: Synthetic coding sequence
  source 1..933: mol_type = other DNA

SEQ ID NO: 104547 - DNA, 933 bp, synthetic construct; identical to SEQ ID NO: 104545
  misc_feature 1..933: note = Description of Artificial Sequence: Synthetic coding sequence
  source 1..933: mol_type = other DNA

SEQ ID NO: 104548 - DNA, 933 bp, synthetic construct; identical to SEQ ID NO: 104545
  misc_feature 1..933: note = Description of Artificial Sequence: Synthetic coding sequence
  source 1..933: mol_type = other DNA

SEQ ID NO: 104549 - DNA, 1197 bp, synthetic construct
  misc_feature 1..1197: note = Description of Artificial Sequence: Synthetic coding sequence
  source 1..1197: mol_type = other DNA
atgagactgagagagcccctgctgagcggcagcgccgccatgcccggcgccagcctgcagagagcctgcagactgctggtggccgtgtgcgccctgcacctgggcgtgaccctggtgtactacctggccggcagagacctgagcagactgccccagctggtgggcgtgagcacccccctgcagggcggcagcaacagcgccgccgccatcggccagagcagcggcgagctgagaaccggcggcgccagaccccccccccccctgggcgccagcagccagcccagacccggcggcgacagcagccccgtggtggacagcggccccggccccgccagcaacctgaccagcgtgcccgtgccccacaccaccgccctgagcctgcccgcctgccccgaggagagccccctgctggtgggccccatgctgatcgagttcaacatgcccgtggacctggagctggtggccaagcagaaccccaacgtgaagatgggcggcagatacgcccccagagactgcgtgagcccccacaaggtggccatcatcatccccttcagaaacagacaggagcacctgaagtactggctgtactacctgcaccccgtgctgcagagacagcagctggactacggcatctacgtgatcaaccaggccggcgacaccatcttcaacagagccaagctgctgaacgtgggcttccaggaggccctgaaggactacgactacacctgcttcgtgttcagcgacgtggacctgatccccatgaacgaccacaacgcctacagatgcttcagccagcccagacacatcagcgtggccatggacaagttcggcttcagcctgccctacgtgcagtacttcggcggcgtgagcgccctgagcaagcagcagttcctgaccatcaacggcttccccaacaactactggggctggggcggcgaggacgacgacatcttcaacagactggtgttcagaggcatgagcatcagcagacccaacgccgtggtgggcagatgcagaatgatcagacacagcagagacaagaagaacgagcccaacccccagagattcgacagaatcgcccacaccaaggagaccatgctgagcgacggcctgaacagcctgacctaccaggtgctggacgtgcagagataccccctgtacacccagatcaccgtggacatcggcacccccagctag

SEQ ID NO: 104550 - DNA, 678 bp, synthetic construct
  misc_feature 1..678: note = Description of Artificial Sequence: Synthetic coding sequence
  source 1..678: mol_type = other DNA
atgagactgagagagcccctgctgagcggcagcgccgccatgcccggcgccagcctgcagagagcctgcagactgctggtggccgtgtgcgccctgcacctgggcgtgaccctggtgtactacctggccggcagagacctgagcagactgccccagctggtgggcgtgagcacccccctgcagggcggcagcaacagcgccgccgccatcggccagagcagcggcgagctgagaaccggcggcgccagaccccccccccccctgggcgccagcagccagcccagacccggcggcgacagcagccccgtggtggacagcggccccggccccgccagcaacctgaccagcgtgcccgtgccccacaccaccgccctgagcctgcccgcctgccccgaggagagccccctgctggtgggccccatgctgatcgagttcaacatgcccgtggacctggagctggtggccaagcagaaccccaacgtgaagatgggcggcagatacgcccccagagactgcgtgagcccccacaaggtggccatcatcatccccttcagaaacagacaggagcacctgaagtactggctgtactacctgcaccccgtgctgcagagacagcagctggactacggcatctacgtgatcaaccagtacgagaagatcagaagactgctgtggtag

SEQ ID NO: 104551 - DNA, 1068 bp, synthetic construct
  misc_feature 1..1068: note = Description of Artificial Sequence: Synthetic coding sequence
  source 1..1068: mol_type = other DNA
atgagactgagagagcccctgctgagcggcagcgccgccatgcccggcgccagcctgcagagagcctgcagactgctggtggccgtgtgcgccctgcacctgggcgtgaccctggtgtactacctggccggcagagacctgagcagactgccccagctggtgggcgtgagcacccccgtggtggacagcggccccggccccgccagcaacctgaccagcgtgcccgtgccccacaccaccgccctgagcctgcccgcctgccccgaggagagccccctgctggtgggccccatgctgatcgagttcaacatgcccgtggacctggagctggtggccaagcagaaccccaacgtgaagatgggcggcagatacgcccccagagactgcgtgagcccccacaaggtggccatcatcatccccttcagaaacagacaggagcacctgaagtactggctgtactacctgcaccccgtgctgcagagacagcagctggactacggcatctacgtgatcaaccaggccggcgacaccatcttcaacagagccaagctgctgaacgtgggcttccaggaggccctgaaggactacgactacacctgcttcgtgttcagcgacgtggacctgatccccatgaacgaccacaacgcctacagatgcttcagccagcccagacacatcagcgtggccatggacaagttcggcttcagcctgccctacgtgcagtacttcggcggcgtgagcgccctgagcaagcagcagttcctgaccatcaacggcttccccaacaactactggggctggggcggcgaggacgacgacatcttcaacagactggtgttcagaggcatgagcatcagcagacccaacgccgtggtgggcagatgcagaatgatcagacacagcagagacaagaagaacgagcccaacccccagagattcgacagaatcgcccacaccaaggagaccatgctgagcgacggcctgaacagcctgacctaccaggtgctggacgtgcagagataccccctgtacacccagatcaccgtggacatcggcacccccagctag

SEQ ID NO: 104552 - DNA, 438 bp, synthetic construct
  misc_feature 1..438: note = Description of Artificial Sequence: Synthetic coding sequence
  source 1..438: mol_type = other DNA
atgaacgaccacaacgcctacagatgcttcagccagcccagacacatcagcgtggccatggacaagttcggcttcagcctgccctacgtgcagtacttcggcggcgtgagcgccctgagcaagcagcagttcctgaccatcaacggcttccccaacaactactggggctggggcggcgaggacgacgacatcttcaacagactggtgttcagaggcatgagcatcagcagacccaacgccgtggtgggcagatgcagaatgatcagacacagcagagacaagaagaacgagcccaacccccagagattcgacagaatcgcccacaccaaggagaccatgctgagcgacggcctgaacagcctgacctaccaggtgctggacgtgcagagataccccctgtacacccagatcaccgtggacatcggcacccccagctag

SEQ ID NO: 104553 - DNA, 1206 bp, synthetic construct
  misc_feature 1..1206: note = Description of Artificial Sequence: Synthetic coding sequence
  source 1..1206: mol_type = other DNA
atggccgtggaggtgcaggagcagtggccctgcctgcccgccgccggctgccccggccccctgggcggccccgtggccgcctgcggcatgagcagactgctgggcggcaccctggagagagtgtgcaaggccgtgctgctgctgtgcctgctgcacttcctggtggccgtgatcctgtacttcgacgtgtacgcccagcacctggccttcttcagcagattcagcgccagaggccccgcccacgccctgcaccccgccgccagcagcagcagcagcagcagcaactgcagcagacccaacgccaccgccagcagcagcggcctgcccgaggtgcccagcgccctgcccggccccaccgcccccaccctgcccccctgccccgacagcccccccggcctggtgggcagactgctgatcgagttcaccagccccatgcccctggagagagtgcagagagagaaccccggcgtgctgatgggcggcagatacaccccccccgactgcacccccgcccagaccgtggccgtgatcatccccttcagacacagagagcaccacctgagatactggctgcactacctgcaccccatcctgagaagacagagactgagatacggcgtgtacgtgatcaaccagcacggcgaggacaccttcaacagagccaagctgctgaacgtgggcttcctggaggccctgaaggaggacgccgcctacgactgcttcatcttcagcgacgtggacctggtgcccatggacgacagaaacctgtacagatgcggcgaccagcccagacacttcgccatcgccatggacaagttcggcttcagactgccctacgccggctacttcggcggcgtgagcggcctgagcaaggcccagttcctgagaatcaacggcttccccaacgagtactggggctggggcggcgaggacgacgacatcttcaacagaatcagcctgaccggcatgaagatcagcagacccgacatcagaatcggcagatacagaatgatcaagcacgacagagacaagcacaacgagcccaacccccagagattcaccaagatccagaacaccaagctgaccatgaagagagacggcatcggcagcgtgagataccaggtgctggaggtgagcagacagcccctgttcaccaacatcaccgtggacatcggcagaccccccagctggccccccagaggctag

SEQ ID NO: 104554 - DNA, 1119 bp, synthetic construct
  misc_feature 1..1119: note = Description of Artificial Sequence: Synthetic coding sequence
  source 1..1119: mol_type = other DNA
atgagcagactgctgggcggcaccctggagagagtgtgcaaggccgtgctgctgctgtgcctgctgcacttcctggtggccgtgatcctgtacttcgacgtgtacgcccagcacctggccttcttcagcagattcagcgccagaggccccgcccacgccctgcaccccgccgccagcagcagcagcagcagcagcaactgcagcagacccaacgccaccgccagcagcagcggcctgcccgaggtgcccagcgccctgcccggccccaccgcccccaccctgcccccctgccccgacagcccccccggcctggtgggcagactgctgatcgagttcaccagccccatgcccctggagagagtgcagagagagaaccccggcgtgctgatgggcggcagatacaccccccccgactgcacccccgcccagaccgtggccgtgatcatccccttcagacacagagagcaccacctgagatactggctgcactacctgcaccccatcctgagaagacagagactgagatacggcgtgtacgtgatcaaccagcacggcgaggacaccttcaacagagccaagctgctgaacgtgggcttcctggaggccctgaaggaggacgccgcctacgactgcttcatcttcagcgacgtggacctggtgcccatggacgacagaaacctgtacagatgcggcgaccagcccagacacttcgccatcgccatggacaagttcggcttcagactgccctacgccggctacttcggcggcgtgagcggcctgagcaaggcccagttcctgagaatcaacggcttccccaacgagtactggggctggggcggcgaggacgacgacatcttcaacagaatcagcctgaccggcatgaagatcagcagacccgacatcagaatcggcagatacagaatgatcaagcacgacagagacaagcacaacgagcccaacccccagagattcaccaagatccagaacaccaagctgaccatgaagagagacggcatcggcagcgtgagataccaggtgctggaggtgagcagacagcccctgttcaccaacatcaccgtggacatcggcagaccccccagctggccccccagaggctag

SEQ ID NO: 104555 - DNA, 1119 bp, synthetic construct; identical to SEQ ID NO: 104554
  misc_feature 1..1119: note = Description of Artificial Sequence: Synthetic coding sequence
  source 1..1119: mol_type = other DNA

SEQ ID NO: 104556 - DNA, 921 bp, synthetic construct
  misc_feature 1..921: note = Description of Artificial Sequence: Synthetic coding sequence
  source 1..921: mol_type = other DNA
atgcccagcacccagctgctggccgccgccgccgccgccgccaccgcccccggccccacccccccccccctggcccccggcagcctgagaagccccgtgccctgccccgtgcccagactgcccagatgccaccccgtgctgaccagacacctggtgctgagagtgcagagagagaaccccggcgtgctgatgggcggcagatacaccccccccgactgcacccccgcccagaccgtggccgtgatcatccccttcagacacagagagcaccacctgagatactggctgcactacctgcaccccatcctgagaagacagagactgagatacggcgtgtacgtgatcaaccagcacggcgaggacaccttcaacagagccaagctgctgaacgtgggcttcctggaggccctgaaggaggacgccgcctacgactgcttcatcttcagcgacgtggacctggtgcccatggacgacagaaacctgtacagatgcggcgaccagcccagacacttcgccatcgccatggacaagttcggcttcagactgccctacgccggctacttcggcggcgtgagcggcctgagcaaggcccagttcctgagaatcaacggcttccccaacgagtactggggctggggcggcgaggacgacgacatcttcaacagaatcagcctgaccggcatgaagatcagcagacccgacatcagaatcggcagatacagaatgatcaagcacgacagagacaagcacaacgagcccaacccccagagattcaccaagatccagaacaccaagctgaccatgaagagagacggcatcggcagcgtgagataccaggtgctggaggtgagcagacagcccctgttcaccaacatcaccgtggacatcggcagaccccccagctggccccccagaggctag

SEQ ID NO: 104557 - DNA, 441 bp, synthetic construct
  misc_feature 1..441: note = Description of Artificial Sequence: Synthetic coding sequence
  source 1..441: mol_type = other DNA
atgctgagaagactgctggagagaccctgcaccctggccctgctggtgggcagccagctggccgtgatgatgtacctgagcctgggcggcttcagaagcctgagcgccctgttcggcagagaccagggccccaccttcgactacagccaccccagagacgtgtacagcaacctgagccacctgcccggcgcccccggcggcccccccgccccccagggcctgccctactgccccgagagaagccccctgctggtgggccccgtgagcgtgagcttcagccccgtgcccagcctggccgagatcgtggagagaaaccccagagtggagcccggcggcagatacagaccccccgccgccctgccccccgcccccctgctggccgcccccgccgcctgcctgtggcacctgtgccacccccccggctggaagtggaacatctag

SEQ ID NO: 104558 - DNA, 1182 bp, synthetic construct
  misc_feature 1..1182: note = Description of Artificial Sequence: Synthetic coding sequence
  source 1..1182: mol_type = other DNA
atgctgagaagactgctggagagaccctgcaccctggccctgctggtgggcagccagctggccgtgatgatgtacctgagcctgggcggcttcagaagcctgagcgccctgttcggcagagaccagggccccaccttcgactacagccaccccagagacgtgtacagcaacctgagccacctgcccggcgcccccggcggcccccccgccccccagggcctgccctactgccccgagagaagccccctgctggtgggccccgtgagcgtgagcttcagccccgtgcccagcctggccgagatcgtggagagaaaccccagagtggagcccggcggcagatacagacccgccggctgcgagcccagaagcagaaccgccatcatcgtgccccacagagccagagagcaccacctgagactgctgctgtaccacctgcaccccttcctgcagagacagcagctggcctacggcatctacgtgatccaccaggccggcaacggcaccttcaacagagccaagctgctgaacgtgggcgtgagagaggccctgagagacgaggagtgggactgcctgttcctgcacgacgtggacctgctgcccgagaacgaccacaacctgtacgtgtgcgaccccagaggccccagacacgtggccgtggccatgaacaagttcggctacagcctgccctacccccagtacttcggcggcgtgagcgccctgacccccgaccagtacctgaagatgaacggcttccccaacgagtactggggctggggcggcgaggacgacgacatcgccaccagagtgagactggccggcatgaagatcagcagaccccccaccagcgtgggccactacaagatggtgaagcacagaggcgacaagggcaacgaggagaacccccacagattcgacctgctggtgagaacccagaacagctggacccaggacggcatgaacagcctgacctaccagctgctggccagagagctgggccccctgtacaccaacatcaccgccgacatcggcaccgaccccagaggccccagagcccccagcggccccagatacccccccggcagcagccaggccttcagacaggagatgctgcagagaagaccccccgccagacccggccccctgagcaccgccaaccacaccgccctgagaggcagccactag

SEQ ID NO: 104559 - DNA, 1182 bp, synthetic construct
  misc_feature 1..1182: note = Description of Artificial Sequence: Synthetic coding sequence
  source 1..1182: mol_type = other DNA
atgctgagaagactgctggagagaccctgcaccctggccctgctggtgggcagccagctggccgtgatgatgtacctgagcctgggcggcttcagaagcctgagcgccctgttcggcagagaccagggccccaccttcgactacagccaccccagagacgtgtacagcaacctgagccacctgcccggcgcccccggcggcccccccgccccccagggcctgccctactgccccgagagaagccccctgctggtgggccccgtgagcgtgagcttcagccccgtgcccagcctggccgagatcgtggagagaaaccccagagtggagcccggcggcagatacagacccgccggctgcgagcccagaagcagaaccgccatcatcgtgccccacagagccagagagcaccacctgagactgctgctgtaccacctgcaccccttcctgcagagacagcagctggcctacggcatctacgtgatccaccaggccggcaacggcaccttcaacagagccaagctgctgaacgtgggcgtgagagaggccctgagagacgaggagtgggactgcctgttcctgcacgacgtggacctgctgcccgagaacgaccacaacctgtacgtgtgcgaccccagaggccccagacacgtggccgtggccatgaacaagttcggctacagcctgccctacccccagtacttcggcggcgtgagcgccctgacccccgaccagtacctgaagatgaacggcttccccaacgagtactggggctggggcggcgaggacgacgacatcgccaccagagtgagactggccggcatgaagatcagcagaccccccaccagcgtgggccactacaagatggtgaagcacagaggcgacaagggcaacgaggagaacccccacagattcgacctgctggtgagaacccagaacagctggacccaggacggcatgaacagcctgacctaccagctgctggccagagagctgggccccctgtacaccaacatcaccgccgacatcggcaccgaccccagaggccccagagcccccagcggccccagatacccccccggcagcagccaggccttcagacaggagatgctgcagagaagaccccccgccagacccggccccctgagcaccgccaaccacacccccagcgaggtgcacacctag

SEQ ID NO: 104560 - DNA, 1182 bp, synthetic construct; identical to SEQ ID NO: 104558
  misc_feature 1..1182: note = Description of Artificial Sequence: Synthetic coding sequence
  source 1..1182: mol_type = other DNA

SEQ ID NO: 104561 - DNA, 1113 bp, synthetic construct
  misc_feature 1..1113: note = Description of Artificial Sequence: Synthetic coding sequence
  source 1..1113: mol_type = other DNA
atgctgagaagactgctggagagaccctgcaccctggccctgttcggcagagaccagggccccaccttcgactacagccaccccagagacgtgtacagcaacctgagccacctgcccggcgcccccggcggcccccccgccccccagggcctgccctactgccccgagagaagccccctgctggtgggccccgtgagcgtgagcttcagccccgtgcccagcctggccgagatcgtggagagaaaccccagagtggagcccggcggcagatacagacccgccggctgcgagcccagaagcagaaccgccatcatcgtgccccacagagccagagagcaccacctgagactgctgctgtaccacctgcaccccttcctgcagagacagcagctggcctacggcatctacgtgatccaccaggccggcaacggcaccttcaacagagccaagctgctgaacgtgggcgtgagagaggccctgagagacgaggagtgggactgcctgttcctgcacgacgtggacctgctgcccgagaacgaccacaacctgtacgtgtgcgaccccagaggccccagacacgtggccgtggccatgaacaagttcggctacagcctgccctacccccagtacttcggcggcgtgagcgccctgacccccgaccagtacctgaagatgaacggcttccccaacgagtactggggctggggcggcgaggacgacgacatcgccaccagagtgagactggccggcatgaagatcagcagaccccccaccagcgtgggccactacaagatggtgaagcacagaggcgacaagggcaacgaggagaacccccacagattcgacctgctggtgagaacccagaacagctggacccaggacggcatgaacagcctgacctaccagctgctggccagagagctgggccccctgtacaccaacatcaccgccgacatcggcaccgaccccagaggccccagagcccccagcggccccagatacccccccggcagcagccaggccttcagacaggagatgctgcagagaagaccccccgccagacccggccccctgagcaccgccaaccacaccgccctgagaggcagccactag

SEQ ID NO: 104562 - DNA, 684 bp, synthetic construct
  misc_feature 1..684: note = Description of Artificial Sequence: Synthetic coding sequence
  source 1..684: mol_type = other DNA
atgctgagaagactgctggagagaccctgcaccctggccctgctggtgggcagccagctggccgtgatgatgtacctgagcctgggcggcttcagaagcctgagcgccctgttcggcagagaccagggccccaccttcgactacagccaccccagagacgtgtacagcaacctgagccacctgcccggcgcccccggcggcccccccgccccccagggcctgccctactgccccgagagaagccccctgctggtgggccccgtgagcgtgagcttcagccccgtgcccagcctggccgagatcgtggagagaaaccccagagtggagcccggcggcagatacagacccgccggctgcgagcccagaagcagaaccgccatcatcgtgccccacagagccagagagcaccacctgagactgctgctgtaccacctgcaccccttcctgcagagacagcagctggcctacggcatctacgtgatccaccaggccggcaacggcaccttcaacagagccaagctgctgaacgtgggcgtgagagaggccctgagagacgaggagtgggactgcctgttcctgcacgacgtggacctgctgcccgagaacgaccacaacctgtacgtgtgcgaccccagaggccccagacacgtggccgtggccatgaacaagttcggctacagatag
